United States Patent Application Publication US 2024/0327476 A1 - sequence listing, part 61

SEQ ID NO: 115432 - DNA, 768 bp, synthetic construct
  misc_feature 1..768: note = Description of Artificial Sequence: Synthetic coding sequence
  source 1..768: mol_type = other DNA
atgttagatagcgtgacacacagcacattcctacctaacgccagcttttgtgatcccctgatgagctggaccgatctgttcagcaacgaagagtactatcccgccttcgagcatcagactgcctgtgattcctactggaccagtgtccatcccgagtactggacaaagcggcacgtttgggaatggttgcaattctgctgcgaccagtacaaactggacacgaattgtatcagcttttgcaacttcaacatctctggactccagttatgctctatgacccaggaggagttcgtggaagctgctggtttgtgtggcgagtatctgtactttatcctccagaatatccgaacccaagggtattcgttctttaacgacgcggaagaaagcaaggcgacaattaaggactacgctgactctaactgtttgaaaaccagcggcatcaagtcccaggactgtcatagtcactctcgaacctccttgcagtctagtcacctctgggaattcgtgcgtgacctcctgcttagtcccgaggaaaattgcggaatactggaatgggaggaccgggaacagggcattttccgggtggtaaagagtgaagcccttgctaaaatgtgggggcagagaaagaagaacgacaggatgacatatgagaagctaagccgggccctgaggtactactataaaaccgggattctggaacgtgtagatagacgtttagtgtataaattcggtaagaacgcacacggatggcaggaggacaagctttag

SEQ ID NO: 115433 - DNA, 798 bp, synthetic construct
  misc_feature 1..798: note = Description of Artificial Sequence: Synthetic coding sequence
  source 1..798: mol_type = other DNA
atgcctagtcttccccacagccacagggtcatgttggacagtgttacccacagtacctttctgcctaacgcttctttctgcgatccactcatgagctggactgatttgttctctaacgaggaatattatcctgcctttgagcatcagacagcgtgcgactcatactggacatcagtccatccagaatattggacgaagagacacgtctgggaatggctgcagttctgctgcgaccagtataagctggacacaaactgcataagtttctgcaacttcaacattagcggattgcagctctgctctatgacccaggaagaattcgtggaggctgccggcctgtgcggcgagtacctgtactttattcttcaaaacattaggactcagggatactcatttttcaatgatgcagaagaaagtaaggccactattaaagattatgctgacagcaactgcctgaaaacctctggcatcaaatctcaagactgtcactctcattccagaacctctctgcaaagttctcacctgtgggagtttgtgagagacctgctgctttctcccgaagagaattgcggcattctggagtgggaggatagagagcagggaatctttcgtgtggtcaaatcagaggccctcgcgaagatgtgggggcagcggaagaagaatgacagaatgacatatgagaagctgtctagagccctgaggtactattataagactgggattctcgagagagtcgataggcggctagtgtacaagttcggaaagaatgcccatgggtggcaagaggacaaactgtag

SEQ ID NO: 115434 - DNA, 483 bp, synthetic construct
  misc_feature 1..483: note = Description of Artificial Sequence: Synthetic coding sequence
  source 1..483: mol_type = other DNA
atgctggattcggttacccatagcacattcctgcccaatgccagcttttgtgaccccctgatgagctggaccgacctgttctctaacgaggagtactaccccgcgttcgaacatcagacagacgcggatagtaattgcctgaagacttcagggataaagagccaagactgccattcgcatagtagaaccagccttcagagttcccacttatgggaattcgtacgcgatctgctactcagtccggaggagaactgtggtattttggaatgggaagatagagaacaggggatcttcagggtggtgaagtccgaagcacttgctaagatgtggggccagaggaagaagaacgatagaatgacatatgagaagctttctcgagctcttaggtattactataaaactgggattttggagcgcgttgaccgtcggttggtttataagtttgggaaaaacgcccatggctggcaggaggacaagctgtag

SEQ ID NO: 115435 - DNA, 1728 bp, synthetic construct
  misc_feature 1..1728: note = Description of Artificial Sequence: Synthetic coding sequence
  source 1..1728: mol_type = other DNA
atgttcggcatccaggacacacttgggcgaggccccaccctcaaagagaaaagtctcggagcagaaatggatagcgttaggagctgggtcagaaatgttggggtagttgatgctaacgtcgctgctcaatccggggtcgcactgagtcgagcccattttgagaagcaaccaccatcaaacctgagaaagtccaatttttttcactttgtcctggccttgtacgataggcaaggccagcccgtcgagatcgagcgaaccgctttcgtggatttcgtggagaatgacaaggagcaaggcaacgagaagaccaataacgggacccactacaaacttcagctgctctatagcaatggcgtacgcaccgagcaggatctttacgtcaggctcatcgattccgtgactaaacagccaattgcatatgaaggtcagaataagaatcctgaaatgtgtcgggttctgttgacacatgaggttatgtgtagccgctgctgcgaaaagaaatcctgcggtaaccgtaacgagacaccctccgaccccgtcattattgaccggttcttccttaagttcttcctgaagtgcaaccagaactgcctgaagacagccggcaacccacgcgacatgcgacgttttcaggtggttctgtctaccacggtaaacgtggacgggcatgtgcttgctgtgtcagacaacatgtttgttcataacaattcaaaacatggcaggagggcccgccgcctggaccctagtgaagcgactccatgcattaaagccatcagtcctagcgaaggctggacaactggcggggcaatggtgattataatcggagataatttcttcgacgggctacaggttgtgttcggaaccatgcttgtgtggtctgagctcattacgccccacgcaatacgggtccaaacgcctccacggcacatccccggcgtggtggaggtgacactgagctacaagtccaagcaattctgcaagggtgcgcccggaagatttatctatacagctctcaacgagcctacaattgactacggcttccaacgcctccagaaagtcattcctcgtcacccaggggacccagagaggctggcgaaggagatgctcctgaaaagggcagccgatctggtggaagccctgtatggcactcctcacaacaaccaagatattatcctgaaaagagcagccgacatcgctgaagcgctgtacagcgttccccgaaacccctcccagttgcccgccctgtcttcatctcctgcccatagcggcatgatgggcatcaatagctatggtagtcagttaggcgtgagcatctcagaatccactcagggtaacaaccagggatacattaggaacacctcttctatctccccaagggggtactctagtagttcgacaccgcagcagtctaactactcaaccagttccaacagcatgaacggttacagcaatgtgccaatggcaaatctaggagtgccaggaagccccgggttcctcaacgggtctcccacaggtagcccctacggaattatgtcgtcttccccaaccgttggatcctcttccacctcctccatattgccctttagcagctccgtgttccctgctgtcaagcagaagtctgcctttgctcctgtgatcagaccccagggcagcccctcccctgcctgctcaagcgggaacgggaacggtttccgcgcgatgacaggtctcgtggtcccaccaatgtag

SEQ ID NO: 115436 - DNA, 795 bp, synthetic construct
  misc_feature 1..795: note = Description of Artificial Sequence: Synthetic coding sequence
  source 1..795: mol_type = other DNA
atggtgatcatcatcggggacaacttcttcgacggactccaggtcgtcttcggtacaatgcttgtctggtcagaactgatcaccccgcatgcaatccgcgtccagacgcctccacggcacattccaggcgtggtggaggtgacactgtcatacaagtcaaagcagttctgcaagggagccccaggccgtttcatttacactgcgctcaacgagccgacaatcgattacggtttccagcgccttcaaaaggtgataccacggcaccctggtgatccagaacgcctggccaaggaaatgctgctgaagagagccgcggacctggtggaagctttgtatggcactcctcataataaccaggacattatcctgaagcgcgcagctgatatcgctgaagcgttatatagtgtgccccgtaatccctcccaactccccgcactgagctcctctcccgctcacagtggaatgatgggcattaattcgtatggatctcagctcggcgtgagcatcagcgagtctactcaaggaaacaatcagggatatatccgcaacacatcaagtatctccccgcgcgggtattcctccagctcaaccccgcagcagtccaattactcaacatcatctaatagcatgaacgggtacagcaatgtgcccatggcaaatctcggggtgcccggatcccctggctttctgaatgggagcccaaccggctctccatacggcaccggactctggctgacttggttgctgaaagcgttttgggggaagaagcgcattgagactatcccatttctgtag

SEQ ID NO: 115437 - DNA, 1791 bp, synthetic construct
  misc_feature 1..1791: note = Description of Artificial Sequence: Synthetic coding sequence
  source 1..1791: mol_type = other DNA
atgtttggcattcaggagaatatcccgcgcggtgggacaactatgaaagaagagcccctgggctctggcatgaaccctgtccgctcttggatgcatactgccggggtggtggacgctaacactgccgctcagtctggtgtcggtctggcacgcgcacatttcgaaaaacagccgccgtcaaacttgcgcaaatctaatttctttcatttcgtgttagccttatacgacagacaaggccagccagtggaaattgaacggaccgcatttgtggacttcgtggagaaggaaaaagaacccaataatgagaagacgaataacggaattcattataagctgcaactgttatatagtaatggcgtacggacggagcaagacctgtatgtcagattgatcgactccatgaccaagcaggctattgtctacgagggacaggacaagaatccggaaatgtgtagggtgctattgacccacgagataatgtgtagcaggtgttgcgataagaagagctgcggcaatcggaacgaaactcccagcgatcctgtgatcatcgacagattttttctgaagttttttctgaagtgcaaccagaactgtctgaaaaatgcggggaatccaagggatatgcggcggttccaagtggtcgtgtccacgacagtaaatgtggatgggcatgtactggcagtgtccgacaacatgtttgtccacaataactcaaagcatggaagacgcgctcggcgcttggaccccagcgagggtacagcccctagttacctggagaacgccaccccctgcattaaagccattagtcctagtgagggctggaccaccggcggggcaactgtgatcataatcggggataactttttcgacgggctccaagtggtgttcggtacgatgctggtgtggtctgaacttatcactcctcacgccattagggtgcagactccacctcgtcacattcccggtgtggttgaagtgaccctatcctacaaatctaagcagttctgtaaaggagccccaggtcgtttcgtgtacacagccctcaatgaacccaccattgattacgggtttcagaggctgcagaaggtgattccacggcaccccggagatcccgagcgattgcccaaggaggttttactcaaacgagctgctgacctagtggaggcattatatggtatgccgcataataatcaggagattatcctgaaaagagctgccgacatcgctgaagccctctactccgtcccgaggaaccacaaccaaatacctactctgggcaataacccagcgcacactggcatgatgggcgtaaacagcttttccagtcagctggctgtgaacgtgagcgagacgagccaggccaatgaccaagtcggatattctagaaatactagttccgtctcacccaggggatacgtgcctagtagcaccccccagcagtcaaattataataccgtgtccacatctatgaacggctacggctctggggcgatggcctcgcttggggtgcctggctctccgggctttctgaacggtagctctgcaaactccccatatgggattgtgccaagcagcccaactatggcagcttcctccgtgacactcccctcgaactgttcaagcacacatgggattttttcttttagtcccgccaacgtcatctcggccgtgaagcagaagtctgctttcgctcccgttgtcaggccacaggcttcgcctcctcctagctgcactagcgctaacggtaacggcctgcaagccatgtcgggattagttgtccctcccatgtag

SEQ ID NO: 115438 - DNA, 1656 bp, synthetic construct
  misc_feature 1..1656: note = Description of Artificial Sequence: Synthetic coding sequence
  source 1..1656: mol_type = other DNA
atgttcggaattcaggaaaacataccgcgcggtgggacaaccatgaaggaggagccactcggatcaggaatgaatcccgtaagatcctggatgcatactgcaggagtggtcgacgccaacactgcagctcaatctggagtcgggctggctcgggcgcatttcgaaaagcaaccaccttcaaatctaagaaaatcgaacttcttccactttgttctcgcactctacgacaggcagggccagcccgtggagatcgaaaggaccgccttcgtcgattttgtggagaaagagaaagaacccaataacgaaaaaaccaataacggtatacactacaagctgcagctcctctattccaatggagttaggaccgaacaggatttgtacgttcggttaattgatagtatgacgaagcaggccatcgtatatgaaggccaggataagaacccggaaatgtgtcgcgtcctgctcacacacgagatcatgtgttcaaggtgctgcgataagaagtcatgcgggaaccgaaacgagaccccctcagaccctgttatcatagacagattctttttgaaattcttcctcaagtgtaatcaaaattgtctgaagaatgcagggaatcccagagatatgagaaggttccaggtggtagtcagcacaacggttaacgtggacgggcatgtactggcggtttctgataacatgttcgttcataataactctaaacatgggcggcgggcaagaaggcttgatccttcagaagccaccccctgcatcaaggcgatatccccatcagagggctggactaccggaggcgctactgtcatcatcatcggagacaacttcttcgatggtctgcaagttgtcttcggcactatgctggtctggtccgagctcatcactccccacgctattcgcgtccaaaccccaccccggcacattccgggggtggttgaggtcaccctgtcatataaaagcaagcagttttgcaaaggagccccaggccgttttgtttataccgccctgaacgaacccaccattgactatgggttccagcggctgcagaaggtgatcccgcgccatccaggggaccctgagaggctgccaaaggaggtgcttttaaaacgcgctgcggacctcgtggaagccttgtatgggatgccccacaataatcaggagatcattttgaagagggcagcagacatagctgaggccctttactccgtgccgcgaaatcataaccagattccaactttaggaaataatccggctcacactgggatgatgggcgtgaattccttcagtagccagctcgccgtgaacgtatcagaaactagtcaggccaatgaccaggtgggctatagtcgcaacacgagctctgtgagtcccagggggtatgtgcccagctccactccccagcaatccaattataatacggtgtcaactagcatgaacggttacggcagcggtgcaatggcctcccttggggtcccaggaagcccaggttttctgaatgggagcagcgcaaacagtccctacggaatgaagcagaagtccgcttttgcccccgtggtcagacctcaagcgagtccaccccctagctgtacttcagcgaatggcaatggcctacaagctatgtctgggctagtggttccccccatgtag

SEQ ID NO: 115439 - DNA, 576 bp, synthetic construct
  misc_feature 1..576: note = Description of Artificial Sequence: Synthetic coding sequence
  source 1..576: mol_type = other DNA
tagttttccagccaacttgccgtcaacgtcagtgagacaagccaggctaatgaccaggtggggtatagcagaaatacttcgtccgtgagccccagaggctacgttccgtcttctacccctcagcagtctaactacaacactgtgtctacttcaatgaacggttacgggtctggagcaatggcaagtctcggtgtgcctggttccccaggattcctgaatgggtcttctgccaactccccttatggaattgtcccttcctcacccaccatggctgcctcttcagtcactctgcccagtaattgctcctcaacacacggaatctttagtttctcccctgccaatgtgatttccgcggtgaaacagaaatcggcctttgcccctgtcgttaggccacaggcgtctccacctccgagttgtacttcagcgaacgggaatggcctgcaggggtctctgctcggggctgaagacgtggcagcagagaaaacaaattggcccttttgtgaagtgggggggattttccatttcgacgaactcatgcttaagaaaggcaccgggaagctttgtttgggatggtag

SEQ ID NO: 115440 - DNA, 1809 bp, synthetic construct
  misc_feature 1..1809: note = Description of Artificial Sequence: Synthetic coding sequence
  source 1..1809: mol_type = other DNA
atgttcccagcccaggatgcactgccccgctctggattgaaccttaaggaggagcccctgctcccagccggccttggttcggtgaggtcatggatgcagggcgcagggattcttgacgcatctactgcagcccagagtggtgttggactagcaagggctcatttcgagaaacagccgccctctaacctgcgcaagtctaatttctttcattttgtcctggcgatgtacgacaggcaaggacagccggttgaagtggaacgcacagcctttattgacttcgtcgaaaaggacagggagcccggggcagagaagacaaataacgggatacactatcgcctcagattggtgtacaataatggactacgtactgagcaggatctgtatgtgaggctaattgactctatgtcaaaacaggctatcatctacgagggtcaagacaagaatccagaaatgtgccgtgtattactgactcatgaaatcatgtgctctagatgctgcgaccgaaaatcatgtggaaaccggaatgagactccaagcgatcccgtaattatcgacaggttttttctaaagtttttcctgaaatgcaatcagaactgtctgaagaacgcgggaaaccctcgcgacatgcgccggttccaggtagtggttagtacaactgtcagcgtggatggacatgtcctggcggtatccgacaatatgttcgttcacaacaatagtaaacacggaagaagagccaggcgactggatccttcggaggccgctacaccttgcatcaaagctataagtccaggcgaggggtggaccactggcggagcgactgtaattgtgatcggagacaattttttcgatggactgcaggtagtcttcggcaacgtactcgtgtggagcgaactcatcactccgcacgcaataagggttcagactcctccacgccacataccaggagtagtggaggtgacactatcctataagagtaagcagttttgcaagggatgccccggcagattcgtgtacacggccctgaatgaacccaccatcgactatggttttcagaggctccagaaagtcatcccaagacatccgggcgaccctgagaggctgccaaaagaggtgttactcaaacgcgctgccgacctggccgaggccctgtacggagtcccaggcagcaaccaggagctgctgttaaaacgggccgccgacgtggcagaggctctttatagcaccccacgggccccgggtcccctggccccattggctcctagtcacccccatccggcggtggtggggattaacgccttctcaagccctctggccatcgctgtgggagacgccacacctggccctgaaccgggatacgcccgctcctgctcgtcggcttcaccacgggggttcgcaccaagccctggttcacaacagagtggctatggtgggggcctcggcgctggactcggcggatacggggctccaggcgtagctggtttgggagtgcccggatccccatcatttttaaacggcagcaccgctacatcaccttttgctatcatgccctccagtccacccctggccgccgcaagctctatgtccctgcccgcagccgcaccgaccacgtccgtctttagcttctctcctgtcaacatgatttccgcagtcaaacagcgtagtgcctttgcaccagtgctccggccacctagcagtcccccacaagcttgcccccgcgctcacggagaaggcttgcctgaccaatcttttgaagactccgacaagttccacagccctgcccgagggttgcagggactggcctatagttag

SEQ ID NO: 115441 - DNA, 1797 bp, synthetic construct
  misc_feature 1..1797: note = Description of Artificial Sequence: Synthetic coding sequence
  source 1..1797: mol_type = other DNA
atggatgcgctgccgcgcagcggcctaaacctcaaggaagagcccctactcccggccggcctaggctccgtgcggtcatggatgcagggtgcgggcatcctggacgctagtactgccgcacagtccggagtcggcttagccagggcccactttgagaaacaaccaccctccaatctgcgcaagtctaatttcttccactttgtccttgccatgtatgatcgccaagggcagcccgtcgaagtcgagcgcacagcctttattgactttgtggaaaaggacagagaaccgggagcagaaaagacgaataatggcatccactacaggttaaggctcgtctataataacggcctcagaactgagcaagatctgtatgtcaggctcatcgactccatgtccaagcaggcgatcatatacgagggccaggataagaatcccgaaatgtgtcgtgttctgctgacccatgagatcatgtgctccaggtgctgcgatcggaagtcctgtggaaaccggaacgagaccccctcagacccagtgattatcgatcggttttttctcaagttctttcttaagtgcaatcagaattgtctgaaaaacgcgggcaacccccgggacatgcgaagattccaggtcgtggtgtctacaaccgtgtctgtggacgggcatgtcctggccgtgtccgacaatatgttcgtgcacaataattcaaagcacgggcggcgcgcccgccggctggatccatcagaggctgcaaccccttgcatcaaggcgatcagtccaggcgaaggttggacaaccggaggggccaccgtcatcgtcatcggagataatttttttgatggccttcaagtcgtgttcggcaacgtgttggtctggagtgagcttattacgcctcacgccattagagtgcagacaccgccaaggcatattcccggagtagtagaggtaactctgagctacaaatccaagcagttttgcaaaggctgccctggaagattcgtgtacacagctctgaatgagcccacgattgactacggtttccagcgtctgcaaaaagtgattccccggcatcccggtgaccccgagcgcctcccaaaagaagttttactgaagcgagcagcagatctcgcagaagccctctatggagtgccaggatcaaatcaggagctgctcctaaaaagggccgccgatgtcgcagaggctctatactcgactcccagagcacctggacccctggccccccttgctcccagccacccccaccccgctgtggtcgggatcaacgccttttcttctcctctcgccatagcagtgggggatgccactccaggcccggagccggggtatgcccgcagctgctcaagcgcttcccccaggggcttcgcaccttctcctggctcgcagcaatctggctacggtgggggtctaggggcgggtctcgggggctacggggcaccgggtgtggccggccttggcgtccccgggtctccatccttcttgaatggcagcacggccacatctccatttgcaatcatgccctcatcccccccactggctgcagccagctccatgtctctgccggccgccgcacccacgactagtgtattctcttttagtcccgttaacatgattagcgctgttaaacagaggagcgcgttcgcgccggtactgcggccccccagctcccccccacaagcttgtccacgcgcacacggagagggcctgcctgaccagagttttgaggacagcgacaaatttcatagtccagctcgcggactgcagggactcgcctactcctag

SEQ ID NO: 115442 - DNA, 555 bp, synthetic construct
  misc_feature 1..555: note = Description of Artificial Sequence: Synthetic coding sequence
  source 1..555: mol_type = other DNA
cgcgggtctgttcaacaccctcccgttgttggcatcaacgcgttttcttctcctttggctattgccgttggcgatgccacccccggacctgaacccggatacgctcgaagctgttcgagtgcctccccacgcggattcgctccctcccccgggtctcagcagtccggatatgggggaggcctgggagctggtctggggggatatggcgcccctggggttgctggactgggcgttccaggcagtccaagcttcctgaacgggtctaccgccacctcaccctttgctatcatgccctcctctccacccttggcagctgcctcaagtatgagcctgcctgccgctgcacctacaacttcagttttctcattcagtcctgtgaatatgatcagcgccgttaagcaaagatctgcctttgctccggtgctgaggcctccttcttctccacctcaagcatgtccccgtgcccacggcgaggggctgccggatcagtcgtttgaagattcggacaagtttcactcccctgctaggggattgcagggcctcgcttacagctag

SEQ ID NO: 115443 - DNA, 1632 bp, synthetic construct
  misc_feature 1..1632: note = Description of Artificial Sequence: Synthetic coding sequence
  source 1..1632: mol_type = other DNA
atggctgccgcaaaagccgagatgcagcttatgagtcctctgcagatctccgatcccttcgggtctttcccacactctcccacaatggacaattacccaaaactcgaggaaatgatgctccttagcaatggcgcaccccagttcttgggcgctgctggcgcaccagaaggcagcggctccaatagttcttccagctcatctgggggtgggggcggcggaggcggcgggtccaatagcagtagtagcagctcaacattcaatccccaagcggacaccggggagcagccctacgaacacttgacagctgagtccttcccagatataagcctgaacaacgagaaagtccttgtggaaactagctacccatcccagacgacacgactgccgcccatcacctatacgggcagattctctctagagcccgctcctaacagtggtaataccctctggcctgaaccacttttctcactcgtgagcgggctcgtgagcatgacaaatcctcctgcttccagcagctccgcccctagtcccgccgcctcttccgcttcagcttcgcaaagtccaccattaagttgtgcagttccgagcaatgattctagcccaatttattcagcggcccctacgttccctactcctaacacagacatcttcccggagccccagtcacaagctttccctggttcagcaggaaccgctctgcagtatcctccacccgcttatcctgccgctaaagggggatttcaggtgcctatgatcccagattatctgttccctcaacaacaaggcgacttaggcttgggaacacccgatcaaaaaccgttccagggtctggagagccgcacccagcagccctctcttactcctttgagtactataaaagctttcgccacccagagtgggagtcaggatttgaaagccctgaacacgagttatcagtctcagctgatcaagccgtctcgtatgcggaagtacccgaataggcctagtaaaacacctccgcatgagagaccatacgcttgccccgtggaatcctgtgaccggcggtttagcaggagcgacgagcttactagacacatccggatccatacggggcagaagccctttcaatgtagaatttgtatgcggaattttagccgcagcgatcatctgaccacacacattcggacccacaccggagagaagcctttcgcctgtgatatttgcgggcggaaattcgcccgtagtgatgagagaaaaagacacaccaagatccatctaaggcagaaggataaaaaggcagacaaatcagtggtcgcgtcatcggctacgtccagtctctcaagctatccaagccccgtggcgacctcatatccaagtcccgtgaccacttcctatccaagtccagccaccacctcttatcccagccccgtacctacttcattctcctcccctggatcaagtacgtaccccagccccgtccactccggttttccctccccatctgttgcaaccacatatagttccgtgcccccagccttcccggcacaagtgagttcttttccttccagtgctgttacaaatagcttttctgcaagtaccggcctgtccgacatgactgccacatttagccctcggacaatcgaaatatgttag

SEQ ID NO: 115444 - DNA, 603 bp, synthetic construct
  misc_feature 1..603: note = Description of Artificial Sequence: Synthetic coding sequence
  source 1..603: mol_type = other DNA
atggcggccgcaaaggcagagatgcaactgatgagccccttacagatcagtgacccattcggctcctttccccactctcccaccatggacaactatcctaagttagaggagatgatgttactgtctaatggcgcaccgcagttcctcggcgccgcaggagccccggaaggtagtggcagtaattctagctcttctagttccggaggtggtggtggcggggggggagggagcaactcatcttcttcctcatctacgtttaaccctcaggctgacaccggggaacagccttacgaacatctcacagccgagtcctttcccgacattagtctgaacaacgaaaaggtgctcgtggaaaccagttatcccagtcagacgacccgacttcctcctatcacgtacaccggacggttcagcctcgaaccagcgcccaattcaggcttcccctctccatcagtggccactacctattctagcgtgcccccagcgttcccagcacaggtttccagcttcccttcgagcgccgtgaccaactccttcagtgcatctactggcctatcagatatgacggcaacattttctccccggacaatagagatttgctag

SEQ ID NO: 115445 - DNA, 699 bp, synthetic construct
  misc_feature 1..699: note = Description of Artificial Sequence: Synthetic coding sequence
  source 1..699: mol_type = other DNA
atggctgctgctaaggccgagatgcaactgatgtctcccctgcagatctctgacccattcggatctttcccgcacagcccaacgatggacaactacccaaaacttgaagagatgatgctgttgagtaacggggcgccccagtttcttggtgcggccggtgcaccagagggcagcggctccaactcttccagtagtagttccggtggcggtggaggcggcggaggcgggtcgaactcctccagtagctccagtacttttaacccccaggccgacaccggcgaacagccttacgaacacctaaccgcggaaagcttccctgacatctccctcaacaacgaaaaggtcttagtggagacatcataccctagccagaccactcgactgccgccgatcacatacacaggaagattttcgctcgaaccggctcccaattcgggcaacacactctggcctgagccactgttttctctcgtttctgggctggtaagtatgaccaaccctcctgcgtcttcctcctctgcaccctcaccagccgctagttctgcctccgcatcccagtcccctcccttgtcttgcgccgtccccagcaatgacagcagtccaatctactccgctgcccccacttttccaacccctaacacagacatctttcccgagactgctatgtcaaaattctttacatcgattcagcgcacgtag

SEQ ID NO: 115446 - DNA, 1431 bp, synthetic construct
  misc_feature 1..1431: note = Description of Artificial Sequence: Synthetic coding sequence
  source 1..1431: mol_type = other DNA
atgatgactgcaaaagccgtggataaaatcccggtgaccttgtcgggattcgtacaccagctttcagacaacatatacccggtggaggatcttgccgctacaagcgtgacaatcttcccgaatgccgagcttggaggcccatttgatcagatgaatggggtcgccggggacggcatgatcaacattgacatgaccggcgaaaaaagaagcctcgacctgccctacccttcgtcgtttgcacccgtctctgccccgcgcaatcagaccttcacatatatgggcaaatttagtatagaccctcagtacccgggcgcaagttgttatccagaaggaatcattaatatcgtcagcgctggcattttacaaggcgtgactagcccggcttccacgacagcctctagcagcgtgaccagcgccagccctaacccactggcaaccgggcctctcggagtctgcaccatgtcacagacacagcctgacctggatcacctatatagccctccaccccccccccctccatacagcggatgtgcaggtgatctctatcaggacccatccgctttcctgagtgccgcgactacaagcacaagcagcagtctggcctatcccccccccccaagttacccctctcccaaacccgccacagacccaggtctctttcctatgatcccggactaccccggcttttttccatcccaatgtcagcgagacttacacggcaccgccggaccggatcgcaaacctttcccatgtccactggacacgctacgggttcccccccctttgaccccactgtcaacaataaggaattttaccctagggggcccatcagctggggtgacaggccccggtgcgtctggcggcagcgaagggcctaggctgccaggctccagttctgctgcagctgcagcggccgccgcagctgcctacaacccacaccacctcccactcagacccatactgagaccccgcaagtacccgaatcgcccaagtaagacccccgtccatgagaggccctacccatgccccgcagagggctgcgatcggagattttcccgatccgatgagctgactaggcacataagaatccatacaggacacaagccgttccagtgccggatttgcatgcgcaatttcagccggtctgatcatctgaccactcatattaggacccatactggtgaaaaacctttcgcctgcgattactgcgggcggaaatttgctagatcggacgagcgcaagcgtcatacaaaaattcatctgcggcagaaggaaaggaagagctcagctccatctgccagcgtgcccgcgcccagcactgcctcttgcagtgggggcgttcagcccggaggcaccctctgttcctccaattccagtagtttgggcggggggcctctggctccgtgcagctctaggacccggacaccttag

SEQ ID NO: 115447 - DNA, 1281 bp, synthetic construct
  misc_feature 1..1281: note = Description of Artificial Sequence: Synthetic coding sequence
  source 1..1281: mol_type = other DNA
atgaacggcgtcgctggtgacgggatgatcaatattgatatgactggcgaaaagcggagtctggatttaccctatcctagctcgttcgcccctgtctccgccccaaggaatcagacttttacttatatgggcaagttctccatagacccccaatacccgggtgcatcctgctaccccgaggggattatcaacatcgtatccgcaggcattctccagggagttacttctcccgcctctaccaccgccagctcaagcgtgacctccgcctctcccaatccactcgctaccggccctctcggggtctgtaccatgagccagacgcaacctgacctcgaccatttatatagccccccaccgcctccccctccgtatagcgggtgcgccggggacctgtatcaggacccatctgcatttctgtctgctgccacaactagcacaagtagttccctggcatatccgccccctccgtcgtatcctagcccaaaacccgctacagatccgggactgttcccaatgatacccgactatccgggattttttccctcccaatgtcagagggatctgcatggcaccgccggccccgacaggaaacctttcccttgccccctcgatacactcagggtgccacctcccctgactccgctgagtacgatccggaatttcacacttggggggccgagcgccggtgtgaccggccctggcgccagcggcggcagcgagggacctcggctgccaggtagctcctctgccgctgctgccgctgcagccgcggctgcctataatccccatcatctgccgttacggccaattctgcgtcctagaaagtaccccaatagaccatctaaaactcccgtgcacgaacgcccctacccttgccctgccgagggatgtgacaggcgcttctctaggtccgacgagttgacaaggcacattcgaattcatacaggccacaagccttttcagtgcaggatttgtatgaggaatttttcgaggagcgaccacctgacaacacacatcagaacccatacaggagaaaagccgtttgcgtgcgattactgcgggcgcaaattcgctcgatctgatgagcgtaagagacacactaaaattcatctccggcagaaggaacggaagtcaagcgctccttctgcttccgtgcccgctcccagcaccgcatcttgctcaggcggagtacagccaggcgggactctgtgttcatctaacagttccagtctgggtgggggcccactggccccctgcagtagcagaaccaggaccccatag

SEQ ID NO: 115448 - DNA, 786 bp, synthetic construct
  misc_feature 1..786: note = Description of Artificial Sequence: Synthetic coding sequence
  source 1..786: mol_type = other DNA
atgcgcgtcggcctgcccagcgaggcatcatcttgcccctggagcgctaggggtccaagggatccacctgagcgtaggcgctcaggcctggcacacgtacttagcgacaatatctatcccgttgaggacctggctgccacctctgtcaccatctttccaaatgcagagctgggcggaccctttgatcagatgaatggtgtggccggagacggcatgataaatatagatatgaccggcgaaaagcggagcctggatttgccttatccttcaagtttcgcgcctgtctccgctccccgcaatcaaacgttcacatatatggggaagttcagcatcgacccacagtatccaggtgcaagttgctatcctgaagggattatcaacattgtctctgccggaattctgcagggagtgacaagtcctgcgagtaccactgcttcttcgtcagttacctcagcctctcccaatcccctggccactggcccactcggcgtatgtaccatgtcacagacacaaccagatctagatcacctgtactccccccctcctccaccccctccctacagcggatgcgctggcgacctgtatcaggacccttccgcctttttatcagctgcgacaacctccaccagtagtagtttggcttaccctccaccacccagctacccatcccctaaacctgtggaagccgcccgtgatcccgggtgcctggtcgccgcgcagcaacagcagcaaccccccccgccaccacctatcacacataccacgtgccattgcggaccattctag

SEQ ID NO: 115449 - DNA, 1431 bp, synthetic construct
  misc_feature 1..1431: note = Description of Artificial Sequence: Synthetic coding sequence
  source 1..1431: mol_type = other DNA
atgatgactgccaaagcagtggataagattccagttacgttgtctggcttcgtccaccagctatcagacaatatttatccagtggaggacctcgcggcaacatcggtgactatcttcccaaatgcagaactaggcgggccatttgatcagatgaacggagttgcaggcgacggcatgataaacatcgatatgactggcgagaaaaggagtttggacttgccctatccatcgtcttttgcgcctgtttccgcaccgagaaaccaaacctttacctacatgggtaagtttagcatcgacccccagtatcccggcgcgtcttgctaccctgagggcattatcaatatcgtttcagcaggcatcctgcagggcgtcaccagccctgcctccacgacggcctcctctagcgttacttcggcctcaccaaacccattggctacggggcctcttggcgtgtgcaccatgagccaaacccagcccgacctggatcatctgtactctccgccacctccaccccccccatattccggatgtgctggtgacctctatcaggaccccagtgccttcctgagcgccgcgacaacatctacatcatcttcccttgcatatcccccccctccgtcataccccagtccaaagcccgcaactgatcccggtctcttccccatgattccagattaccccgggttcttccctagtcaatgtcagcgggacctgcacggcaccgccggccccgatcggaagcccttcccgtgtcctttggatacactacgcgttccccccccattgacacccttgtcaactattagaaatttcacattagggggcccttccgccggcgtgactggcccaggggcaagcggcggcagcgaaggccctaggctgccgggctcaagcagtgctgctgctgccgccgcagccgccgctgcctataaccctcaccacctccctcttaggcctatcctccggcctaggaaataccctaaccgcccctctaagacacctgtccatgaaaggccatacccctgccctgctgaggggtgtgatcgccgattttccaggtccgatgagctcactaggcacatccgcatccatactggacataagccatttcagtgcaggatctgtatgcgtaatttctcccggtctgatcacctcaccacccatatccgcactcacactggcgaaaagcctttcgcgtgcgattattgtggccggaaattcgctcggtcagatgagagaaagcgccataccaagatccacttgcgccaaaaagagcgaaagtctagcgccccttccgcttcagtgccagccccttcaacagcttcttgttccgggggggtccagccaggcgggactctgtgttcatccaacagttcctcactgggtggggggccgctagctccctgctcctccagaaccagaaccccatag

SEQ ID NO: 115450 - DNA, 1461 bp, synthetic construct
  misc_feature 1..1461: note = Description of Artificial Sequence: Synthetic coding sequence
  source 1..1461: mol_type = other DNA
atgctccatctgtccgaattctctgagccagatgccttgctagtcaaaagcacggaagggtgttgtgctgagccgtccgctgagctccccagactccctgccagggatgcaccagcagcaactggatacccaggtgctggcgatttcctcagctgggccctcaactcttgtggtgcatcgggagatctggcagactcatgcttcctggagggtccagcacctacgccaccccctgggttgtcttactcaggttccttcttcatccaggcggtcccagaacaccctcatgacccggaagccctgtttaatctcatgtccggaatcctcggattggcccctttcccaggaccagaagcagccgcctctagatctcctctagacgccccctttcccgctgggtctgatgcactgttgccagggccccccgatctctatagtcccgacctgggggctgcccctttccccgaggcattctgggaggcctccccttgtgcgggagccccttcacagtgtctgtacgaacctcagctatccccaccagacgttaaaccaggcctgagggcgcctcctgcatcaccagccctggacgccgtctctgcgttcaaagggccttacgccccatgggaactgttgtcagtgggggctcccgggaactgtggcagccaaggtgactaccaggccgcccctgaagcccgcttccccgtgattgggaccaaaatcgaggatttgcttagtattagctgccctgcagagttgccagcggtccccgccaatcgcctgtacccctcaggagcatacgatgcctttcccctggcccccggcgatctgggtgagggtgctgaaggacttccgggtttgctgactccacccagtggggaaggggggtcaagcggcgatggaggcgagttcctggcctccacccagcctcaattaagtccactcggactacggagcgcagccgctgccgacttcccaaagcccttagtggctgatatccctgggagctcaggcgtggccgcacccccagtacctccccctccacccaccccttttccccaagcaaaggcccgacgaaaaggcagaagaggagggaaatgctccactaggtgtttttgtccacggcctcatgccaaagcattcgcctgcccagtggaatcatgcgtgagatcatttgcccgcagcgacgaacttaataggcacctgcggattcacaccggacacaagcccttccagtgtagaatttgcttaagaaatttctcaaggtccgaccatctcaccacccatgtgcggacacatacaggagagaaaccctttgcttgcgacgtgtgtgggcggaggttcgcacggtctgatgagaaaaaacggcactcgaaggtgcaccttaaacagaaggccagagctgaggaacgactcaagggcctgggcttttactcactcgggttatcattcgcaagcctgtag

SEQ ID NO: 115451 - DNA, 1770 bp, synthetic construct
  misc_feature 1..1770: note = Description of Artificial Sequence: Synthetic coding sequence
  source 1..1770: mol_type = other DNA
atggcggtggcgcgaggagtgggctcaccagaacccgcccctcctcagctgtataagtgggggggttgtgggctgggagagccgggaagcgctttggagcgtcgtggcgctgctgctcggggacggtgcggtcgagcccgcgcccctcgactaccagatagttttcctaggggcgaatgcccaaagcctggggctagggcacctaggtctgtgagatgtggggaacccctgccgccagcgtccccaccaccagcacggccccaagcacagcgcgctcgccccagggctccccacagccgtcgcagagccatgttgcatttgtcagagttcagtgagcctgacgcccttctcgtcaaatccacagaaggatgttgcgccgagccctctgcagaactgcctaggctgcccgcccgggacgctccagccgcaaccggctatccaggcgctggtgattttcttagttgggcactcaactcatgtggagctagtggagatcttgccgacagctgttttcttgagggacctgcgcctacgcctcctcctggcctgagctattccggttctttctttatccaggccgttcccgaacatccgcatgacccagaagcactttttaacttgatgtctggcatcctagggcttgccccctttcctggcccagaagctgcggcgtccagatcaccgctggacgccccatttccagcaggctctgatgcactgcttcccggtccacccgacttgtactcccctgacctgggagccgccccgttccccgaggccttttgggaagcctcaccttgtgccggggctcccagccagtgtctctatgagccccagctcagcccacctgacgttaagcccggcttgagagctccccccgcgtcccctgctctggacgccgtgtctgcctttaaggggccttatgctccttgggagctcctgtcggtgggggcccccggcaattgcgggtcacagggggactatcaggcggcccctgaggcccgctttcccgtgataggtaccaagattgaagacctactctctattagttgccctgcagagcttccagccgtgccagcaaacagactgtacccctcaggggcatatgatgccttcccacttgcaccaggcgatctcggcgaaggagctgagggtcttcccggccttctgaccccaccgagtggcgaaggaggcagcagcggtgatgggggagagttcctcgcctcgacacagccgcagctgagccctttagggctccgcagtgccgccgccgccgactttcctaagccactggttgctgatatccctggctcttcgggagtggctgccccgccagtgcccccacctcctcctaccccattccctcaggcgaaagctcgacgcaagggcaggagaggaggaaagtgcagtactcgctgtttttgtccccgacctcatgctaaagcctttgcttgtcctgttgagtcttgtgttaggtccttcgcacgttcagacgaattgaataggcacctccgaatccacacagggcataagccctttcagtgcaggatctgcctacggaactttagtcgtagtgatcacctaaccactcatgtgcggacacatactggtgagaaaccgttcgcctgcgatgtttgtggaaggcggtttgcacgttctgatgagaagaaacgacacagtaaggtgcacctgaagcagaaagctcgcgccgaagagaggctcaaggggctgggcttctattccctggggctgagtttcgcctccctgtag

SEQ ID NO: 115452 - DNA, 921 bp, synthetic construct
  misc_feature 1..921: note = Description of Artificial Sequence: Synthetic coding sequence
  source 1..921: mol_type = other DNA
atggacacacctcccttgtcagattctgagagcgaaagcgatgagagtctcgtcaccgaccgcgagctgcaggacgctttcagccgcggcctcttgaagcccggattaaacgtggttctcgagggacctaaaaaagccgtcaatgatgtcaatggactgaagcagtgcctcgcagagtttaagcgggatcttgagtgggtcgaaaggctcgacgtgaccttaggcccagtgcctgagatagggggctccgaagctccagcgcctcagaataaggaccagaaggctgtggaccccgaagacgattttcagagagagatgagtttctatagacaggcacaggctgcggtgctggctgtattgcctcgactgcaccagttgaaggtcccaactaagagaccaaccgactatttcgcggagatggctaagagcgatttgcaaatgcagaaaattcgccaaaagttgcaaactaagcaagctgctatggaaaggtctgagaaggcgaagcagcttcgggcgctccggaagtacgggaagaaggtccagaccgaggttttacagaaaagacagcaagagaaggctcatatgatgaacgcaattaagaagtaccagaaggggttcagtgataagctcgacttcctggaaggggaccaaaagcctctcgcccaacgcaagaaggcaggcgccaagggacagcagatgagaaaagggccttcagccaagcgccgctacaaaaatcagaaattcggatttggcggcaagaagaaaggcagcaagtggaacacgagagagtcctacgatgacgtctccagttttagggccaaaacggcgcacggccgcgggctgaaacggccgggcaagaagggctctaataagcgtcccgggaagaggacgcgggagaaaatgaaaaatcggacacactag

SEQ ID NO: 115453 - DNA, 1086 bp, synthetic construct
  misc_feature 1..1086: note = Description of Artificial Sequence: Synthetic coding sequence
  source 1..1086: mol_type = other DNA
atgtacccagaagcactgccagtggggattctgagcaatccagatactttcaaacgccggtccggcagctactctaacgataaacctgaagtgtggtttgccgccggctctggttctccgaaccagaagctaagctccagctgcgtggggcgtgcctgcggcgagatggatacaccccctctgtcagattccgagagtgaatcagacgagtccctggtgacagatagggagctgcaagacgccttctctagaggtttactgaagcccggactgaacgtcgtgttggaaggcccaaagaaagcggtgaatgacgtgaacggtctgaagcagtgcttagctgaattcaaacgcgacctggagtgggtcgaacggctggatgtcacactggggcccgtacctgagatcggcggttcagaggcacctgctccccaaaacaaggatcagaaagcagtggatccggaggacgactttcaaagggaaatgtccttttaccgccaggcacaagccgccgtgttggccgtactgccccgtcttcaccagctgaaagtaccaacaaaaagaccgacagactacttcgcagaaatggctaagtcagatctgcagatgcagaaaatcaggcagaagctgcaaacaaagcaggccgctatggaacgcagtgagaaagcgaaacagttgcgggcactgcgtaaatacgggaagaaagtgcagaccgaggttctgcagaagaggcagcaggagaaagcgcatatgatgaacgccatcaaaaagtaccagaaggggttctccgataaactggacttcttagaaggcgaccagaagccgctggctcagaggaagaaagccggtgcgaaggggcagcagatgcgaaaggggccatccgctaagagaagatataaaaatcagaagtttggtttcggcggaaagaagaaaggctccaagtggaatactcgggagagctacgatgacgtctcctcattcagggcgaagaccgcccacggccggggcctcaagaggccagggaaaaagggctccaacaagcgaccaggcaagaggactcgagagaagatgaaaaaccgcactcactag

SEQ ID NO: 115454 - DNA, 2448 bp, synthetic construct
  misc_feature 1..2448: note = Description of Artificial Sequence: Synthetic coding sequence
  source 1..2448: mol_type = other DNA
atggaagatggcttcagcagctactcctcactgtatgacacaagtagccttctgcagttctgtaacgatgactccgcctcagctgcctccagcatggaggtgacagatcgcatcgcttctttggagcagcgggtgcagatgcaagaagatgatattcaactgctgaagtcagcccttgctgatgttgtgcggcgactgaacattacagaggaacagcaggccgtcctgaaccgcaagggacccactaaggcccgacccctgatgcaaaccctgcctctcaggaccacagttaacaatggtacggtgctacccaaaaagccaacaggtagtctgccgtctcccagcggcgttcgtaaagagacagccgtgccagctactaaatccaacatcaagcgcacttcaagcagcgagagagtcagcccaggcgggcgacgggagagcaacggagactccagagggaatagaaatcggactggaagtacctcttcttcctcatccggaaagaagaacagcgaatcaaagccaaaggagcccgtattcagcgcggaggagggatacgtaaaaatgttcctacgcggaaggcccgtgacgatgtacatgccgaaggaccaggttgattcttattcactggaagcgaaagtggagttgcctaccaagcggcttaaactggaatgggtttatggataccgcggtcgagactgtcgcaataatctgtatctcctcccaaccggcgagactgtctattttattgctagcgttgtggtcctgtataatgtggaagaacagctgcagcgtcactatgccggtcacaacgacgatgttaagtgcttggctgtccatcctgaccggattactatagctaccggtcaggtggctggaacgtcaaaagacgggaaacaactccccccacatgtgcgcatttgggactccgtgacccttaacactttgcacgtgattggcataggatttttcgatcgggctgtgacctgcattgcattctctaagagtaacggcggaacaaacctgtgtgcggtggacgattctaacgaccatgtgctcagcgtgtgggattggcaaaaagaagagaagctggctgacgtgaaatgcagcaacgaggcggtctttgccgctgatttccaccctactgacacaaacatcatagtgacctgcggcaagagccacctctacttttggacactcgagggctcctccctcaataagaaacaggggctttttgaaaagcaggagaagccaaagtttgttctttgtgttacattcagcgaaaacggggatacaatcacgggagatagctctgggaacattctcgtgtggggaaaagggaccaatagaatttcctatgcagtgcagggcgcgcatgagggggggatcttcgccctctgcatgctgagggatgggacactggtctccggaggcggaaaagaccgaaagttgattagctggtccggaaattaccagaaactaaggaaaaccgagatacctgaacagttcggccccatcaggactgtggcagagggcaaaggcgacgttattctcatcggaaccacaagaaattttgtcctccagggcactttgagcggggactttaccccaattacacagggccatacagacgagttgtgggggctggccatacatgctagtaaaagccaattcctaacttgcggacatgataagcacgcaacactttgggatgccgtgggtcacaggcctgtctgggacaagattatcgaagacccagcacagtctagcgggttccacccttccggctccgtcgtggctgtcggcaccctgactggccgctggttcgtgttcgacaccgaaaccaaggatctcgtgactgtgcataccgatgggaacgaacagctgtcggtcatgcgatacagtccagatggcaattttctcgccattggctctcatgacaactgcatatatatctatggcgtctcagataatggtcgcaaatacacccgcgtaggaaaatgtagcggccattcttccttcatcacccacttggattggagtgttaacagtcagtttctcgtgtccaacagcggcgattacgagatactctactgggttccgagcgcctgtaagcaagtggtcagcgtggagaccacccgtgatattgaatgggcaacatacacatgtacgttggggtttcacgtatttggagtttggcccgagggatccgacgggaccgatattaacgccgtttgtcgggcacacgaaaagaaactcttgtccacgggcgatgactttggtaaagtgcatttatttagttacccttgctcccagttccgggccccttcccacatttatggagggcattcttctcatgtgacaaatgtagactttctttgtgaagacagtcacctcatctccaccggggggaaggatactagcataatgcaatggagagtaatttag

SEQ ID NO: 115455 - DNA, 2505 bp, synthetic construct
  misc_feature 1..2505: note = Description of Artificial Sequence: Synthetic coding sequence
  source 1..2505: mol_type = other DNA
atggaagacggttttagctcatattcaagtctttacgataccagttccttgctgcagttctgtaacgacgatagcgcctcggcagcctccagtatggaagttactgatcgcatcgccagtcttgagcagcgcgtgcaaatgcaggaggatgacattcagctattgaagtccgccttggccgatgtcgttaggagacttaacatcactgaagagcaacaggctgttctaaaccgtaaagggcctactaaggctcggcctttgatgcagactttacccttgcgtacaacggtgaataatgggaccgtgttgcctaaaaagcccacaggttctctgccatctccatcgggtgtccgaaaggaaacagccgtgcctgctacgaagcgcctcaatcgctccgtgagcctcctgaatgcctgcaagctcaatcggagtacaccatccaatatcaaacgaacatccagctcagagagagtcagccccggcgggaggcgggaaagcaacggagacagcagaggtaatcgcaatcggaccggtagcacctcttcgagcagtagcggaaaaaagaatagcgaatccaaacctaaagagcccgtttttagcgctgaagaaggatatgtgaaaatgtttttacggggccgccctgttacaatgtatatgcctaaagatcaggtggactcctactccttagaggccaaggtggaactccctaccaagcgtctgaagctagaatgggtctacggctatcgaggtagggactgccgcaataacttatatctccttcctactggtgagaccgtctacttcattgccagcgtcgttgtgctgtataatgttgaagaacagctgcagcggcactacgccggccacaacgatgacgtgaagtgtctggccgtccaccccgacaggattaccatcgccacgggccaggtcgctggcacatcaaaagatgggaagcaattacctccccatgttcggatctgggattcagtcactttgaacacactccatgtgattggcataggattctttgaccgggcagttacatgtatcgccttttccaagtccaacggcggaacgaacctctgcgctgtcgatgactctaatgatcacgtgctgtcggtttgggattggcaaaaagaggaaaagcttgctgatgtgaaatgctcgaacgaagccgtatttgctgccgactttcacccaactgataccaacatcatcgttacctgtggcaagtctcacctgtacttctggactctggagggctcatctcttaataaaaaacagggcctgttcgaaaaacaggagaaacctaagttcgtgctctgcgtaactttcagtgaaaacggcgatactataacgggagactcttccgggaacatcttggtctggggtaagggcacaaacaggatcagttacgctgttcagggtgcccatgaggggggcattttcgctctgtgcatgttgcgcgatggcactctggtctcaggaggaggtaaggacaggaagctaatcagctggtcaggtaattaccagaagcttcggaagaccgagattcctgagcaattcgggcccattcgcaccgtggctgaaggaaaaggcgatgtcatcctgattgggactaccaggaacttcgtgctgcagggtaccctgtcaggggactttactcctatcactcagggacacacagatgagctgtggggactcgcaatccatgcttctaagtcgcagttccttacctgcggccacgataaacacgccaccttgtgggacgctgttggacataggcctgtctgggataaaatcatcgaggatcctgctcaatccagcggctttcaccccagtggcagcgttgttgctgtgggcacgttgacagggaggtggttcgttttcgacactgagaccaaagatctcgtcaccgtccatacagatggcaacgaacagcttagcgtgatgcggtactcgcccgatggcaatttccttgccatcggttcccatgataattgcatatatatctacggagtatccgacaacgggaggaagtacacacgcgtgggcaagtgctccggccactccagctttattacacatttagactggtccgttaattcccagttcctcgtgagtaacagtggcgactatgagattttatattgggtgccctccgcctgtaaacaggttgtgtctgtcgagactacccgagacatcgagtgggccacatacacctgcaccctgggtttccatgtctttggcgtatggccggagggatctgacggtacagatattaatgccgtgtgccgcgcccacgaaaaaaagctgctcagtactggggacgattttggaaaagtacacttgttttcttacccctgctctcagtttagagcaccatcccatatctatggaggccacagttctcatgtgaccaacgtcgattttctgtgcgaagattctcatctgatctcaacgggcggcaaggacaccagcatcatgcagtggcgagtcatctag

SEQ ID NO: 115456 - DNA, 2505 bp, synthetic construct
  misc_feature 1..2505: note = Description of Artificial Sequence: Synthetic coding sequence
  source 1..2505: mol_type = other DNA
atggaagatggattcagctcatattcaagcttatatgacacatccagtctgcttcagttctgtaatgatgactcagctagcgcagctagtagtatggaggtcaccgaccgaatcgcctcactggagcaacgggtgcagatgcaggaggacgacattcagctgctgaagagcgctctagcagatgtggttcgacgtctgaatatcacagaagaacagcaggcagtcttaaataggaagggcccaacaaaggctcgccccttgatgcagaccctgcccttgcggacgaccgtcaataatggtaccgtcttaccaaagaaacccactggcagtttgccatctccctccggcgtgcgcaaagaaaccgctgtcccggccaccaaaagactgaatagatccgtgtctctgttgaacgcatgtaaactcaaccggagtacaccttcaaacattaagcggacttcaagtagtgagcgagtgtcaccaggggggcgtcgggaatctaatggcgacagtagggggaaccggaataggaccgggtcaactagttctagctcttctggaaagaaaaattctgagtctaagccgaaagaaccagtttttagtgccgaagaaggctatgtcaaaatgttcctgcgaggacggcctgtcactatgtatatgcccaaagatcaggtggattcctactctctagaggccaaggtcgaactgccgacgaagcgtttgaagctcgagtgggtttatggctataggggacgagactgccgaaacaatctgtacctgcttccgaccggcgagacagtgtactttatcgcctctgtggtagtgctctataatgttgaggaacaattacagaggcactatgcagggcataatgacgatgtgaagtgcctggccgttcacccagaccggataactatagctaccggtcaagtggctggaacttcaaaagatggaaaacaacttccaccacacgtgcgcatatgggattcggtgacactgaacactcttcacgtaatcgggattgggttctttgatcgggcagtcacatgcatagccttctcaaagtccaatggaggtaccaacctgtgcgcagttgacgattctaacgatcatgtcctgtccgtctgggactggcaaaaggaagagaagctcgccgacgtgaaatgttcaaatgaggctgtcttcgccgctgactttcaccctacagatactaacattatagtgacttgcgggaagagccacctctacttttggacccttgaaggtagttctttgaataaaaaacagggcctcttcgagaagcaggagaagccaaaattcgtgctgtgcgtgacattctcagagaatggcgatacaattacgggggatagcagtggtaatatactggtctggggtaaggggaccaaccggatcagctacgctgtgcaaggagcgcacgaggggggaatcttcgctctgtgtatgctgcgggacggcacgctggtctctggaggtggtaaagacagaaagttaattagctggagcggcaattatcagaagctgaggaagaccgaaatacccgagcagtttggccccattcgcactgtcgcggagggcaaaggggatgtaattctcattggcactacaagaaattttgtgcttcagggcacactatccggggattttacaccgatcacccaggggcatacagacgagctatggggactggccatccacgccagcaaaagccagttcctgacttgtgggcatgacaagcatgctactctgtgggacgctgttggccacaggcccgtgtgggacaagatcattgaagaccccgcccagagcagcggcttccacccatctgggtcagtcgtggccgtgggcacgctgacaggccgctggtttgtgttcgatacagagacaaaagacctggtgaccgtgcacaccgatggcaatgaacagcttagtgttatgaggtactcaccggatggaaatttcctggctataggatctcacgataattgcatatacatctatggcgtgtctgacaacgggaggaaatatacccgtgtggggaaatgtagtggccactcatcctttattacacatctggattggagcgttaactcccagttccttgtatcaaattccggcgattacgagatcctctattgggtgccctcagcatgcaaacaggtggtgtctgtggaaaccacacgcgatatcgaatgggccacctacacttgtactctcggctttcacgtattcggggtttggcccgagggctctgacggcaccgatatcaacgcggtgtgccgcgcacatgaaaagaagttgctcagtacaggagatgacttcggtaaggtgcatctcttttcatacccctgttctcagtttcgggccccgtcccatatctacgggggacattcttcccacgttactaacgtggacttcttatgtgaagactcacatctgatcagtacaggaggcaaagatacaagcatcatgcagtggcgcgtaatttag

SEQ ID NO: 115457 - DNA, 2946 bp, synthetic construct
  misc_feature 1..2946: note = Description of Artificial Sequence: Synthetic coding sequence
  source 1..2946: mol_type = other DNA
atggatggttttgcaggctccctagacgatagcatatcagcagcctctactagtgatgtacaagaccgcctgagcgctctagagtccagggtacaacagcaggaagatgaaattactgtgctgaaagccgccttagcagacgtgctgcggcgattggcaatctccgaagatcacgtagccagcgtgaagaagagcgtgtcctccaaaggccagcccagccccagggccgtgattcctatgagctgcattactaacggctcaggcgccaatcgtaaaccgtcccatacctctgcagtatccatagcaggcaaggaaacactgagcagcgcagccaagagtggcaccgagaagaaaaaggaaaaaccccaaggacagagagagaaaaaagaagaatctcatagtaatgaccagtccccacagattagggcttcccccagcccacagcctagcagccagccccttcagattcaccggcagacgcctgagtccaaaaacgccacacccactaaatcaattaagaggccatctcctgccgaaaaaagccataatagctgggaaaattcggacgatagtcgtaataaactgtccaagatccctagcacccctaaactcatccccaaggtcactaaaacggctgacaagcacaaagatgtgatcattaatcaagaaggcgaatatatcaagatgttcatgagaggaagaccaatcacaatgttcatcccctccgacgtagacaattatgacgacatccgtaccgagctacctccggagaagcttaaactagaatgggcatacggataccggggaaaagattgccgcgctaacgtgtacctgcttccaacgggtaaaattgtgtattttattgcctccgttgttgtgctttttaactacgaggagcgaactcagaggcactatcttggccatacagactgcgtgaagtgcttggctatccatccggataaaatccgcatcgctacgggtcaaatagccggcgtagataaggacggaagacctctccagcctcatgtgcgcgtctgggattcggtgaccctatctacccttcagataattggcctgggaacattcgaacggggggtcgggtgtctggactttagtaaggccgacagcggagtgcatctgtgtatcattgacgacagtaacgagcacatgctcactgtgtgggattggcagaagaaagctaagggtgctgaaattaagacgacaaacgaagttgtgctggcggtggagttccatcctaccgatgccaacactattataacgtgtgggaaaagccatatctttttctggacgtggagcggcaatagcctgacaaggaaacagggaatcttcggcaagtacgaaaagccgaaattcgtgcagtgcttggcattccttggaaatggtgatgtgctgacaggtgactcggggggagtaatgctgatctggtccaaaaccacggttgagcccacccctgggaagggccctaaaggcgtgtatcagattagcaagcagatcaaagcccacgacggctcggtgtttaccctgtgtcaaatgcggaacggtatgctccttacaggcggcgggaaggaccgaaagatcatactctgggaccatgacctcaacccagagagagagattgaggtgcctgatcaatacggtacaatcagagccgtcgccgaaggaaaggcggatcagttcctcgttgggacgagcaggaatttcattcttcgagggacattcaatgatggttttcagatcgaggtgcagggacacaccgacgagctgtggggactggctacccacccatttaaagatctgctccttacatgtgcccaggaccgccaagtttgtctgtggaatagcatggagcaccggctggaatggacccggttggtggatgagccaggacactgcgctgatttccatccctccggtaccgttgtggcgatcggcacacactctggacgctggtttgtgttagatgctgagacaagagatcttgtgtccatccacactgacggcaacgagcagctgtctgtgatgcgctactccatcgatggcaccttcttggctgtgggcagccacgataattttatttatctgtacgtcgtgtctgaaaatggacggaaatactctcggtacgggcggtgtacaggtcactcctcctacatcacccacttggactggtcacctgataacaagtacattatgtctaacagcggcgattacgaaatcctgtattgggatatacccaacggatgcaaactcattcgtaaccgctccgactgcaaagatatcgactggacgacatacacgtgcgtcttgggcttccaggtcttcggggtttggccggagggatcggacgggactgacatcaacgcccttgtccggagtcataatcgcaaggtcattgctgtcgcggacgatttttgcaaggttcatctctttcagtacccatgttccaaagcaaaggctcctagtcacaagtattctgcacattccagccacgtgaccaatgtgagctttacacacaatgactcccacctcatctcaacaggggggaaagacatgtcaattatacagtggaaactcgtagagaaactttctctgccccaaaatgaaacagttgctgatacaacccttactaaagcccccgtgtcctctaccgaatcagtcattcagtctaacaccccaactccgcctccttcccagccgctaaatgagactgccgaggaagaatcccggatctcctcatcacccacactgctcgagaattctctcgagcaaaccgtggagccctctgaagatcacagcgaggaagaatccgaggaaggctcgggggatttgggcgaacccttatatgaggaaccttgcaatgagatctccaaagagcaagccaaggcaaccttgctggaagatcagcaggatcctagcccgtcttcttag

SEQ ID NO: 115458 - DNA, 738 bp, synthetic construct
  misc_feature 1..738: note = Description of Artificial Sequence: Synthetic coding sequence
  source 1..738: mol_type = other DNA
atgtctaactccggcgactatgagatcctttattgggatattcccaatggctgtaaactcattcggaatcgctcagattgcaaggacatcgactggacaacatacacctgcgtcctgggcttccaggtgtttggagtgtggcccgaggggtctgatggaacagatattaacgccctcgtaaggtcccacaaccgcaaggtaatcgcagtggcagatgacttttgtaaggttcatttattccaatacccttgctcaaaggcaaaagcaccttctcataagtattccgcccacagtagtcacgtcaccaatgtgtctttcacacataacgacagtcacctcatcagtactgggggtaaagacatgtcaattatccagtggaaactagtggagaagctctcactccctcagaatgagactgtggctgataccaccttgaccaaggccccagtgtcgtctactgaatcggtgatccagagcaatacaccaacccctcctccgagccagcctctaaatgagacggccgaagaggaatctaggatctcaagttcacctaccctgctagagaattctctcgagcaaaccgttgagcctagcgaggatcactcagaggaggagagcgaagaaggctcaggggatttgggagaacctctgtacgaagagccttgcaacgagatttctaaggaacaagccaaagctacacttttggaggaccagcaggacccctctccatccagttag

SEQ ID NO: 115459 - DNA, 2772 bp, synthetic construct
  misc_feature 1..2772: note = Description of Artificial Sequence: Synthetic coding sequence
  source 1..2772: mol_type = other DNA
atggatgggtttgctggtagcctggacgattcaatctccgcagctagcacaagcgacgtgcaggacagactctcagccctggaatccagggtgcaacagcaggaggatgagattaccgtccttaaagctgccctggccgacgtgttacggagactggctatttctgaggaccatgtggcgagcgtgaaaaagtctgtctcttctaaaggccagccttccccgcgcgcagtgatccccatgtcttgtattacaaatggatcgggcgctaatcggaagcctagccacacaagtgccgtgagtatagccggaaaggaaactctctcttccgccgcgaagagcatcaaaaggccaagccccgccgagaagagtcacaatagctgggaaaattctgatgactcgagaaacaaactcagcaagattccttcaacccccaagctgatcccaaaggtgacaaagaccgccgataaacacaaggacgtgatcatcaaccaggagggtgaatacattaagatgttcatgcgggggcggcccatcaccatgtttatcccctccgacgtggataactacgacgacataagaactgagctgccacctgaaaagctgaagctggagtgggcctacggctaccggggtaaggattgccgggctaacgtctatcttctgcctaccgggaaaatcgtttattttatcgctagcgttgttgtgctcttcaactacgaggagaggactcagagacattacctcgggcatacagattgcgtaaaatgtctcgccatccacccagataagattaggatcgcaaccggtcaaattgccggcgttgacaaggacgggcgccccctgcagccgcacgtgcgagtgtgggacagcgtcactctcagtaccttgcagatcattggcttgggaacctttgaacgaggagtgggttgtctggacttcagcaaagcagattccggtgtccacctatgcattatcgacgactccaatgagcacatgctaactgtgtgggactggcaaaaaaaggctaaaggtgccgagatcaagacaacaaacgaggtggtactcgcagtcgagtttcatccgaccgatgctaatactattattacgtgcggtaaaagtcacatcttcttctggacctggtctggcaactctttgaccagaaaacaaggtatctttggaaagtatgagaagcctaaattcgtccaatgcctcgcgtttttaggcaatggtgatgtgttaaccggagactcagggggggtaatgctcatttggagtaagactacagtggagcctacaccgggcaagggccccaagggtgtctaccaaatcagtaaacagattaaagcccacgacgggtctgtcttcaccctttgccagatgcgcaatgggatgctgctaaccggcggcggcaaggaccgcaagatcatcctgtgggatcatgacctgaaccccgaaagggaaattgaagttccagatcagtatgggacaattagagcggtcgcagagggtaaggctgaccagttcctggtcggcacaagtcgcaactttatcttaagggggactttcaatgatggcttccagattgaggtacaaggccacactgacgagctgtgggggctggccactcatccttttaaagatctcctgctgacctgtgctcaggaccggcaggtgtgtctgtggaattcgatggagcaccggctggaatggacacgtctggtggacgagccagggcattgtgccgattttcatccgagtggaaccgtggttgcaataggcacccacagcggccggtggttcgttctcgacgccgaaacaagagacttggtgtcgatccatacagatgggaatgaacaattaagtgtaatgcggtacagtatcgatgggacatttctggccgtcggcagccatgacaattttatatacctttatgtcgtgtctgagaacggacgcaagtactctcggtacgggcggtgcactggacacagctcttacattacgcaccttgactggtccccggacaacaagtatataatgagtaattccggggattacgagatactgtattgggatatcccaaatgggtgtaagctgataaggaatagatccgactgtaaggatatagactggacaacctatacctgcgtactgggtttccaggtgtttggtgtctggccagaaggaagcgacggaacagacattaacgccctggtgcgctcccacaatcgtaaggtgatcgctgtggcagacgatttttgtaaggtccacctttttcagtacccttgctccaaggctaaagctcctagccataagtattcagcccactcatctcacgtgactaacgtgagctttactcacaatgattcccacctgatctccaccggcggaaaggatatgtctattattcagtggaagctcgtggaaaagctgtctctccctcagaacgagaccgtcgccgatacaacattaaccaaagctccagtgtccagcaccgaatctgttatccagtcaaacacaccgactcctccaccgtcacaacccctgaacgagacagccgaggaggaatcaaggatttctagttcaccaaccttgttggaaaatagccttgagcagaccgtggaacctagtgaagatcattccgaagaggagtctgaggaaggatctggagatctcggggagccactttatgaggagccctgcaatgagatttccaaagagcaggctaaggctacactattagaagatcagcaggatccatcgccatcctcctag

SEQ ID NO: 115460 - DNA, 780 bp, synthetic construct
  misc_feature 1..780: note = Description of Artificial Sequence: Synthetic coding sequence
  source 1..780: mol_type = other DNA
atgcttctgcgtagttggttcgggaataaagacttccaggccctccctattctggcccgcttaccgtccatgccaaccgacatggagcacacaggacactatctgcatcttgcctttctcatgaccacagttttctccctgagtcctggaacaaaggctaattacacaaggttatgggccaatagtacaagctcctgggatagtgttatccagaataaaactggccgcaaccagaatgaaaacattaatacaaacccgattacccctgaggtcgactataaggggaattccaccaatatgcctgagacttctcacatagtcgccttgaccagtaaaagcgagcaagagctgtatattccgtccgtcgtgtctaattcgccttcaacagttcaatccatagagaacacttcaaaaagccatggcgagattttcaaaaaggacgtgtgcgccgagaacaataataacatggctatgctgatatgcctcatcatcatcgctgtgctgtttctgatttgtaccttcttgttcctgtccaccgttgtactggctaacaaagtttcatctttaaggaggagtaagcaggtgggaaagaggcagccacggagcaacggcgattttttagccagcggattatggcccgccgaatcagatacgtggaaacgaacaaagcaattgactggacctaatctcgttatgcagtctacaggcgtgctgaccgcaacccgggagcgaaaggatgaggagggcacagagaagctcacgaataagcagatcggatag

SEQ ID NO: 115461 - DNA, 711 bp, synthetic construct
  misc_feature 1..711: note = Description of Artificial Sequence: Synthetic coding sequence
  source 1..711: mol_type = other DNA
atgccgacagacatggagcatactggtcactatctccacctcgccttcctcatgacgacagtattctccctatctcccggtacaaaagccaattacactagactctgggctaactccaccagctcttgggacagtgtcatccagaacaaaaccggaagaaatcagaatgagaatattaacaccaacccaataactcctgaggtggattataagggaaacagcaccaatatgcctgagacttcccacatcgtagccctcactagcaaaagcgaacaggaactgtacattcccagcgtggtaagcaatagccccagcacagtgcaatcaattgaaaatacatccaagtcccatggggagatcttcaaaaaggatgtgtgcgcggaaaacaataataatatggctatgctaatctgtctcattataattgcagtgttgttccttatttgcactttcctgttccttagtaccgtcgttctcgcgaataaagtgtcaagcctgagacggtctaaacaagtgggtaaacggcagccacgtagcaacggcgatttccttgcctctggcctatggcctgccgagagcgacacctggaagcgcacaaagcagctgaccggccctaatctggttatgcagagtaccggagtcttgacggctacccgggagcgcaaagatgaagagggcaccgagaagctgacaaataaacagatcgggtag

SEQ ID NO: 115462 - DNA, 711 bp, synthetic construct
  misc_feature 1..711: note = Description of Artificial Sequence: Synthetic coding sequence
  source 1..711: mol_type = other DNA
atgccaacggacatggagcatactggtcactacctgcacttagcatttctgatgacaaccgtattctcgctctctccgggaactaaagctaactacaccaggctctgggcgaactctacgtcatcatgggatagtgtcatacagaataagacaggaaggaaccaaaacgaaaatattaatactaaccccattacaccagaggtggattacaaaggaaattccaccaacatgccagaaacaagccatatagtggccctaacatccaaaagtgagcaggagctgtatattccctctgtggtgagtaattctccctccactgttcagagcatcgaaaacacttctaaatctcacggagagatttttaagaaggatgtgtgtgcagaaaacaataataatatggccatgctgatctgcctcatcattattgctgttctgtttctgatctgcaccttcctcttcctttccactgtggtgctggcaaacaaagtgagttcactgcgaagaagtaagcaggtgggaaagcggcagcctaggtctaacggggatttcctggcaagcggactttggccagccgagagtgatacatggaagcggacaaagcaactgactgggcctaacctggtaatgcagtccactggcgttctaactgctactcgtgagaggaaggatgaggagggcaccgagaaactgacaaataagcagatcggttag

SEQ ID NO: 115463 - DNA, 699 bp, synthetic construct
  misc_feature 1..699: note = Description of Artificial Sequence: Synthetic coding sequence
  source 1..699: mol_type = other DNA
atggagcacactggccactatctgcacctcgcgttcttaatgactacggtgttttcattaagccccggcacaaaagccaactacactagactgtgggccaatagcacctctagctgggacagcgtaattcaaaataagaccggccgaaatcagaacgaaaatatcaacactaatcctataactcccgaggttgactacaaaggcaattctactaatatgcccgaaacatcccacattgtcgccctgacttctaaaagcgagcaggagctctatattccgagcgtcgtgtctaactctccttctactgtacagtcaatcgaaaataccagcaaaagccacggggaaattttcaagaaggatgtttgtgccgagaataacaataatatggctatgctaatttgtctgataataattgccgtgttgttcttaatttgcacatttctcttcctgagtactgtggttctcgccaacaaagtgtcaagtctaagacgatcaaaacaagtggggaaaaggcaacctagatcaaatggcgactttctagcctcgggactctggcctgcggagagtgacacctggaagcgaaccaagcaacttacaggaccaaatttggtaatgcagtccacaggtgtcctgaccgctacccgcgaacgcaaggatgaagaaggcaccgaaaaactcacaaacaagcaaattggatag

SEQ ID NO: 115464 - DNA, 1347 bp, synthetic construct
  misc_feature 1..1347: note = Description of Artificial Sequence: Synthetic coding sequence
  source 1..1347: mol_type = other DNA
atggacccaaagtacttcattctaatcctcttctgtggccacctgaataatacttttttcagcaaaacagaaactatcacaaccgagaagcagagccagccaacgctctttacaagttctatgtcgcaggtcctggcaaacagtcagaacacaacaggaaatccgttggggcagcccacccagttttctgacactttctccgggcaatccatctcacccgccaaagtgactgctggacagccaaccccagcagtatacacgagttcagaaaaacctgaggctcacaccagtgccggacaacccctcgcctataacaccaagcagcccaccccaatagcaaatacatcttcacaacaagccgtgtttacaagtgccagacagctgcccagcgctagaacttctactacgcagcctcccaagtcctttgtttataccttcacgcagcaatcctcctctgttcagattccgagcagaaaacagatcacagtgcataacccgagtacacagccgacaagcaccgtgaagaactctcccagaagcacacccggattcatactggacaccacttctaataaacagacgcctcagaaaaacaattataattccattgccgctatattaatcggagtgctcttgacctctatgctggtcgccattataataatagtactgtggaagtgtctgcgtaagccagtcttaaatgaccaaaactgggccggtagatccccattcgccgatggcgaaacccccgatatctgtatggataacattagagagaatgagattagcacaaaaagaacaagcattatcagcttgacaccctggaagccatccaagagcaccctgcttgctgacgacctcgagattaagcttttcgaatcatctgagaacatagaagattctaacaatccaaagaccgagaagatcaaggatcaggtgaatggaactagcgaagattccgcggacggttccaccgtggggacagccgtgtcgagcagcgacgacgccgatcttccgcctccccctcctttgctagatctggaggggcaggagtcaaatcagtccgacaaacccaccatgactattgtgtctcccctgcccaacgacagtacaagtttgccaccctcactggattgcctgaaccaggactgcggagaccacaagtccgaaatcattcagtctttccccccgctggactctctcaacctgcctcttccccccgtagatttcatgaaaaaccaggaagatagcaacttggagatccagtgtcaggaattctccattccccccaactcagatcaagatcttaatgaatccctgcccccacctccggcagagctgctatag

SEQ ID NO: 115465 - DNA, 1392 bp, synthetic construct
  misc_feature 1..1392: note = Description of Artificial Sequence: Synthetic coding sequence
  source 1..1392: mol_type = other DNA
atgctcttccggtacgctgaaaagattacgaggaagtattctgagatggacccaaagtattttatcttgattcttttctgtggccatttgaacaacacatttttctccaaaactgaaaccataacaacggagaagcagtctcagccaaccctgttcacatccagcatgtcccaggtgctggcgaatagtcagaacacgacaggcaaccccctgggccagcctacacagttttcagatactttcagcggccagtctattagcccggccaaagtcaccgcaggacaacctacaccagcagtctacactagtagcgagaagcctgaggcacacacctctgctgggcagcccttggcatataataccaaacagcccactccaattgccaatacaagctctcagcaagcagttttcactagtgcacgtcagttacccagcgcacggacttctaccacccagccacccaagtccttcgtttacacattcacacaacagtcgagttcagtgcaaattccttcgagaaagcagataaccgtgcacaatccctcaactcaacctacttcaaccgtaaaaaactcaccacgatccacgcctggcttcattctcgataccactagcaataaacagactccacagaagaataattacaattccatcgcagccatcttgatcggagtgcttcttaccagcatgctcgtggctatcattataatagtgctctggaaatgcctaagaaaacccgtgcttaatgaccaaaattgggcaggccgctcgcccttcgccgacggcgaaacgcccgacatatgcatggacaatattagagagaacgagatttccaccaagcggactagcatcatcagtctgaccccctggaagccctccaagtccaccctgttggctgatgacctcgagatcaaacttttcgagagctccgaaaatatagaagacagcaacaatcccaaaacagaaaagatcaaagatcaggtgaacggtacgtctgaggactccgccgacggctccacagttggaacagccgtgtccagcagcgacgatgccgatctacctcccccccctcctttgttagatctggagggacaggaatctaatcaatccgacaaaccaacaatgaccatcgtgtctccactcccaaatgatagcacctctctgcctccatccttggactgcctgaaccaggactgtggagatcataaaagcgaaataatccagagtttccctccgttggatagtctgaacttaccattgcccccggtggacttcatgaaaaaccaggaggacagtaatttggagatccagtgccaggaattctccattcccccaaattctgatcaggacctgaacgagagcctcccacctcctcccgctgagttgttgtag

SEQ ID NO: 115466 - DNA, 924 bp, synthetic construct
  misc_feature 1..924: note = Description of Artificial Sequence: Synthetic coding sequence
  source 1..924: mol_type = other DNA
atgaatcaagccgagctgatgcagttagacatggagggtatgcttcagcacttccagaaagtgattccccatcagttcgatggcgtccctgataaactgattcaggctgcctaccaggtgaagtacaattcgaagaagatgaaaaaactggagaaggaatacactacgataaaaactaaggagatggaagaacaagtggagatcaaacgactcaggacagaaaaccgccttctgaaacaacggattgaaactctggagaaagaaagcgcttccctggccgataggctcatacaagggcaggtgacccgggcccaggaggcagaagagaattacctaatcaaacgcgagttagctaccattaagcagcagtccgatgaggccagcgctaagctggaacaagctgagaacaccattagaaaattgcaacaccaacaacagtggcacaaatgtagcagtaactacaacgaggactttgtgctccagttggagaaggaactcgttcaagcacggctcagcgaggctgagtcccagtgtgccctgaaagaaatgcaggacaaagtgctagatatagagaagcgaaataatagtctgcccgacgaaaacaacatcgcccgtttgcaggaagagctgattgccgtgaagctgcgggaggccgaagcaattatgggtttgaaggaactcagacagcaggtcaaggacctggaggagcactggcaacggcatctggctcgaacaaccggtagatggaaagatcctcccaagaagaatgctatgaatgagctccaggatgaactcatgaccatccgcctgcgcgaagcagaaacccaggccgaaatcagggagattaagcagaggatgatggagatggaaacacagagtggtacctgtggcccccttctaaagatcattttttttaatgcatag

SEQ ID NO: 115467 - DNA, 2433 bp, synthetic construct
  misc_feature 1..2433: note = Description of Artificial Sequence: Synthetic coding sequence
  source 1..2433: mol_type = other DNA
atggttactaacaagatgactgccgcctttcgcaacccctccggtaaacaggtggccacagataaggtcgctgagaaactgagctcaactctgagttgggttaagaataccgtctcacacaccgtctcacagatggcaagccaggtcgcctcccctagtacttcactgcacaccaccagcagttcaaccaccctgtcaacccccgccctaagccccagcagtccatcccaactgagcccagacgacttggaattgctcgccaaactggaagagcagaacagactcctggagacagattcaaaatcgttaaggtccgtgaatgggagtagaaggaacagtggcagctctcttgtgtcttcatcttcagcctcctctaacttatcacacctggaagaggactcttggatcctgtggggaaggattgtgaacgagtgggaagatgtacgcaaaaagaaggaaaagcaggtaaaagaactggtccataaagggatcccccatcattttagggccatcgtatggcaattactgtgcagtgcccagtcgatgccaattaaggatcagtatagcgaattattaaagatgactagcccatgtgaaaaactgataaggcgtgatatcgcacgcacttaccctgagcataattttttcaaggaaaaggatagtctcggtcaagaagtcctatttaacgtgatgaaggcgtattcactggtagaccgggaggtgggctactgtcagggttccgcgttcattgttggcctgctgctgatgcagatgcctgaggaggaggctttttgtgtgtttgttaaactgatgcaggattatcggctgcgtgagttgttcaaaccatccatggctgagctagggttatgcatgtaccagtttgaatgcatgattcaggaacacctgcctgagctgttcgtacattttcaatctcaatcctttcacacctctatgtacgcttccagctggttcctcactatcttcctgacgactttcccactccctatcgccacacggatttttgatatcttcatgagtgagggactggagatcgtgttccgggtaggtcttgcactgcttcagatgaaccaggctgagctaatgcagttggacatggaagggatgctgcagcacttccagaaagtaattccccaccaattcgacggcgtcccagacaagctcatccaggcggcttatcaggtgaaatacaattctaagaagatgaagaagcttgagaaggagtatactacgatcaagaccaaggagatggaagagcaggtggaaattaaacgcctccgaaccgagaaccgcctgctgaaacaacgaatcgagactttggagaaacacaagtgttcctcaaactataatgaggacttcgtactacagctggagaaggagctggtccaggcccggctgagtgaagcagaatctcagtgcgcattgaaagagatgcaggataaagtgctggatatagaaaaaaggaacaacagcctgcccgacgaaaacaacatcgccaggctgcaggaagagctgatcgcagtgaagcttcgggaggctgaggcgatcatgggcctaaaagagctgcggcagcaggtgaaagatttagaggaacactggcagcggcatttagctcggaccaccggcagatggaaggacccccctaagaaaaacgccatgaacgagctgcaggacgagctgatgaccatcaggttgcgcgaggccgaaactcaagctgaaattcgagaaattaagcaaagaatgatggagatggaaactcagaaccagatcaactcgaaccatctgcgccgagctgaacaagaggtcatctccttacaagagaaggttcagtacctcagcgctcagaacaagggcttgctcacacagctgtcagaggctaagcgcaagcaggctgagattgaatgtaagaacaaggaagaggtgatggctgttcggttgagagaggccgatagcattgccgccgtagcagagctgcggcagcacatcgctgaactcgaaattcaaaaggaggaagggaaactgcagggtcagttaaacaaaagcgactctaatcaatacattggtgagcttaaagaccagatcgcagaactcaaccacgagctccggtgcttgaagggacagagaggcttctcaggccaacccccgtttgacggcatacacatcgtcaatcacttgatcggcgatgatgaatccttccatagttcagacgaagatttcatcgataattctctgcaggaaactggtgtaggctttccactccacggcaaaagtgggagcatgagcctcgatcctgccgtggccgatggctccgagagtgagaccgaggatagcgtgctggaaacacgcgagtcaaaccaggtcgtccaaaaggaaaggcctccacgaaggagggagagttactcgacaaccgtgtag

SEQ ID NO: 115468 - DNA, 2433 bp, synthetic construct
  misc_feature 1..2433: note = Description of Artificial Sequence: Synthetic coding sequence
  source 1..2433: mol_type = other DNA
atggtgacaaacaaaatgaccgccgccttccggaatccatcagggaaacaagtagcgaccgataaagttgcagagaaattgtcatctaccctttcctgggtgaaaaatacggtgagccacaccgtctctcagatggcttcacaggtggcctccccgagcacatccctccatacgaccagtagcagcactaccctgagcacacccgctttgagtccctctagcccaagccagctgagccctgacgatttggaactgttagccaagttggaagaacagaatcgccttctggagactgacagtaagtctctccgttctgtgaacggctcaaggaggaactcaggttcctcgctggttagctcttctagcgcgtcaagtaacctgtctcacttagaagaggactcgtggattttgtgggggcggatagtgaatgagtgggaggatgtaagaaagaaaaaggaaaaacaggtgaaggagctggtccacaaggggatcccacatcacttccgcgccattgtgtggcagctgctgtgttctgcgcagagtatgcccattaaagatcagtacagcgaactgctgaagatgacttctccttgcgagaagctcattcggcgggatatagccagaacgtaccctgagcataacttttttaaggagaaagattcgctgggtcaggaagtgctgtttaatgtcatgaaggcttatagtctggtggatcgtgaagttggatattgtcagggatccgcatttatcgtaggactcctcctgatgcagatgcctgaggaggaggcattttgtgtgttcgtgaaacttatgcaggactataggctcagggagttgtttaaacccagtatggctgagttgggcttatgtatgtatcaattcgaatgtatgatccaggagcacctacctgagctgtttgtgcactttcaaagccagtctttccataccagtatgtatgccagcagttggtttctcaccatctttctgactacattccctcttccaatcgctacccggatcttcgacatatttatgagcgaagggttagaaatcgtgttccgagtaggattggctctgcttcaaatgaaccaagctgagctcatgcagctagacatggagggtatgttgcagcacttccaaaaagtgatccctcatcaatttgacggtgtgcccgataaactgatccaggccgcatatcaggtgaaatacaactctaagaaaatgaaaaagctggagaaggagtataccacaattaaaactaaggaaatggaagaacaagtggaaataaagcggctgaggactgaaaatcgacttctgaaacagaggatcgagactctggagaagcataagtgtagtagcaactataatgaggactttgttttacaattggagaaggagcttgtacaggccagacttagtgaggcagaatcccagtgcgccttaaaggaaatgcaggacaaggtgctggatatagaaaagcgcaataattcactgcctgatgagaacaacattgctaggttacaggaggagctaatagctgtcaaactgagggaggcggaagccatcatgggcctcaaggagctacggcaacaggtcaaggatctggaggaacactggcaacggcatctcgccaggactacaggccgatggaaggatccgccaaaaaagaatgcaatgaacgagctgcaggacgaactcatgacaatccgcctccgcgaagctgagacgcaggcggaaatccgggaaatcaagcagcgcatgatggagatggaaactcagaatcaaatcaattccaaccatctgcgtcgggctgaacaggaagtaatttcactgcaggagaaagtgcagtacctgagcgcacagaacaaaggtctgctaacccaactcagcgaggccaagagaaaacaggcagaaatagaatgtaagaataaagaagaagtgatggccgtgaggctccgagaggctgacagcattgccgcggtggcagaactccgacaacatatcgcagaacttgagattcagaaagaggaaggcaagctccagggccagttgaacaaatcagactctaaccaatatataggagaactgaaggaccagatcgcagagctgaaccacgaactgagatgcttaaaagggcaaagaggcttctctggacagcccccattcgatggaattcatatcgtgaatcacctcatcggagatgacgagagcttccacagcagcgacgaagacttcattgacaacagtcttcaggagacaggtgtcgggtttcccctgcacggtaaatccggatcaatgtctctggacccagccgttgccgacgggagtgagagcgagacagaggatagtgtgctggaaactagggaatccaaccaggtcgtgcaaaaggagagacctccgcggcggcgagagagttactcaactacagtctag

SEQ ID NO: 115469 - DNA, 2466 bp, synthetic construct
  misc_feature 1..2466: note = Description of Artificial Sequence: Synthetic coding sequence
  source 1..2466: mol_type = other DNA
atggtgacaaataagatgactgctgcctttcgcaacccttccggaaagcaggtcgcaacagacaaggtcgccgagaagctgagttccaccctgtcttgggtcaagaatacagtctctcataccgtgagccagatggcaagccaagtggcctctcccagtaccagcctccacaccacatccagctccacaaccctcagcactcccgcactgtctccgagcagtccatcccagctgtcaccagacgatctcgagttgttggcaaaactggaagagcagaatagactgttggagacagattctaaatcccttcgatcggtgaatggctcccgcaggaatagcggcagcagcctggtaagttcctccagcgcctctagcaatctctcacacctggaagaagattcttggattctgtggggacgtatcgtcaacgaatgggaagatgtgagaaagaaaaaagaaaaacaagttaaagaattggttcacaaaggtatcccccaccactttcgagccattgtgtggcaacttctgtgctctgcccaaagcatgcccatcaaagaccagtatagcgagttgctgaagatgacaagcccctgtgaaaagctcatcagacgggacatcgcacgtacatatcccgagcataatttcttcaaggagaaggatagccttggtcaggaggtgttgttcaacgtaatgaaggcctatagcctcgttgaccgggaagtgggctactgtcagggtagcgctttcatcgtaggcttactcctgatgcaaatgcctgaagaagaagctttctgcgtgttcgtgaaattaatgcaggactaccgcctgcgggagctgttcaagccatctatggcagaactcggattgtgcatgtaccagtttgagtgcatgatccaggagcatctgcccgagctgttcgttcactttcaaagccagagttttcacacctccatgtatgcaagcagctggttccttacaatctttttaaccacatttccactgccaattgccacccggatcttcgatatttttatgtccgagggtctcgaaattgtgttcagggtggggctcgctcttctacagatgaatcaggccgaacttatgcagctggacatggagggcatgctgcagcatttccagaaagtcataccccaccagtttgatggagttcccgacaagctcatacaggccgcatatcaggtgaaatataatagtaagaaaatgaaaaaattggagaaggagtataccaccattaaaacgaaggagatggaggaacaggttgagatcaaacggctgaggacagagaacagacttctgaaacaacgaattgaaacgttggaaaaagagagcgccagcctcgccgatcgactaattcaacataagtgtagtagcaattataatgaagattttgtccttcagctggaaaaggagctggtgcaggcccgtctcagtgaggcggagtcgcagtgtgcactaaaggaaatgcaggacaaggttctcgatatcgagaaaagaaataattcccttccagatgagaacaacattgccagattgcaggaggagcttattgccgtcaagctccgggaggccgaagccatcatgggtttaaaggaactgaggcaacaagtgaaggacctcgaagagcactggcagagacatctagctagaacaactggccgctggaaagaccctccaaagaagaacgccatgaacgagctacaggatgagctaatgaccattaggttgagagaagctgagactcaggccgaaattagagaaatcaaacagagaatgatggaaatggagacccagaaccagataaattcaaaccatctaagaagggcagagcaagaagtgatcagtcttcaagagaaggtccaatacctttctgcccaaaacaaaggtttgctaactcagttaagtgaggctaagagaaagcaggctgagatcgaatgcaaaaataaagaggaggtgatggcggtgaggctgagagaggcagatagtattgcggcagtcgcggagcttcggcaacatattgccgaacttgagatccaaaaggaagaaggcaaacttcaaggccagctcaataaaagcgatagcaatcagtacattggagagctgaaagaccagatcgccgagctcaatcacgaactaaggtgtcttaaagggcagagagggttttccgggcagccccctttcgacggtattcacatagtgaaccacctgatcggggacgacgaatctttccatagctctgatgaggacttcatcgacaattcactgcaggagacaggagtcggttttcctctacacggaaaaagcgggagcatgtcgctggatcctgccgtcgccgatggctcagagagcgagaccgaagatagcgtacttgagaccagggaatccaaccaggtggttcagaaagagcggccccccagaagaagagagtcgtacagcacgactgtatag

SEQ ID NO: 115470 - DNA, 891 bp, synthetic construct
  misc_feature 1..891: note = Description of Artificial Sequence: Synthetic coding sequence
  source 1..891: mol_type = other DNA
atgtcctgggtccaggccaccctgctggctcgcgggctttgccgggcttgggggggcacctgtggagccgcgctaaccgggacttctatctcgcaggtaccaaggcgcctcccacggggtctgcattgctctgctgcagcacattctagcgagcaatcgctcgtgccctcccctcctgagccccggcagaggccaactaaagcgctcgtacctttcgaagatttgttcggccaagcccctggcggtgagagggacaaggcttcctttctccaaactgtccaaaaatttgcagagcatagtgtaagaaaacgcggtcacatagactttatttatctggcgttgaggaagatgcgggaatatggggtcgagcgcgacctggccgtttacaatcagctgctcaatattttcccaaaggaggtgtttcggcctaggaacatcattcagagaattttcgtccattaccctcgacagcaggagtgcggcattgctgttctggaacagatggagaatcacggcgtgatgcccaacaaggagactgaatttctgttgatccagattttcggtagaaagtcatacccaatgctgaaactggtccggctaaaactgtggttcccccggttcatgaatgtcaatccttttccagtgcctcgggatctgccacaggaccccgtcgaacttgcgatgttcggtctaaggcatatggaaccagatctgtccgcgagggtgactatctaccaggttccacttcccaaagactctactggggcagcagatccaccccagccacacattgtgggaagcggcagagatgcaggaggcgtagagcctttgctgccggatgccgccggccctggggtgtgcgaggaatggctgggacagctgcgggtgtag

SEQ ID NO: 115471 - DNA, 1296 bp, synthetic construct
  misc_feature 1..1296: note = Description of Artificial Sequence: Synthetic coding sequence
  source 1..1296: mol_type = other DNA
atgtcttgggtgcaagcgacactgctcgcccgcggactgtgccgtgcctggggcggaacatgcggagccgcactcactggaaccagcatctcccaggttccaagacgcctgccaagagggttgcactgtagtgctgcagctcactcttctgagcagtcattagtgccttctcctcccgaacctcgtcagcgcccgacgaaggccctggtgccttttgaagacttgttcgggcaggctcccggcggcgagagagataaagcaagctttctgcagacggtgcaaaagttcgcagagcacagtgtccgaaagcgggggcatatagatttcatatacctcgctctgcggaaaatgagggaatacggcgtggagagggaccttgctgtatacaaccagttgctcaatatatttccaaaagaagtgttcagacctaggaacattatccaacggatttttgtacactacccacgccaacaggaatgtggcattgcagtgctggaacaaatggagaaccacggggtcatgccaaacaaagaaacggagttcctgctcattcaaatcttcggtagaaagtcatatccaatgctgaaactggtgaggcttaagttgtggtttcctaggttcatgaacgtcaacccgttccccgtacccagggatcttccacaggatccggtcgaattagctatgtttggtcttaggcatatggaacccgacctgtccgctcgtgtcacaatttaccaagtacctttaccaaaggattctacaggggcggcggacccaccccaaccccatattgtgggtatccagtccccagaccagcaggctgcacttgcccgtcacaaccccgcccggcccgtttttgttgaaggcccattcagcctgtggctaagaaacaaatgcgtctattaccacatccttcgtgcggatcttttaccacctgaagagagggaggtggaggaaactcctgaggagtggaacctgtattacccaatgcagctggacctggaatacgtccgaagcgggtgggacaactatgagttcgacattaatgaggttgaggagggccctgtatttgctatgtgtatggctggggcacatgatcaagctacaatggctaagtggatccaagggctgcaagagaccaacccaacgctcgctcaaattccagtggtcttccgcctcgctggctcaactagagagcttcagaccagctccgcggggctcgaggagccaccgttgcctgaggatcaccaggaagaggatgataatctccagcgccaacaacagggacaatcttag

SEQ ID NO: 115472 - DNA, 654 bp, synthetic construct
  misc_feature 1..654: note = Description of Artificial Sequence: Synthetic coding sequence
  source 1..654: mol_type = other DNA
atgtcttgggtgcaagctactctgctggctagaggtctgtgccgcgcctgggggggaacatgcggtgccgccttgacaggtacctcgatttcgcaagtgcctctcccaaaggattctactggagcagctgatccgccccagcctcacatcgttggtattcagtcccccgaccagcaggccgccttggcccggcataatcccgctcgaccagtattcgtggagggccccttctctctgtggctacgcaacaaatgcgtgtattaccacatactgcgagccgaccttctccccccagaggaacgagaggtggaggagactcccgaggaatggaatctgtactaccccatgcagctggacctagaatacgttagatccgggtgggacaactacgagtttgacattaacgaagtggaagaggggcccgtgtttgccatgtgcatggctggcgcacacgaccaggccacaatggctaagtggattcaaggccttcaggagaccaacccgaccctcgcccagatcccggtagtgtttcgcctggcaggcagtacacgagagctacagactagttccgcagggcttgaagagccaccacttccggaagatcaccaggaggaggatgacaatctccagcgtcagcagcagggccaatcatag

SEQ ID NO: 115473 - DNA, 891 bp, synthetic construct
  misc_feature 1..891: note = Description of Artificial Sequence: Synthetic coding sequence
  source 1..891: mol_type = other DNA
atgtcatgggtccaggcgactttgctcgccaggggcctatgtagggcctggggcggcacttgcggagccgccttaaccgggacatcaatctcacaagtaccccgacgtctgccgagaggactgcactgttcagcagccgcccattcctcagaacagtcccttgtcccctctccaccagaacccaggcaacggcctaccaaagcattggtcccatttgaggatctcttcggccaggctccaggcggagaacgcgataaggctagcttcctgcaaaccgtgcaaaagtttgcagagcacagtgtccgcaaaaggggccatatagattttatatacctggctctgaggaagatgagagaatatggcgtggaacgggacctcgccgtctacaatcagcttttaaacattttcccaaaggaagtttttaggccccggaatataattcaacggattttcgtgcactatccgcgtcagcaggaatgtggaattgctgtcctggaacaaatggaaaaccatggcgtcatgcctaataaagaaactgagttcctactcatacagatttttggacgtaaaagctatcccatgttgaagctggtacgcctgaaactgtggttcccccgcttcatgaacgtgaacccttttcctgtgcctagggacctgccccaggatccggttgaactcgccatgttcggcctgcggcatatggaacccgacctgtctgctagagtgaccatctaccaggtgcctctcccgaaggactcgacaggggccgctgacccaccccagccgcacattgtggaactgacatgctgtccccgaagaagaggaaagtggaagcggaggcggcgcagcggaacttccacaacccggtgcagttggacatggtctatgtag

SEQ ID NO: 115474 - DNA, 1770 bp, synthetic construct
  misc_feature 1..1770: note = Description of Artificial Sequence: Synthetic coding sequence
  source 1..1770: mol_type = other DNA
atgagcgtgagtgtacacgagaacagaaagagcagggcctcaagcggcagcatcaacatctacttattccataaatccagttatgcagacagcgtgctgacccacttgaaccttctccgtcaacaaaggctgtttactgacgtgctgctccacgccggcaataggacattcccttgccaccgagcggtgctggccgcctgcagccgttattttgaagcgatgttttcagggggattaaaagaatcacaggacagcgaagttaatttcgataactcaatacatccagaggtcttggaacttctgctagactatgcatatagctctcgtgttattataaacgaagaaaacgccgagagtctgctggaggctggcgacatgttggaattccaagacatccgggacgcatgtgccgaattcctggagaagaatctgcatcccaccaattgcctgggcatgctgctgttgagcgatgctcaccagtgcacaaagctgtacgagctgtcttggcggatgtgcctcagcaacttccagacgatccgaaaaaatgaggatttcttgcagctcccccaggacatggtggtccagctcctgtcttccgaggagctggagactgaagatgaacgtcttgtctatgagagcgcgattaattggatctcttacgatctgaaaaagcgttactgctacctgcccgagctgctgcagaccgtccggctcgctttgctgcctgcaatctatctgatggaaaacgtagccatggaagagctgataaccaaacagcgcaaatcgaaagagattgtggaggaggccatcagatgtaagcttaagatcttgcagaatgacggggtggtaacgtctctgtgtgcaagaccccggaaaacaggccatgctctattcctcttgggggggcagacattcatgtgtgataagctgtacctggttgatcagaaagccaaggagattatacccaaagccgacattccctcgccacgaaaagaattctctgcatgcgccatcgggtgtaaggtgtacatcactggaggccgcggtagcgaaaacggggtgtctaaggatgtgtgggtgtacgatacactgcacgaagaatggtccaaggctgctcccatgctggtggctcgctttggccacggttctgctgagttaaagcactgcctgtacgtcgtaggagggcataccgccgcaacagggtgcctgcccgcgtccccctctgtatcactaaagcaggtcgagcactacgatcccaccattaacaaatggacaatggtcgccccactcagagagggcgtatccaacgcggcagtggtctctgccaaactcaagctcttcgcgttcggggggacctcagtgtcccatgacaaactgcccaaggtccaatgttatgaccaatgcgaaaacagatggaccgtgcccgccacatgccctcagccttggaggtacaccgccgctgccgtgttaggcaatcagattttcattatgggtggagacactgagttttctgcatgctccgcctacaaatttaatagcgagacctatcaatggactaaggtgggggacgtcaccgccaagagaatgagctgccatgctgtggctagtggtaataaactgtacgtcgtagggggttattttggaattcaaaggtgcaagactctggattgctacgacccgaccctcgacgtttggaacagcattacaactgtgccttatagcttgatccctaccgctttcgtttccacctggaagcatttaccctcctag

SEQ ID NO: 115475 - DNA, 153 bp, synthetic construct
  misc_feature 1..153: note = Description of Artificial Sequence: Synthetic coding sequence
  source 1..153: mol_type = other DNA
atgtccgtgagtgtccacgagaatcggaaatcaagggccagctccggcagcattaacatttatcttttccataaatctagctacgccgacagcgttctcacccatcttaatcttctgaggcaacagagattgtttacagacgtcctgctgtag

SEQ ID NO: 115476 - DNA, 15 bp, synthetic construct
  misc_feature 1..15: note = Description of Artificial Sequence: Synthetic coding sequence
  source 1..15: mol_type = other DNA
atgtccgtctcttag

SEQ ID NO: 115477 - DNA, 1770 bp, synthetic construct
  misc_feature 1..1770: note = Description of Artificial Sequence: Synthetic coding sequence
  source 1..1770: mol_type = other DNA
atgtccgtatctgtgcacgagaatcgcaagagcagagcatcctccggtagtattaatatctatttgtttcacaaatcaagttacgcggattccgtccttacccacctcaacttactaagacagcagaggttgttcacagacgtactgctgcatgcgggaaaccggaccttcccgtgccatagagcggtgctagcagcgtgctcccggtactttgaggccatgtttagcggcggcttaaaggagagccaggactccgaggtgaactttgataatagtatccatcctgaggtcctcgaactgctcttggattatgcatacagcagtcgtgtgatcataaatgaggaaaacgccgagtctttgctggaggctggagatatgctggaattccaagacatcagggacgcatgcgcggagttcttagagaagaacctgcaccctactaattgcctcggcatgctcttgctcagcgacgcgcaccaatgcaccaaattgtatgagttatcctggagaatgtgtctgagcaattttcaaaccatccgtaaaaacgaagacttcctgcaactcccccaggacatggttgtacagttattatcttccgaggagctggagacggaagacgagcgtctggtgtatgaaagcgcaatcaactggatatcctacgacctgaagaagaggtactgctatctgcccgagctgctccagacagtgcgactggcgcttctgcctgccatttacttgatggaaaatgtcgctatggaagaactgatcacaaagcagcgcaagtcgaaggaaatcgtcgaagaagccatccgatgcaaactgaaaatcctccagaacgacggggtcgtaacgtcactgtgcgcacggccccggaagaccggacacgccctcttcttgctagggggccagacttttatgtgtgataaattgtacctggttgatcagaaagccaaggaaattatcccaaaagctgatattcctagtccacgaaaagagttctccgcctgtgcaatcgggtgtaaggtgtatatcaccggcggccggggctctgagaatggggtatctaaggacgtatgggtttacgataccctgcacgaagagtggagtaaagcagcaccaatgctggtggcccgattcggccacggtagcgccgaactcaaacattgcctgtatgtcgtcggcggccacacagccgccactggctgcctgcccgcctccccatcagtctctctaaaacaggttgagcactatgacccaacaataaataagtggacgatggtcgcccctttacgcgagggggtgtctaacgccgctgtggtgtccgccaagttaaaacttttcgccttcggagggacctccgtaagccatgataaattgcctaaagttcagtgttatgatcagtgcgaaaatcgatggacggtccccgcgacatgtcctcagccctggcggtataccgctgccgcagtgctgggtaatcagatctttattatggggggcgatacagagttcagcgcatgcagtgcatacaaattcaatagcgagacctaccagtggaccaaggtcggtgatgtaacggccaaacggatgtcgtgtcacgccgtggctagtggcaacaaattgtacgtggtcggcggttatttcgggatacagcgctgcaaaaccctcgattgttatgaccccacacttgatgtgtggaacagcataacaacagtgccatattctcttatccccacagccttcgtctccacctggaagcacctcccttcgtag

SEQ ID NO: 115478 - DNA, 1551 bp, synthetic construct
  misc_feature 1..1551: note = Description of Artificial Sequence: Synthetic coding sequence
  source 1..1551: mol_type = other DNA
atgttcagcggaggcctgaaggagagccaggactctgaagtaaactttgacaatagcattcatcctgaggtcctggagcttctgctggattacgcttatagctcccgggttatcattaacgaagagaacgcggaaagtttgcttgaggctggagacatgctggaattccaggatatcagagatgcttgtgccgaatttctggaaaaaaaccttcaccctacaaattgtctgggcatgctcctcctctctgatgcgcatcagtgtacaaagctgtacgagttgtcatggcggatgtgcctctctaacttccagactattcggaaaaatgaggatttccttcagctcccccaggacatggttgttcagcttcttagcagtgaggaactggagacggaagacgaacggcttgtatacgagtctgcaatcaattggatttcttatgacctcaagaagagatactgttacctgccagagttgctgcaaactgtccggctggctttactgccagcgatctacctgatggaaaacgtggcgatggaggagctgatcaccaagcagaggaagagtaaggaaatcgtggaagaggcgatcaggtgcaaattgaaaatccttcagaacgatggcgtggttacctccctctgtgctcggccaagaaagacaggacatgcactgtttctccttggggggcagactttcatgtgcgataaattgtacctggtcgaccagaaagccaaggaaattataccaaaggcagacatcccaagcccgcggaaggaattttccgcttgcgctatcggctgcaaagtgtacatcaccggaggcagggggagtgagaatggcgtatccaaagacgtatgggtgtacgatacgttacacgaagaatggtcaaaggccgcacctatgctggtggccaggttcgggcatgggtccgcagagctgaagcactgtttatatgtggtgggtggccataccgccgctaccggatgcctgcccgctagcccttccgtttcgctgaagcaagtcgagcactatgatcctactattaacaagtggaccatggttgcgcctctgcgcgagggagtctctaacgcggctgtggtgagcgccaaactaaaactattcgcctttggtgggacctccgtctcacacgataagctcccaaaagtgcaatgctatgaccagtgcgagaacaggtggaccgttccagccacctgcccccaaccttggcggtacaccgcggccgcggtgctgggaaaccagatttttattatgggaggcgatacggagttctccgcttgctccgcttataaatttaactccgaaacataccagtggaccaaggtgggagacgtcacggctaaaaggatgtcttgccatgccgttgcatctggaaacaagttgtatgtcgttggcggatatttcggaatacagcgctgcaagacgttggactgctacgatcctaccttggatgtgtggaactccatcaccacagtgccatatagcctcattcccaccgcctttgtctccacatggaagcacctgcccagttag

SEQ ID NO: 115479 - DNA, 1932 bp, synthetic construct
  misc_feature 1..1932: note = Description of Artificial Sequence: Synthetic coding sequence
  source 1..1932: mol_type = other DNA
atggtggacgctggaggagtcgaaaatataacccaactgccccaagaactaccacagatgatggctgcagccgcagatgggcttggctccattgccatagacacaacccagctgaacatgtcagttacggaccccaccgcatgggccacagcgatgaataatttagggatggtgccagtgggactccccgggcaacagctggtgtcggactctatttgcgtacccggattcgatccctctcttaacatgatgacgggcatcacgccaataaacccaatgatccctgggctgggactagtaccccctccaccacctacagaggtcgctgtggtgaaagaaatcatacactgtaaaagctgtaccctgtttccccagaatcccaatttacctccaccctcaacccgcgagcggccaccagggtgcaagactgtgttcgtaggcgggctcccggagaacgcgacagaggagatcatccaggaagtttttgaacagtgcggggacatcactgccatcaggaaatctaaaaagaatttttgccatattaggttcgctgaagaattcatggtcgataaggccatttaccttagcggctaccgtatgagacttggttcatcaactgataagaaagattcgggtcgccttcatgtggactttgcccaggcccgtgacgatttctacgagtgggagtgtaagcagcggatgcgcgccagagaggaaaggcaccgccgtaaacttgaggaggacagacttcgtcccccttcccctcctgcaatcatgcactattctgaacatgaggccgcactattggccgagaagttgaaagacgactccaaattctctgaggctataaccgtgctgctatcatggatcgaacgtggggaggttaacaggcgcagtgcgaatcagttctatagtatggtgcagtccgccaattcccatgtgcgcagactgatgaatgaaaaggccacccatgaacaggaaatggaagaggcaaaggagaactttaagaatgcactgactggcatcctaacccaatttgagcagatcgtagctgtatttaacgcttccactcgtcagaaggcttgggaccatttttccaaggcccagaggaagaacattgatatctggaggaaacacagcgaagagcttcgcaatgcacagtcagagcaactgatggggatcagacgagaagaggagatggaaatgtccgacgacgaaaactgtgactctcccaccaagaagatgcgggtagatgagtcggccttggctgcccaggcctacgcgttaaaggaagaaaatgactccctgcgttggcagttggacgcataccggaatgaagtagaactcctgaaacaggaaaaggagcagctcttcagaacagaagaaaacttgacaaaggaccagcagctgcagtttctgcagcagactatgcaggggatgcaacaacagttgctgactatccaggaagagctcaataataaaaagtcagaactggaacaggctaaggaggaacagtcccatacccaggcacttctgaaggtcctgcaggaacaattgaaggggaccaaggagctggtggaaaccaacggacactcgcatgaggactccaacgaaatcaatgtccttacagttgccctggtaaatcaggatagggagaataacattgaaaaacggagtcaggggcttaaaagcgaaaaagaagctcttctcattggcattatcagtacttttctgcacgtgcatcccttcggagcaaatattgagtatctatggtcctatatgcagcagctcgattccaagattagcgcgaacgagatagagatgctactgatgagactccctcggatgtttaagcaggagttcacaggcgttggtgctaccctggaaaagagatggaagctgtgtgcttttgagggaatcaagactacatag

SEQ ID NO: 115480 - DNA, 1932 bp, synthetic construct
  misc_feature 1..1932: note = Description of Artificial Sequence: Synthetic coding sequence
  source 1..1932: mol_type = other DNA
atggtggatgcgggtggcgtcgaaaatattacccaactgccccaggagcttccacagatgatggccgccgctgccgacggactgggtagtatcgctatcgacaccacacaattgaacatgtctgtgacagatccaactgcttgggccacagctatgaacaacctcgggatggtccccgttggcctgcccggccagcaactcgtctccgattctatttgcgtacccggctttgaccctagtctgaatatgatgacaggaatcactcccatcaaccctatgatccccggactggggctagtaccacctccaccccctacagaagtcgccgtggtgaaagagattatccactgcaagtcctgtaccctgttcccacagaatccaaacctccccccacccagcacccgagagcgtcctcctggatgcaagaccgtattcgtgggtggtctgcccgaaaatgccaccgaggagatcattcaggaggtgtttgagcagtgcggtgacatcacagctatccggaaatccaaaaagaacttttgccacattagattcgccgaggaattcatggtggataaagctatctatctcagcgggtacaggatgagattgggaagcagcaccgacaaaaaggattcaggccggcttcatgtggacttcgcccaagcgcgagacgatttttacgaatgggaatgtaaacagagaatgcgggcccgagaagaacggcaccggcggaagctcgaggaggatcgtctgcggcctcccagtccgcctgccattatgcactactccgaacacgaagccgccttgctggcggagaaactgaaggacgactcaaagttctccgaagccattactgtgctcctttcttggattgagaggggcgaagtcaataggcggtctgccaatcagttctacagcatggtccagagcgctaatagccatgtacgcaggctaatgaacgaaaaggccacgcatgagcaggagatggaagaagcgaaagaaaactttaagaacgctctgactggtatactcactcagttcgaacagatcgtggccgtctttaatgccagcacgcgacagaaagcctgggaccacttcagcaaggcccagagaaaaaacatcgatatctggcgaaaacacagcgaagagctgaggaacgcccagtccgagcagctcatgggaataaggcgggaagaggagatggagatgtccgatgacgagaactgtgatagtccaacaaagaagatgcgggtcgacgaatccgcactggccgcgcaagcttatgctctgaaagaggaaaacgactccctgcgatggcagctggatgcataccggaatgaggtggagctgctgaagcaggagaaggagcaactcttccggacagaagagaacctcacaaaagatcagcagttgcagttcctacagcagactatgcaggggatgcagcagcagctgctaaccatccaggaggagctgaataataaaaaaagcgagctcgagcaggccaaagaggagcagagccacactcaggccctattgaaggttttgcaggaacagctcaaaggaacaaaggagcttgtggagactaacggacattcccatgaggacagcaacgagatcaatgttctgacagtggctttagtcaaccaagaccgcgaaaacaatattgagaagcggagtcaagggttgaaatcagaaaaggaagcacttctgatcgggataatctctacatttttgcacgtgcatccttttggggccaacattgagtacctctggagctacatgcagcagttggatagcaagatcagtgccaacgaaattgaaatgctattaatgcggctgccacggatgttcaagcaagagttcactggcgtgggcgccaccctggaaaagagatggaaattgtgcgcttttgagggtatcaagacgacatag

SEQ ID NO: 115481 - DNA, 708 bp, synthetic construct
  misc_feature 1..708: note = Description of Artificial Sequence: Synthetic coding sequence
  source 1..708: mol_type = other DNA
atggtggacaaggccatctacctgtctggatataggatgagactgggcagctctaccgacaagaaagacagcggacgacttcatgtagactttgctcaagccagagacgatttctacgaatgggagtgcaaacaacggatgcgtgctcgcgaagagaggcatcggcgcaagctagaagaggaccggctccgtcctcctagtcccccggccatcatgcactactccgagcatgaagcagccctcctggccgagaagctgaaggacgactcaaaattctcagaggccattaccgtcctgctaagctggatcgagaggggcgaggtaaatcgccgctctgcaaatcagttctactctatggttcagagcgccaatagccacgtccgcagactcatgaacgagaaagctactcacgagcaagaaatggaagaggcgaaagagaatttcaaaaacgccctgacggggattctgacccagtttgagcagattgttgcagttttcaatgcctctaccaggcagaaggcctgggaccatttctcaaaagcccagagaaagaacatcgatatatggaggaaacattccgaggagctgagaaacgctcaaagcgaacaactcatgggcatacggagggaggaggaaatggagatgtcagatgacgaaaactgcgatagtccaactaagaaaatgcgggtggatgagagcggggcatag

SEQ ID NO: 115482 - DNA, 1833 bp, synthetic construct
  misc_feature 1..1833: note = Description of Artificial Sequence: Synthetic coding sequence
  source 1..1833: mol_type = other DNA
atgcagcgggacttccgctggctctgggtgtatgaaatcggctacgccgcagacaactcccggaccttaaatgttgatagtacggccatgacgctaccaatgtctgaccccacagcttgggccaccgcgatgaacaacctgggaatggcccccttgggtatcgccgggcagccaatattgcctgacttcgatccagcgctcggaatgatgaccggtatcccaccaattacccccatgatgcccggtctcggcattgtacctcctccaatccctccagatatgcccgtggtgaaggaaattattcactgcaaatcttgcaccttgtttcccccaaatcctaacttaccccctcctgccacccgggaaaggcctcccgggtgtaagactgtttttgtgggtggcttgcccgagaacggaactgaacagatcattgtggaagtgtttgagcagtgcggcgagattattgccatacgaaagtctaagaagaatttttgtcacatcagattcgccgaagagtatatggtcgataaagcgctatacctatctggttaccggatcagactgggctcatctaccgataaaaaagacacaggaaggcttcatgttgatttcgcccaagcccgtgatgatctgtacgagtgggaatgtaagcagaggatgttagcacgcgaagagagacataggaggcgcatggaagaggagcgtttgagaccaccaagtccccctccagtggtgcactacagcgatcacgagtgttccattgtggccgagaaattgaaggatgatagcaaattcagtgaagccgtgcagaccctactcacatggattgagagaggcgaagtgaacaggagatctgcgaataatttctacagcatgatccagagtgctaatagccacgtgaggcgcctagttaacgaaaaagcagctcacgagaaggacatggaggaggctaaagagaagttcaaacaggctctgagcggaatcctcattcagtttgagcagatcgtggcggtctatcacagtgccagcaaacagaaagcatgggatcacttcacgaaggctcaacgcaaaaatatatctgtgtggtgtaaacaggccgaggagattaggaatatccacaacgatgagcttatgggcattcggcgggaggaggagatggagatgagtgacgatgaaatcgaagagatgaccgagacaaaggaaacagaagagtccgcgctggtgagccaggcggaggccttgaaagaggagaacgacagcttgcggtggcagttggatgcctatcgcaatgaggtcgagctgctcaagcaggagcaggggaaggtgcatagggaagacgacccaaacaaagagcagcagctgaagctgctgcaacaggctctgcagggaatgcagcaacatttgttgaaggtccaggaagaatacaaaaagaaggaggccgagctggagaagctcaaggatgacaagttgcaggtcgagaagatgctcgaaaatctcaaggagaaagagtcttgtgcaagccggttgtgtgcttcaaatcaagactcagagtatcctttagagaagacgatgaacagttcccccatcaagagtgagagggaggccttgctggtgggtattatcagcacttttctgcacgtgcatcctttcggagcgagtattgaatacatctgctcgtacctgcaccggctcgacaacaagatttgcacctccgacgtcgagtgcttgatggggcggttacagcatacattcaagcaggaaatgaccggggtgggagcttcattggaaaagaggtggaaattttgcgggtttgagggcttgaagcttacatag

SEQ ID NO: 115483 - DNA, 1917 bp, synthetic construct
  misc_feature 1..1917: note = Description of Artificial Sequence: Synthetic coding sequence
  source 1..1917: mol_type = other DNA
ttacctttcgacccggctaataataatgagccactccagttcgggtccgccagtggaccgctcgtaaccgaaggattaattgaaaatggtggagaatccagcaagaaaagaaagcggactaataccccctccgctgacaacagccgcacgcttaatgttgatagcactgccatgaccctccctatgagtgatcctaccgcctgggccacagctatgaacaatctgggcatggctccactgggcatcgcgggccaacccatcttgcctgactttgatcccgccctggggatgatgacgggcattccaccaattacccctatgatgcccgggttaggcattgttcctccccccatcccccccgatatgcctgtggtcaaagagattattcactgcaaaagttgcaccttgttccccccaaatcctaacctgcccccacccgccacccgagagcgcccccccggctgtaaaactgtgtttgtcggcggtctgccagagaacggaacagagcaaatcattgtagaagtgttcgagcagtgtggcgagatcatcgccatcaggaaaagtaagaagaatttttgtcatataagatttgcagaggaatacatggtggacaaagcgctatacctttctggatatcgaattagattgggctcctctaccgataagaaggacactggcaggctccacgtggactttgctcaggctagagacgatctgtatgaatgggagtgcaaacagaggatgctggcaagggaagaaagacaccggcggcggatggaggaggagaggttgaggcctcccagccctccaccagtcgtccactacagcgatcatgagtgctcaatcgtggccgagaaactgaaggacgactcaaaatttagtgaagccgtacagactctactgacctggatcgaacggggggaggtcaacaggaggtcggctaataacttttactcaatgatacagtccgccaactctcacgtgagaagactggtcaatgagaaagccgcgcatgaaaaggatatggaggaggcaaaggagaagttcaaacaggccttgtcaggaatcctaatccaatttgagcagatcgtggcagtataccactccgcatccaaacagaaagcctgggatcattttaccaaagcgcagcgaaagaatattagtgtgtggtgtaaacaagcagaagaaatacggaacatccacaacgacgaattaatgggaatcagacgtgaagaagagatggagatgtcagacgacgagatagaagagatgactgagactaaggaaacagaagagtccgctcttgtttcacaggcggaggccctgaaggaagagaacgactccctgcggtggcagctcgatgcttaccgcaacgaggttgaactgttgaagcaagagcagggcaaggtgcaccgcgaggacgatcctaataaggaacagcagttgaaactgctgcagcaggcattgcagggaatgcagcaacatctcctgaaggtgcaggaggagtacaaaaagaaggaggctgaactggagaagctgaaggatgataagcttcaggtagaaaagatgctggagaatctcaaggagaaggagagctgtgcaagtagactgtgtgccagtaatcaggactccgaatacccgctggagaagaccatgaacagtagcccaataaagagcgagcgcgaggcccttcttgtgggcatcataagcacctttttacatgtgcacccatttggagcgtccatcgaatacatttgctcttacctccatcgactggataataaaatttgcacgtctgacgtcgaatgcctgatgggacgattgcaacacacctttaaacaggaaatgactggggtgggggccagtttggaaaagaggtggaaattctgtggcttcgagggactcaagcttacttag

SEQ ID NO: 115484 - DNA, 1833 bp, synthetic construct
  misc_feature 1..1833: note = Description of Artificial Sequence: Synthetic coding sequence
  source 1..1833: mol_type = other DNA
atgcaacgcgatttccgatggctatgggtctacgagattgggtatgctgccgataattccaggacactgaacgtggattcaacagccatgacacttcctatgtctgatcccacagcatgggccacagcaatgaataacttgggcatggcccccctgggcattgctgggcaacccatcctgccggatttcgatcctgccttaggaatgatgacagggattccccccatcacccctatgatgcccggcctgggtatcgtgccaccacccatccctcccgacatgcctgtggtgaaagagattatacactgcaaaagctgcaccctgtttccacctaatccaaacttgcccccccccgccaccagagagagacctcccgggtgcaaaaccgttttcgtgggagggctcccagagaatgggaccgagcagattattgtggaggtctttgaacagtgtggcgaaattatagcaatcaggaaatcaaagaaaaatttctgccacataaggtttgccgaagagtatatggtggataaagccctgtatctgtctgggtatcgcattcgcctgggatcaagtactgacaaaaaggatactggccgtttacatgttgatttcgcacaagccagggatgatttgtatgaatgggaatgcaaacagcgtatgttggcccgagaagagagacaccgtcggcggatggaagaagagaggctcaggcccccctccccaccaccagtggtgcactacagcgatcatgagtgtagcatcgttgccgagaagctgaaagacgattcaaaattttccgaggcggtgcagaccctactaacttggatcgaacggggcgaggtgaacaggcggagcgcaaacaacttttacagtatgatacagagcgcaaattcccatgtgagacgactggttaatgagaaagcagcacatgagaaggacatggaggaggctaaagagaaatttaagcaggcactctccggcatcctgatccagtttgagcagatcgttgccgtctaccattcagcatctaagcagaaggcatgggatcactttactaaagcccaaagaaagaatatttcagtgtggtgtaaacaagctgaagaaattcgcaacatccataatgacgaattgatggggataaggagagaagaggagatggaaatgagcgatgacgagattgaagaaatgacagagacaaaggaaactgaggaatctgcacttgtttcgcaggctgaggcactgaaggaagaaaatgactcacttcgttggcagctagatgcctataggaacgaagttgaactgctaaagcaagagcaggggaaggtgcacagagaggatgatccgaataaagagcaacagctcaagctgctacagcaggcattgcagggcatgcagcagcatctgctgaaggtccaggaggagtacaagaagaaagaggccgagctcgagaaactgaaggatgataaactccaggtggagaagatgctggagaacctcaaggagaaagaatcttgtgcgtcacgcctgtgcgcaagcaaccaggactccgaataccctctggagaagaccatgaactcttcacccataaagtctgagcgagaagctcttctggtcggtataataagcactttcctgcatgtacaccccttcggtgcttcaattgaatacatttgttcctacctgcataggctggacaataagatttgcacgtcagacgtggaatgcttgatggggcggctgcagcacacctttaagcaggagatgacaggagttggggccagtctggagaagcgatggaagttttgtggcttcgagggactgaaattgacctag

SEQ ID NO: 115485 - DNA, 1746 bp, synthetic construct
  misc_feature 1..1746: note = Description of Artificial Sequence: Synthetic coding sequence
  source 1..1746: mol_type = other DNA
atgactctcccaatgtccgacccgactgcctgggctaccgctatgaataacctggggatggcaccactggggatcgcaggacagcccatcctgcccgatttcgatcccgctcttgggatgatgactgggatacctccaataacccccatgatgcccggtctgggtatcgtccctccccccatccccccagatatgccagtcgtcaaggaaatcattcattgtaaatcctgtaccctcttccctcccaaccctaatctccctccacctgccacccgcgagagaccccccggatgtaagaccgttttcgtcggcggccttccagaaaacggaaccgaacagatcattgtggaagtgtttgaacaatgcggcgagataattgccattaggaagtccaagaagaacttctgtcacattaggtttgcagaagaatatatggtggacaaagctctctacctctctgggtatcgtatccgactcggtagttcaacagataaaaaagatactggacggttgcatgtggacttcgctcaagcacgtgacgatctgtatgaatgggagtgcaagcaacggatgctggctagagaggaacgacaccggagacggatggaagaggagcgactccgccccccttcccctccccctgtcgtccactacagtgatcatgagtgttccatcgtggctgagaagctcaaggatgacagcaaattcagtgaggctgttcagactctcctcacctggatcgaacggggggaggtcaaccggcgatctgccaacaacttttattctatgatccagagcgctaactctcatgtgcggcgtctcgtgaacgaaaaagccgctcatgagaaagatatggaagaagccaaggaaaaatttaagcaggccctcagcggaattctcatccagttcgagcaaattgtggctgtgtatcattctgcaagtaagcagaaggcatgggatcactttacaaaggcacagaggaagaacatcagcgtatggtgcaaacaggctgaggagatccggaacattcacaacgacgagctcatggggatacggcgcgaggaagagatggaaatgagcgacgacgagatcgaggaaatgactgagactaaagaaacagaggagtcggcccttgtctcacaggccgaggcactcaaagaagagaatgactctttaaggtggcagctggatgcttataggaatgaggtcgaactcctcaaacaagagcagggcaaagtccaccgagaagatgaccccaataaagagcaacagttgaagttgcttcagcaggcactgcagggtatgcaacaacatctcctgaaagtgcaggaggaatacaagaagaaagaggctgagcttgagaaattaaaggatgataagcttcaggtggaaaagatgttagaaaacctgaaggaaaaagagagttgcgcctcccgcctctgcgccagtaaccaggattccgagtatcctctggaaaagaccatgaattcatcacctatcaagtcggagcgcgaagctctcctggtgggaattattagcacctttctgcacgtgcatccatttggggctagcatagagtacatctgcagctatctccaccgcctcgataacaagatttgtacatcagacgtagagtgcctgatgggtagacttcagcacacattcaaacaggagatgacaggtgtgggggcgagcctcgaaaagcgctggaaattttgcgggtttgagggactgaaactcacctag

SEQ ID NO: 115486 - DNA, 1746 bp, synthetic construct
  misc_feature 1..1746: note = Description of Artificial Sequence: Synthetic coding sequence
  source 1..1746: mol_type = other DNA
atgacactccctatgagcgatcccacagcttgggctaccgccatgaataacctcgggatggcgcctctagggatcgctgggcagcccattctaccagactttgaccccgcattaggcatgatgaccggtatccctccgattacaccgatgatgcccggattaggtatcgttccaccgcccattcctcccgacatgccggtagtgaaggagataattcattgcaagagctgcacattgtttcctcccaaccctaacctcccccctccagccaccagggaacgaccaccgggctgcaagaccgtattcgtcggtggccttcctgaaaacggtaccgagcaaatcattgtggaagtgtttgagcagtgtggtgagatcatcgctatcagaaaatctaaaaaaaacttttgccatataagattcgctgaagagtacatggttgataaggcgctgtatctctccggataccgcatccgtttgggatcctccacggataagaaggataccgggagactgcatgtcgacttcgctcaggcaagagacgatctttacgaatgggagtgtaaacaacgaatgctggcccgggaggagaggcaccgtcggcgcatggaggaggagagattgcggcctccatctcctcctcccgtggtgcattacagcgaccacgaatgtagcattgtggctgagaagctaaaggatgacagcaaattctcggaggcagtgcaaactctcttgacatggattgagagaggcgaggtcaatcgtcgaagtgcgaataatttttattccatgattcagagcgccaacagtcatgttcggaggctggtaaatgaaaaggcagcacacgagaaggacatggaggaggccaaagaaaagttcaagcaggctctgtcaggcatccttattcagtttgaacagatagtagctgtttaccactcagcttctaaacagaaggcctgggatcattttactaaggcacagagaaaaaacattagtgtatggtgtaagcaggcggaagagatccgcaacatccacaatgatgagctgatgggcatacggcgagaggaagaaatggaaatgagcgacgacgaaattgaagaaatgactgagacaaaagagacggaggaaagcgccctcgtttcccaagccgaggcactcaaggaggagaacgattccctgagatggcagttggatgcgtatcgcaatgaggtcgagctgctcaagcaagagcagggcaaggtgcaccgcgaggacgatccaaataaggagcagcaacttaaactactgcagcaggcccttcagggcatgcagcagcaccttcttaaagtgcaggaggagtataagaagaaggaagccgaactggaaaaactcaaagacgacaagctacaggtggaaaagatgctggagaacctcaaagagaaggagagctgcgcctcgagactgtgcgcctccaaccaggactcagaatacccgcttgagaagactatgaactcatcccccatcaagagtgagcgggaggccctcctggtgggcatcatatcgacctttctgcacgtgcacccgtttggagcttcgatcgaatacatatgcagctatctgcaccgcctagataacaagatttgcacctcagatgtggaatgcctaatggggcggctgcagcacacctttaagcaagaaatgaccggtgtgggcgcaagtcttgagaagcggtggaaattctgtggcttcgaggggctgaagctcacatag

SEQ ID NO: 115487 - DNA, 1131 bp, synthetic construct
  misc_feature 1..1131: note = Description of Artificial Sequence: Synthetic coding sequence
  source 1..1131: mol_type = other DNA
atgaccctcccgatgtccgaccctacagcctgggctaccgcaatgaataacctcgggatggctccattggggattgccggacagccgatcttgcccgattttgatccagctctcgggatgatgactggcattccccccattactccaatgatgcctggccttggcattgtgcctcctcccattcccccagatatgccagtagtcaaggagatcatccactgtaagtcctgtacactttttccacccaatcctaacctgcccccacccgcaacaagggagcgtccgcctggctgcaaaacagtattcgtgggcggcctccccgagaatggcaccgaacagattatagtggaggtgtttgagcagtgtggggagattattgccatccggaagagtaagaaaaacttttgtcatattaggttcgccgaggagtacatggtggacaaggccctctatctttccggttacaggatcagattgggctcaagcacggacaaaaaggatactggccggctccacgttgattttgcacaggccagggacgacctgtatgaatgggaatgcaaacagcgtatgctcgcccgcgaagaacggcaccgacggcggatggaagaggagaggctcagacccccgtctcctcctcctgtggtgcattatagtgatcacgagtgctctatcgtggccgaaaagcttaaggatgacagcaagttcagcgaagccgtgcaaacccttctgacatggatagagaggggcgaggtaaacaggagatccgcgaataacttctattcaatgattcagtctgcaaatagtcacgtacgacgcttagtgaacgaaaaagctgcccatgaaaaagacatggaggaagcaaaggaaaagttcaaacaggcgttgagcgggatactgatacaatttgaacagatcgttgccgtgtaccactcggcatccaagcagaaagcttgggaccacttcaccaaagctcaacgcaagaatatctcagtctggtgcaagcaagctgaagagattaggaacatccataacgatgagctcatgggaattagacgcgaagaagaaatggagatgtcggatgacgagatcgaggagatgactgagacaaaggaaaccgaggaaagttag

SEQ ID NO: 115488 - DNA, 1407 bp, synthetic construct
  misc_feature 1..1407: note = Description of Artificial Sequence: Synthetic coding sequence
  source 1..1407: mol_type = other DNA
atgactcttcccatgagcgacccaactgcctgggcaactgcaatgaataacttagggatggctcccttgggcattgctggccaacccattcttccagatttcgaccccgccctaggcatgatgaccggcattccaccaatcaccccaatgatgccaggattggggattgttcctccccccattccacccgacatgccagtcgtcaaggagataattcattgcaaatcctgcaccctctttccacccaacccaaacctccctccaccggcaacccgggagcggccgcctggatgtaagacagtatttgtggggggactcccagagaatggcacagagcaaataattgtggaggtctttgaacaatgtggagaaattatagctatcagaaaaagcaagaagaacttttgtcacatccgttttgccgaggagtatatggtggacaaggccttatatctcagcggctacaggatcaggctgggctcttccaccgacaagaaagatactggcagactgcatgtggatttcgctcaggcccgagacgatctttacgaatgggagtgcaagcagcgcatgctcgcccgggaagaacgccaccggagacgcatggaggaggaaagattgcgtccgccctcccccccacccgtagtccactactccgatcatgaatgcagcatagtggctgaaaagttgaaggatgatagcaagttttctgaagctgtccagacgctgctgacctggatagagcgtggagaggttaaccgacggtccgccaacaacttttactccatgatccagagcgcgaactctcatgttaggcgactggttaatgagaaggcagcacatgaaaaagacatggaggaggcaaaagaaaagtttaagcaggccttgagcggaattctgatccaattcgagcagatcgtcgcagtttaccacagcgcatctaagcagaaggcatgggatcactttacaaaagcacaaagaaagaatattagtgtctggtgtaaacaggctgaagagataagaaacatacacaatgacgagctgatggggataagaagagaagaagaaatggaaatgagtgacgatgagattgaggaaatgactgagaccaaagaaactgaggaatcggccctcgtgtcacaggccgaggcactgaaagaagaaaacgattctctgaggtggcagttggacgcctatagaaacgaagtggaactgctgaagcaggagcagggaaaggtgcatcgggaggacgacccaaacaaggaacagcagctgaagcttttgcagcaggcacttcagggcatgcaacagcacttactgaaggtgcaggaggaatacaagaagaaggaggccgaactggaaaaactgaaggacgacaaattgcaagtggagaaaatgaaaaaatag

SEQ ID NO: 115489 - DNA, 1119 bp, synthetic construct
  misc_feature 1..1119: note = Description of Artificial Sequence: Synthetic coding sequence
  source 1..1119: mol_type = other DNA
atggaatctgaagaactggcagatcgggttctcgatgtggtggagagatccctcagcaattatcccttcgattttcagggtgcccgcatcatcaccggccaagaagagggcgcctacgggtggatcaccataaattacctgctgggtaagttttctcagaagaccaggtggttttccattgtaccttacgaaaccaataaccaggagactttcggtgcccttgatctaggtggcgcctcgacccaggttacattcgtgccgcagaaccagactattgagagcccggacaatgcactccaatttcgactctacggtaaggattataatgtttacacccattcctttctgtgttatgggaaagaccaagccctgtggcagaaactggccaaggatattcaggtcgcatctaacgagatcctcagagacccctgcttccaccccggctacaaaaaagttgttaatgtcagcgatctgtataagacgccctgtactaagagattcgaaatgacactgcccttccagcagtttgagattcaggggataggtaactatcagcaatgccaccaatccatcctcgagctttttaacacgtcctactgcccctatagtcagtgtgcttttaatggcatcttccttccacctctgcagggggacttcggagctttcagcgcgttttacttcgtgatgaagttcttgaaccttacgagtgagaaggtatcacaggagaaagtgacggagatgatgaagaagttctgtgcccaaccctgggaggaaatcaagacctcttacgccggcgtcaaggaaaaatacttgtctgaatattgtttctctggcacctatattctgagcctgcttctccagggttaccattttaccgcagacagttgggagcatattcattttataggtaagatccagggctccgacgcagggtggacactggggtacatgttgaatctaaccaatatgattcccgctgagcagccactgtccacaccgctgtctcattcaacctacgtctttctgatggtactctttagcctcgttctgtttaccgtggctattatcgggctgctgatctttcacaagccaagctatttctggaaggatatggtatag

SEQ ID NO: 115490 - DNA, 1533 bp, synthetic construct
  misc_feature 1..1533: note = Description of Artificial Sequence: Synthetic coding sequence
  source 1..1533: mol_type = other DNA
atggaagacaccaaagaatctaacgtgaaaaccttttgctcgaaaaatatattggcaatcctgggcttctcatcaattatcgcggtaatcgctctcctagccgttggccttacgcagaacaaggcgcttccagagaacgtgaagtacggcatcgttctcgacgccgggtcctctcacactagcttatatatctacaaatggccagctgagaaggagaacgacacaggcgtcgtgcaccaggttgaggagtgtcgcgtaaagggacctgggatctctaaatttgttcagaaggtgaacgaaattggtatttatctaaccgactgtatggaacgagcaagagaggtgatcccccggtcacagcaccaggaaacaccagtgtatctgggagcaacagcaggcatgcggcttttgagaatggagtccgaggagctcgcagaccgggtgctggatgtggtcgagcggtctctgagcaattatccttttgacttccaaggggcgagaataataacaggacaggaggagggcgcctatgggtggatcacgatcaactacctgctgggcaaattctcacagaagacgagatggttttcaattgttccttacgagaccaataatcaagagacatttggggctcttgacctgggtggcgcctctactcaggtgacttttgtgccgcagaaccagacaattgagagccctgacaacgcactccagttccggctgtacggaaaggattacaatgtgtacacgcacagctttctctgctacggcaaagaccaggctctttggcaaaagctagccaaggatatccaggtagcttccaatgagattctgagagacccttgtttccaccctggttataaaaaggtagtaaacgtgagcgatttgtacaagacaccatgtactaaacgcttcgagatgactctcccatttcagcaattcgagatccagggcattggtaattatcagcaatgtcaccagagtattctagaacttttcaacaccagctattgcccatattcacagtgtgcgtttaacgggatttttcttccgcccttacagggtgacttcggggcttttagtgccttctactttgtcatgaaatttctcaatctgacaagtgaaaaggtcagccaggaaaaagtgactgaaatgatgaaaaagttttgcgctcagccttgggaggagatcaagacctcctatgccggtgttaaagagaagtacctgtcggaatactgtttctcaggtacctacattctatctctgttgttacagggatatcacttcacagcagactcctgggagcacatccacttcataggtaagatccagggttcagatgctggctggacactcggctacatgttgaacctcacgaatatgattccagcggaacagcctctttctacaccactctcacattccacctacgtgttcctgatggtcctgttttccctggttctcttcactgtggcgattatcggactgcttatctttcataaaccttcctacttttggaaagatatggtatag

SEQ ID NO: 115491 - DNA, 921 bp, synthetic construct
  misc_feature 1..921: note = Description of Artificial Sequence: Synthetic coding sequence
  source 1..921: mol_type = other DNA
atgaaggggactaaggatcttacttcccaacagaaggagtccaatgtcaagactttttgcagcaaaaacatactggccatcctggggtttagttcaataatcgcggtcattgctctgttggccgtcggactcacacagaacaaagccctgccggagaatgtgaaatacggcatagtcctggacgcaggaagcagccacaccagcttgtacatctacaagtggcctgccgagaaagagaatgacactggcgtggtgcatcaggtagaggagtgtagggtgaaaggacccggcattagtaagtttgtgcaaaaggtgaatgaaataggtatctacttgacagactgtatggagcgagctagggaggtcattccacggtcccagcaccaagagacgcctgtgtatctgggcgcaacggcaggtatgcgattgctcaggatggagtccgaggagctggcggatcgcgtcctcgacgttgttgagcggtctctctcgaattatccatttgatttccagggcgctcggatcatcaccggacaagaggagggcgcctacggatggatcacaattaactatttactgggcaaatttagccaaaagacccgttggtttagtatagtgccatacgagaccaacaatcaggaaacttttggtgcacttgacctcggcggcgctagcacccaggtgacgttcgttcctcagaaccagactatagagtcacctgacaatgcactgcagtttagattatatggtaaggattacaacgtgtacacacactctttcctgtgctacggaaaagatcaggcattatggcagaagttagccaaagacatacaggccagcataacccagtccaggccggctccctttacaagtgcccccccagcccccaccagctgttgctttctgttccagattcagtag

SEQ ID NO: 115492 - DNA, 1569 bp, synthetic construct
  misc_feature 1..1569: note = Description of Artificial Sequence: Synthetic coding sequence
  source 1..1569: mol_type = other DNA
atgggccgagaagaactttttctgacctttagcttttccagcggattccaagagtccaacgtcaagactttctgtagtaagaacatccttgccatcctcgggttctccagcattatcgctgtgatagctctcctcgcagtgggactcacccaaaacaaggctcttccagaaaacgttaaatatgggatcgtgctagatgccggcagcagtcacacatctttgtatatctataagtggccggccgaaaaagaaaacgacacaggagtagttcatcaggtggaggaatgccgggtgaaaggaccaggcatatccaagttcgtgcagaaagtgaacgagatcggaatctacttaactgactgcatggaacgggctagggaagtgattccacgctcccagcaccaggaaacaccagtatatctcggggcaaccgctggcatgcgcctcctgagaatggagtctgaagagctggccgatcgggttctggacgtcgttgaaagaagtctgagcaattatccctttgactttcagggagcgcgcattataacaggtcaggaggagggagcttatggatggatcacgatcaactaccttctgggcaagttctcccaaaagacccggtggttttctatcgtcccatatgaaactaacaaccaggaaacctttggggccctcgatcttgggggagccagcacgcaggttacctttgtgccccagaaccaaaccatcgagtctccggataatgcgctgcaatttagattgtacgggaaggactataacgtttatacacattcttttctgtgctacggcaaggaccaggccttatggcagaagctggcaaaagatattcaggtcgcatctaatgagatcttgagggacccctgcttccaccccggatataaaaaagtggtcaatgtttccgacctttacaagactccatgcactaaacgcttcgaaatgactttgccgttccagcagttcgaaatccaaggcatcggaaactaccagcagtgtcaccagagtatcctggaattatttaatacttcatactgcccttacagccagtgtgctttcaacggcatcttcctccccccacttcagggtgactttggagccttttccgccttttactttgtgatgaagttcctgaacttgacatccgagaaggtaagtcaggaaaaagtgaccgagatgatgaaaaaattctgtgcgcagccatgggaagaaattaaaacatcatacgcaggggtcaaggagaaatatctcagcgaatactgtttcagcggtacgtatatcctgtcactcctgctgcaggggtatcacttcactgcagattcttgggagcacattcacttcattggaaaaatacaggggagtgatgccggctggaccctgggttacatgctcaatctcacaaatatgattcctgctgagcagccactctccactccactcagtcattctacttacgtgttcctgatggttctcttcagcttggtgctatttaccgtagcgatcattgggttgttgatctttcacaagccctcatatttctggaaagatatggtgtag

SEQ ID NO: 115493 - DNA, 1554 bp, synthetic construct
  misc_feature 1..1554: note = Description of Artificial Sequence: Synthetic coding sequence
  source 1..1554: mol_type = other DNA
atgaaggggactaaggatctgacaagccaacagaaggagtccaatgttaagacattctgttcgaaaaacattctggcaattcttggcttctcgagcattattgcggtgatcgcattactcgcagtagggttgacccagaataaagcccttccagaaaacgtcaagtacggcatcgttctggatgccggtagttctcatacatcactatacatttataagtggccggccgagaaagagaatgacaccggcgtggtccaccaggtagaagagtgtcgcgtcaagggccccggaattagcaagttcgtgcaaaaagtgaacgaaattgggatatacttgacagattgcatggagagggccagagaagtcataccacgctcccagcaccaagaaacgcccgtttacctgggggctaccgctggaatgcggctgctgcggatggagtccgaagagctggccgacagagtcctcgacgtggtggagcgaagcctgtccaactatccttttgattttcagggcgcccgcatcatcaccggccaggaagagggtgcgtatggatggattacaatcaactacctcctcggtaaattctctcagaagactcgttggttcagtattgtgccttacgagactaataatcaagagacatttggcgcactagacctgggcggggcgtccacccaggtaacattcgttccgcagaaccagaccatcgaaagccccgataacgctttgcagttccgcctctacgggaaggactacaatgtctacacgcacagcttcctgtgttatggaaaagatcaagccctgtggcaaaaactggctaaagacatccaggtagccagtaatgagatcctacgtgatccttgtttccatccaggctataaaaaggtagttaacgtgagtgatctgtataaaacaccctgcacaaaaaggttcgagatgacattaccattccagcaattcgagatccaggggatcggaaactaccagcagtgtcaccaaagcatcttagagctctttaatacatcatattgcccctactcccaatgcgctttcaatggaatatttctccccccgctgcagggggatttcggggcgttctctgctttctattttgttatgaagtttctgaatctgaccagcgagaaggtgagccaggaaaaagtcacagagatgatgaaaaagttctgtgcgcagccttgggaggagataaaaacatcctatgcaggcgtcaaggaaaagtacctgtcagagtactgcttcagcgggacatacatcctttccctgttacttcaagggtaccattttaccgccgacagttgggaacacatccattttattggaaaaattcagggaagtgacgccggctggactctggggtatatgctcaacctgacgaacatgatccccgccgaacagccactgtccactcccctttcccattctacatatgtcttcctcatggttctgttctcactagttctgttcaccgtggccattattggcctgctcattttccataaaccgtcttacttctggaaagatatggtgtag

SEQ ID NO: 115494 - DNA, 1119 bp, synthetic construct
  misc_feature 1..1119: note = Description of Artificial Sequence: Synthetic coding sequence
  source 1..1119: mol_type = other DNA
atggagagcgaagagctcgccgatagagtcctcgacgtggtcgaacgcagcctgagcaattatccctttgactttcaaggcgctcgcattatcaccgggcaggaagagggagcgtatggctggattactatcaactatctcctagggaaattctcacagaagaccaggtggttctcgattgtcccctacgaaaccaataatcaggaaacgttcggcgctttagatcttggcggcgcatctacacaagtgacgttcgtgccacagaatcaaaccatcgaatctccagataacgccttacagttcagactgtacgggaaagactacaatgtttacacacactcgttcctctgttacggaaaggatcaggccctatggcagaagctggcaaaggacattcaggtggcctcgaatgagatcctcagagacccctgcttccacccagggtacaagaaagtggtgaacgtgagcgatttgtacaagaccccttgcacaaaacgcttcgagatgacactaccattccagcagttcgaaatacagggaatcggtaattaccaacagtgccaccagtccattctggaactgttcaacacctcatactgcccttactcacaatgcgcgtttaatggaatctttctccccccactgcagggggattttggagctttctcagcattctactttgtgatgaagttcctgaatttgacctcagagaaagtgagccaggagaaagtgaccgagatgatgaagaaattctgtgctcaaccatgggaggagattaagacctcatatgctggcgtcaaagagaagtatctgtcggaatactgtttttccggcacttacatcctgagtttactgcttcaggggtatcacttcacagcagatagctgggagcatattcatttcatcggcaagatccaaggtagtgatgcgggatggactttgggatatatgcttaatctcactaatatgatccccgccgagcagcccctctctaccccattgtcccattcaacctatgtattcctcatggttctcttcagcctagtactgttcactgtggcgataattggattgctgatcttccacaagcctagttatttctggaaggatatggtctag

SEQ ID NO: 115495 - DNA, 1209 bp, synthetic construct
  misc_feature 1..1209: note = Description of Artificial Sequence: Synthetic coding sequence
  source 1..1209: mol_type = other DNA
atggagcgggcaagagaagtcattcctcggtctcagcaccaagagacccccgtttatcttggcgccaccgccggcatgcggcttctcaggatggaaagcgaagagttggccgaccgcgttctggacgtggtcgaacgttcactgtctaactatccttttgattttcagggggccagaattatcacgggccaagaggagggcgcatatggctggattaccatcaactaccttttggggaaatttagtcagaaaaccaggtggttcagcattgtcccttacgagaccaacaaccaagaaacctttggagcactcgacctgggaggagcatccactcaagtgacgtttgttccccaaaaccagaccatagaaagtcctgataacgcattgcagttcaggctttatggcaaggactacaatgtctacacgcatagctttctatgctacggtaaggatcaggccctgtggcagaagctggcgaaggacatacaggttgcaagcaatgagatccttagagacccttgtttccatccgggctacaagaaggtggtgaacgtgagcgatctgtacaagacgccatgtacaaagaggttcgagatgactctaccatttcagcagtttgaaatacaaggcataggtaattaccaacagtgtcaccagtctattctggagttgttcaacaccagctactgtccttatagtcagtgtgcatttaatgggattttcctgccccctctgcagggggacttcggcgcatttagcgcgttttattttgtcatgaagttcttgaacctcacttcagagaaagtctcacaggaaaaggtgaccgaaatgatgaaaaaattttgcgcccagccctgggaagagattaagacgtcctatgcaggcgtaaaggagaaatatctcagcgagtactgcttcagtggcacttatattctcagcctcctgttacagggctaccatttcaccgctgattcctgggaacacattcactttatcggcaaaatacagggctcggatgcaggttggacattaggttacatgctgaaccttactaatatgatacccgccgagcaacctctttctactcctctctcgcattctacctacgttttcctcatggtgctcttctccctagtgctcttcaccgtggccatcattggactgctgatctttcataagccgtcgtacttctggaaggatatggtgtag

SEQ ID NO: 115496 - DNA, 1419 bp, synthetic construct
  misc_feature 1..1419: note = Description of Artificial Sequence: Synthetic coding sequence
  source 1..1419: mol_type = other DNA
atggccggcaaagtgcgatctctcctgcctccactactgttggcagcggccgggcttgcagggcttcttctgttatgcgttcccactagagacgtgcgggagccacctgctctcaaatatggtatcgtactggatgcaggctcgtcacatacaagcatgtttatatacaagtggccagctgacaaggagaacgatacagggatcgtgggccaacactcttcctgcgacgtcccaggcgggggcatatcgagctacgctgataacccaagtggcgcatcccaatcattagtgggttgcctcgaacaggcccttcaagacgtaccaaaggagagacacgcggggacgcccctctacttgggcgcgactgcaggtatgaggctgctgaatctcacaaacccggaggccagcactagcgtgctgatggccgtgacccatacactgactcagtaccccttcgattttaggggagcacgaatattaagcggacaagaggagggagtcttcggctgggtgaccgccaactatcttttagagaattttattaagtatggttgggtaggacgctggtttcggcctcgtaaaggaaccctcggcgccatggacctaggaggcgcttcaacccagattacatttgaaacaacaagcccagcagaagatcgggcttccgaagtgcagctacatctgtacggtcagcactaccgggtgtatacacattcctttttatgttacggacgggaccaggtgctccagcggctgttagcctctgccctgcagactcacggatttcatccgtgttggcccaggggattctctacccaagtgctcctgggagacgtttaccaaagtccttgcacgatggcccagcgccctcaaaacttcaatagcagtgcaagggtctccctgtccggctcttctgacccccatctctgccgggacttggtgtcggggctcttctctttcagttcttgtcctttctccagatgtagttttaatggagtgtttcagcccccagtggccggaaattttgtggcgttctcggcattcttttataccgtggactttctgcgcacatcaatgggtctacctgtcgcaactctgcaacagctggaagcagcagctgtgaatgtgtgcaaccagacttgggcccagcagctgctctcacgggggtatggctttgacgaacgcgcgttcggcggagtgatatttcagaaaaaagctgcggacaccgccgttggatgggcgctgggctacatgctgaacttgacgaatctgatccccgccgaccctcccggcctccgaaagggcaccgatttctcttcttgggttgtgctactcctcctgttcgccagtgccctcctggctgccctcgttctcctacttcggcaggtgcattcagcaaagctgccctcaactatatag

SEQ ID NO: 115497 - DNA, 1488 bp, synthetic construct
  misc_feature 1..1488: note = Description of Artificial Sequence: Synthetic coding sequence
  source 1..1488: mol_type = other DNA
atggccggaaaagtgcgctccttgttgccgccactactgctggccgctgccggactggcaggcctcctgctactctgtgtgcctaccagagacgtgagggagcccccagctctcaaatacgggatcgtgctggacgctggttccagccacaccagtatgttcatttacaagtggccggccgacaaggagaacgataccggcatagtgggacagcattcctcttgtgacgttccggggggcggtatctccagctatgcagataatcctagtggagcgtcccagagcctggtcggctgcttggagcaggccctccaggatgtccccaaggagcggcatgcaggcactccgctgtatctgggagctacggccggaatgcgcctgctgaacttgacaaaccctgaagcctcaacgagtgtcctgatggccgtaacccacacgctcacccaatatccttttgactttcgaggtgcccggattttgtccggacaggaggagggggttttcggctgggtgactgcgaattaccttctggagaattttattaagtacggttgggtgggccgttggttcagaccccgcaagggcaccctgggcgcaatggacctgggtggggcctcaacacagattacattcgaaaccaccagcccagccgaggacagagcatctgaggtccagctgcatctgtatggacaacactacagggtatacactcactcctttctctgctacggcagggatcaggttcttcagcgtttgctggcttctgcactgcagacacatggattccacccatgctggccgcgcggtttctccactcaggtgttgcttggtgacgtttatcaaagcccttgcacgatggcacaaagaccccaaaattttaacagctccgcccgggtttctcttagtggctcttcagatccacatctttgcagggacctggtctctggtctgttttctttctccagctgtccattttcgagatgttcattcaatggcgtctttcagccgccggtggctggaaacttcgtggccttttccgcctttttttataccgtggatttcctgcgtactagcatgggtctgccagttgccaccctgcaacagttagaggcagctgctgtcaatgtgtgtaaccagacgtgggctcaactgcaggcccgcgtgcctggtcaacgcgcccgactggccgactattgtgctggagctatgttcgtgcaacagctgttatcccgcggatacggattcgatgagcgagcatttggaggtgtgatcttccaaaagaaggctgcagacacagccgtaggttgggcattggggtacatgcttaacctgacgaacctaatccctgccgatccacctggcttacgaaaagggaccgatttctcctcgtgggtggtacttctattgctctttgcctcggccctgttggcggctctggtgctcctgctgcgacaggtgcacagtgctaaactccccagcaccatctag

SEQ ID NO: 115498 - DNA, 1590 bp, synthetic construct
  misc_feature 1..1590: note = Description of Artificial Sequence: Synthetic coding sequence
  source 1..1590: mol_type = other DNA
atgttcacggtgctgacacgtcagccatgcgagcaagcaggtttgaaagcattataccggaccccgacaattatcgccctggttgtattacttgtgtcaatcgtggttttagtctccattacagtgatccagattcacaagcaggaggtgctcccacctggactgaagtacggaattgtgctcgatgctggaagcagcagaaccaccgtctatgtgtaccaatggccagctgagaaagagaacaacacaggcgttgtcagccagaccttcaaatgttcagtgaaggggagcggaatttcatcgtacggcaataacccgcaggacgtacctcgagccttcgaagaatgtatgcaaaaggttaaaggacaggttccaagccatcttcacgggagcactcctattcatctgggcgccacggcaggtatgaggctgcttagacttcaaaatgaaacagccgccaacgaggtgctggagtcaattcagagttatttcaaaagtcagccatttgatttccgtggggctcagataatttccggtcaggaggaaggggtttacggatggatcacagccaactacctcatgggcaatttcctagaaaagaatctgtggcacatgtgggtgcacccccatggcgtggagacaaccggcgcactggacttgggcggagcgtccacacagatctcttttgtggctggagagaagatggacttgaacacatccgatataatgcaggtaagcctgtatggctatgtttataccctgtacactcatagcttccaatgctacggccggaatgaggctgaaaagaaatttctggctatgctgctgcagaacagccccacaaaaaaccatttaacaaacccctgctatcctagggactactctatttccttcaccatgggtcatgtgtttgattctctttgcaccgtggaccagcgccctgaaagttataaccccaatgacgtgatcactttcgaaggtactggcgacccttccctgtgcaaagagaaagtggcatctatctttgactttaaggcgtgccacgaccaagaaacctgcagttttgacggcgtctaccagccaaagattaagggcccattcgtggcttttgctggcttctactatacagcatccgccctgaacttgagtgggtcttttagtcttgacacatttaactctagtacctggaatttctgcagtcagaactggtcacaactgcccctgctactgcctaagttcgacgaagtgtacgctcgctcttattgcttctctgccaactacatttatcacctgttcgtgaatggatataaatttaccgaggagacctggccacagatccactttgagaaggaagtggggaattcctccatcgcatggagtcttggctatatgttatcgctcaccaaccaaataccggctgagtcccctcttatcagactgcctatagagccacccgtctttgtaggtactttggccttcttcacggctgccgcgttactgtgtttggcctttctggcttacttgtgtagtgccacccggagaaaacgacactccgaacatgcctttgatcatgctgtggactcagattag

SEQ ID NO: 115499 - DNA, 1590 bp, synthetic construct
  misc_feature 1..1590: note = Description of Artificial Sequence: Synthetic coding sequence
  source 1..1590: mol_type = other DNA
atgttcactgtgctgaccagacagccctgcgagcaggcggggctgaaggccctgtaccggaccccgactattatcgccctggtggtgttgttagtgtcaatagtagtgctggtcagtattaccgtaattcagatccacaaacaggaggtcttacctccgggcctgaagtacggtatcgtgctcgacgccggttcctcacgcacaacagtctatgtgtatcagtggcccgctgaaaaggaaaataataccggcgtcgtgtcacaaacttttaaatgctctgtgaaagggtctggtatcagcagctacggcaataacccacaagatgttcctcgcgcctttgaggaatgcatgcagaaggtcaagggccaagttccctcacacctacatggctccactcctatccatttgggtgctactgccggcatgcgattactcaggcttcagaacgagaccgccgccaacgaagtgcttgagtcaattcagtcctacttcaaatcacagccatttgacttcaggggtgcccagataatttctggacaggaagagggtgtatacggctggataactgccaattatctgatgggcaacttcctggagaagaacttgtggcatatgtgggttcacccacatggagttgagacaaccggggctttggacctcggcggggcgagcacgcagatctcctttgtcgccggggagaagatggacctgaacactagcgacattatgcaggtgagtctgtacggttacgtatataccctctacacgcattcttttcagtgttatggaaggaacgaagcagagaaaaaattcctggccatgctgcttcagaattccccgacgaagaatcatctaaccaacccctgttaccccagggattactcaatcagcttcactatgggccacgtcttcgattccctttgcactgtcgaccaacgaccggaatcttacaatccaaacgatgtcattacattcgaaggaactggtgatccctcactgtgcaaagaaaaagtggcatctatcttcgatttcaaagcttgccacgaccaagaaacttgttcctttgacggagtgtatcagccaaagattaagggcccgttcgtggcttttgcaggcttctactataccgccagtgcactaaacctctctggctctttttctctggacacctttaattcatcaacgtggaacttctgttctcaaaactggtctcagctccccttactgctgcccaaatttgatgaggtgtacgctagatcttattgtttttctgccaactatatctaccacctctttgtcaacggatacaagttcactgaggaaacctggccccagatccactttgagaaagaggtgggaaattcttccatcgcatggtctctcggctacatgctgtccctgaccaaccagatcccagccgagtcccctcttatacgcctcccgatcgagcccccagtttttgtaggcactctcgccttttttaccgctgccgctctcctgtgcctggccttccttgcgtacctttgttcagcaacccggaggaaacgtcatagcgagcatgcgttcgatcacgcagttgacagcgactag

SEQ ID NO: 115500 - DNA, 1287 bp, synthetic construct
  misc_feature 1..1287: note = Description of Artificial Sequence: Synthetic coding sequence
  source 1..1287: mol_type = other DNA
atggctacctcctggggtactgtattcttcatgttagtcgtcagttgtgtctgcagcgcggtcagccaccggaatcagcagacctggtttgagggcatctttctatccagtatgtgccccatcaacgtgtccgctagcactttgtatggtatcatgtttgacgcaggctctaccggaacacgcattcacgtgtacaccttcgtgcaaaaaatgcccggccaactgcctatcctcgagggagaggtttttgacagcgtgaaacccgggctaagtgcctttgtggatcagccgaagcagggagctgagactgtccaaggtctgcttgaggtggcgaaagactcaattccccggtctcattggaagaaaacacccgttgtgctaaaagctacagctggtctgcggctcctaccagaacataaggccaaggctcttttattcgaggtcaaggaaattttcagaaaatcaccgtttcttgtccctaaaggatcggtttccataatggatggctcggacgagggaattctagcttgggtcactgtcaacttcctcactggacagctgcatgggcaccggcaggaaaccgtcggcaccctggacctcggcggcgcttccacccaaatcacatttctacctcagttcgaaaagaccctggaacagactccacggggttatctaacctcttttgagatgtttaatagcacttataaactctacacccacagctatctgggatttggtctgaaagctgccagactggccacactaggagcacttgagaccgagggaaccgacggccacacctttcgctcagcgtgcctgcctcgttggcttgaggccgagtggattttcggcggggtaaagtaccagtacggcggaaaccaggagggtgaggtcgggtttgagccctgttacgctgaggtcttaagagtggtgaggggcaaactacaccagcccgaggaggtccaacgggggagtttttatgccttctcttattattatgatcgtgccgtggatactgacatgatcgactatgaaaagggaggaatactgaaagtcgaagatttcgagcgcaaagcccgggaagtttgcgacaacctagagaacttcacctcgggttcccctttcctctgcatggacttgagctatatcactgcacttttgaaagatggattcgggtttgcggactctactgtgttgcagctgaccaaaaaagtgaacaacatcgaaactggttgggccttaggcgcaacctttcacttgctgcaatccctgggcatttcccactag

SEQ ID NO: 115501 - DNA, 1404 bp, synthetic construct
  misc_feature 1..1404: note = Description of Artificial Sequence: Synthetic coding sequence
  source 1..1404: mol_type = other DNA
atgcaacctcagcacgggccctggcaaacgcgcatgagaaagatctctaaccatgggtccctccgagtcgcaaaggtcgcatatccactgggcctctgcgtgggcgtgtttatatacgtggcttatatcaagtggcaccgcgccacagccacccaggcatttttttctataacacgagcggcgccgggtgctcgttggggacagcaggcccactcccccctcggcacggctgcagacggacatgaagtgttttatggcataatgtttgatgctggctcgacaggcacacgggtgcatgtcttccagttcactaggccccccagagagacccctacgctgacccacgagaccttcaaggcactgaagccgggcctgagcgcatatgccgatgatgttgagaaatcagcgcagggaatacgtgagctgctggacgtggctaagcaggacatcccatttgatttttggaaagccactccgttagttctgaaagcgacagccgggttaaggttacttccaggggagaaggcccaaaaacttctgcaaaaggtgaaaaaggtttttaaggcttccccttttctggtgggtgacgactgtgttagcatcatgaatggtacggacgaaggggtttccgcttggattactataaactttctgacaggatccctgaagacgcctggtgggtccagtgttggcatgctcgatctgggtggcggatcaactcagatcgcgttcctgccgagagtggaaggaaccttacaggctagtcctccaggttacttgaccgccttgaggatgttcaatcgcacttataagctctattcttatagttacctcggactgggactgatgtctgctcgactggccatcttgggaggggtagaaggccagcccgccaaggacggaaaggagctagttagcccatgcctatcccctagtttcaaaggcgaatgggagcacgccgaagtcacctatcgtgtgtcaggacaaaaggctgcagcatccttacacgagctctgtgcagccagagtttccgaagtcctccaaaaccgagtccatagaactgaagaggtcaagcacgtggacttttatgctttttcatattattacgacctggctgcaggggtggggctcatagacgccgagaaaggtggctcattggtggttggagactttgaaattgccgcaaagtacgtgtgccggactcttgagacccaacctcagtctagcccgttctcttgtatggatctgacctacgttagcctcttgctccaggaattcgggttcccgcgttccaaggtgctcaaactaactaggaagatagacaatgtagaaacctcctgggccctgggagctatctttcactacatcgatagccttaacagacagaagagccctgcgtcgtag

SEQ ID NO: 115502 - DNA, 1452 bp, synthetic construct
  misc_feature 1..1452: note = Description of Artificial Sequence: Synthetic coding sequence
  source 1..1452: mol_type = other DNA
atgaagaagggaatcagatacgaaaccagcaggaagacatcttacattttccagccccaacacggaccttggcagaccagaatgagaaagatttcaaatcacgggtcattgcgagtggccaaggtcgcgtaccccctaggattgtgcgttggagtgtttatctatgtcgcctacataaagtggcacagagctaccgccacacaggcttttttctcaatcacccgcgccgcccctggagcaagatggggtcagcaggcacacagtcccctggggacagcagccgacgggcacgaggtcttctacggcatcatgttcgatgcggggagcactggaactcgtgtgcacgtgttccagtttaccagaccccctcgggagacgcctactttgacccacgaaaccttcaaagcactgaagcccgggctgagcgcttacgccgatgacgtcgaaaagtccgcccagggaattagagaattgttggacgttgcaaagcaggatataccatttgacttttggaaggctacaccactggtgctcaaagccacagccggactgagactcctgcctggagagaaggctcagaagttactccagaaggttaagaaggtcttcaaagcttcaccattcttggtcggcgatgactgtgtgtcaattatgaacggaaccgacgaaggcgtgtctgcctggattaccattaattttttgacaggttcccttaaaacccccggcggtagctccgtgggcatgctagatctcggcgggggtagcacacagattgctttcctgccaagagtggaagggaccctgcaggcctctcctccggggtacctgacggccttgcggatgtttaaccgcacctacaagttgtacagttatagttacttgggactgggtctgatgtccgcgaggctggccatactggggggggtggaaggacaaccggctaaggacggcaaagagctggtgtccccctgtctgtctcccagcttcaagggcgaatgggagcatgccgaggtgacctatagggtgagcggtcagaaagctgctgcatctctgcatgagctttgtgccgcccgggtgtctgaggtactgcagaaccgcgtgcatagaaccgaagaggttaagcacgtggacttttatgcgttttcttattactacgaccttgccgcaggcgtgggactgattgacgcagagaaaggaggtagcctggtggtgggggattttgagattgctgccaagtatgtctgccgcaccctggagactcaacctcagagttctcccttctcctgtatggatctgacctacgtctcccttctactgcaagagttcggatttccaagaagtaaggtgcttaagctgactcgtaaaatcgacaacgtggagacttcctgggccctcggtgccatatttcactatattgatagccttaaccgccaaaaatcacctgcctcctag

SEQ ID NO: 115503 - DNA, 1104 bp, synthetic construct
  misc_feature 1..1104: note = Description of Artificial Sequence: Synthetic coding sequence
  source 1..1104: mol_type = other DNA
atgttcgatgcaggctccacaggcacccgggtgcatgtgtttcagttcacccgcccccctcgcgagacacccactctcacacatgagacttttaaggctctaaaaccaggcctctcggcttacgcggacgacgttgaaaaatccgcacagggtataagagagctccttgatgtggccaagcaggacattccttttgacttctggaaggctacgcccttggttctgaaggccaccgcgggcctgagactgctcccaggcgagaaagcccaaaagttattacagaaagtcaagaaagtgttcaaagcatcaccttttctcgtgggagatgactgcgtctcgattatgaatggaaccgacgaaggagtctccgcctggataaccataaacttccttactggaagcctaaagacccctggtggcagctccgttggcatgctggatctgggtggaggaagtacccagattgcttttcttcctagagtagaggggacacttcaggcctcccccccgggatacctgacggccctccgcatgtttaataggacctataaactttactcctacagctacctggggctggggctgatgtctgctcgcttggccatcctgggcggagtggaaggacaaccagccaaggacggcaaagagttagtgtcaccctgtcttagcccatctttcaagggcgaatgggagcatgcagaggttacttatcgggtttcaggccagaaagctgctgcttccctgcacgagttatgtgccgcgcgcgtcagtgaggtactgcagaacagggttcatcggactgaggaagtgaaacacgttgatttctatgccttctcgtactattatgacttggccgccggggtgggcctcattgatgccgaaaaaggcggctctctagtcgtgggtgactttgaaattgctgcaaagtatggaggtagccacctcgagagggaggggacctgtcttataccttctgtgagcgacccaggggataccgctgcagaacagccactgctgatgcacggaccacaccttaggcaaccagccacccctggagtgagactctctcaggagcagagcgctgaagctcactccgagaactag

SEQ ID NO: 115504 - DNA, 1455 bp, synthetic construct
  misc_feature 1..1455: note = Description of Artificial Sequence: Synthetic coding sequence
  source 1..1455: mol_type = other DNA
atgaaaaagggcatccgatacgaaacttccagaaaaacgtcttacatcttccagcagccccaacacgggccatggcagacaaggatgagaaaaatctcaaatcacggcagtttgagggtggctaaggttgcttaccccctgggcctgtgcgtgggagtgtttatatatgtcgcttacatcaaatggcatagggccaccgccacgcaggcgttctttagtatcacccgggccgctcctggagcccggtgggggcagcaggctcacagtccgctcgggactgccgcggacggccacgaggtgttctacggaataatgtttgacgcggggtccaccggaacccgtgtgcacgtgttccagtttacccgcccacctcgggagacgcccacgctcacacatgagacctttaaggctctcaagcctggcttaagcgcatacgccgacgatgtggagaagagcgcccagggcatcagggagctgctagacgtggccaaacaggatataccttttgatttttggaaagcgaccccactcgtgctgaaggcgactgccggactcaggttactgccgggcgagaaagcccaaaaacttctgcagaaagtgaagaaagtgtttaaggcttccccatttctagtcggcgatgactgtgtctccattatgaacgggactgacgaaggagtgagtgcctggataaccataaattttcttaccggctctctgaaaactcctggcggtagctctgtgggtatgctggatctgggcggtggcagcacacagatagcctttctgccccgcgtcgaaggcacgcttcaggcaagtccgccaggctacctgacggcattgcgtatgtttaatcgaacatataagctttatagttacagttatctgggtctcggactcatgtccgccagactggccatcttggggggggtggaaggacaacctgccaaagacggtaaggaacttgtaagtccctgtctgagccctagcttcaagggggaatgggagcatgctgaagtcacctatagggtcagcggccagaaagccgctgcttccctgcacgaattgtgtgcagcccgagtgtcagaagttctgcaaaacagagtgcacaggactgaggaagtgaagcatgtggatttctatgcatttagctattactatgacctggctgcaggtgtaggcctgatcgacgccgaaaaaggcggaagtctcgtcgttggcgattttgaaattgctgccaaatatgtatgtaggactttggaaacacaaccccagagctcaccctttagctgcatggacctaacgtacgtgtcgttactgctgcaagaattcggctttccacgcagcaaggtcctgaagctgacccgcaagattgataacgttgaaacctcctgggctctgggagccatctttcattacatagacagtttaaaccgacagaagagtccagcatcctag

SEQ ID NO: 115505 - DNA, 888 bp, synthetic construct
  misc_feature 1..888: note = Description of Artificial Sequence: Synthetic coding sequence
  source 1..888: mol_type = other DNA
tgagtcctgaaggcaacggccggcctgcgactcctacctggggaaaaggcccagaagctattgcaaaaggtaaagaaggtgttcaaggccagtccattcctggttggtgatgactgtgtgagtatcatgaatggaactgatgaaggagtctctgcttggatcaccatcaactttctaactggttctttgaagacgccaggaggaagtagcgtgggcatgttggatctgggcggaggatccacccagatcgcatttctgccacgcgtcgaaggcacgttacaggcctcccctcccggctatctgacggctctccggatgttcaatagaacctataaactgtacagttattcatacttgggcctaggcttgatgtcagcccgcttggccattctggggggggtcgagggtcaaccagccaaggacggaaaagagctggtgagcccttgcttaagtccctccttcaagggggagtgggaacacgcagaggtcacctatagggtgagcggccagaaagcagcagccagcttgcatgaactctgtgccgctcgggtaagtgaagttctgcagaatagagtacatagaacggaagaggtcaaacacgtggacttctatgccttctcctactactatgatctggccgccggcgttggactgatcgatgccgagaagggtggctccctcgtcgtgggcgatttcgaaatcgctgcaaaatacgggggttcccatctcgagagggaaggaacatgcttgattccctccgtgtcggaccccggcgacaccgccgcggagcagcctctattaatgcatgggccccatctcagacagcccgctacgcccggggtccgcctgagtcaggagcagagcgctgaagcacatagcgaaaattag

SEQ ID NO: 115506 - DNA, 681 bp, synthetic construct
  misc_feature 1..681: note = Description of Artificial Sequence: Synthetic coding sequence
  source 1..681: mol_type = other DNA
atgccgcagcacggtccttggcagactcggatgaggaaaattagtaatcacgggagtctgcgggtggcaaaggtggcgtatcccctggggctgtgcgtgggtgtattcatttatgtcgcgtatatcaaatggcatagggccactgcgacacaggcctttttcagcattactagggccgcaccaggagctcgatggggtcaacaagcccatagtccactgggaactgccgctgacggtcacgaggtgttctatggaattatgttcgacgctggctccacgggtactagggtgcacgtgtttcagttcacacgcccaccacgggaaactcccaccctgacacacgagacattcaaggccctgaagcccggtttgtctgcgtatgccgatgacgttgagaaagtgaaaaaagtgttcaaagcatcaccttttctggtgggcgatgattgtgtgtctatcatgaacggaaccgatgaaggtgtttccgcatggataactatcaactttctcaccggctccttgaagactcctggcggctcctcagttgggatgttggacttgggcggggggagcacacagattgcctttctccctcgggtggaggggacactgcaggcatcccctcccggctacctcaccgcacttcgaatgttcaaccgcacttacaaactgtattcttattag

SEQ ID NO: 115507 - DNA, 588 bp, synthetic construct
  misc_feature 1..588: note = Description of Artificial Sequence: Synthetic coding sequence
  source 1..588: mol_type = other DNA
atgcagccacaacatgggccctggcagacacgcatgcgtaagattagcaaccatggctcactgcgcgttgccaaggttgcttacccactagggctctgtgtcggggtgtttatctacgtcgcctatattaaatggcatcgggccacagccacacaggcctttttttctattacgcgcgctgcccccggagctaggtggggccagcaggcccacagcccgttggggaccgccgccgatggccatgaggtgttttacggaatcatgtttgatgccggtagtacaggaactcgggtacacgtattccagtttacacgacctccacgggaaacccccaccctcacacatgaaacttttaaggccctaaagcccggtctcagcgcatacgcagacgatgtggaaaaagtaaaaaaagtctttaaggccagccccttcctcgtgggcgacgattgcgtatccatcatgaatggcaccgatgagggcgtgtctgcctggataaccattaattttttaacgggatccctgaagacaccaggcgggtcatcagtgggcatgctcgatctgggaggcggaagcacccagatcgcctag

SEQ ID NO: 115508 - DNA, 903 bp, synthetic construct
  misc_feature 1..903: note = Description of Artificial Sequence: Synthetic coding sequence
  source 1..903: mol_type = other DNA
atgaagaaaggtattcgatatgaaacaagcagaaagacgtcttatatcttccaacaacctcaacatggaccgtggcagacaagaatgaggaaaattagcaatcacgggagtctgcgcgtggcgaaggtggcttacccacttggcctttgcgtgggagtttttatctatgtggcatatatcaagtggcaccgcgccacagccacacaggcattcttcagcatcacgcgggcagcgcccggcgcccgttgggggcagcaagcccatagtcccctgggaaccgccgctgatgggcacgaggtgttttacggaatcatgtttgacgcgggtagtactggtacgagggtgcacgtgttccagtttacaaggccaccaagagagacccctacccttactcacgagactttcaaggccctaaaacccgggctctctgcctacgctgacgacgtcgagaaggttaaaaaggtcttcaaagcctccccctttctagtcggggacgattgcgtttctataatgaatggaacagatgaaggcgtgagcgcctggataactatcaacttccttactgggagcctcaaaacacccggcggcagctctgtgggcatgctggacctgggggggggctctacccagatcgccttcttgccgagagtggagggtaccctacaagcttcccctcccggttatctaaccgcgctgagaatgtttaaccggacgtataagctgtacagctacagctatctaggcttggggctgatgagcgcgcgactggccattctgggcggagtagagggacagcctgctaaagacggaaaggaattggtgagcccatgtctctccccgtcttttaagggagagtgggagcatgctgaagtgacatatcgtgtgagcggacagaaagcctag

SEQ ID NO: 115509 - DNA, 453 bp, synthetic construct
  misc_feature 1..453: note = Description of Artificial Sequence: Synthetic coding sequence
  source 1..453: mol_type = other DNA
tgacctggacggggctctcccaaagatcggctaccccctgccccacgcaaacgggcgttggtgagcgttggggtggccgagcgtgctgttcatgaaactcccactctgacacacgagactttcaaagccctcaaaccagggctgagcgcctatgccgacgatgtggagaaggttaagaaagtcttcaaggcttcacccttcctggttggggatgattgcgttagcatcatgaacggcacggacgagggcgtgagcgcatggatcaccataaatttcttgacaggctctctgaagacacctggaggttcttccgtcggcatgctcgatctgggaggagggtccacgcaaatcgcattcttgcctagagtcgaggggacactccaggcttcaccacctggttatttgacagcactgcgcatgttcaaccgtacttataaactctacagctattag

SEQ ID NO: 115510 - DNA, 1314 bp, synthetic construct
  misc_feature 1..1314: note = Description of Artificial Sequence: Synthetic coding sequence
  source 1..1314: mol_type = other DNA
atgaagaagggaatcagatacgaaacctcaaggaagacatcatacatcttccaacaaccccagcatggcccatggcagacacgcatgcgcaaaatcagcaaccacgggtctctaagggtggccaaggttgcataccctctcggcctgtgtgttggggtctttatttacgtggcctacattaagtggcacagggccactgccacacaggccttcttctccatcacccgggccgccccaggtgcgcgttggggccaacaggcccatagccctctaggcaccgccgccgacggtcatgaggtgttttatggaatcatgtttgatgctggatcaacaggaaccagagtacacgtattccaatttacccggccacctagagaaactccaactttaacccacgagaccttcaaggcgctaaaaccaggtctcagtgcctatgccgatgacgtggaaaaaagcgcccaggggatccgcgagcttttggacgtggcgaagcaagatatcccttttgatttttggaaagccacgcccctcgtgctgaaagcaaccgctggactccggctcctgcccggggagaaagcccagaaactgctacagaaggtcaaaaaagtgttcaaggccagtcccttcctggttggcgacgattgcgtgagcatcatgaatgggaccgatgagggggtgtctgcttggataaccattaatttcttgaccgggtcattgaaaactccaggaggatcgagcgtggggatgctggacctggggggcggcagcacgcagattgcctttctccctcgagtggaaggtaccctccaagcaagcccgccaggatacctcaccgccctgagaatgttcaacagaacttacaagctctactcatactcataccttggactcggcctgatgagcgcacgcctagccattttgggcggcgtcgagggacagcccgctgcatccctccacgaactctgcgccgccagggtgtcggaggtgctgcagaatcgcgtacataggacggaagaggttaaacatgttgacttctatgcttttagctactattacgacctcgctgccggagtggggcttatcgatgcagaaaaaggcggctccctcgtggtaggcgattttgaaattgcagcaaagtacgggggcagccatctagagcgggaaggaacttgcttaatccccagcgttagcgatccgggggacactgccgctgaacagcccttacttatgcacgggccgcatcttaggcaaccggcaacacctggggtaaggttgtcacaggaacagtccgctgaagcgcacagcgagaactag

SEQ ID NO: 115511 - DNA, 945 bp, synthetic construct
  misc_feature 1..945: note = Description of Artificial Sequence: Synthetic coding sequence
  source 1..945: mol_type = other DNA
tgaaatcggggagtagttagcaggggctggcgcccgggatggcggcggcctgggagaggaagccccaaagaccgactgcctcctgctccacgcaagagagccttagtcagcgtcggggttgctgaaagggcggttcacgaaacaccaacccttactcacgagacattcaaggctttaaagcccggactctctgcctacgccgatgatgtggaaaaaagcgcgcaggggatccgcgagttgctggacgttgccaaacaggacattccctttgacttttggaaggctacccccttggtccttaaagctacagcaggcctccggctgctgccaggcgagaaagcacagaagttgctccagaaggtgaagaaagtgttcaaagcgagtccgttccttgtgggagatgattgtgtgtccatcatgaacgggaccgacgaaggcgtctcagcttggattacaataaattttctgaccgggtccttgaaaaccccaggtggttcctccgttgggatgttggacctgggcgggggatccacacaaatagccttcctgccaagagtggaggggaccctccaggcttctccgccaggatatctaaccgcccttcggatgttcaatagaacgtacaaactctatagttatagctacttggggctgggactgatgagcgcaagactggccatcctcggtggagtggagggacagccagccaaggatgggaaagaactcgtctcaccatgcctctcaccctcattcaagggggagtgggagcatgctgaggtgacatacagggtgtctggtcaaaaggccgctgccagtttgcacgaactttgtgctgctcgggtgtccgaggtgctccagaaccgtgtccacaggactgaggaggttaagcatgtggacttctacgcattctcatactattacgacctcgccgctggagttggctag

SEQ ID NO: 115512 - DNA, 567 bp, synthetic construct
  misc_feature 1..567: note = Description of Artificial Sequence: Synthetic coding sequence
  source 1..567: mol_type = other DNA
atgaagaaaggcatcagatacgagacctctcggaaaacgtcctatattttccagccacagcatggtccctggcaaacccgaatgcgaaagatatccaaccacgggtccctgcgggtcgctaaggtcgcgtatcctctgggcctgtgtgtgggcgtttttatctatgtggcctacattaagtggcaccgagcgactgccacacaggcatttttctcaatcactagagcagccccgggagcccgttggggccaacaggcacattctcccctcggaacagcggccgacggtcatgaggtcttctacggaatcatgttcgatgccggctcaaccggcactagggtgcacgttttccagtttacccgcccaccacgagagacacccacgctaacccatgaaaccttcaaggccctcaagcccgggctgagtgcctatgctgacgacgtcgagaaatccgcccagggaattcgcgaactgcttgatgtggccaaacaggatatcccatttgatttctggaaagccacacctctggtgctcaaggccacagcaggccttcgcctgctgccttag

SEQ ID NO: 115513 - DNA, 891 bp, synthetic construct
  misc_feature 1..891: note = Description of Artificial Sequence: Synthetic coding sequence
  source 1..891: mol_type = other DNA
atgcctcagcacggaccatggcagacacggatgcgaaaaataagcaaccatggctctctcagggtcgccaaagttgcttaccctctcgggctgtgcgtgggcgtgttcatatatgtcgcatacataaaatggcatcgggctactgccacgcaggcctttttctcaatcacgagagcagcgccgggcgcccgatggggccaacaagcacactcccctctggggacggccgctgatggtcacgaagttttctatggaataatgttcgacgctgggtccacaggtacacgggtccacgtattccagttcacgaggcccccaagagagacaccaaccctgacccacgaaacctttaaggctctgaagcccggcctgtcagcttacgccgatgacgtagagaagagcgctcaaggtattagagaactcctggacgtagctaagcaagacatcccgttcgacttttggaaggccacgccactggtgctgaaggcaaccgccggactgaggttattaccgggggaaaaagcccagaaactgctgcagaaagtgaagaaagtatttaaagcctcgccatttcttgttggcgacgattgcgtgtcaatcatgaacggcacagatgagggggttagcgcctggatcaccattaattttctcacggggtcactcaagaccccgggtggcagttctgtgggaatgctcgatctcggaggaggtagtactcagatagcgtttctgccaagagtggagggaaccctccaagcttcgccacctggctaccttactgccttgcgaatgttcaacaggacttacaaactgtactcttacagctatctgggactgggcttaatgtccgctagactggcaatcctgggaggcgtcgaaggccagccatag

SEQ ID NO: 115514 - DNA, 936 bp, synthetic construct
  misc_feature 1..936: note = Description of Artificial Sequence: Synthetic coding sequence
  source 1..936: mol_type = other DNA
tagggctctacaggcacgcgcgtccatgtgttccaattcactaggcctccacgggaaacacctactctgacacatgaaacattcaaagcattaaaacccggcttaagcgcctacgccgacgacgtagagaaatcggctcagggaattagggagttgctggacgtggctaaacaggacataccattcgacttttggaaggccacacctcttgtactgaaggcaacagctgggttgaggttactgcctggggagaaggcacagaaactcctccaaaaagtcaaaaaagtcttcaaggcaagtccctttctcgtgggcgatgattgtgtgtcgataatgaatggcacggatgagggtgtttccgcatggattaccatcaacttcctcaccgggtcactgaagactccaggggggagcagcgtcggtatgctcgaccttggaggaggctctacacaaattgcatttctcccgcgagtggaggggacactgcaagcgagtccacctggatatcttactgcccttcgcatgtttaaccgcacgtataagctctactcctactcgtatctaggcctgggccttatgagtgccaggctggcgatccttggaggcgtagagggccagcccgccgctagtctgcacgagctatgtgctgctagagtgagcgaagttctccagaaccgagtgcatcgcactgaagaggttaaacatgtggacttctatgcattcagctactactatgacttggccgcaggggtaggactcatcgatgccgagaagggcggcagcctcgtggtgggagactttgagattgccgctaaatacgtatgtcggactcttgagacacaacctcagagctctcctttctcctgtatggatctcacgtacgtttctcttttgttacaagaattcggttttccacgatctaaggttctcaaatag

SEQ ID NO: 115515 - DNA, 942 bp, synthetic construct
  misc_feature 1..942: note = Description of Artificial Sequence: Synthetic coding sequence
  source 1..942: mol_type = other DNA
aaccgaggagtggtaagcaggggatggaggccaggctggcggaggcccggccgaggctcacccaaggaccgcctcccgcctgcacctaggaagcgggctctggtgtcagtgggagtagctgagcgcgcagtgcacgaaacgccaacactcacccacgaaacgttcaaagccctcaagcccggcctgtctgcatacgctgacgatgtggaaaaatctgcacagggcattagggaactcctggacgtggccaagcaggacatcccattcgacttttggaaggcaactccccttgtgctgaaagccaccgccggtctgcggctgctgccaggcgaaaaggctcagaagctcctgcagaaagtgaaaaaggtgttcaaagccagtccttttttggtcggcgacgattgcgtgagtataatgaatggtaccgatgaaggtgtgagtgcttggatcaccatcaactttttgacaggttccttgaaaactccagggggaagctccgtaggaatgctggatctgggtgggggtagcactcagattgcattcttgccccgagtggagggcactctgcaagcaagcccacctggatacctgacagccttgagaatgttcaacagaacctacaaactgtatagttactcctatctgggactgggtctcatgagtgccaggttggcgatattagggggagtggaaggtcaaccggcgaaggatggtaaggagctcgtgtcaccatgcctttctccgtcattcaagggggagtgggagcacgccgaggtcacttaccgcgtgtctggccagaaggctgccgcttctcttcacgagctgtgcgctgccagggtgtcagaggtcctgcaaaatagggttcatcggactgaagaggttaagcacgtggacttctacgccttttcatattactacgatttagccgccggtgtcggatag

SEQ ID NO: 115516 - DNA, 2778 bp, synthetic construct
  misc_feature 1..2778: note = Description of Artificial Sequence: Synthetic coding sequence
  source 1..2778: mol_type = other DNA
atggaacgggatgggtgcgccggcggcggcagcagagggggagaaggcggcagagcacctagagaaggtcccgcgggaaacggacgcgatagagggaggtcgcacgccgcagaggcccccggtgatcctcaggctgcagcctccttattggctcccatggatgtcggagaggaaccgcttgaaaaagccgctagggcacgtaccgccaaagatccaaacacgtacaaggtgttgtcattggtcctcagtgtctgtgtcctaacaacaattttaggttgcatcttcgggctgaagccttcctgcgccaaggaggtgaaatcctgtaaagggcggtgttttgagcgcacatttggtaattgcagatgcgacgcagcgtgtgtggaactgggaaactgttgtctggactaccaggagacatgcatagaacctgagcacatctggacttgtaataagtttaggtgtggggaaaaaagactgacacggtcgctttgtgcgtgctctgacgattgtaaggacaagggcgattgttgtattaactattcctcagtctgccagggcgagaagtcctgggtggaggagccatgtgagtccattaacgaaccccaatgtccagcaggtttcgagaccccgcctacattgctgtttagcctggatgggttccgggcagaatacctgcacacctggggagggttgttgcctgtcatctctaagctgaagaagtgcggtacctacacgaagaatatgagaccagtctaccctaccaaaacttttcctaaccactatagcatcgtgaccgggctgtacccagagagccacggcattattgataataaaatgtatgatccaaagatgaacgcctccttttccctgaaatctaaagagaagttcaatccggagtggtataaaggggaacctatttgggttactgctaagtatcagggcttgaaatcaggtaccttcttctggcccggctcagacgtggaaattaatggcatttttccagacatctataagatgtataatggctccgtgccattcgaagagcgaattctggcagtgcttcagtggcttcagctccccaaggatgaacggccccatttttatactttatacttggaggagcctgactcatccggccactcttacggcccggttagctccgaagtcatcaaagctctccaaagggttgacggtatggttggtatgctcatggacggcttaaaggagctaaatctgcaccgttgcctgaacctgattctcataagcgatcacgggatggaacagggtagctgtaaaaagtatatctacctgaacaagtacctgggggacgtgaaaaatataaaagtgatatacggcccagccgcccgactccgcccctcggacgtgccggacaagtattacagcttcaattacgagggcattgccagaaacctctcatgtcgtgagccaaaccagcatttcaaaccgtatctaaagcattttcttcctaagagattgcacttcgcgaagagcgacagaattgagccgctcacattctatctggatcctcagtggcagttggccctaaacccgagcgaacggaaatattgcggttctggctttcatgggagcgataatgtcttttccaacatgcaggccctttttgtaggatacggtccaggctttaagcacggtatcgaggcagatacctttgaaaatattgaagtctataatttgatgtgtgacctccttaacctgactccggctcccaacaacgggactcacgggtccctaaatcacttattaaagaatcccgtctatactcctaaacatcctaaggaggtgcatcctctggtgcagtgcccatttaccagaaaccctagggacaatttgggctgttcttgtaatccaagcatccttcccatcgaggactttcagactcagtttaatctcaccgtggcagaagaaaaaataataaaacatgagacactgccctacggaaggccacgagtgctacagaaggagaacaccatatgtctcctgtcccagcatcagttcatgtccggctacagccaggatattcttatgccattatggacctcttatacggttgaccgcaatgactcctttagcactgaagacttctccaattgcctctaccaggacttcaggatacccttgagtccagtacacaagtgcagcttctacaagaacaatactaaggtgagctacggattcctctcccctccacaactgaacaaaaactcatcagggatatacagtgaggctctgctgaccactaatatagtaccaatgtatcaatctttccaggtcatctggagatacttccacgacacactccttagaaagtatgccgaggagcgtaatggtgtgaacgtcgtatctggaccagtctttgacttcgattacgatggacgctgcgactctctggaaaatctgcggcagaaaaggagagtgattagaaaccaggaaatcctgatcccaactcatttcttcattgtactcacctcatgcaaagacaccagccaaacccccctgcattgtgaaaacctggacacattagccttcatcttgccccaccgaaccgataacagcgagagctgcgtccatgggaagcacgactccagttgggtggaggagctcttgatgctgcacagagctcggatcacggatgtggagcacatcacaggactgtcgttctaccagcagcggaaggagccagtgtcagacatacttaagttaaagacacaccttccgacattctcgcaggaggactag

SEQ ID NO: 115517 - DNA, 2592 bp, synthetic construct
  misc_feature 1..2592: note = Description of Artificial Sequence: Synthetic coding sequence
  source 1..2592: mol_type = other DNA
atggccagacgatcctcttttcagtcttgccagatcatctctctgttcacattcgcagtgggcgtgaacatctgtttggggttcactgcacatagaatcaagcgggccgagggttgggaagaaggccctccaacggtgctgtctgatagtccttggacaaatatttccgggtcatgtaagggccgttgctttgaactgcaagaggccggaccaccagactgtcggtgcgacaatctgtgcaaatcgtatacctcttgctgtcacgacttcgatgaactatgcctaaaaactgctagaggttgggaatgtaccaaggataggtgtggcgaggtgaggaacgaggaaaatgcctgccactgcagtgaggattgtctggctaggggcgactgttgcacgaactaccaggttgtgtgtaaaggggagagccactgggtggatgatgattgcgaggagattaaggcagctgagtgcccagctggattcgtgaggccacccctgattatcttttcagtggacggattccgggcatcttacatgaaaaaggggtcaaaggtgatgcccaacattgagaagttacgcagctgcggaactcacagtccgtatatgcgccctgtctacccaactaagacgtttccgaatctatatactttggcaaccgggttataccccgaaagccacgggatcgtgggtaactctatgtacgacccagtgtttgacgctacgttccatctgaggggaagagaaaagttcaaccacaggtggtggggcggacagcccctatggataaccgccactaaacagggggtgaaggcaggcactttcttttggtcagttgtcattccgcatgagagaagaatcctgacaatactccaatggctgacgttgcctgaccacgagcggccatcagtatatgccttttacagtgagcagccagatttcagcgggcataagtacggaccctttggacccgagatgaccaacccactgcgggaaattgacaaaattgtgggccagttgatggacggcctaaagcagttaaaattacataggtgtgttaacgtcatctttgtgggcgaccatggcatggaggatgtgacctgtgatcgtaccgagttcctcagcaactacctcaccaacgtggatgatatcacccttgttcctggaaccctgggcagaatcaggtctaagttttcgaacaatgccaagtacgacccaaaagcaattatcgcaaatctgacatgcaagaagcccgatcagcactttaagccatacctgaaacagcatctgcccaaacgactgcactatgcaaataacagaagaattgaagacatccatctcttggtcgagcgccggtggcacgtggcacggaagcctctggacgtctataaaaaacctagcggcaagtgttttttccagggcgaccacggttttgataacaaagtgaacagtatgcagacagtttttgtgggctatggctcaaccttcaaatataagaccaaggttcccccttttgagaacatagaattgtataatgtgatgtgcgacctcctgggtctcaaacccgcccctaataacggcactcacggctccctgaaccatctattacgcactaataccttccggcccaccatgcccgaagaagttacacggccaaactatcccgggataatgtacttgcagagcgactttgatctggggtgcacctgtgacgataaggtcgagcccaaaaataaactcgatgagctgaacaaaaggcttcatacaaagggttcaacagaggaaagacacctgctctatgggcggccagctgttctgtatcgcacacgctacgatatcttgtaccataccgactttgagtcaggctatagcgagatttttctgatgccgctttggacgtcttacacggtgagtaagcaggccgaggtgtcttccgttccagaccatctgactagctgtgtaagaccggatgtacgggtgagcccgtccttttctcaaaattgtctggcctacaagaatgacaaacagatgtcttatggctttttgttccctccctaccttagctcctctcctgaggcgaaatatgatgccttccttgtgactaatatggttcccatgtatccggctttcaagagagtatggaattacttccagcgcgtcctcgtgaaaaagtatgcttcggaacggaacggggtgaacgtaatctctgggccgatcttcgactacgattacgatggtctgcacgacaccgaggacaagatcaagcagtatgtggaggggtcctctattccagtccccacccactactactcgataatcacttcatgcctggattttactcagcccgctgataagtgcgatggccccctgagtgtgtcttcgtttatcctgcctcaccggccggacaatgaagagtcgtgtaactcgagtgaggacgagagcaagtgggtcgaggagctcatgaagatgcacaccgctcgagtacgggacatcgaacatctgacttctctggatttctttaggaagaccagccgaagctaccccgaaatcctgaccctaaaaacgtatctccacacatacgaaagcgaaatctag

SEQ ID NO: 115518 - DNA, 2748 bp, synthetic construct
  misc_feature 1..2748: note = Description of Artificial Sequence: Synthetic coding sequence
  source 1..2748: mol_type = other DNA
atggcccggagaagcagctttcagagctgccaaataattagcctctttactttcgccgtaggtgttaacatctgcctggggtttacggcgcaccgcatcaagcgcgccgaaggctgggaagagggaccaccgacagtgctgagcgactctccctggacaaatattagcggatcatgcaagggcaggtgcttcgagcttcaagaggcaggtcctcccgattgcaggtgcgacaacctttgcaaaagctacactagctgttgtcacgactttgacgagctgtgcttgaagacagcaagagggtgggagtgtactaaagaccgatgcggcgaagttcgcaacgaggagaacgcatgtcattgctccgaggactgcctggcccgcggtgactgctgtaccaactatcaagtggtgtgcaaaggagaaagccattgggttgacgatgattgcgaggaaataaaagctgcagagtgccctgctggcttcgttcgaccccccctcatcatattcagtgttgatggttttcgcgcctcttatatgaagaagggctctaaagtcatgcccaatatagaaaagcttagatcatgtggcacccacagcccctacatgcgtccagtgtacccaacaaaaaccttcccaaacttatataccctggccaccggcctgtatcctgagtctcatggcattgtcgggaactcaatgtatgacccagtgtttgacgccaccttccatctgcggggacgggaaaagtttaatcatcgctggtggggcggacagccattgtggatcaccgccacaaaacagggtgtaaaggcaggaacctttttctggtcagtggtgatcccacacgagagaagaattcttaccattctgcagtggttgacgctgcccgatcatgaaagacccagtgtgtacgccttctactcagagcagcctgatttttctggacacaagtacggtcctttcggtcccgaagagtccagctatggttcaccgtttactcctgcaaagaggccaaagaggaaggtggctcctaaacgcagacaagaacggcctgttgcccccccgaagaaaagaagacggaaaatccacagaatggaccactatgctgcggagacccgccaggataagatgactaatcctcttcgcgagatagacaagattgtcggtcagctgatggacggccttaagcagctcaagctgcaccggtgtgtgaatgtcatcttcgtgggggaccacggaatggaggacgtcacttgtgatagaaccgagttcctctctaattatctcacaaatgtagacgacattactttagtaccaggtaccctgggccgtatccggtctaaattctcgaacaacgctaaatatgacccgaaagcaattatcgcaaacctgacttgcaaaaaacctgaccagcattttaaaccgtatttgaaacagcacttacccaaacggctgcactacgctaataatcgccggatcgaagacatccacttgctagtggaacgcaggtggcacgtggcacgcaaaccgttagatgtgtataagaaacctagcggcaagtgcttttttcagggggaccatggctttgacaacaaggtgaacagcatgcagacagttttcgtcgggtatggatccacttttaagtataagacaaaggtccccccgttcgagaacattgagctgtataacgtgatgtgtgatctgcttggcctgaagcctgcccccaacaatggaacccacgggtcactgaaccacttattacgcacgaatacctttagacccacaatgccagaggaagtaacaagacctaactaccccggcataatgtatttacagtcagacttcgatctgggatgcacatgcgatgacaaggtcgagccaaaaaataagcttgacgagttaaacaaaaggctgcacaccaagggcagcacagaggagcggcatctgctatacggcaggccggccgtcctttacagaacacgctacgatattctctaccacacagactttgaaagcggttatagcgagatcttcctgatgcccttgtggacatcttatactgtgagtaagcaggcagaggtgagctctgtgccggatcatttgacctcttgtgtgcggcccgatgtcagagtctctccctctttttcccagaattgcctcgcgtacaaaaacgataaacaaatgtcttacggctttttgtttcctccctatctctctagcagccccgaggcgaagtacgatgccttcctggttaccaacatggtccccatgtaccccgcttttaagagggtctggaattacttccagagagttcttgtcaaaaagtacgcatctgagagaaatggagtgaatgtcatttctggacccatatttgattacgattacgatggtcttcatgataccgaggacaagattaaacagtatgtggagggctcaagtattcccgtgcccacacactattactcaattataaccagctgcctggacttcactcagcccgccgacaagtgtgatggtcccttgagcgtctctagctttattttgccgcaccggcccgataatgaggagagttgcaactcatctgaagacgagagcaagtgggtggaagaactcatgaagatgcacacagctcgggtacgagatatcgagcaccttacttccctggacttttttaggaagacaagccgaagctaccctgagattcttactctgaaaacctacctccacacctacgaatcagaaatatag

SEQ ID NO: 115519 - DNA, 2667 bp, synthetic construct
  misc_feature 1..2667: note = Description of Artificial Sequence: Synthetic coding sequence
  source 1..2667: mol_type = other DNA
atggctcgccgctcttccttccagtcctgccagattataagcttgtttaccttcgccgttggggtcaacatttgcctgggtttcaccgcacaccgaatcaaacgagccgagggatgggaggaagggccgccaaccgtgctgtcagacagtccttggactaacatcagtggttcctgcaagggcaggtgttttgaattgcaggaagcagggccccccgactgtagatgtgacaacttgtgtaagtcttatacatcttgttgtcacgacttcgacgaactctgtcttaagactgcccgcggctgggagtgtaccaaggaccgttgtggtgaggtgagaaacgaagagaacgcctgccattgttctgaagactgtttagcccgcggggattgctgtactaactaccaggttgtttgtaaaggagaatcccactgggtggacgacgactgcgaggaaatcaaggccgccgaatgtcccgcagggttcgtgcgtccacctctcataattttttcggttgatggcttccgcgctagctacatgaaaaaagggagcaaggtgatgccaaatattgagaagttaaggagctgcgggactcattccccctatatgcggcccgtataccctaccaagacctttccaaacctctatacccttgcaactggactgtatcccgagtcccacggaatagttggtaattctatgtacgaccctgtgtttgatgctacatttcacctccgcgggcgagagaaattcaatcatcggtggtgggggggacagcctttgtggataactgcaaccaagcagggcgtgaaagcaggcacttttttctggagtgtggttataccgcatgagagaaggatcctgaccatactgcagtggctcacacttcccgaccacgagcgcccatcagtgtacgcattctacagtgagcagcctgacttttccggccacaaatatggacctttcggccccgaaatgacgaaccccctgagagaaatcgataagattgtgggtcagctgatggatggtctcaagcagctgaagctgcataggtgtgtcaacgtgattttcgtgggggatcatggcatggaagacgttacatgcgatcgcaccgaatttctttcgaactacctcaccaatgtcgatgacattaccctcgtgccaggcactctgggcagaattcgttctaagttttctaacaacgcgaagtatgaccctaaggctatcatagccaacctaacgtgcaagaaacctgatcagcatttcaaaccctatctcaagcagcacctccccaaacggcttcactacgccaacaacaggcgaatcgaggacatccacttactggtcgagaggcgctggcacgttgctcggaaacctctggacgtgtacaaaaaaccgtcaggaaagtgtttctttcagggagatcacggtttcgacaataaggtaaactctatgcagactgtctttgtgggttacggaagtacttttaaatacaagacaaaggtgcctccatttgagaatatcgaattatataatgtgatgtgcgacctgctcgggttaaagccagcaccgaacaacggtactcatggttcactgaatcacttactccggactaatacgtttaggcccaccatgcctgaggaggtgacgaggccaaactatccagggatcatgtacctgcaatcagattttgacctcggctgcacctgtgatgataaagtggaaccgaagaacaaacttgacgagctgaataaacgcctccacacaaagggatcaacagaggcagaaactaggaagttccgtggctctaggaacgaaaacaaggaaaacataaatggaaacttcgagcccaggaaagaaagacacctgctttacggtcggccagccgtgctgtaccggaccagatatgacattctgtaccacactgacttcgagagtggctattccgagatctttctcatgccactgtggacctcttacacggttagcaagcaggcagaggtctctagcgtgcccgaccacctgaccagctgcgtgcgccccgatgtgcgcgttagtccttcattctcacaaaactgtctcgcatacaaaaacgacaaacagatgtcttacgggttcctgttccccccctacctgtcatcttccccagaggcgaagtatgatgccttcctggtgaccaacatggtccccatgtaccctgctttcaagcgagtctggaactacttccagagagtgctggttaagaaatacgcatcagagaggaatggcgtgaacgtcatttccgggcccatattcgactatgactatgacggtctccacgacacggaggataagattaagcagtatgtggaaggctcctcaatacccgtcccaacccattattattccattataacaagctgccttgatttcacccagccagcggataagtgtgatgggcctttgagtgtgagctctttcatcctaccccatagaccggacaacgaggagtcttgtaattcatcagaagacgagtctaagtgggtggaggaactgatgaaaatgcatacagctagggtaagagacatcgagcatctgacctcactggatttctttcggaaaacgtcacggtcatacccagagatactgactttgaaaacctatttacacacgtacgaatccgaaatctag

SEQ ID NO: 115520 - DNA, 2628 bp, synthetic construct
  misc_feature 1..2628: note = Description of Artificial Sequence: Synthetic coding sequence
  source 1..2628: mol_type = other DNA
atggagtcaaccctcacgctggctacagaacagcccgtgaaaaaaaacaccctgaagaagtataagattgcctgcatagtgttgctggcattgctcgtgatcatgtccttgggactggggttgggactcggcctgaggaagctggagaagcagggatcctgtagaaagaagtgcttcgacgcgagtttccgtggactggaaaattgtaggtgcgatgtggcctgtaaggatagaggtgattgctgctgggatttcgaagacacatgcgtggagtccacaagaatctggatgtgtaacaagtttagatgcggcgagactcgtctggaggcctccctatgttcttgtagcgacgactgcttgcaacggaaggattgctgcgccgactacaaaagcgtctgccagggcgaaacgtcctggttagaagagaattgcgacacagctcagcagagtcagtgtcccgaggggttcgaccttccacccgtgatcctgtttagtatggatggttttcgtgcagagtatttatatacatgggatactttgatgccaaacatcaacaaattaaagacgtgcggcatccatagcaagtatatgcgggctatgtaccccacaaaaacgtttccaaaccattacacaatcgtcacaggtctttatccagagagccacggcatcattgacaacaatatgtatgacgtaaatcttaacaaaaatttctctctttcatcaaaagagcagaataaccctgcatggtggcacggacagcccatgtggctgactgccatgtaccagggtctgaaagctgctacgtatttttggcccggcagcgaagtggccataaatgggtccttcccctctatatacatgccgtacaatggcagcgtcccttttgaggagaggatctcaaccctgcttaagtggctggatctgccgaaggctgagcgcccaaggttttatacaatgtactttgaagagccagactcaagtggccatgcaggcggtcccgtgagtgctagggtgatcaaagccctgcaggtagtcgatcacgcctttggcatgctgatggaagggctcaagcagaggaacctccacaattgtgttaacatcatcctccttgctgaccatggaatggatcagacttactgcaacaagatggagtacatgactgactacttcccgcggatcaacttcttctacatgtatgagggcccggctcccaggattcgcgcccacaacatcccacacgactttttttctttcaacagcgaggagatcgtgcggaaccttagctgtagaaagccagaccagcacttcaagccatacctgacacccgacctgcctaagcgcctgcattatgccaagaacgtgcgaattgacaaagttcacctgttcgtcgaccagcagtggctcgcagtcaggagtaagtctaatactaattgtggaggcggaaatcatggttataataacgagtttaggagtatggaggccatcttcctcgcgcacggccctagctttaaggaaaaaacggaagtcgagcccttcgaaaatattgaagtgtacaacctgatgtgcgatcttctacgcatccagccagcacccaacaacggcactcatggctcactcaaccatcttcttaaagtgccgttctatgaaccgagccacgctgaggaagtgtccaagttctcagtgtgtgggtttgcaaaccctctcccaaccgagtcccttgattgcttttgtcctcacttgcaaaactctacgcaactcgaacaggttaaccaaatgctgaatcttacacaggaggaaatcacggcaactgtgaaagtcaatctgcccttcggtcggccgcgcgtgctacagaagaacgtagaccactgcctgctttatcatcgcgagtacgtgagcggcttcgggaaagccatgcggatgccgatgtggtcatcctacacagtgccgcagttaggtgacaccagtccgttgcctcccacggtcccagactgtctgagggcagacgtgagagtgccccccagtgaatcccagaaatgtagcttttacctggcagataagaatatcacacatggttttctctacccccctgcaagcaacagaaccagcgatagtcagtacgatgcactcataacaagtaatctagtccctatgtacgaagaatttagaaagatgtgggattattttcatagtgttttgctgatcaaacatgcgaccgaaagaaacggtgttaatgtcgtgtccgggcctatcttcgattataactacgatggacacttcgacgcacccgacgaaatcaccaaacatctggccaacacagacgtgcctattcctacgcactacttcgtggtactcacatcctgtaaaaataagtcccatacacctgaaaactgtccaggctggctggacgtactgccctttatcattccacacaggcctacaaatgtggagtcttgtccagaagggaagccagaggcactttgggtagaggagaggttcaccgcacacatagctcgggttcgggatgtcgaattactgactggcctggacttctaccaggacaaggtgcagcctgtgtccgagatacttcagcttaagacctacctgcccaccttcgaaacgacaatatag

SEQ ID NO: 115521 - DNA, 1992 bp, synthetic construct
  misc_feature 1..1992: note = Description of Artificial Sequence: Synthetic coding sequence
  source 1..1992: mol_type = other DNA
atggaatcaaccctcactttggctaccgagcagcccgtgaagaagaacacactgaagaagtacaaaattgcctgtatagtcctgcttgcgcttctggttattatgagtctgggactggggttgggactcgggctacgtaaactcgaaaagcaaggttcttgccggaagaagtgtttcgatgcttccttccgcgggctggaaaactgcaggtgtgacgtggcgtgcaaagacagaggggattgctgctgggattttgaggacacctgtgtcgagagtacacgaatctggatgtgcaataagtttagatgtggagagaccaggctggaggcatcgctctgttcttgctcagatgattgcctgcaacgaaaggactgttgcgcagattataagagtgtgtgtcagggggagacatcatggctagaagagaattgcgacaccgcgcagcaaagccagtgtcccgagggcttcgatctgccacccgtcattttgttcagcatggatggcttccgagctgaatatctctatacttgggatacccttatgcctaatataaacaagctaaagacatgtgggattcacagcaagtacatgagagctatgtatcccacaaaaacgtttccgaaccactacacgattgtgaccgggctttatcccgaatcccacggcataatcgataacaacatgtacgatgtgaacctcaataagaattttagcctgtcttcaaaggagcagaacaatcctgcctggtggcacggccagcccatgtggctgaccgctatgtatcagggattgaaggccgccacatacttctggcccggctcagaagttgcgatcaatggctcattcccctcaatttatatgccatacaatgggtccgtgccatttgaggagcgcatatcaaccctgctgaagtggcttgatctgccgaaggccgaacgtcccagattttatactatgtatttcgaggaaccagactcttccgggcatgctggcggccctgtatcggcacgcgtgattaaggccctccaggtggtagatcacgcgtttgggatgctgatggagggcctgaagcagcggaacctgcacaactgcgtgaatatcatactgctggctgatcacggaatggatcagacctactgtaataaaatggagtacatgacagattactttccacggattaatttcttttacatgtacgagggccccgcccccaggattagggcgcacaacatcccacacgattttttctctttcaattccgaggaaatcgtcaggaatctttcatgcagaaaacccgatcagcactttaagccctacctgacccccgatctaccaaagaggctgcactacgccaaaaatgtaaggattgacaaggtgcatttgtttgtggatcagcagtggctagccgtgcgaagcaagagcaatactaattgcggcggaggaaaccatggctacaacaatgagtttcgcagcatggaggccatctttcttgcccacggacctagcttcaaagaaaaaacagaagtcgagccatttgagaacatcgaagtgtacaatctgatgtgcgacctgctgaggatccagccagccccaaacaatggaacccatggatccctgaatcacctcctgaaagtacctttctacgagcctagtcacgccgaagaagtgtctaaattttcagtctgtggttttgcaaatccgctgcccaccgagtcgttggactgcttttgcccccacctgcagaactccacccaactggaacaggtgaatcagatgcttaatctgacccaggaagagattacagccactgtgaaggtgaacctgccctttgggagaccaagagtgctgcaaaaaaatgttgatcactgcctattatatcacagggaatacgtctcagggtttgggaaggccatgcggatgcctatgtggtctagttacaccgtgccacagcttccagccattgagcatcagattgcaaatatgatgttgtag

SEQ ID NO: 115522 - DNA, 2628 bp, synthetic construct
  misc_feature 1..2628: note = Description of Artificial Sequence: Synthetic coding sequence
  source 1..2628: mol_type = other DNA
atggagagcacactcacactcgcaaccgagcagccagtgaaaaagaacactctaaagaagtataagattgcttgcatcgttctcttggccttactcgtcatcatgagcttaggactaggcctcgggttgggactgagaaagctcgaaaagcagggatcttgtaggaagaaatgcttcgacgcttctttccgcggacttgagaactgccgctgtgacgtagcatgcaaagatcggggggattgctgctgggacttcgaggatacttgcgtggaaagcacgaggatctggatgtgtaacaaattcagatgtggggaaactcgcctcgaggcctccctctgttcctgttccgatgactgtctgcagcgtaaggattgttgcgctgactacaaatcagtgtgccagggcgagacaagctggctcgaagaaaattgcgacactgcgcagcaaagccaatgtccagagggtttcgatctcccaccagttatcttattcagtatggatggatttcgggccgagtatctctacacatgggatacgttaatgccaaatattaataagctgaagacctgcgggattcacagcaagtatatgcgagccatgtatcctacgaaaacttttccaaaccactatacaatcgtgacagggctttatcccgaatctcatggaataatcgataacaacatgtatgatgttaacctgaataagaacttttccctcagctcgaaggagcaaaacaaccccgcatggtggcacggacaacccatgtggttgactgctatgtatcagggcctgaaagcagccacttatttttggccaggatcagaggtggccattaacggctctttcccgagcatctacatgccgtacaacgggagcgtgcccttcgaagaacgaatcagtacgctgctgaaatggcttgacctcccaaaggctgaaagaccccggttttataccatgtacttcgaagaacctgacagcagcgggcatgcaggcggacccgtcagcgcgcgggttattaaagctctccaggtagtggaccacgctttcggcatgcttatggaggggttgaaacaacggaacctgcacaactgtgtcaatattattctgctggctgatcacggaatggaccagacttactgtaataagatggagtatatgacagactactttccacgtatcaacttcttttatatgtacgagggccctgcaccccgcatcagagcacataacatcccccacgattttttcagtttcaattcggaagaaatcgtgcgcaatctttcatgtcgcaagcccgatcagcattttaagccctacctgactcctgacctgccgaagagattacactatgcaaaaaatgtgcgcattgacaaggtgcacctttttgtggaccagcaatggctggccgtgagaagtaagagtaatacgaattgtggtggaggcaaccatggttacaataatgagtttcgatctatggaggcaattttcctggcacatggcccatcctttaaggagaaaacagaggtggagccattcgagaatattgaagtgtataatctgatgtgcgacctcctgaggattcagcccgccccaaataatggtactcacggaagtcttaatcacctgctcaaggttcccttttatgagccaagtcacgctgaggaggtttcaaagtttagtgtgtgcggttttgcaaatcctcttcctacagaatccctggattgtttctgcccccacctgcagaattcaacgcagctagagcaggtaaatcagatgctgaacctgacccaggaggagattacagccactgtaaaagttaacctgccctttgggagacctcgggtgctgcaaaagaatgtggatcactgcctgctgtaccacagagagtacgtgagcgggttcggtaaggccatgcggatgccaatgtggtcatcgtacacagtgccacagttgggagatacttctccccttccgcccaccgtcccagattgtctcagagccgacgtacgggtgcccccctccgaaagtcagaaatgctcattttatctcgctgataaaaacattacccacggatttctgtatccccctgcctcgaaccggacaagtgactcgcaatatgacgctcttattacctccaacctcgtgccgatgtacgaagagttccggaaaatgtgggattatttccattccgtcttactcataaaacacgcaaccgaacggaatggcgttaacgttgtgagcggacccatttttgactataattacgatggccacttcgacgcacctgacgagattaccaagcatctggcaaatactgatgtgcccatccctacccattactttgttgttttaacatcctgcaagaataagtcacatacaccggagaattgtccagggtggttagacgtgctcccttttattatcccacaccgccccaccaacgtcgagtcttgtcctgaaggaaagcctgaagcactgtgggttgaggagagattcactgcacacatcgcaagagttagagacgtggaattgttgactggcctcgatttctatcaggacaaggtgcaacccgtctcggagatcctgcaactcaagacttatctgcccaccttcgaaactacaatatag

SEQ ID NO: 115523 - DNA, 765 bp, synthetic construct
  misc_feature 1..765: note = Description of Artificial Sequence: Synthetic coding sequence
  source 1..765: mol_type = other DNA
atgtcactgggcctgggactgggcttaggcctccgcaagttggaaaaacaggggagctgcaggaagaagtgtttcgacgctagtttccgagggttggaaaactgtaggtgcgatgttgcttgtaaggatcgaggagactgttgctgggattttgaagatacgtgcgtggagagcacccggatttggatgtgtaacaaatttaggtgcggggagacaaggctggaggcctccctgtgtagctgctctgatgattgcttgcagaggaaggattgttgcgcggattacaaatccgtctgtcagggtgagacgtcatggctggaggagaactgcgacaccgctcagcagtcccagtgtcccgagggattcgacctgccccccgtgattctcttttccatggacggcttcagagcggaatacctatacacatgggacacacttatgccaaacattaacaagctgaaaacatgcggcattcattctaaatatatgcgcgccatgtaccctaccaaaacatttcctaaccactatacaatagtaactggcctgtacccagagtcccacggtatcatcgataataatatgtacgatgtgaacctcaataagaatttcagcctgtcatctaaggagcagaataaccccgcatggtggcacgggcagccggtgtgcagcatcctgcatgtcgccacagaagtcacttcgatttctcagtgcgatcgacgcacattgttcagtctgtcgggcgccagctccatgagtccaatctag

SEQ ID NO: 115524 - DNA, 774 bp, synthetic construct
  misc_feature 1..774: note = Description of Artificial Sequence: Synthetic coding sequence
  source 1..774: mol_type = other DNA
atgtctctagggttgggattgggtctaggcctgagaaagcttgagaagcagggcagctgccggaaaaagtgttttgatgcctctttcagggggttagaaaattgccgctgtgacgtagcctgtaaagatagaggcgattgttgttgggattttgaggatacctgcgttgaatctacgcggatatggatgtgtaataagtttcggtgtggagagacacgcctcgaagcgagcctgtgttcctgtagtgatgattgcttgcaaaggaaagattgctgcgccgactacaaatcagtgtgccagggcgaaacctcgtggcttgaggagaattgcgacacagcgcagcagagccagtgtcccgagggctttgacctccccccggtgatactgtttagtatggacggttttagagctgaatacctgtacacatgggacacattaatgccaaacatcaataagctgaagacctgtggtatccatagcaagtatatgcgtgcgatgtatccaaccaagacattcccgaaccactataccatagtaaccggcttgtaccccgaatcccacggaatcatcgacaataacatgtatgatgtgaaccttaataagaacttcagcttgtccagcaaggagcagaataatccggcctggtggcatggacaaccgatgtggttgaccgcaatgtatcagggcttgaaggctgccacttacttttggcccggtagtgaggtcgccattaacggatcctttcctagcatttacatgccgtacaacggctag

SEQ ID NO: 115525 - DNA, 1200 bp, synthetic construct
  misc_feature 1..1200: note = Description of Artificial Sequence: Synthetic coding sequence
  source 1..1200: mol_type = other DNA
atggctagtccagggaagccaggtgcggacgaggcccaggaggaagagggcgaactggaaggtggatctgcgggcccaagggctgctatcctggaacaagccgaggagttattcctgttgtgcgacaaggaagcaaaagggttcattacgaagcatgacctgcagggcttgcagtccgatctccctttgactcctgagcagctggaagctgtgttcgaatcgctggatcgtgcccacacgggattcttaacggctcgggaattctgtctgggattgggaatgtttgtgggcgtagcttcggcccagggagctaatccctgcaggacgcccgaagagactttcgagtccggaggccttgatgtgcagggtaccgccggaagcctcgatgaggaagaagaggaggaggaacgctttcatacggtcctggagcagttgggagtggctcctgtcctgggcaagcaacgcgccgttcggaccttatgggcaaggctccaacgagaacggcccgagctgctgggatcgtttgaggatgttctgattcgagccagtgcgtgcctagaggaggccgcacgggagcgcgatggacttgagcaggcactgaggagaagagaatctgaacacgagcgcgaggtgcgggccctctacgaggaaaccgagcagcttcgggaacagtctaggaggccccccagtcagaattttgctagaggtgagcgccggagtcggttagaactagagctccagtcaagggagcaggatcttgaacgggccgggctcaggcagcgggagctggagcaacagttgcatgcccaagccgcggagcatttggaagcccaggcccagaactctcagctctggagagcccatgaagctctcaggacacaactcgagggagctcaggaacagatccgcaggttagagtcggaggctcggggacggcaagaacaaacacagagggacgttgtggccgtcagcagaaacatgcagaaggagaaggtgtctctgctgagacagctggagctgctgagagaactcaatactcgtctccgcgatgaccgtgacgcctgtgaagcacgaagagctgggagttcctgcagaaaagctctgaccacagccagattgcctggccctacctgctgctgctgttgttgctgggcacggccacctaggcggggctctgggcaccttccatccgcgcggtag

SEQ ID NO: 115526 - DNA, 885 bp, synthetic construct
  misc_feature 1..885: note = Description of Artificial Sequence: Synthetic coding sequence
  source 1..885: mol_type = other DNA
atggcttctccaggaaagccaggcgccgacgaggctcaggaagaggaaggagagcttgaggggggctccgctgggccccgagctgctatactcgagcaggccgaagagttgtttctactgtgtgacaaggaggctaaagggttcattacgaaacatgacctccaggggttgcagagtgacctgcctctgacacctgagcagcttgaagcggttttcgaatctctagaccgggcacacaccgggttcctgaccgctcgagagttttgcctgggtcttgggatgttcgtcggagtggctagcgcacagggtgccaatccttgtcgaactcccgaggaaaccttcgagtctggagggcttgacgtgcaaggcaccgctggcagtcttgatgaagaagaagaagaggaagagaggttccacactgtgctcgagcagctgggcgttgctcctgtgctcggcaagcagcgcgcggtcaggacattgtgggccaggttgcagagagagcgtccggagctcttgggtagtttcgaggatgtgctgattcgtgcctcagcttgcctggaggaggctgctcgagaaagagacggtttggagcaggcactgagaagacgggaatcggaacatgagcgagaggtcagagccctgtacgaggagactgaacagctgcgggagcagtctcgaagacccccctcccaaaactttgcaaggggcgaaaggcgatctcgcctggaactcgaactacaaagtagagagcaggacctggagcgagccggtctacgacaacgggagaggcgaggccgccgcctccaagagcacgctgaaagggaatctcagcccgcaaccgcgactggggctgcccagggtgctgaatacacagcggccggatag

SEQ ID NO: 115527 - DNA, 267 bp, synthetic construct
  misc_feature 1..267: note = Description of Artificial Sequence: Synthetic coding sequence
  source 1..267: mol_type = other DNA
atggccagtcccgggaagcctggagccgatgaagcgcaagaagaagagggagaactcgagggagggtctgctggtccgagggctgcaatcctcgaacaggccgaagagcttttcctgctgtgcgacaaagaggctaagggtttcatcacaaagcacgatctgcagggcctgcagtcagacctccctttgacgcctgaacagctcgaagctgtctttgaatcattggatagagcacataccggcttcttaacggctcgagagttctag

SEQ ID NO: 115528 - DNA, 105 bp, synthetic construct
  misc_feature 1..105: note = Description of Artificial Sequence: Synthetic coding sequence
  source 1..105: mol_type = other DNA
atggcgtctcccggcaagccaggcgctgacgaggcacaggaggaagagggcgagcttgagggaggatcggccggtcctagggcagcaattctagaacaagcatag

SEQ ID NO: 115529 - DNA, 885 bp, synthetic construct
  misc_feature 1..885: note = Description of Artificial Sequence: Synthetic coding sequence
  source 1..885: mol_type = other DNA
atggcctcgcccggaaagcccggggccgacgaggcacaagaggaagaaggtgaattagagggaggctccgcgggtcctagggcagctatactcgagcaagctgaggaactttttttgctttgcgataaggaggcaaaaggcttcatcacaaaacacgaccttcagggactgcaatcggatctgcctctaacacccgaacagctggaagccgtattcgaatcgcttgatagagctcacacaggctttctgaccgcccgagagttttgtctcggacttggtatgttcgttggtgtcgcctcagcacagggggctaacccttgcaggacaccggaagaaacatttgaatcaggcggcctcgacgtgcaaggcaccgctgggtcactagatgaagaggaagaggaggaagaacgcttccacaccgttctagagcaacttggggtggcaccagtcctcgggaaacagagggcagtgcgcacactttgggctaggcttcagcgcgagcgacctgaactactgggaagcttcgaggatgtactgattagagcctccgcatgcctggaggaagctgctcgagaacgagacggcctggagcaggctctgcgaagaagggagtcggagcatgagcgagaggtgagggcgttatacgaggagaccgaacaactcagagaacagagtaggagacccccctcccagaattttgccagaggtgagagacgatccaggctggagctggagcttcagagcagagagcaagatttagagcgggccggattgcgtcagcgggagaggagaggcaggaggctccaggagcatgctgaaagagagagtcagccggctacagcaactggagccgcgcagggggccgaatataccgccgcgggctag

SEQ ID NO: 115530 - DNA, 162 bp, synthetic construct
  misc_feature 1..162: note = Description of Artificial Sequence: Synthetic coding sequence
  source 1..162: mol_type = other DNA
atggcttccccgggcaagccaggagccgatgaggctcaggaagaagagggtgagctggagggaggctctgctggccccagagccgccatcctcgagcaggcagaggagctgtttctcttatgcgacaaggaagcaaagggtttcataaccaagcacgattag

SEQ ID NO: 115531 - DNA, 246 bp, synthetic construct
  misc_feature 1..246: note = Description of Artificial Sequence: Synthetic coding sequence
  source 1..246: mol_type = other DNA
atggcttctccagggaagcccggcgcagacgaagcccaggaagaagaaggggagcttgaaggcgggtctgccggacccagagcagctatcttagaacaggccgaggagctgttcctcttgtgtgacaaggaggcaaaaggtttcatcactaagcacgacctgcagggtctgcagagcgacctgccgttgacccctgaacaactcgaggcagtgttcgaatccctcgacagagcccacactggctag

SEQ ID NO: 115532 - DNA, 1188 bp, synthetic construct
  misc_feature 1..1188: note = Description of Artificial Sequence: Synthetic coding sequence
  source 1..1188: mol_type = other DNA
atggccgctcccgacggccgagtggtatcacgtcctcagagattgggacaggggagcggccagggcccaaaagggtccggtgcttgcttgcaccctttagacagcttggagcagaaagagacacaggagcagaccagcggacagttagttatgctacgcaaggcccaggaattctttcaaacatgcgatgccgaggggaaagggttcatcgctcgcaaagatatgcaaaggcttcataaagagttaccattatcactcgaggagttggaggatgtcttcgacgcccttgatgccgacgggaatggttacctaactccacaagagttcacgactggcttctcacacttcttttttagccagaacaatccttcccaggaggacgctggcgaacaggttgcccaaaggcacgaggaaaaggtgtacctgtctaggggagacgaagatcttggcgatatgggagaggatgaagaggcccagtttcgcatgctgatggatcgattgggagcgcagaaggtcttggaggatgagtccgacgtcaaacagctgtggttgcaattgaaaaaagaggaaccccacttgttatctaactttgaagacttcctgactcggatcatctcccagctgcaggaggcacacgaggaaaagaacgagctggagtgcgctttgaaacgtaagatcgccgcttatgatgaagagatacagcatctctacgaggagatggagcagcagattaagtctgagaaagaacagttccttctcaaggatactgagaggtttcaggcccgcagccaagagctcgaacagaagctcctgtgcaaggagcaggaactggaacaactgactcagaaacagaagcgtcttgaggggcagtgcacagccctgcatcatgacaagcatgagaccaaggcagaaaatacaaaactcaagttgaccaaccaagagctggctcgagagctggaaagaaccagttgggaacttcaagacgcgcagcagcagctggagagcctgcagcaggaggcgtgcaagctgcaccaggaaaaggagatggaagtgtacagagtaaccgagagcctccaaagggagaaggccgggctgcttaaacaattggacttccttcgctgtgtgggcgggcactggcctgtgcttcgcgcccctccaaggtctctcggatccgagggccctgtttag

SEQ ID NO: 115533 - DNA, 2196 bp, synthetic construct
  misc_feature 1..2196: note = Description of Artificial Sequence: Synthetic coding sequence
  source 1..2196: mol_type = other DNA
atggccgccccagacggccgagtggtaagcagacctcagcgcttgggccagggctctggccaggggccaaaagggtcaggggcctgtctacacccgctcgactcattagagcagaaggagactcaagagcagaccagcggacagttggtcatgttaagaaaagcccaggaattttttcaaacgtgtgatgccgaaggcaaaggtttcattgctaggaaggatatgcaacggctgcataaagagctgccattaagcctggaagaactggaggacgtgttcgacgcactggatgccgatggaaatggctacctgacccctcaggaatttactacaggattctcacacttcttcttcagtcaaaacaacccatcgcaggaggacgcaggcgagcaggtcgcacagcgacacgaagaaaaggtgtacctctcccgcggcgacgaggatctgggggacatgggcgaagacgaagaggctcaatttagaatgctcatggataggctcggagcccagaaagtcctcgaggacgagtccgacgtcaaacagctttggctacaactgaaaaaggaggaacctcacctgctgtcaaactttgaggactttctaacacggattatttcccagttacaggaggcacacgaggaaaaaaacgagctcgagtgcgcactgaaaagaaagattgccgcttatgatgaagagatacagcatctgtacgaagagatggagcagcaaattaagtctgagaaggagcagtttttactgaaagatacagagcgttttcaggcccgctcccaggagctcgaacagaagttactttgtaaggaacaggagctggagcagcttacgcagaagcaaaaacgcctagagggtcagtgcactgccttgcatcacgacaagcacgagacgaaagccgagaacaccaagctgaaattgacaaatcaggagttagcccgggagctggagaggacgtcttgggagctgcaggatgcacagcagcagctggagtcattacagcaggaggcctgcaaactgcatcaggagaaggagatggaggtatacagagtgaccgaatcactgcaaagagagaaagcgggactgctcaagcaactcgacttcctgagggaacgcaataagcatctccgcgatgagagggacatttgttttcaaaaaaataaggccgccaaggctaacacggctgcttcccgtgcatcatggaagaagcggagtgggtctgtgatcggtaaatacgtcgactctcggggcatcctgcggtctcaaagtgaagaagaagaggaggtttttggcatccctcggagaagctctctgggactttccggatatcccctgaccgaagaagaacctgggaccggggagccgggccctggaggaccctaccccagacctttgaggcgcatcataagtgtggaggaggatccactccctcagcttctggacggtggctttgaacaaccattgagtaaatgcagtgaggaggaagaagttagtgaccagggtgtgcaggggcaaattccagaggcaccacctttgaaactgactccaaccagtccacggggccagcccgttgggaaggaggctctgtgcaaggaagaatctagcccttccgctcccgataggctcttcaaaatcgtgttcgttggaaacagcgctgtgggaaaaacctcctttttgagaaggttttgcgaggatcggtttagtcctggcatggccgcaaccgtcggaatagattatcgagtcaaaactcttaacgtcgataattcccaagtggcactccagttgtgggatacagccgggcaggagcgctatcggtgtattacacagcagttttttaggaaggcggatggtgtaatcgtaatgtatgatttgacggacaaacaaagcttcctgagcgtgagacgttggctgtcttccgtggaagaggcggtcggcgatcgggttcccgtgctgttgctcgggaataagttagataacgagaaggagagagaggtcccccgcgggctgggggagcagctagctactgagaataatctgattttctacgagtgttccgcttactctggccacaacacgaaagaatccttgctgcacctcgcgcgattcctcaaggagcaggaagatacagtgcgggaagataccattcaggtaggccaccccgccaaaaagaagagttgttgcggatag

SEQ ID NO: 115534 - DNA, 1389 bp, synthetic construct
  misc_feature 1..1389: note = Description of Artificial Sequence: Synthetic coding sequence
  source 1..1389: mol_type = other DNA
atggcggcccccgatggacgggtggtaagtcgaccacaacggcttgggcaagggtctgggcagggacccaagggctctggtgcctgcctgcatccgctcgactctttggaacagaaagaaacgcaggagcagacatctggtcagttagtcatgctgcgcaaggcccaggagttctttcagacatgcgatgctgagggaaagggattcatcgcgcgtaaggatatgcagaggcttcacaaggaactcccattgagcttggaggaactcgaggacgtgttcgatgcactcgacgcagacgggaatggatacctgactcctcaggaattcaccactggatttagtcatttcttcttcagtcaaaacaaccctagccaggaagatgccggagagcaggtggctcagagacatgaggagaaagtctatctctcccgcggcgatgaagacctgggtgatatgggggaagacgaggaggcgcagttccgcatgctgatggaccgccttggtgcacaaaaggtactcgaggatgagtcggacgtgaaacagttgtggctgcagctgaagaaagaggagcctcacctgttgtccaactttgaggactttctcactcgtatcatcagccagctccaggaggctcatgaggaaaagaacgagttagaatgcgcactaaaacggaagattgctgcctacgatgaggagatacaacacttgtacgaggaaatggaacagcagatcaagagtgagaaggagcaatttcttctgaaagacactgagcgattccaagcccgatcgcaagagttggagcagaaacttctttgcaaagaacaggaattggagcagctcacacagaagcagaagagactggaaggacagtgtacagccctccatcatgataagcacgagactaaggcggagaacacaaagttgaaactgaccaatcaggagctcgcgcgcgagttggaaaggacctcttgggaactgcaagacgctcagcaacagctcgagtccctgcagcaggaggcttgtaagctccaccaggagaaagaaatggaggtctatagagtcacagaatcattacaaagggaaaaagccggcctgcttaagcagctcgatttcctgcgggagagaaataaacacctgcgcgatgagagagacatctgtttccagaaaaacaaggctgccaaggctaacaccgctgcatccagggcttcctggaagaagagatctggaagtgtgattgggaagtacgtagatagtagggggatcctgcgccggtggcctcagcgggaccggggtattccaactttgcagtaccagacccagagggatctagaggattgcaaacatgagatgaaaaagatctgtaaagccgaggttaccctcgaaatgtag

SEQ ID NO: 115535 - DNA, 357 bp, synthetic construct
  misc_feature 1..357: note = Description of Artificial Sequence: Synthetic coding sequence
  source 1..357: mol_type = other DNA
taagagaaggagatggaggtgtatcgggtgaccgagagcctacagagagagaaggctgggcttttgaaacagctcgactttctgagggagcggaataaacacttaagggacgaacgcgatatctgtttccaaaaaaacaaggctgccaaagcaaataccgcagcatcccgagcttcatggaagaagagaagcgggtctgtgattgggaaatacgtggactccaggggcattttgcgacgctggccgcagagggatcgaggcatccccacactgcagtaccagactcagcgtgatttggaagactgtaagcacgagatgaagaagatctgcaaggccgaggtcaccctagaaatgtag

SEQ ID NO: 115536 - DNA, 1923 bp, synthetic construct
  misc_feature 1..1923: note = Description of Artificial Sequence: Synthetic coding sequence
  source 1..1923: mol_type = other DNA
atggtgtctaaccccgtacatggtctgcctttccttcctgggaccagcttcaaggactcgacaaagacagcttttcaccgatcccagactctctcatacaggaacgggtacgcaattgttcggcgccctaccgtagggatcgggggagatcggctccaattcaatcagctgagccaggccgagctcgatgaattagctagcaaagcaccggtgctgacatacggccagccaaagcaggcgccaccagcagattttattcctgcacacgtggctttcgacaagaaagtgctcaagtttgacgcctacttccaggaggatgttcccatgtccacagaggagcagtatcggatccgacaggtgaatatttactactaccttgaagatgactccatgagtgtaatcgagcctgtggtggagaactcaggaatcctgcaaggaaaactgattaagaggcaacggctcgcgaaaaatgaccgcggggatcattatcattggaaagacctgaatagaggcattaatatcaccatctacggaaagaccttccgagtggtcgactgtgaccaattcactcaagtgtttttagagtcacaaggtattgagctcaatccaccagagaagatggcattggacccgtatacagaactccgcaaacagcctctcagaaaatacgtgaccccctctgacttcgatcagctcaagcagttcctgacattcgacaagcaggtgctgcggttctacgcaatctgggatgataccgattccatgtacggtgagtgtcgcacttatatcatccactattatctcatggacgataccgtggagatccgggaagtgcatgaacggaacgacggccgcgacccctttccactcctaatgaaccgccaaagagttcccaaggtcttagttgaaaatgcaaagaattttcctcagtgcgttttggaaatctctgaccaagaagtgctcgagtggtacactgccaaagattttattgtcggcaaaagcctgacaatcctgggccggacattctttatctacgactgtgacccttttacacgccgttattataaagagaagtttgggattacggacttgccgagaatcgacgtgagtaagcgagagcctcctcctgtaaagcaggagctcccaccctataacggcttcgggctcgttgaggactctgcacagaattgttttgctctgatccccaaggcgcctaaaaaagacgtgatcaagatgcttgtgaatgataacaaagtgctccgatatttggcagtgctggagagtcccataccggaggacaaggatcggaggttcgtcttcagctatttccttgctaccgatatgatctccatttttgaaccacccgtgcggaacagcggtatcatcggcggcaaatacctgggtaggactaaggttgtcaagccctatagcaccgttgacaatcccgtctactacgggcctagcgatttcttcattggagccgtaatagaggtgtttggacacaggttcattattctggacaccgacgagtacgtgctcaagtatatggagtcgaatgcagcccagtacagtccagaggcattggcttccatacagaatcacgttcggaaacgcgaagcccctgctccagaggcagaatccaagcagacggagaaggatcctggggtgcaggagctggaggctcttatcgacaccatacagaagcaactgaaagaccactcctgcaaggacaacatcagagaagctttccagatctacgacaaggaagcctctggatacgtggaccgcgatatgtttttcaaaatatgcgaaagcctcaatgttcctgtggacgatagtttggtgaaagagttaattagaatgtgtagtcacggagagggtaaaataaactattacaacttcgtgagggccttctctaattag

SEQ ID NO: 115537 - DNA, 1653 bp, synthetic construct
  misc_feature 1..1653: note = Description of Artificial Sequence: Synthetic coding sequence
  source 1..1653: mol_type = other DNA
atgtcctggcctgtactaaaatttgacgcttatttccaagaggatgtgccaatgagtaccgaggaacagtatcgaattaggcaggtgaacatatactactatctggaggatgattccatgagcgttatcgagcccgtcgtggagaattcgggcatattgcaggggaagcttattaagcgccaaagactggcaaagaacgataggggggaccattatcactggaaggacctcaatagggggattaatattaccatttatgggaagacgtttcgagttgttgactgcgaccagttcactcaggtctttctcgagtcacaaggtatcgagctcaaccctccagaaaaaatggctctcgatccatacacagagctgagaaagcaacccttgagaaagtatgtcacaccctcagacttcgaccaactcaaacagtttcttacattcgacaaacaggtcttgcgattttatgccatttgggatgacaccgacagtatgtacggggagtgtagaacctatatcatccactattaccttatggacgataccgtcgaaatccgagaagtgcacgagaggaacgacggccgagaccccttcccgctgctcatgaatcgccaaagggtccccaaggttctggttgagaatgctaagaactttccacagtgcgtcctagaaatcagcgaccaggaggtgttggagtggtatacagcaaaagacttcatcgtgggaaaaagtttaacaattcttgggcgcactttcttcatctacgattgtgaccctttcaccagaagatactataaagaaaagttcggtatcacagatctcccaaggatcgacgtctccaagcgagagcctccacccgtgaagcaagagctccccccatacaacggttttggtcttgtggaagactcagctcagaactgcttcgctctcattcctaaggccccaaagaaggatgttataaagatgcttgtgaatgacaacaaagtgctccgatacctcgccgtcctggagagtcctataccagaggacaaggacagacgctttgttttcagttattttctggcaacagatatgataagcatcttcgagccacctgtacggaattcgggaatcatcggcggcaagtatctgggaaggaccaaagtggtcaaaccctacagcacagtggataatcctgtttactatggcccaagtgacttcttcataggcgcagtgattgaggtcttcggccacagattcataattctcgacacggatgaatacgtccttaaatatatggagagtaatgctgcgcagtatagcccagaagccctggcaagtatacagaatcatgtgaggaagcgcgaggcacctgcacccgaggctgaatccaaacaaactgagaaggatcctggcgtgcaggagctcgaggcattgatcgacacgatacaaaaacagctaaaggatcatagttgtaaagacaacatcagggaggcctttcagatttatgacaaggaagccagcggttacgtggaccgggacatgttcttcaaaatttgtgaatccctcaatgtgccagtcgacgattccctggtgaaggaagtcacctgcaaacgactgctcctccctgccttcaccttcccttcacccgtttggatccccttgtgtggcctatag

SEQ ID NO: 115538 - DNA, 1866 bp, synthetic construct
  misc_feature 1..1866: note = Description of Artificial Sequence: Synthetic coding sequence
  source 1..1866: mol_type = other DNA
atgctgaaaacagctttccatcggtcacagaccttatcttacagaaacggttatgccatcgttcggcgccccaccgtgggtataggaggcgaccggctgcagttcaaccaactgagccaggctgaacttgacgaactggcaagcaaggcacctgtattgacctacgggcagccaaaacaggctcccccagccgatttcatccccgcccacgttgcctttgacaagaaagtgttgaagttcgatgcttacttccaggaggatgtgcctatgagcactgaagaacagtatagaatccgacaagtcaacatttactattacctggaggacgactcaatgtcggtgattgagcctgtggtagagaattccggcatcctgcaaggcaagttgatcaaaagacagagactagctaagaatgaccgaggcgaccactatcactggaaagatttgaatagagggatcaatattaccatttacggcaaaaccttccgcgtcgtggattgcgaccagttcacacaggtgtttctggagagccagggtattgaattgaatcctccagaaaagatggcccttgacccatacacagagctgaggaaacagcccttgagaaagtatgtgaccccatcagacttcgaccagctgaaacagtttttgacctttgataaacaggtgttacgattttacgcgatttgggacgatacagattccatgtatggggagtgcaggacttacatcattcattattaccttatggacgacactgtagaaatcagggaagttcacgagagaaatgacggtcgggaccctttcccgctactcatgaacagacagagggtaccaaaagtgcttgtggaaaacgctaaaaacttcccccagtgcgtcctcgagatcagcgaccaggaggtcttggaatggtatactgctaaagattttatcgtcgggaagtccttgacaattctcggcagaaccttcttcatttatgactgtgacccattcactagaagatattacaaggagaagtttggaatcaccgatttaccacgtattgatgtatctaagagggagccccctcctgtgaagcaagaattgccaccatacaacggctttgggcttgttgaagactccgctcagaattgttttgccttgatacctaaggcccccaaaaaagatgtcattaaaatgttagtgaatgacaacaaagttttacgatacctagccgtcttagaaagtcccattcctgaagacaaagatcgcagattcgtgttttcctactttctcgccacagacatgattagcattttcgaaccgcctgttcgaaactccggtataatagggggaaaatatctcgggaggacaaaagttgtcaagccctattctactgtcgataacccagtctactatggcccatcggacttttttatcggcgctgtgatcgaagtgtttggtcaccgctttatcatcttagacacagacgaatacgtgctgaagtacatggagtccaatgctgcacaatacagtcctgaggccctggctagtattcagaatcacgtgaggaaaagagaagctcccgccccagaggccgaatcaaagcagacggagaaggaccctggtgttcaggagttagaggcgctgatcgacacgattcaaaagcagctgaaggatcacagctgcaaggacaatattagagaggcctttcagatttacgataaagaggcctctggatacgtagatcgggatatgttttttaaaatctgtgaatccctgaacgtaccggtcgatgattccttagtgaaggagcttatccgaatgtgtagtcacggcgaaggcaaaattaattactataattttgtgcgcgccttctccaactag

SEQ ID NO: 115539 - DNA, 2250 bp, synthetic construct
  misc_feature 1..2250: note = Description of Artificial Sequence: Synthetic coding sequence
  source 1..2250: mol_type = other DNA
atggccctgccactgttacccgggaactctttcaacaggaatgtcggcaaagagaagttccacaagagtcagcactggggcttttgcaataacgttatgatgctggtatcagatgagaaaccggggatcggaggagagcctctcctgggccagaaaatcaagccaaagtgctctatatatcccaagggcgacggatctgatgtcccgtcatgggtggctttcgataaacaggttctgtcgtttgacgcttacttggaggaagaggttctagacaagagccaaacaaactaccggatcagatactacaaaatctacttctatcccgaagacgatacgatacaggtaaatgagcctgaagtgaagaacagcggcctattgcaaggaacatctatccgccgacatcgcatcacgctgccacctcctgacgaggaccagttctacactgtgtaccatttcaatgtcgggacggaggtggttttctatggcagaacatttaagatatacgactgtgacgcattcacacgcaactttctcagaaaaattggagtgaaggtcaaccctcccgttcagtgcccagaggacccatatatgaagataagacgtgaagtggtggaacacgttgaacccctgcgcccttatgaatccctggataccctgaagcagttcctccagtatcacggcaagattctctgttttttttgcttgtgggacgattcggttagcatgtttggcgaccgacgcgagcttatcttacactactttctctgcgatgatacaatcgaaatcaaggaactactgccgcattcgtccggacgagacgccttgaaaatgttcctgcgacgatctaagttgccaaaaaattgtccaccacgtgtgtaccagccaggacagattactgatagagccgtgctgaattcttatggcgacttcatcaagaaccaggcagatggctacctttttgatagatataagctgggaaaagtggatcaggaattctataaggattctgatctttccctgggcgtcacaattaacgtgtggggaaggaaggtgcttctgtatgattgcgacgagttcacgaaaagctactataagagtaaatacggaatcgaaaactttacctccgtgtcatgtaaaccgccatcccccccccccaagatcgagcggaagttccctccttataatggcttcggcagtgaagaggactccttacggaactgcattgatctcaaacccacaccccatcggcgtaactttaaaaagttcatggaaaaagattcatatggtagtaaaagcaacatcctgcgcttttttgctaagctcgtcactgacaaatgtgtggacctggacaggatgtttgtcattagctattatctcggtgacgacacaatttcagtgttcgaaccgatcgagcgaaactcagggatcgctggcggaatgtttctcaagagaagtagagttaaaaaacctggccaagaggtgttcaaatccgagctgtctgagtacattaaagccgaggaactttacatcggcgttacagtgaatgtcaacggttatttgttccgcctgctcaacgccgacgagtatactcttaattatatggagcaaaacactgataagtaccctttctcaaatctgaagctggcactccagaagctgaagcaggaggaaggaaagagtcgggagcttaagcaggtgttcaaagctgctgactcgaaacatacaaatatggtggactacaatacctttcgggacattttaatgtcgctgaccgttgggaaccttgctgagcaggaattcgtgactatcgcccggcactaccgcgtgcctgagggaacctgcagcgacatggatttcctaatcgccctggcacacgaaaagtttaagaaaaatatgttcgaaaacttcgacaccttcatttacagctgtgtctatgaagatcgagaaaagaaaaatgtactgccaacaaaggacatcaagcgactgtgtaagagctctcggctccccttgagcgatgatcttcttgagagcctcctgtccagattcgaagatagtgagaagcagattgactacaagagttttttctctgcattgaactggagaaaaaaccctgtgccggagctccagccagcatcctatctgaaggagcgctgtgaagacgtttggctcggtatgccttccccaatccctgccaagtacatcgactattggacctttctgaaggatgcctttgggcttgaagaagagtag

SEQ ID NO: 115540 - DNA, 489 bp, synthetic construct
  misc_feature 1..489: note = Description of Artificial Sequence: Synthetic coding sequence
  source 1..489: mol_type = other DNA
atgtcccttacagtcggaaacctggctgagcaggaatttgtcacgatagccaggcattatagagtccccgaaggtacctgtagcgacatggacttcctgatcgctttagctcacgaaaagtttaagaaaaatatgttcgagaactttgacaccttcatctattcctgtgtgtacgaggaccgagagaagaaaaatgttttacctaccaaggacattaagcggttatgcaagtcaagtaggctacccctgtcagatgatctcctcgaaagtttgctatctcggttcgaagacagcgaaaagcagattgattacaaaagtttctttagcgccctcaattggcgtaaaaacccagtcccagaactgcagccagcttcttatctgaaagagaggtgtgaggatgtttggctggggatgcctagtccaatcccagcaaagtatattgactactggaccttcctcaaggacgcctttggcctggaagaagaatag

SEQ ID NO: 115541 - DNA, 753 bp, synthetic construct
  misc_feature 1..753: note = Description of Artificial Sequence: Synthetic coding sequence
  source 1..753: mol_type = other DNA
atgaagattcggagagaagtggtcgaacacgtggagccgctgaggccctacgagtcactggacacactcaagcagtttctacagtaccatggcaaaattttatgttttttctgtttatgggacgatagcgtttcgatgttcggcgataggagagaactcatactgcactattttctgtgtgacgacaccatcgagattaaagaactgcttccccactcaagcggacgtgatgccctgaaaatgtttttgcggagaagcaagctcccaaagaactgcccaccgagggtgtatcagcctggacagattaccgatagggccgtgttgaatagctacggagatttcattaagaatcaggccgatgggtacctattcgacaggtacaaactggggaaggttgaccaggaattctacaaggactcagacctgagtttgggcgtgacaattaacgtgtggggaaggaaggttctgctgtacgactgcgatgaattcacaaagtcctattacaaaagcaagtatgggattgaaaatttcaccagcgtaagctgcaaacctcccagccctcccccaaaaattgaaagaaagtttccaccttataacggcttcggatctgaggaagattcacttcggaactgcatcgacttgaagcctaccccccatcgaaggaactttaagaagttcatggagaaggattcctacggaagcaagtcgaatatcctgtttttttgtaagacaagccatcgccagatgtgctag

SEQ ID NO: 115542 - DNA, 2334 bp, synthetic construct
  misc_feature 1..2334: note = Description of Artificial Sequence: Synthetic coding sequence
  source 1..2334: mol_type = other DNA
ggcggccagacaacacgaccaggcggggctgcggcctgcagggctctgtcctctggcacactggacttcaggacattgtccgccatggccctcccactgctacccggcaactccttcaatagaaacgttggcaaagagaaattccacaaaagtcaacactggggcttttgcaacaatgtcatgatgctggtgagcgatgaaaagcccggaatagggggagagccgcttctgggccagaaaatcaaaccaaagtgttctatctatcccaagggcgatggctccgacgttcctagctgggtggccttcgacaagcaggtgctctctttcgatgcatacttggaggaggaagtactggataaaagtcaaaccaactataggatacgctattataagatctacttctatcctgaggacgatactatccaggtgaatgaacctgaggtaaagaattctggccttctgcagggaacatctattaggcgccatcgcattacgctgccgcctccggacgaggatcaattctacaccgtttatcactttaacgttggcacagaagtggtgttttatggccgcacctttaaaatttacgactgtgacgcgtttacacgaaatttcctaaggaagatcggcgttaaggtcaacccgccggtgcaatgcccagaagatccctatatgaaaatcaggagagaggtagtggaacacgtagagcctctacggccgtatgagtcactcgatacactgaagcagttcctgcagtaccatggcaaaatactatgtttcttctgtctctgggacgatagtgttagcatgttcggggataggcgcgagctcatcctgcattacttcctctgtgatgacaccatagagatcaaggagctcctgccgcattcctccggcagagacgccctgaaaatgtttttacgtagatccaagctacccaaaaattgtcctcctcgggtgtatcagcccggccaaatcactgaccgagccgtactgaactcctatggcgattttatcaagaaccaggcagacggttatctttttgatcgctacaaactgggtaaagttgaccaggagttctacaaagactccgatctcagcctgggcgtcacaatcaacgtatggggccggaaagtcctcttatacgactgcgacgagtttacaaagtcttactataaaagcaagtacggcatcgaaaattttactagcgtgtcatgtaaaccgccctctcctccgcctaaaatcgaaaggaaatttccaccatacaatggattcggctccgaggaggactctctgcgtaattgtatagacctgaagcccaccccccacaggagaaactttaaaaaattcatggagaaggattcgtacggcagtaagagcaatatcctaagatttttcgcgaaattggtcactgataagtgcgtcgatctggatcgaatgttcgtgatctcgtactatttgggagacgatacaatctccgtctttgagccaatcgaaagaaattcaggtatagccggcgggatgttcttaaagcgtagtagggtgaaaaagccagggcaagaggtgtttaagtccgagctctccgagtacatcaaagcagaagagctgtatatcggagtgaccgttaatgtaaatgggtatttgtttagactcctcaatgccgatgagtacactctgaattacatggaacagaataccgataaatatcccttttctaaccttaagctggcccttcagaagctgaagcaggaggaaggcaagtctagagagctgaaacaggtgtttaaggccgccgattctaaacatactaacatggtcgactataatacattccgcgacatattaatgagcctgactgtggggaacctggccgagcaagaattcgttaccatcgcccgccattatcgtgtgcccgaggggacctgtagtgacatggacttcctcatagctctagcccacgaaaaatttaaaaaaaatatgtttgagaatttcgacacgtttatctactcatgtgtgtacgaagatcgtgaaaagaagaacgtgctcccaaccaaagatataaaacggctgtgcaagagctctcgtctgccactttctgacgatcttcttgaaagcctgctcagtcggtttgaagattcagagaaacagattgactataaaagcttcttcagcgccctgaactggcgtaagaaccccgtgccggagttacagccggcgagttatctgaaggagagatgcgaagatgtctggttgggcatgccctctcccatcccagccaagtacatcgattattggacctttctgaaagacgcattcgggcttgaagaggagtag

SEQ ID NO: 115543 - DNA, 2193 bp, synthetic construct
  misc_feature 1..2193: note = Description of Artificial Sequence: Synthetic coding sequence
  source 1..2193: mol_type = other DNA
tgaaataatacagcaggccgacggcggtgcttacccggtccgctcttctgggatccaggcttttcagacactgagcggcatggacctgcctctgccgcaggccagcaacttcaacctcagcgggagaaaggcgacgggagtgatgtgcccagttgggttgcatttgacaaacaagtgctctctttcgacgcctacttagaagaggaggtcctcgataaaagtcagacgaattaccgtattcgctactataaaatttacttttaccctgaagacgataccatacaggtgaatgagcccgaagtgaaaaacagcggattgttgcaagggacctccatacgccggcaccggatcaccctgccgcctcccgatgaagatcagttttacaccgtttatcactttaacgtcggaacagaagtggtattttacgggcgtaccttcaagatttatgattgtgatgccttcacacgaaactttctcaggaagattggggtaaaagtgaaccctcccgtgcagtgccctgaagatccgtacatgaaaataagaagggaggtggttgaacatgtggaacctttgagaccctatgaatcgcttgacaccctaaagcagttcttacaataccatggcaagattctgtgctttttttgcctgtgggatgattctgtatcgatgttcggagaccgacgagaactaatcttgcactattttctttgcgacgatacaatcgagattaaggagttactgcctcacagttctggcagggatgccctgaaaatgtttctgcggagatccaagctgccgaagaactgtccgccacgagtttatcaaccaggacagataaccgatcgggccgtacttaactcttacggggacttcattaagaaccaggccgatggctacctcttcgataggtacaagctcggtaaagtcgatcaagagttctataaagacagtgatctgtcactgggcgttacgatcaatgtctggggtcggaaggtgttgctgtacgactgtgatgaattcaccaagtcttactacaaatctaagtatgggattgaaaattttacctctgtttcctgtaagcccccgtcgcccccaccaaagatcgagagaaaattcccaccatataatggcttcggaagtgaggaggacagtctccgtaattgtattgacctgaaaccaacccctcatcggagaaatttcaagaaatttatggagaaggactcgtacggtagcaagagcaacattctcagatttttcgctaagcttgtgaccgataaatgtgtagatcttgaccgcatgtttgtaatatcttactacctgggggacgacaccatttcagtgtttgaacccattgaacggaatagcggcattgcaggaggaatgtttctgaaaaggtctcgcgtaaaaaaacctggccaagaagtttttaagtctgaattgtccgaatacattaaagcggaagaattgtatattggcgtgaccgtcaacgtcaatggctatctgttcagattgctgaacgccgacgagtacacccttaattacatggaacagaacaccgacaagtatcccttctcaaacctaaagctggcactgcagaagctcaaacaggaggagggtaaatcaagggagctgaaacaagttttcaaggccgccgactcaaaacatacaaacatggtggactacaacaccttcagggacatcctgatgtctttgacggtgggaaatctggctgaacaggagttcgtaactatcgcccgacactatcgcgttcccgagggaacgtgttcagatatggattttctgatagctctcgcgcatgagaagttcaaaaagaacatgtttgaaaatttcgacacctttatctatagctgcgtctatgaggaccgcgagaaaaagaacgttcttccaaccaaagacatcaaaaggttgtgtaagagttcccgtctacctctgtctgacgacctattggaatctttgctgtcaagattcgaagattctgaaaagcagatcgattataagtctttcttctccgccctgaactggagaaagaatccggtgcccgaactgcagcctgcctcctacctcaaggagagatgtgaggacgtgtggcttgggatgccgtctccaattccagcaaaatacattgactactggaccttcttgaaggacgcgtttggactggaagaagaatag

SEQ ID NO: 115544 - DNA, 720 bp, synthetic construct
  misc_feature 1..720: note = Description of Artificial Sequence: Synthetic coding sequence
  source 1..720: mol_type = other DNA
atggcatctgaagagctggcgtgtaagttggagcgcaggttgcgaagagaagaggctgaggagagtggcccccagctggcccctctcggcgccccagcacctgagcccaagcctgaacctgagccacctgctcgggcaccgacagcctctgcagacgcggaactgagcgcacagctttctagaaggttggatattaatgagggcgctgcacggccgagaagatgtagagtgttcaacccctatacggagtttccagagttctcaaggcgtcttatcaaagacttagagtcgatgttcaaactctatgacgcgggacgagacggatttattgacctgatggagcttaaactgatgatggaaaaattgggtgcaccgcaaacacacctcgggttgaagagcatgattaaagaggttgacgaagatttcgacggcaagctgtcatttcgggaatttctgctgatattccataaagccgcagcaggcgagctccaagaagattccgggctaatggccctggcgaagcttagtgaaatcgatgttgctctagagggggtaaaaggcgctaagaatttttttgaggccaaggttcaagcactgtcctcggcctctaagtttgaagcggagctgaaggccgagcaagatgagcgcaaacgtgaggaggaagagaggcgcttacgccaggccgccttccaaaagctgaaagctaactttaatacatag

SEQ ID NO: 115545 - DNA, 432 bp, synthetic construct
  misc_feature 1..432: note = Description of Artificial Sequence: Synthetic coding sequence
  source 1..432: mol_type = other DNA
atgggggaactgcagtacgacgcagggagagacggctttattgatctgatggagctgaaattgatgatggagaaactcggcgctcctcaaactcatcttggcctaaagagcatgatcaaagaggtggacgaagattttgatgggaaattgagttttagagagttcctgcttatctttcataaggcagcggccggcgagctgcaggaggacagtggattgatggcactcgccaaattaagtgaaatcgatgtcgccctagaaggggtgaagggggctaaaaacttcttcgaggctaaagttcaagccctgagctctgcttcaaagtttgaagcagagttaaaagccgagcaggacgagagaaagcgcgaagaggaggaacggcggctcagacaggccgctttccagaaactgaaggccaacttcaacacatag

SEQ ID NO: 115546 - DNA, 384 bp, synthetic construct
  misc_feature 1..384: note = Description of Artificial Sequence: Synthetic coding sequence
  source 1..384: mol_type = other DNA
atggagctgaaactgatgatggagaagctcggcgccccgcagacacacctcggcctcaagtcaatgattaaggaagtggatgaggactttgacggaaaactcagcttcagggagttcctactgatctttcataaagctgccgctggggagctccaggaggatagtgggctcatggccctggcgaagctttccgagatcgacgtcgccttagagggcgtcaagggggccaaaaactttttcgaagctaaggttcaggccctgtcgtcagcaagcaagtttgaggcggaactgaaagctgagcaggatgagagaaagagagaggaagaggaacggcggctgcgtcaagctgcctttcaaaagctaaaggccaattttaatacctag

SEQ ID NO: 115547 - DNA, 384 bp, synthetic construct
  misc_feature 1..384: note = Description of Artificial Sequence: Synthetic coding sequence
  source 1..384: mol_type = other DNA
atggaactgaaacttatgatggagaagctcggcgcaccccaaacccatctgggattgaaatccatgataaaagaagtggacgaggacttcgatggaaagctcagtttccgggagtttctattgattttccacaaggccgcagccggtgagctccaggaggatagtggcctaatggccctggcaaagctaagcgaaatcgatgtcgccttggaaggagtcaaaggggcgaagaattttttcgaagcaaaggtgcaagccctaagtagcgcgagcaagtttgaagctgagctaaaagctgagcaggacgaacgcaaaagggaagaagaggagcgccggcttcgtcaggccgccttccagaaactgaaggctaatttcaatacttag

SEQ ID NO: 115548 - DNA, 429 bp, synthetic construct
  misc_feature 1..429: note = Description of Artificial Sequence: Synthetic coding sequence
  source 1..429: mol_type = other DNA
atgtttaaattatacgacgctggtcgcgacggttttatcgatctgatggagctcaagctgatgatggagaaactgggagcccctcagactcatctaggcctcaaatctatgattaaagaagtggacgaggacttcgatgggaaactctcctttcgcgaattcctgttaatctttcacaaggctgcagctggggagctgcaagaggatagtgggctcatggcactggctaaattgtctgaaatcgacgtggcactagagggcgtgaaaggcgctaaaaactttttcgaggcgaaagtccaggcattgtcctccgcctctaagtttgaagccgagttgaaggcagaacaggacgaaagaaaacgtgaggaggaggagcggcgcctacgacaggccgcatttcagaagctgaaagcaaactttaatacttag

SEQ ID NO: 115549 - DNA, 2466 bp, synthetic construct
  misc_feature 1..2466: note = Description of Artificial Sequence: Synthetic coding sequence
  source 1..2466: mol_type = other DNA
atgccaacccgggtttgctgctgttgttccgctctgagacctcgctacaaacggctagtagacaatatcttccctgaggatcccaaggatggattagtgaaaacggacatggagaagctgacattctatgctgtgtctgctcctgagaaattagacaggataggatcctacttggctgagcgacttagccgggatgtggtaagacaccggagcgggtatgtgcttattgccatggaagccctggatcaactactgatggcctgtcactcccagagtatcaaacctttcgtcgaatcattccttcatatggtggcaaaactgttagagtctggagagcccaaattgcaagtactgggaactaattccttcgtgaaatttgcaaatatcgaagaagatacgccctcataccaccgacggtacgactttttcgtgtcgcgttttagcgcgatgtgccatagctgccactctgatcccgagataaggactgaaatccgcattgccggcatcaggggtatccagggtgtagtcaggaaaactgtgaacgatgaactgcgggccacaatttgggaaccccagcatatggataagatcgtccccagccttctgtttaacatgcagaagattgaagaggtggacagtcgcatcggtccgccaagctcaccctcagctacagataaagaagagaaccccgcggtgttagctgaaaattgttttcgagagctgctcggacgtgctaccttcggaaacatgaacaacgccgtcaggcctgtcttcgctcatcttgaccatcataagctatgggaccctaacgagtttgccgtgcactgctttaagataatcatgtatagtattcaggcacagtatagccaccatgtcattcaggagatcttaggacacttagacgcccgaaagaaagacgctccaagggtgcgcgctggaatcattcaagttctcctggaagcagtcgcaattgccgccaagggatctattggacctaccgttctcgaagtgtttaatacgcttctgaaacaccttcgattgagcgtggaattcgaggctaacgacttgcaggggggaagcgtgggatcggtgaacttaaacacctcttcaaaagataacgacgagaagattgtgcagaatgccattatccagacaatcggcttttttggctcaaacctgcccgattatcagcgctccgagatcatgatgttcatcatgggtaaggtgccggtgttcggcacaagcacacacaccctggacatctcccagctaggggacctgggaacccgcaggatccaaatcatgttgcttaggagcttactcatggtgacttcggggtacaaggccaaaactattgtgaccgcactgcccggcagttttctcgaccctcttcttagtccttccctcatggaggactatgaactccgtcagttggtgctggaggtgatgcataacctcatggaccgccatgacaatcgggctaagctgaggggaatcagaatcatacccgacgtcgccgacttaaagatcaaacgcgaaaagatctgccggcaagatacatccttcatgaagaagaacggccagcagctgtaccgccacatctatctgggatgcaaggaggaagataacgtgcagaaaaattatgaattattatacaccagcctcgctctgatcacaatcgagctggccaatgaggaggtagtgattgatcttattcgactcgctatcgctttacaggatagcgctatcatcaacgaggacaatctgcctatgtttcatcgctgcggcatcatggcactggtggcagcatatttaaacttcgtcagccagatgattgccgtgccagctttttgtcagcatgtgtctaaggtcatcgaaatccggactatggaagccccctatttcctcccagaacatatctttcgggataagtgcatgttgcccaagtctctggagaaacatgagaaggatttgtactttttgactaataagattgcggagtccttgggagggtcaggatattcagtcgaacgtttgtctgtgccatatgtaccacaggtgacagacgaagacagactttctcgtcggaagtctatagtggacacggtttctattcaagtcgacattctatctaacaatgttccttccgatgatgttgtgagtaacacagaagaaataactttcgaggcccttaagaaggcaatcgacacgagcgggatggaggagcaggagaaggaaaagcgtaggcttgttatcgagaaattccagaaagcccctttcgaggaaatcgcagcacagtgtgagtcaaaggctaatctgctgcatgaccgcctagcacaaatcctagagctaaccatcagaccacctccttccccttcaggaacattgacaatcacttcgggtcacgctcaatatcagtccgttccagtttatgagatgaagttcccggatctttgcgtgtactag

SEQ ID NO: 115550 - DNA, 2466 bp, synthetic construct
  misc_feature 1..2466: note = Description of Artificial Sequence: Synthetic coding sequence
  source 1..2466: mol_type = other DNA
atgaaatcacgtgtgtgttgctgctgttcagccctgcggcccagatacaagagacttgtcgataatatttttcctgaagatcccaaagacggcctcgtaaaaactgacatggaaaagctcaccttttacgctgtgagcgctcctgagaagcttgacagaattgggtcctacctcgccgaaaggcttagcagggacgtcgtccgccacaggagtgggtatgtgcttatcgccatggaggctcttgatcagcttctgatggcgtgccattctcaaagcattaagccatttgtcgagtcctttttacacatggtggccaaactcctggagagcggggagccaaagttacaggttctcgggacaaactcatttgttaagttcgcgaacattgaagaagacaccccatcttaccatcgccgatacgatttttttgtgagtcgtttcagtgccatgtgtcattcttgccactctgatccagagatccggacagaaattcgcattgcaggtatcaggggaattcagggggtggtgcggaaaactgtcaacgacgaattgagagctaccatttgggagccgcagcatatggacaagatagtgccctccctgctgttcaatatgcagaaaatagaggaagttgactcaaggattggccctcccagttcaccatccgccacggacaaggaagaaaatcccgcggttcttgccgaaaattgcttcagagagttacttggcagagcgacttttggaaatatgaataatgccgtaagacctgtgttcgcccatctggatcaccacaagctttgggaccctaacgagttcgccgttcattgtttcaagatcatcatgtattccatccaggctcagtatagccatcatgtgatccaagaaatcctggggcacctcgacgcgcgtaaaaaggacgccccacgggtgcgagccgggatcattcaggtactgcttgaggccgtcgccatagccgccaagggtagcattggaccgactgttttggaggtgttcaacactttattaaagcacctgcggctgagtgtagagttcgaggcaaacgatctgcaagggggcagcgtaggcagcgtgaacctgaacacgtcatccaaggacaacgatgaaaagatcgtccagaatgcgatcattcagactatcgggttcttcggtagcaatttgccagattatcagagatccgagattatgatgttcatcatgggcaaggtccctgtgttcggcacttctacccacactcttgatattagccagttaggagacctgggaacaaggcgcatccagatcatgctcctgaggtccctgctgatggtgaccagcggatacaaagccaaaacaatcgttacagctctccccggcagcttcctggacccactgctatcaccctccctcatggaggactacgaactccgacagctggtgctggaggtgatgcataacttgatggatcggcacgacaaccgggcgaaacttagggggatccggattatccccgatgttgccgacctgaaaatcaaaagggagaagatatgccgccaggacacttctttcatgaaaaaaaacggccagcagctgtatcggcacatttacctcgggtgcaaggaagaggacaatgtgcagaaaaattacgagctgctgtatacctccctggctctcatcacaatagagctagcaaatgaggaagtggtgattgacctgattcgcctggcaattgcgctgcaagactccgctataatcaatgaggacaatctgccgatgtttcatcggtgtggcatcatggcgttggtcgccgcttatctcaatttcgtctcccagatgatcgcggtcccagctttctgtcaacacgtgtctaaggtgatcgaaatcaggactatggaagctccctacttcctgccagagcacatttttagagacaagtgtatgcttccaaaatcgttagaaaagcatgaaaaagacctctacttcctcacaaacaagatcgctgagtcactcggtggctctggctactcagttgaaaggctctccgttccctacgttccacaggtaacggacgaggatcgcttgtccaggaggaaaagtatcgtcgacacagtaagcatacaggttgatatcctctctaacaatgtgcccagtgacgacgtagtctcaaacactgaagaaattactttcgaagccctgaagaaggccattgatacctcagggatggaggagcaggagaaagagaaacgccggctagtgattgagaaatttcagaaggccccgtttgaggaaatcgccgcgcaatgtgaatcgaaagctaacctgcttcacgataggctggcacagatcctagaactgaccattaggccccctcccagccctagcgggaccctaacgatcactagtggacatgctcaataccaatctgtccctgtgtatgaaatgaaatttcctgatttgtgcgtttactag

SEQ ID NO: 115551 - DNA, 2334 bp, synthetic construct
  misc_feature 1..2334: note = Description of Artificial Sequence: Synthetic coding sequence
  source 1..2334: mol_type = other DNA
atgcctaagggtgtttgttgttgttgttccgccctccgcccccggtacaagcgcctggtggataacatcttccccgaagaccccaaggatggccttgtcaagaccgacatggagaaattgaccttctacgctgtcagcgcccccgagaagctagatagaatcggctcgtatctggccgagagattgagtagagacgtggtgcggcacagaagtggatacgtgctgattgctatggaggctctcgatcaactgcttatggcttgccacagccagtctatcaaacctttcgttgagtcatttttgcatatggtggctaaactgctcgagtccggagaaccaaagcttcaagtcctcggcactaattcctttgttaaattcgcaaatattgaggaggacacccctagttaccatcggcggtatgacttcttcgtgtccaggttcagtgctatgtgccactcttgccactccgatcccgagatccggacagaaatccgaatcgccggcatccgcggtatccagggggttgttaggaagacagtcaacgacgagctaagggccaccatttgggagcctcagcacatggataagatcgtgcccagtctgcttttcaatatgcaaaagattgaagaggtcgactcccggatcggccctccaagttcgccgagtgcgacagacaaagaggagaatcctgctgtgcttgctgaaaactgcttccgcgaactcctggggcgtgccacattcgggaacatgaataacgccgtgcgccccgtatttgcccacctggaccatcacaagctgtgggatccaaacgaatttgcagttcactgtttcaagattatcatgtactccatccaggcccaatatagtcaccacgtcatccaggagatccttggtcacctggatgctcgcaagaaggatgcacccagggtgcgggccggcatcattcaggtcctgctcgaggctgtggccattgctgccaagggaagcatcggccccacagtgttggaagtcttcaacaccttactgaagcatcttcgactgtctgtcgagtttgaagctaatgacctgcaggggggcagcgttggcagtgtgaacctcaatacatccagtaaagataatgacgagaaaatagtccaaaacgcaattattcagaccatagggttcttcggttctaatcttcctgattaccagaggagcgagattatgatgtttatcatgggcaaggtccccgtttttggcaccagtacccacacgctagacatcagtcagctgggggacctgggtactaggaggatccagataatgttgctgagatcgctgctgatggttacgagcggttataaagccaaaactatcgttactgccctccctggaagtttcttggaccccctcctgtctccctccctgatggaggactacgagcttcgccagctggtgctggaagtgatgcacaacctgatggatagacacgataaccgtgctaaactgagagggatccggatcatccccgacgtcgctgacctcaagatcaagcgagaaaaaatctgccgccaggacactagcttcatgaagaagaacgggcagcagctgtatagacatatttacctggggtgtaaggaggaagacaatgtgcagaagaactacgagctactctacacttcactagcgctcataacaattgagctggccaacgaggaagtagtgatcgacttaatccgcctggcaatcgctctgcaggacagcgcaatcataaatgaggacaacctgccgatgtttcacagatgcggtataatggcactggtcgcggcctatttgaatttcgtcagccagatgatcgcggtcccagcattctgccacaagattgcagagtctcttggtggctccggctatagcgtggagcgcctgtcagtaccttacgtgcctcaggtaactgatgaggatcgccttagccggagaaagtctatagtggatacagtcagtatccaagtggacatcctgagtaacaatgtgccaagcgatgacgttgtttcaaacaccgaggagattacttttgaagcactaaagaaagccattgacacaagcgggatggaggaacaggagaaagaaaaacgcaggttagtcatcgagaaattccagaaggccccattcgaggagatagccgcgcagtgtgagtccaaggccaatctgcttcacgaccggctggctcaaatactcgaactaaccatccgccctccaccgtctcctagcgggactctgacgataaccagcggccatgcccaataccaaagtgtccctgtctatgaaatgaaatttcccgacctctgtgtctattag

SEQ ID NO: 115552 - DNA, 603 bp, synthetic construct
  misc_feature 1..603: note = Description of Artificial Sequence: Synthetic coding sequence
  source 1..603: mol_type = other DNA
atgctggctcgcctgctgaagttcgaagaggcaccctactttctgcctgaacatatctttcgagataagtgcatgttgcccaagagccttgagaagcacgaaaaagatctgtacttcctcaccaacaagattgccgagtcgttggggggttcggggtacagcgttgagcgactgtcagtcccctatgtgcctcaggtgactgacgaagaccggctaagtcggaggaagtctatagtcgacactgttagcattcaggtggatattctgtcaaacaacgtgcctagtgatgatgtggtctctaatactgaggagatcacgtttgaggcactcaagaaagccattgatacctctggtatggaggagcaggaaaaagagaaaaggaggctggtgatcgaaaagtttcagaaagctcctttcgaggaaattgccgcacaatgtgaatcaaaagccaatctactgcacgacaggcttgctcaaatactggaattgacaatccgccctccgccctctccatccggaaccctgactatcacctccggacatgcacagtaccagagcgtccccgtttatgagatgaagtttccagacctatgcgtatattag

SEQ ID NO: 115553 - DNA, 2358 bp, synthetic construct
  misc_feature 1..2358: note = Description of Artificial Sequence: Synthetic coding sequence
  source 1..2358: mol_type = other DNA
atggagaaattaacattctatgccgtgtccgcacccgagaaattagatcgtatcggaagttatctcgccgagcgactgtcgcgggatgtggtcagacacagaagcgggtacgtattgattgctatggaagcactagatcagctcctgatggcgtgtcactcacagtccataaagccctttgttgaatctttcctccatatggttgcaaagttgctggaaagcggggagcctaagcttcaggtgctgggaacaaatagcttcgtaaaattcgcaaacattgaggaggacactccttcttatcaccgtcggtacgattttttcgtctcaaggttctcggcgatgtgtcatagctgtcactccgaccccgaaatacggaccgaaatacgaatcgcaggaatcagaggaatacaaggtgttgtcaggaagaccgtgaatgatgagctgagagccactatttgggagcctcagcacatggacaagattgtgccctccctgttgtttaacatgcagaaaatcgaggaagttgattcccgcattgggcccccctctagtccgagcgctacggacaaggaggagaatccagctgttctcgccgaaaactgcttccgcgagctgttgggaagagcaacatttggcaatatgaacaatgctgtgcgtcccgtgttcgcccacttagaccaccacaaactgtgggacccaaatgagtttgcggtccattgcttcaaaataattatgtactcgattcaggcccaatacagccaccatgttattcaggagatattgggtcacctcgatgctcgaaagaaagacgcgccacgtgtgcgcgcaggcatcatccaagtcctgctggaggcggttgccatcgctgcgaagggcagtattgggccaaccgtgttggaggtctttaataccctgcttaaacacctgcggctctccgtggagttcgaggctaatgacctgcagggaggcagcgtgggaagcgtgaatctaaatacgagctccaaggataatgacgaaaagatcgttcaaaacgccatcatccagactattggattcttcggatccaacctaccagactatcagagaagtgaaatcatgatgtttattatgggcaaggtgcctgtgttcggcacgagcactcacaccctggatatatctcaactgggggacctcggcacccgaagaatccagatcatgctcctgagaagtttactaatggtgacctcaggatataaggccaaaacaatcgtcacagctctccccggatccttcctggacccactgctctcccccagtctaatggaggactacgagctcaggcagctagtcctggaggttatgcataatcttatggatcggcacgataatcgggcgaaactgcgaggcattcgcatcatccccgacgtggccgatctgaagatcaaaagagagaagatttgccggcaagatacatcctttatgaagaaaaacggacagcagctgtacagacacatctatctagggtgcaaggaggaagacaacgttcagaagaactacgaactgctgtacaccagtcttgcacttatcaccattgagctggccaacgaggaagtggtgatcgaccttatccggctcgctatcgcactgcaggactcagcaatcataaacgaggacaatttgcctatgtttcatcgttgcggcataatggccctggtagctgcctatttgaatttcgtaagccagatgattgctgtgcctgccttctgccagcacgtgtcgaaggtcattgaaataagaacaatggaagcaccttactttcttccggaacacatcttcagggataaatgtatgctgccaaagtcccttgagaagcacgaaaaggacctgtatttccttaccaacaaaattgctgagagcctgggcggctcagggtattctgtagaaagactgagcgttccttacgtgccacaggtgactgatgaggatcgcctctcccgtagaaaaagcattgtagacacagtgagcattcaagtagacatcctctcaaacaatgtgcccagcgatgatgtggtgtctaacacagaagagattacattcgaagcattaaaaaaggccatcgatacgtcaggaatggaggagcaagagaaggaaaagagacgtctggtgatcgagaagttccagaaagcgccattcgaggagattgccgcccagtgcgaatccaaagccaatcttctacatgatagactcgctcagatcctcgagctcaccattagaccacctccttctccatcgggaaccctcactatcacatcaggacacgctcaataccagagcgtgccggtctatgaaatgaagttccccgacctctgtgtctactag

SEQ ID NO: 115554 - DNA, 1482 bp, synthetic construct
  misc_feature 1..1482: note = Description of Artificial Sequence: Synthetic coding sequence
  source 1..1482: mol_type = other DNA
atgctcaaggcactgtttctaaccatgctcactctggcgttggtcaagtcacaggatacagaggagactatcacctatacgcagtgtacagatggttacgagtgggatcccgtgaggcagcagtgcaaagatatcgacgaatgtgatatcgtgccagatgcttgcaagggagggatgaagtgcgtgaaccattacggcggctacttatgcctgcccaaaacagcccaaattatcgtgaataacgagcagccgcaacaagagacccagcccgcagaaggaacaagtggcgcaactaccggggttgttgcagcgtcttccatggccactagcggtgtactgccaggcggtgggttcgtggcgtctgcggccgccgtggccggaccagagatgcagaccgggaggaataacttcgtgatcaggaggaaccccgcagatccacaaaggattccatctaatccctctcatagaattcagtgcgcggcaggctatgaacagagtgagcacaacgtgtgccaagacatcgacgagtgtacagccggcactcacaactgccgcgccgatcaagtctgtattaacctgagagggagttttgcctgtcaatgtccaccaggctatcagaaacgtggagagcaatgtgtagacatcgacgaatgcaccattccaccttactgtcaccagcgctgcgtgaataccccgggctccttctactgccagtgctctccgggatttcaactggcagccaataactacacctgcgtggacatcaatgaatgcgacgctagtaatcaatgcgctcaacagtgctataatattctgggttccttcatttgccagtgtaaccaaggttacgagctgtcatcagacagactgaattgcgaagacatcgacgaatgccgtacatcgtcctacttgtgtcaatatcagtgcgtaaacgaacccggcaagttcagctgcatgtgcccccagggttatcaggttgtgagaagcaggacatgtcaggatatcaatgagtgcgagaccacaaacgagtgccgcgaagatgagatgtgctggaattatcacggaggtttccgctgctatcctcggaacccctgccaggacccatatatcctgacacccgaaaatcggtgcgtctgccctgtctccaacgctatgtgtagagagctgcctcagtccatcgtatataaatacatgtctatccggtccgacaggtccgtacctagcgacatctttcagatccaggccaccaccatttatgcaaacacaataaacaccttcaggattaagtcgggcaacgagaatggtgagttttatctgcgacagaccagtccagtttctgcaatgctggtgctcgttaaatctttgagtggcccacgggagcacattgtggacctggaaatgctgacagtctcaagtatcggcacctttagaactagttcagtcctcaggctcaccatcatagtgggccctttttcgttctag

SEQ ID NO: 115555 - DNA, 1482 bp, synthetic construct
  misc_feature 1..1482: note = Description of Artificial Sequence: Synthetic coding sequence
  source 1..1482: mol_type = other DNA
atgttgaaagctctgttccttaccatgttgactctggctttggtcaagagccaggatacggaagagaccattacctacacgcagtgcaccgacggctacgaatgggaccctgtgaggcagcaatgtaaggatatagacgagtgcgacatcgtaccagatgcgtgtaagggagggatgaaatgcgtgaaccactacggcggctacctgtgcctccccaaaaccgcccagattatcgtcaacaacgaacagccccagcaggagacacagccggcagagggcaccagcggagctacaactggcgtcgtggccgcgtcttcaatggccaccagcggagtactgcccgggggcggcttcgttgcatcggccgcagcagttgctggccctgaaatgcaaacaggcaggaacaacttcgtgattagaagaaatcctgccgatcctcagcggataccctccaatcccagtcatcgaattcagtgtgctgcgggatatgaacagtcagagcacaacgtgtgtcaagatatcgacgaatgtactgccggtactcacaattgcagagctgatcaggtgtgtataaacttgagaggttctttcgcctgtcagtgcccaccggggtaccaaaagcgtggcgagcagtgcgtggacatagatgaatgcactatacctccatattgtcatcagcgctgtgttaacacacccggcagtttttattgccagtgctcccccggctttcagctggctgccaataattatacttgcgtcgacattaacgagtgcgacgcaagcaaccagtgcgcacagcagtgttataatatcctggggagttttatttgccagtgtaatcaagggtatgagctgagcagtgataggttgaattgcgaggacatcgacgaatgccgtacttcgagctacctgtgccagtatcagtgtgtaaacgagccaggaaaatttagttgcatgtgtccacagggttatcaggtggttaggtctaggacctgtcaggacatcaacgaatgcgagacaaccaatgagtgccgagaggatgagatgtgttggaattatcatgggggctttagatgctacccccggaacccctgccaggatccctacatcctgaccccagaaaatcgttgtgtgtgccctgtctctaatgccatgtgccgagagctgccccagtccatcgtgtacaaatacatgtcaattcgcagcgacaggtccgtgccctccgacattttccagattcaggccaccactatctacgccaatacgataaacacatttcgcattaagtccggcaatgaaaacggagagttttaccttagacaaacctcacccgtttcggcaatgttggttctggtgaagagtctgtcagggccaagggaacatatcgtcgacctggagatgctgaccgtaagttccatcggcaccttccggacttcttcggtgttaagattaacaattatagttggtcccttcagtttttag

SEQ ID NO: 115556 - DNA, 1482 bp, synthetic construct
  misc_feature 1..1482: note = Description of Artificial Sequence: Synthetic coding sequence
  source 1..1482: mol_type = other DNA
atgctgaaggctctgttcctgacaatgctcaccttggcgctagtgaagagccaggataccgaggagacgattacttacacccagtgtaccgatggatacgaatgggatcccgtccgacagcagtgcaaggacatcgatgagtgtgatatcgtgcccgatgcatgtaaaggcggaatgaagtgtgtgaaccattacggtggctatctatgtcttcccaagactgctcagatcatcgttaacaacgagcagccccagcaggaaacccaaccagccgagggaacctctggcgctactacaggagtcgtggctgccagctctatggcgacttcaggcgtccttcccggaggcggcttcgttgcaagcgctgctgctgtggctggccctgagatgcagactggccggaataactttgtaattcggagaaatcccgccgatccccaacggattccgtccaaccccagccatcggatccagtgcgccgccgggtacgagcagtccgaacacaatgtttgccaggatatcgatgaatgcacagccggcactcacaattgcagggctgaccaggtgtgcataaacctcagaggatcatttgcttgccagtgcccacccggttatcaaaagaggggcgaacaatgtgtggatatcgacgagtgcaccatacctccttattgccaccagagatgcgtaaacacccctggctccttctactgtcagtgctctcccggcttccagctggcagcaaataactatacgtgcgttgatatcaacgaatgtgatgccagtaatcaatgcgcacaacaatgctataatattctcgggtccttcatctgccaatgtaatcaggggtatgagttatcttctgatcggttgaactgtgaagatattgacgaatgcaggacttcatcatatttgtgtcagtatcagtgtgttaacgagcctggcaagttctcttgcatgtgtccacagggatatcaagtggttcgttcacgcacatgccaggatatcaacgagtgcgaaacaaccaacgaatgcagggaggatgaaatgtgttggaattaccacggagggtttcgatgttaccccaggaatccatgtcaggacccttatatactaacccctgagaaccgctgcgtgtgccccgtttcgaacgctatgtgtcgggagcttccacaatctatcgtctataagtatatgtctatccggtctgatcgctcagtcccttccgacatctttcagatccaggccacaactatctacgccaacaccatcaacactttccgaatcaaaagcggaaacgaaaatggtgagttctacctccgtcagacctctcccgtgagtgcaatgcttgtgctggtgaagtctttgtcaggacctagggaacacatcgtagatctcgaaatgctcactgtgagctctatcggtacatttagaacctcatcagtcctgcgcctgaccatcattgtcggacccttcagtttctag

SEQ ID NO: 115557 - DNA, 1050 bp, synthetic construct
  misc_feature 1..1050: note = Description of Artificial Sequence: Synthetic coding sequence
  source 1..1050: mol_type = other DNA
atggaggacacgagtgcttttcggaagcagccccgactgttgagcataatgaatagtttgtcctcagaacacaacgtgtgtcaggacattgacgagtgcaccgccgggacgcataactgcagggcagatcaggtttgtataaatctgcgtgggtccttcgcctgtcaatgccctcccggctaccagaaacgcggagagcagtgcgtggacatcgacgaatgtaccatacctccttactgccaccaacgctgcgtgaatacaccaggcagtttctactgccaatgtagtccagggttccagctggccgcaaataactacacttgtgtcgacattaacgagtgcgacgcttctaatcagtgtgcccagcagtgttataatatactcgggagttttatctgtcagtgtaaccagggttacgaactgtcctctgaccgattaaattgtgaggacattgacgagtgcagaacatccagttacttatgtcagtaccagtgtgtcaatgagccggggaagttttcttgtatgtgtccgcagggctaccaggttgtacgcagtagaacctgtcaggatatcaacgagtgtgaaaccactaacgagtgcagggaggatgaaatgtgttggaattaccacggggggttcaggtgttacccgcgcaacccatgtcaggatccatacatcttgactcctgaaaatcggtgcgtgtgccctgtctcgaacgccatgtgtcgggagctacctcagtctatcgtgtacaaatatatgagtatccggtctgaccggtcagtaccaagcgacatcttccaaatccaggccacaacaatatacgcaaataccatcaatacctttagaataaaaagcggtaacgagaacggcgagttttatctgcgacagacatcccctgtgtctgccatgctggtgcttgtaaagtcactgtccgggccacgagaacacattgttgatctggagatgctgactgttagctccatcggtacctttcgcacgtcttctgtgttgcgcttgaccatcatcgtagggcctttctctttttag

SEQ ID NO: 115558 - DNA, 159 bp, synthetic construct
  misc_feature 1..159: note = Description of Artificial Sequence: Synthetic coding sequence
  source 1..159: mol_type = other DNA
atgctgaaagccctgttccttaccatgctgacgctcgccctggtcaaatcacaggatacagaagaaaccatcacgtatacccagtgtaccgacggttatgagtgggaccctgtccgacaacagtgcaaggacatcgatgagtgcgatattgtaccctag

SEQ ID NO: 115559 - DNA, 84 bp, synthetic construct
  misc_feature 1..84: note = Description of Artificial Sequence: Synthetic coding sequence
  source 1..84: mol_type = other DNA
atgctcaaggccctgttccttactatgttaacccttgccctggtgaaatctcaggatacggaggagaccatcacatacacctag

SEQ ID NO: 115560 - DNA, 1068 bp, synthetic construct
  misc_feature 1..1068: note = Description of Artificial Sequence: Synthetic coding sequence
  source 1..1068: mol_type = other DNA
atgaagtgtgtgaaccactatggcggatatctgtgcttaccaaaaacggctcagattatagtaaacaatgaacagccccagcaggagacacagcccgctgaaggcacatccggcgctactacaggagtggtggctgcctctagtatggctacaagcggcgtcctgccagggggagggttcgtggcctctgcggccgccgtggctgggcccgagatgcagactgggcgtaataactttgtcatcaggagaaacccagccgacccgcagcggataccctctaacccatcccaccggatccagtgtgccgcggggtatgaacagagtgagcacaatgtatgtcaggatattgatgagtgcaccgccggtacccataattgcagagcagaccaagtttgcattaatctaaggggttcatttgcttgtcagtgcccacccggataccaaaagagaggcgaacagtgtgtggatatcgatgaatgtcgaacttcatcttacctctgccagtaccagtgcgtgaacgagccaggaaagttttcttgcatgtgtccccagggatatcaggtcgtgagaagtaggacgtgtcaggatatcaatgaatgcgaaacaacaaatgagtgccgtgaagacgaaatgtgctggaattatcacgggggcttccgctgctaccctaggaacccttgtcaggatccatacatcttaacccctgagaatcggtgcgtttgcccagtgtcgaacgccatgtgtcgggagttgccccagtctatagtatataaatacatgtcaatccggagtgaccgtagcgtgccctcagacatttttcagatccaggccaccacaatctatgcaaatacaatcaataccttcagaattaaatccggaaacgaaaacggcgagttctacctgcggcagacctcaccggtgtctgccatgctcgttctggtgaagtctctcagcggaccaagggaacacatagtcgatttggaaatgctgacagtgtcctccattggaaccttcagaacatcctccgtcttgcggttgacaataattgtcggacctttctccttttag

SEQ ID NO: 115561 - DNA, 264 bp, synthetic construct
  misc_feature 1..264: note = Description of Artificial Sequence: Synthetic coding sequence
  source 1..264: mol_type = other DNA
atgcttaaggcgttgttcctcacgatgctgacactcgccttggtgaagtcacaggacaccgaggaaactatcacttatacacagtgcaccgatggttatgaatgggatccggttcggcaacagtgtaaagacatcgatgagtgcgacattgtgccagacgcatgcaaaggcggcatgaagtgcgttaatcactacggcggatatctttgtctgcccaaaaccgcgcagattattgtgaataacgagcagcctcagcaggagtag

SEQ ID NO: 115562 - DNA, 519 bp, synthetic construct
  misc_feature 1..519: note = Description of Artificial Sequence: Synthetic coding sequence
  source 1..519: mol_type = other DNA
atgcttaaagcattatttctaacaatgcttaccctcgcgctcgtaaaaagccaggacacagaggagactattacgtatacccagtgtactgacggttacgagtgggaccctgtgagacagcaatgcaaggacatcgacgaatgcgatattgtgcccgacgcttgtaaagggggcatgaaatgcgttaaccactacggagggtatctatgcttacccaagaccgcgcagattatcgtgaataatgaacagcctcagcaggagacacagcccgctgagggcacctccggagcaacaacaggggtagttgccgcatctagcatggcaactagtggcgtcctcccaggcggtggctttgtggctagcgctgccgccgtggcagggccagagatgcagaccggtagaaacaattttgtgatccggcggaaccccgccgatccccaaaggatccccagcaacccttctcatcggattcagtgtgcggctgggtacgaacagtctgaacacaacgtgtgtcagtag

SEQ ID NO: 115563 - DNA, 360 bp, synthetic construct
  misc_feature 1..360: note = Description of Artificial Sequence: Synthetic coding sequence
  source 1..360: mol_type = other DNA
atgctgaaggcacttttcctcactatgttgactctggccctggtcaagtcccaggacacagaggaaacgataacatacacccagtgcactgacgggtatgagtgggatcccgtgcgccagcagtgtaaagatatcgacgaatgcgatatcgtgccagacgcctgcaaaggggggatgaagtgcgtgaatcattatggtggctacctctgcctcccaaagaccgctcagatcatagtgaataatgagcagccacagcaggaaactcagcctgcggaaggcacctcgggggctactacaggggttgtggcggcatctagcatggcaacatcaggagttctaccaggaggcgggtttgtttag

SEQ ID NO: 115564 - DNA, 321 bp, synthetic construct
  misc_feature 1..321: note = Description of Artificial Sequence: Synthetic coding sequence
  source 1..321: mol_type = other DNA
atgctcaaggcactcttcttaaccatgctgactctcgcgctggtgaagtcacaggataccgaggagacgataacatatacccagtgcaccgatgggtatgagtgggatcctgtgcgccagcagtgtaaggatatcgacgagtgcgatattgtgcctgacgcgtgtaaagggggcatgaagtgcgtcaatcattatggcggatacctgtgcctgccaaagaccgcccagattatcgtgaataatgaacaaccacagcaggaaactcagcctgccgaggggacaagcggagcgaccactggcgtagtagcagcctccagttag

SEQ ID NO: 115565 - DNA, 189 bp, synthetic construct
  misc_feature 1..189: note = Description of Artificial Sequence: Synthetic coding sequence
  source 1..189: mol_type = other DNA
atgctcaaggccctttttctgacaatgttaactctcgcactggtgaagtctcaggacaccgaggaaaccattacttacacccagtgtacagatggttatgagtgggatccagtcagacaacagtgcaaagacatcgatgagtgcgacatcgtgcccgatgcatgtaaaggaggaatgaagtgtgtatag

SEQ ID NO: 115566 - DNA, 1332 bp, synthetic construct
  misc_feature 1..1332: note = Description of Artificial Sequence: Synthetic coding sequence
  source 1..1332: mol_type = other DNA
atgttgccatgtgcctcttgcctcccaggcagtttactactgtgggcgctcttgctgctgttgctgggctctgccagccctcaggatagtgaggagccagattcttacaccgaatgcaccgatggctacgagtgggaccccgactctcagcattgcagggacgtgaacgagtgcttgactatccccgaggcatgtaagggcgaaatgaaatgcattaatcactacgggggctatctgtgcctgccacggtcagccgccgttatcaatgacctgcacggagaggggcccccgccccccgtgcccccggcccagcaccctaacccttgtccacccggctatgaacctgacgatcaggattcatgcgtggatgtggatgagtgcgcacaggctctgcatgactgccgaccaagtcaagactgccataacctccccggatcttaccagtgtacatgtcctgatggatatcggaaaataggaccggaatgtgtcgacatcgacgaatgccgataccggtactgccagcataggtgcgtcaacctgccaggctcttttcggtgtcagtgtgaaccagggttccagctcggacccaataacaggtcctgcgtcgacgtcaatgagtgtgatatgggcgccccatgtgaacaaagatgtttcaactcgtatggaacctttctctgtcgctgtcaccagggatacgagttacaccgggacgggtttagctgcagtgacattgatgagtgcagctactcatcctatctctgccaataccggtgtatcaatgaaccgggccgattcagctgccattgcccccagggctatcaattgcttgccactcggctatgccaggacattgacgagtgcgaatcaggagctcaccagtgcagcgaggctcaaacctgcgtgaacttccacggtggctacaggtgtgttgacacgaatagatgtgtggagccctacatccaagtttccgagaaccgatgcctgtgtcccgccagtaacccactatgtcgtgaacaacctagctctatcgtacatagatatatgactataaccagcgaacgtagcgtacccgctgacgtgtttcagattcaggccaccagtgtgtatcccggggcctataatgcgttccagatcagggccgggaactcccagggagatttttatatccgacagatcaacaacgtgtccgctatgttagtactcgctcgaccagttactggtccgagagaatatgtcctggacttagagatggtcaccatgaacagtcttatgtcctacagggcctcaagtgtcctacgactcaccgtttttgtcggcgcctacaccttctag

SEQ ID NO: 115567 - DNA, 609 bp, synthetic construct
  misc_feature 1..609: note = Description of Artificial Sequence: Synthetic coding sequence
  source 1..609: mol_type = other DNA
atgctgccgtgcgcttcatgcctgcctgggtctctcctcctttgggctctgctgctgctcctcctaggtagtgcttctccccaagattctgaagaaccagactcttataccgaatgtacagacgggtatgaatgggatccagatagccagcattgtcgagacgtgaacgagtgcttgactattcctgaagcctgtaaaggtgagatgaagtgtatcaaccattacggtgggtatctctgtttgccgcgctctgctgcggtcataaacgatctgcacggcgagggccctccccccccagtgccgcctgcccagcatcccaatccctgtccacctggctacgaacccgacgatcaggatagttgcgtagacgtggatgaatgtgcacaggccctgcacgactgtcgtccttcacaggactgccataatctccccggtagctatcaatgtacatgcccagacgggtatcggaaaatcggccccgagtgtgtcgacatcgacgagtgcaggtacagatactgccaacatagatgtgttaatctccctggttccttccggtgtcaatgtgagcccggctttcagctcggacctaacaatagatcctgtgtgtag

SEQ ID NO: 115568 - DNA, 552 bp, synthetic construct
  misc_feature 1..552: note = Description of Artificial Sequence: Synthetic coding sequence
  source 1..552: mol_type = other DNA
atgctgccgtgtgcctcgtgcctgccaggctccctcttactgtgggcccttttgttacttttgctgggctctgcaagcccccaagattctgaagaacctgacagctacacagagtgtaccgacgggtatgagtgggacccagactcacagcattgtagggatgtgaacgaatgcctgactatcccggaagcatgcaagggcgagatgaagtgtattaatcactatggaggttacttgtgtctcccgaggtcagccgctgtcatcaatgaccttcatggcgagggacctcctccaccagtacctccagctcaacatcctaatccgtgcccgccaggttatgagcccgacgaccaggacagctgtgttgatgttgacgaatgcgctcaggcgctgcacgactgcagaccaagccaggattgccataacctcccagggtcttatcaatgcacctgtcctgacggctacaggaaaattgggccggagtgcgtcgacatagacgagtgtcggtaccggtattgtcagcaccgctgtgtgaacctccctggaagttag

SEQ ID NO: 115569 - DNA, 1332 bp, synthetic construct
  misc_feature 1..1332: note = Description of Artificial Sequence: Synthetic coding sequence
  source 1..1332: mol_type = other DNA
atgctgccctgtgctagctgcctgccaggatccctgctgctatgggctttgctgctgttgctcctagggtctgccagcccccaagacagcgaggaaccagattcctacactgaatgtacggacggctacgagtgggacccagattcccagcactgtcgggatgtaaacgagtgcctgacaattcccgaagcgtgtaaaggggagatgaagtgcattaatcattacggcggctacctgtgccttccacggtcagctgcagttattaatgaccttcacggagagggcccaccaccaccagtccccccagcgcagcacccaaatccctgcccccccggttatgaacccgacgaccaggacagttgtgtcgatgtagacgagtgtgcacaggccctgcacgattgccggccatcccaggactgccataacctgcctgggagttaccagtgtacttgtccggatggataccgcaagatcgggcctgaatgcgtggatattgacgaatgtagataccgttattgtcagcatcggtgtgttaatctgcccggatcctttcgctgccagtgcgaaccaggtttccagctcggacctaacaacagaagctgtgtagacgtgaacgaatgtgacatgggagctccatgtgaacagagatgtttcaattcctatgggacatttttgtgtcgatgccatcagggatacgaactgcacagagatgggttttcctgttcagacatcgacgagtgtagctactcgtcatacctttgtcagtataggtgcatcaacgagcccggtaggttttcttgccactgtccacagggctaccagctgctggcaacccgactgtgtcaggacatcgacgagtgtgagagcggagcacaccagtgtagcgaagctcagacctgcgtcaacttccacgggggttatagatgcgttgacacaaacaggtgcgttgaaccttatattcaggtgtcagaaaacagatgcctttgccccgctagcaatccactgtgtcgcgaacagcctagctccatcgtccaccgatacatgaccataacatccgagagatccgtgcccgccgacgtgttccagatccaggccacctccgtctatcccggggcctacaacgcattccaaatccgggcaggcaacagccaaggcgatttctatattcgccaaatcaacaacgtgtccgccatgttggtcctagctcgtcctgtgacaggaccacgggagtatgtcctcgatctggagatggttaccatgaattcgctgatgagctatagagcttcttccgtgctccgacttactgtctttgtgggggcttatacattttag

SEQ ID NO: 115570 - DNA, 2466 bp, synthetic construct
  misc_feature 1..2466: note = Description of Artificial Sequence: Synthetic coding sequence
  source 1..2466: mol_type = other DNA
atgcgaggctttaacctcctgctgttctggggatgctgcgttatgcattcctgggaaggccacatccggccaaccagaaaacccaataccaaggggaacaactgccgcgatagcacgctctgcccagcgtatgccacttgcacaaatacggtggatagctattattgcgcctgcaagcaggggtttctgagttctaatggccagaaccatttcaaggaccccggcgtgcgatgtaaagacattgatgagtgcagccaaagtcctcagccatgcggccccaacagttcctgcaaaaatctgagcggaagatacaagtgctcttgcctagacgggtttagcagcccaacaggaaacgactgggtccccggaaaaccgggaaacttctcatgcaccgatatcaatgaatgccttacctcaagtgtgtgtcccgaacattcagattgtgtgaactcaatgggttcttactcatgctcctgtcaagtgggcttcatatcccgcaacagcacctgcgaggacgtggatgaatgtgccgatcccagagcctgcccagaacatgcaacctgtaacaataccgtcggcaattactcctgcttttgtaatccgggcttcgaatcatccagtggccatctaagttttcagggcctgaaagctagctgcgaagacatcgacgagtgcactgagatgtgccctatcaattctacctgtaccaatacaccaggctcatatttttgcacctgtcaccccggcttcgctccgagtaacgggcagctgaattttaccgatcagggtgtggaatgccgagacattgacgaatgccgacaggatccctcaacttgtgggcctaactccatatgtacaaacgccctaggctcctattcatgtgggtgcatcgcggggtttcacccaaatcccgagggatcacagaaagacggcaacttcagctgccagcgtgtgctattcaagtgtaaagaagacgttatccctgacaataagcagattcagcagtgccaagaaggcaccgccgtcaagcccgcatatgtttcgttctgcgctcagatcaacaacattttctctgtgttagacaaggtgtgtgagaacaagactactgtagttagccttaaaaatacgacggagagctttgtgcctgtcttgaagcaaattagcacatggaccaagttcacaaaggaggaaacatcctcactcgcgacggtttttctggaatccgtagagagcatgacgcttgcaagcttctggaagccttccgcaaatattactccagccgtgcgaactgaatacctcgatattgagtctaaggtgattaataaagagtgcagcgaggaaaatgtgacactggaccttgtcgccaaaggagacaagatgaaaatcggatgctccactatagaagagtcagagtccaccgagaccaccggggtcgccttcgtgtccttcgtgggtatggaaagtgtcctgaatgagaggttctttaaagaccaccaagcaccgctgaccacatccgagatcaaactgaagatgaactccagggttgtcggggggatcatgacaggggagaagaaggacgggttctccgatcctattatctatactttggaaaatattcaacctaagcagaaatttgaaaggcctatatgtgtgtcttggtccaccgacgtgaaggggggcaggtggacctcatttggatgtgttattctggaggcatcagagacctacactatctgttcctgtaatcagatggctaatctggcggttatcatggccagcggtgagctcactatgggttgcgcaataatagctgggttcctgcactatttgtttttagcttgtttcttctggatgctagtagaggccgtaattctgtttttgatggtgaggaatctgaaagtggtgaattacttttccagcaggaacataaagatgttacatatctgcgcgtttggatacgggctgccgatgctggtggtcgtcatttccgcaagtgttcagcctcagggctatggaatgcataaccgctgctggctcaatacggagaccggcttcatatggtcttttctgggccccgtgtgtaccgtaatcgtgattaatagcttgttgctcacttggacgctttggatcctcaggcagcgcctcagcagcgtaaatgccgaggtctcgaccttaaaagatacacgactcctcacattcaaagcattcgcacagttgttcattcttggctgctcttgggtactgggtatctttcagattggacctgtggctggcgtgatggcatacctgttcaccatcatcaactctcttcaaggggcctttatttttttgatccactgtctgctgaacggccaggttcgagaagaatataagagatggattacgggcaagactaaaccaagctcccaaagccagacgtcacggatccttctatccagcatgccttccgcctctaagacgggttag

SEQ ID NO: 115571 - DNA, 2661 bp, synthetic construct
  misc_feature 1..2661: note = Description of Artificial Sequence: Synthetic coding sequence
  source 1..2661: mol_type = other DNA
atgcgcggattcaacttgctgctgttctggggatgttgtgtgatgcatagttgggagggccacatccgtcccactcgcaagccgaataccaaaggcaacaactgtagagattccacactttgccccgcgtacgccacctgcactaacacagtggattcatactactgtgcttgtaaacagggcttcctgtcctcaaacggtcagaatcactttaaagaccctggggtacgctgtaaagacatagacgaatgctctcaaagtcctcagccctgcgggcccaattcctcatgtaagaatctctccgggcgatacaaatgcagttgcctggatggattctcttcccctactggtaacgactgggtccccggtaagcccggaaactttagctgtaccgacattaatgaatgtctgacctcctctgtttgcccagaacattccgattgtgtgaatagtatggggtcgtactcctgttcatgccaggtgggcttcatcagtagaaactctacctgtgaggacgtcgatgaatgcgctgatcctcgggcttgtcctgagcacgcaacatgtaataacaccgtggggaactactcctgtttctgtaatcccggcttcgagtcaagcagcggacacttgtcgttccagggcctaaaagccagctgcgaagacatcgacgaatgtaccgaaatgtgtccaatcaattccacttgtacaaacacgcccgggtcctatttttgcacatgtcaccctgggttcgcgccttctaatgggcagcttaattttacggatcagggagtggaatgtagggacatcgatgaatgtcggcaggatcccagcacgtgcggccccaacagcatttgcaccaatgccttggggtcctattcttgcggttgtattgccgggtttcaccccaatcctgagggcagccagaaggacggcaactttagttgccagagagtattgttcaaatgtaaggaggacgtgattcctgataataaacagatccagcagtgccaggaaggcacagctgtcaagcctgcatacgtgtccttctgtgctcagattaacaacattttcagcgtgctcgataaagtttgcgaaaataagacaaccgtagtatctctcaagaacacaaccgagtctttcgtccctgtcctcaagcagatctctacatggacaaagtttacaaaagaagaaacctcatcgctggcaactgtgtttttggagagcgttgaaagtatgacactcgcttctttttggaagcccagcgcaaacataacacccgctgtgagaacagaatacctagacattgagtccaaggtaattaacaaagagtgtagtgaggagaatgtaactcttgatctggtcgccaagggcgataaaatgaaaattgggtgttccaccatagaagagagcgagtctacagaaaccacaggcgttgccttcgttagctttgttggaatggaaagtgtgcttaatgagcgcttcttcaaagaccaccaggctcccttgactaccagcgagattaaattgaagatgaactctagagtggtgggaggcattatgaccggagagaagaaggacggtttctctgatccaatcatctacacactcgagaacattcaacctaagcaaaagttcgagagacccatctgtgtaagttggagtaccgatgtgaaaggagggcggtggacttcatttgggtgtgtgatactggaagcttctgaaacatataccatctgttcctgtaaccaaatggcgaacctggctgtgatcatggccagcggtgaactcaccatggacttcagcctgtacattatcagtcacgtcggtatcatcatttccctcgtgtgcctggtcttggccatcgccacatttctattatgccggtcaattcgtaaccataacacctatctgcatctccacctctgtgtgtgtctgctgttggcgaaaacgctgttcctggcaggcatccataagacggacaacaaaatgggctgcgcgataatcgccggttttttgcattacctgtttctggcctgttttttctggatgcttgtcgaggctgtcatcctgtttcttatggtgcgcaatttaaaggtggtaaactatttttcatcaaggaacataaagatgttgcacatttgtgcctttggctacggtctgcccatgttggtggtggtaattagcgcctcagtacagcctcagggctatggcatgcacaatagatgctggttaaatacagagaccggctttatctggtcctttctgggtccagtgtgcaccgtgatcgtaattaactccctgctactcacttggacattgtggatcctacggcagaggctgagttcggtcaacgctgaagtgtcaaccttaaaagacacccggctgttaactttcaaagcttttgcccaattgtttatcctgggctgttcctgggtgcttggtatttttcagattgggccagtggccggcgtgatggcgtatcttttcacgattatcaattcgctacagggggcttttatctttctcatacactgtctgttaaatggccaggtgcgggaagaatataaacgctggatcacagggaagacaaagccaagcagtcaatcccagactagtagaatcctgctgtcttccatgccttcagcatccaaaactggttag

SEQ ID NO: 115572 - DNA, 2604 bp, synthetic construct
  misc_feature 1..2604: note = Description of Artificial Sequence: Synthetic coding sequence
  source 1..2604: mol_type = other DNA
atgagaggatttaatctccttctgttctgggggtgttgtgtcatgcactcttgggagggccacattcgtccaacccgtaaacctaacacaaaggggaataactgtagagactctacattgtgcccagcctatgccacatgtacgaatacagtcgactcctactactgcgcgtgcaagcagggctttcttagcagcaatgggcagaaccattttaaagatcctggtgttcgttgtaaggatataaacgaatgtctgacatcatctgtatgccccgaacattccgattgcgtcaattcaatgggctcttactcttgtagctgccaggtcggctttatcagcagaaatagcacttgcgaagacgtagacgaatgcgccgatcctcgcgcctgtcctgagcatgcgacatgtaataataccgtcggtaattactcttgcttttgtaacccagggtttgagagttcttctgggcatcttagttttcaaggcctgaaggcttcatgcgaggatattgacgaatgtactgagatgtgtccaataaattctacatgtacgaacacacctggctcctatttctgtacttgtcaccccggtttcgccccaagcaatggtcagctgaactttaccgatcagggagttgagtgccgcgacattgacgaatgcaggcaagatccgagcacgtgtggcccaaattcgatttgcacaaacgccctaggttcctattcgtgcggatgcatagccggctttcatccaaacccggaggggtcacagaaggatggaaacttttcctgccaacgggtgctgtttaagtgcaaagaagatgtgatccccgataataagcaaattcagcagtgccaggaagggaccgccgttaagcctgcatatgtgtctttctgcgctcaaattaacaatatttttagtgttctggataaggtgtgtgagaacaagaccacagttgtgagccttaaaaatactactgagtccttcgtgcctgtattgaaacagatttccacctggaccaaatttacaaaggaggagacctctagccttgctaccgtctttctcgaatctgtggagtcgatgaccctggcttctttttggaagcccagtgctaatattactcccgcggtgaggaccgagtacctggacatcgagtccaaagtaatcaacaaagaatgctccgaggaaaacgtgacattagacctcgttgccaaaggcgacaagatgaaaatcgggtgcagtactattgaagagagcgagagcaccgagacaacgggagtagcgttcgtcagcttcgtggggatggagtcagtgctgaacgagcggttcttcaaagaccaccaggcccctttaacaactagcgaaatcaaactcaagatgaactctagagtggtgggcgggataatgacaggggagaagaaagacggattcagcgacccaatcatctacaccttggagaacattcaacccaagcagaaatttgaaaggcccatatgcgtctcttggagcacagacgtgaagggtgggagatggacatcgtttggttgcgtgattctcgaggcttcagagacctacacaatttgttcatgtaaccagatggccaatcttgccgttattatggccagcggcgagctgacaatggacttcagcctgtacatcatcagccatgtcgggattatcatcagcctggtgtgtctggtgctagcaatcgccacctttctgttgtgtcgtagcatccgtaaccacaatacgtaccttcaccttcatctgtgcgtttgtctgctgttggctaagaccttattcctcgctggcatccacaaaaccgataacaaaatggggtgcgccataatcgccgggtttctgcactacctgttcctcgcctgtttcttttggatgcttgttgaggcggtcatcctgtttctcatggtgaggaatctaaaagtggtgaattatttttcaagtcgcaacatcaaaatgcttcatatatgtgcttttggctacggactgccaatgctggttgtcgttatcagcgcttctgtgcagccgcagggctatggcatgcataacaggtgttggttgaacacagagactggcttcatttggtcgtttctgggccccgtgtgcactgtaatagtcgtgtctaaatactacaactcactggccaaatgtgtcctgaaagaagaacagggggatcttagggatctggagtttcccggaacttgtgctgcggaacggatcaatagcctgctactcacctggactttgtggattctgcgccaaagactctcttccgtaaatgcagaagtgtcaacgcttaaagacacgagactgctgacttttaaagctttcgcacagctcttcatcctgggttgttcctgggttctgggtattttccagattgggcccgtggcaggagtgatggcctatttgtttaccatcataaatagtttgcagggtgcctttatattcctgatccattgtcttctaaatggccaggttcgcgaagagtacaaacggtggattaccggtaagacgaagcccagttcccagtcacagactagccgaatcctacttagttctatgccttcggctagtaagacgggctag

SEQ ID NO: 115573 - DNA, 2238 bp, synthetic construct
  misc_feature 1..2238: note = Description of Artificial Sequence: Synthetic coding sequence
  source 1..2238: mol_type = other DNA
atgcggggctttaatctgctcctgttttggggttgctgcgtcatgcattcttgggagggccatattcgcccaacccggaagccaaatacaaagggcaataactgcagggacagcactctctgtccagcctatgcgacatgcacaaataccgtcgatagttactactgtgcttgtaagcagggatttctgtcatctaacgggcagaatcatttcaaagaccccggtgtaaggtgcaaggacatcgatgagtgcaccgagatgtgtccaatcaatagcacctgcaccaacacacctggatcctacttctgcacttgtcaccccggatttgcacctagtaatgggcagctaaacttcaccgatcagggcgtggaatgtagggatatagatgagtgccggcaggatccttctacctgcgggcctaacagtatctgtaccaacgcactcggaagctacagttgcggatgcattgcagggtttcaccctaatcctgagggctcacagaaagacgggaacttctcctgtcaaagggttctgttcaaatgcaaggaggacgtcatcccagataacaagcagatccagcaatgtcaggaaggaacagcagtgaagcccgcttatgtgagcttctgcgctcaaattaacaacatctttagcgtgctcgataaagtgtgcgaaaataaaactacggtggtgtcgctgaaaaacacaaccgagagctttgtgcccgtgttgaaacaaatctcaacttggaccaaatttacaaaggaggaaactagttctctggcaaccgtgttcctcgagtccgtcgagtcaatgacccttgcgtccttctggaaaccaagtgcaaatatcacgcctgctgtcaggacagaatacttggacatcgaatctaaagtaataaataaggagtgttccgaggagaatgtgacccttgatctagttgcaaagggcgacaagatgaaaattggctgcagcacaatcgaggaaagtgagtccacagagactactggtgtggcgttcgtcagctttgtcgggatggagagcgttcttaatgaaagattcttcaaagatcaccaggctcccctgactacctcagagatcaaacttaaaatgaatagccgagtagtgggcggaataatgaccggtgagaagaaagatgggttttccgaccctataatttatacactggaaaacatccagcctaagcagaaattcgaaaggcccatctgcgtatcctggtccactgatgtgaaaggaggacgttggaccagtttcggctgcgttatcctcgaagcctctgagacatataccatctgcagttgtaaccagatggctaatcttgctgtgatcatggcatccggcgagctgacgatggatttctccttgtacataatatcacatgtgggaattatcataagcttggtttgtcttgtcctggccatcgcaacgtttctcctctgcaggagcattagaaaccacaacacgtacctacatctccacctttgtgtgtgtctgctgctcgccaaaacgctttttcttgctggaatacacaagacagataataagatgggttgtgccataattgccggatttttgcattaccttttcctggcttgctttttttggatgcttgtagaggccgttatcttatttctgatggttcggaacctgaaagtggtaaattacttttcgtccaggaacatcaagatgctccatatttgtgctttcggatacgggctaccaatgctggtggtggtgatatccgcctccgtccagccacaggggtacggaatgcacaataggtgttggctgaacacagaaaccgggtttatttggagtttcctcggacctgtgtgcaccgtcatcgtgattaattctctcctcctgacatggaccttgtggatattgagacagagacttagcagcgtgaatgcggaagtgagtaccctgaaagatacccggttgcttacctttaaagcttttgcgcagttgttcattctcggttgctcctgggtcctggggatattccagatcggacccgtagccggcgtaatggcttatctgttcacaatcattaactctctgcaaggcgctttcatctttctgattcactgccttctgaacggccaagtgcgtgaggagtacaaacgttggattactggcaaaactaaaccatcctctcagagccagaccagccgtattctgctgagctcaatgccatcagcttctaagacaggatag

SEQ ID NO: 115574 - DNA, 2130 bp, synthetic construct
  misc_feature 1..2130: note = Description of Artificial Sequence: Synthetic coding sequence
  source 1..2130: mol_type = other DNA
atgcgcggtttcaacttacttcttttttgggggtgttgcgtgatgcacagttgggaaggccacataaggcctacccgaaagcccaataccaaaggcaataactgtagagattctaccttatgcccagcctacgctacctgcacaaacaccgtagacagttactattgcgcttgcaagcaggggttcctgtcgtctaatgggcagaatcactttaaggatcccggtgtcagatgtaaagatatcgatgagtgcagtcagagcccacagccttgtggaccgaactcaagttgcaaaaatctctctgggcgctacaagtgcagctgcttggacggctttagcagccctactggtaatgactgggtccctggcaagcctggcaacttctcatgcacagacatcaacgagtgtctgacaagccgtgtactctttaagtgcaaagaggacgtcatacccgacaacaaacaaatccagcaatgccaggaaggcacggcagttaaaccagcctacgtctcgttctgtgcccagataaacaatatcttctctgtcctggacaaggtctgtgaaaacaagactacggtcgtgagcctgaaaaacactacagagagcttcgtgcccgtactgaagcagatttctacatggacgaagtttactaaagaagaaacctcctcacttgctactgttttcctcgagagtgtggagtctatgacgcttgcatctttttggaaaccctccgctaacattactccagcagtcagaactgaataccttgacattgagagcaaagtgattaataaagaatgttcagaggagaatgtcaccctggatctggtcgccaagggtgacaaaatgaaaattggatgcagtactatagaggagtccgaaagcaccgagaccactggggtcgctttcgtgagtttcgtcggcatggagtccgtgctaaatgagaggttcttcaaggaccaccaggcccctcttacaactagtgagatcaagctcaagatgaatagcagggtcgtgggaggcatcatgactggagaaaagaaggacgggttttctgatcctatcatctataccctagagaatattcagcccaaacagaagttcgaacgccctatctgcgtttcttggtctaccgacgtgaaaggcgggagatggaccagtttcggctgcgtgatcttggaggcatctgaaacgtacaccatttgctcctgtaatcaaatggctaatttggctgtgatcatggctagcggcgagctcaccatggatttctcactgtatattatcagccacgtggggatcattattagtctcgtttgtcttgttttggctattgcgactttcctactgtgccgcagcatccgcaatcacaatacctatctccaccttcacttatgtgtgtgcttactcctcgcaaaaaccctgttcctggcaggcatccacaagaccgataacaagatgggatgtgcgatcatcgctgggttcctgcactacctctttctggcatgctttttctggatgctggtcgaggccgtgatactgttcttgatggtgaggaatcttaaggttgtgaactacttttcttcccgaaatatcaaaatgcttcacatttgcgctttcgggtacggactccccatgctggtggtcgtgatttctgcttcagtgcagccccagggatatggaatgcacaatcgctgttggctgaataccgagacaggcttcatttggtccttcttgggcccagtatgcacggtgatcgtgatcaatagtctgctgctcacctggaccctctggattctgaggcaaagactgagtagcgtcaatgccgaggtctccaccctgaaagacacacggctgttgaccttcaaggctttcgcccagctctttatcttaggctgtagctgggtgctgggcatcttccagataggccctgtcgcaggcgtgatggcgtatctctttactattatcaactcactgcagggcgccttcatattcctcattcattgtctcctgaatggccaggtgcgagaagagtacaagcgttggattactggcaaaactaagccgagcagtcaaagccaaacctccaggatactcctatccagtatgccatctgcgtccaaaaccggatag

SEQ ID NO: 115575 - DNA, 2466 bp, synthetic construct
  misc_feature 1..2466: note = Description of Artificial Sequence: Synthetic coding sequence
  source 1..2466: mol_type = other DNA
atgagaggtttcaacctcctgctcttttgggggtgttgcgtcatgcactcatgggaagggcacataagaccaactaggaagccaaacaccaaggggaacaattgccgcgattctacgctctgccctgcatatgccacctgcactaacaccgtagattcgtactattgcgcatgtaagcaaggttttctatccagcaatgggcagaaccactttaaggatcccggtgtgagatgcaaagatattgacgaatgcagccagtcaccgcagccatgtggccccaacagcagctgtaaaaatctgtcaggacggtacaaatgctcctgcctggacggatttagctctccaacaggcaatgactgggtgcccgggaagcccggaaatttttcttgcaccgacattaatgaatgcctgacctcttccgtgtgccccgaacactcagactgcgtgaactcaatgggatcttacagttgtagctgccaagtgggttttatctctaggaattccacttgcgaggacgtggacgagtgtgcggatccacgggcatgtccagagcacgctacttgtaataatacagtgggaaactatagttgcttctgtaacccgggatttgagtcttcgtcgggccacttgtcgtttcagggtctgaaagcaagctgtgaagatatagatgaatgcaccgagatgtgtccgattaatagcacatgtacaaatacacctggctcgtacttttgcacctgccatcctggttttgccccttcgaacggccagcttaattttacagaccagggggtggagtgcagggacatcgatgaatgccgccaggacccgtcgacttgtggacccaactctatctgcaccaacgccctcgggtcctattcctgtggatgtatagctggctttcaccccaacccggaaggaagccaaaaagacggcaacttttcttgtcaaagagtcctcttcaaatgtaaagaagatgttatccctgataacaaacagattcagcagtgtcaagaggggaccgccgtcaaaccagcttatgtgtccttctgcgctcagataaataacatcttctctgtcttagataaagtctgtgagaacaagactaccgtagtgagtttgaaaaacaccacagagagcttcgttcccgttctcaagcagatcagtacatggactaaatttacaaaagaggagacctcttcacttgcaaccgtgtttttggagtctgtagagagcatgacactcgcttccttttggaaaccctccgcaaacatcacccccgcggttcggacagaatatttagacatagagagtaaagtaataaataaggaatgtagcgaggaaaatgtaaccctcgaccttgtggccaaaggggacaagatgaagatcggatgtagcaccatcgaggagtccgaatcaactgagacaaccggagtggccttcgtctctttcgtcgggatggagagtgtgctgaacgaacgtttctttaaggaccatcaggcacccctgacgacctccgaaattaagctgaagatgaactctcgcgtggttggcgggattatgaccggtgagaagaaagatggatttagcgaccctataatttacactttagaaaatattcagccgaagcagaagtttgaacgtcccatatgtgtgtcatggagtaccgacgttaagggtggcaggtggacaagcttcggctgtgttatattagaagccagcgaaacttatacaatatgcagctgtaaccagatggccaacctcgctgtcataatggcttccggagagcttaccatgggctgcgccatcatcgctggtttcctgcactacctcttcttagcgtgtttcttttggatgctggtagaagctgttatcctgtttcttatggtccgtaacttaaaggtagtgaactacttttcctctagaaacataaaaatgctgcacatttgtgcatttggctatgggcttcctatgttggtggtggtgatttctgccagtgtgcagcctcagggatacggcatgcacaaccgatgttggttaaatactgaaaccggctttatctggtcattcctgggtccagtttgcaccgttatcgtaatcaactccctattgctgacatggaccctgtggatccttaggcaaagactatctagcgttaacgcagaagtgagtacgttgaaggacaccagactcctcacctttaaggctttcgcacaactgtttatattaggctgtagctgggtcctggggatctttcagattgggcccgtcgctggcgtgatggcctacttgtttactataataaatagtctgcagggcgccttcatttttttaattcactgcctgctgaatggccaggtgcgcgaggagtataaacggtggataactggcaaaactaagccttcatcgcaatctcagacttctcggatcttgctctcgtccatgcccagtgcctctaagacagggtag

SEQ ID NO: 115576 - DNA, 1662 bp, synthetic construct
  misc_feature 1..1662: note = Description of Artificial Sequence: Synthetic coding sequence
  source 1..1662: mol_type = other DNA
atgccacttccatggagcctggcgctgccactgctgctgtcatgggtggccggcggttttggtaacgccgctagcgctaggcaccacgggctactggcatccgcccggcaacccggggtctgccactacggtactaaactcgcttgctgctatggatggcgccggaacagcaaaggagtgtgcgaggctacgtgcgagcccggctgtaagttcggagaatgtgtaggcccaaacaaatgccggtgcttcccagggtatacggggaagacctgctctcaggacgtcaacgagtgcggcatgaagcctaggccttgccaacacaggtgcgtgaacacccatggcagttataaatgtttttgcctgtcaggtcatatgctaatgcccgacgccacttgcgtgaactcccggacctgtgctatgatcaactgccagtatagctgtgaggacacagaggagggtccccagtgtctgtgcccctcgtctggcctcaggctggcccctaacggaagagattgcttggacattgacgagtgcgcatctggcaaggtgatttgcccctacaatcggaggtgtgtcaatactttcggaagctattattgcaagtgccatatcgggtttgagttgcagtacatttcgggtcgttacgactgtattgacattaatgagtgcaccatggactctcatacctgcagccaccatgccaactgttttaatactcaggggtctttcaagtgtaagtgtaaacagggttacaagggcaatgggctgaggtgcagcgcaatccctgagaattccgtcaaggaagtattgcgcgctccaggcaccattaaggacaggatcaaaaaactcctggcccacaaaaattccatgaagaaaaaggcaaagatcaaaaatgtgacaccagagcccacccgaacacccactcccaaggtaaacttacagcctttcaattatgaagagattgtttccaggggaggaaatagtcatggcggaaagaaagggaacgaagagaaaatgaaagaagggctggaggacgaaaagcgggaagagaaagccctcaaaaacgacattgaggagcgtagtctcaggggagatgtctttttccctaaagttaacgaagctggggagtttgggcttattctggttcagcggaaggccctgacttccaaactggagcataaagacctgaacatatccgtggattgctctttcaaccacggaatttgtgattggaagcaggatagggaagatgattttgattggaaccctgcagatcgggacaacgccatagggttctacatggctgtgcctgcgctcgccggccacaaaaaagacatcggccgattgaaacttctgcttcctgatcttcagccccagtccaatttctgtctgctgtttgattatcgcctcgcaggcgacaaagtgggcaagcttagggttttcgtaaaaaactctaacaacgctctcgcttgggagaagaccacatctgaggatgaaaagtggaagacagggaaaatccagctgtatcaggggaccgacgcgactaaaagcattattttcgaagctgagagagggaagggtaaaacaggggagattgcagtggatggagtacttttggttagtggcctttgccccgatagtctgctctctgtcgacgattag

SEQ ID NO: 115577 - DNA, 1665 bp, synthetic construct
  misc_feature 1..1665: note = Description of Artificial Sequence: Synthetic coding sequence
  source 1..1665: mol_type = other DNA
atgccgctcccttggtcccttgccttgcccctcctactgagctgggtggcgggggggttcggcaacgccgcttctgccagacatcacggactccttgcaagcgcaagacaacctggtgtatgtcactacgggactaaactggcctgctgctatggttggcgtcggaactctaaaggcgtgtgtgaagcaacgtgtgaaccaggttgcaaattcggtgagtgcgtcggccccaataaatgtcggtgctttccaggctacaccggaaagacttgcagtcaggatgtgaacgagtgcggaatgaaaccaagaccatgtcagcatcgttgtgtgaatacccatggtagctataagtgcttctgtctgagcggccatatgctgatgccagatgctacctgcgtgaatagtcggacctgcgcaatgatcaattgtcagtactcatgcgaggatacggaagaagggcctcagtgcctctgtccgtcatctgggttaagactggcccctaatggcagagactgcttggacattgacgagtgtgctagcggcaaagtcatctgcccatataatagacgatgcgtgaatacttttgggtcttattattgcaagtgccacatcggattcgaactccaatatatctctggccggtatgactgtattgacattaacgagtgtaccatggatagccacacttgttcccaccatgctaactgtttcaacactcagggcagtttcaagtgtaagtgtaagcaggggtacaagggcaatgggctcagatgcagtgcaatccctgagaactccgtgaaggaggtgctacgtgcaccaggcacaatcaaagatcgaattaaaaagttgttggcgcacaagaacagcatgaaaaagaaggccaagattaaaaacgtgaccccagagccaaccaggactccgaccccgaaagtgaacttgcagccctttaattatgaggagatagtctccagagggggaaattctcacggcgggaagaagggtaatgaggagaaaatgaaggagggcctggaggatgagaagagggaagaaaaggcattaaaaaacgacatagaggagcgaagtttgcgcggagacgtgttcttccctaaagtaaatgaggccggagaattcgggctgatactggtgcagagaaaggctctcacctccaaacttgagcacaaggcggatctgaatatcagcgtggattgctctttcaaccacggtatttgcgactggaaacaggatcgggaggatgattttgattggaaccctgccgatcgcgataacgccattggtttctatatggctgtcccagccctcgccgggcacaagaaggatattggccggctgaagctcctgctacccgacttgcagccccagtccaatttttgcctcctgttcgactataggctggctggcgacaaggtgggaaagctgagagtgtttgtcaaaaacagcaacaacgccctggcatgggagaaaacaacctctgaggatgaaaaatggaagacagggaagattcagctataccaaggcaccgatgccactaaatctatcatatttgaagctgaaaggggaaaaggtaagaccggggagatcgccgtggacggtgtcctgctggtttctggtctttgcccggacagcctgttgtccgtagatgattag

SEQ ID NO: 115578 - DNA, 822 bp, synthetic construct
  misc_feature 1..822: note = Description of Artificial Sequence: Synthetic coding sequence
  source 1..822: mol_type = other DNA
atgcgaggctcacaggaagtccttctcatgtggctgctcgtccttgctgtgggtgggaccgagcatgcttataggcctggccgccgtgtttgtgctgtgagggcccacggagaccctgtttctgagtctttcgtccagagggtgtatcagcccttccttactacgtgtgacggccatcgggcttgctctacctataggacgatctaccggaccgcatatcgccgatcccctggactcgcacctgctcggccacgctacgcatgctgccctggctggaaacgaactagtggcctgcccggggcttgtggagccgcaatctgccagccgccttgccggaacggcggaagctgtgttcagccggggcggtgtcgatgcccagcaggctggagaggagatacctgtcagtcagacgtagatgagtgtagtgcacgacgtggagggtgcccccaacgttgtgtcaataccgcaggcagctattggtgtcagtgttgggagggccactccctcagtgcagacgggaccctctgtgtgccaaagggcggcccccctagggtcgcccctaacccaaccggagttgactcagctatgaaggaggaggtccagagactgcagagcagggtggatcttttggaagagaagctgcagctggtgttggctccactgcactcgctggctagtcaggctctcgaacacggtcttcctgaccccggttctctgctggtgcatagctttcagcagttaggcagaatagacagtctttccgaacaaatttcgttcctggaggagcagctaggttcttgctcctgcaagaaggacagttag

SEQ ID NO: 115579 - DNA, 822 bp, synthetic construct
  misc_feature 1..822: note = Description of Artificial Sequence: Synthetic coding sequence
  source 1..822: mol_type = other DNA
atgagggggagccaggaggtgctcctgatgtggctgctggtactcgctgtcggcgggacagaacacgcctatcgccctggccgccgagtctgcgcggtaagggctcacggagatcctgtgagcgaaagttttgtgcagcgggtataccagcctttcctgacaacctgcgacggacatagggcttgctcgacatacaggactatttataggacagcctatcgacgctcccctggccttgcgccagctagaccacgatatgcgtgttgccctggttggaagcgcacttctgggctgcccggagcctgtggcgcagcaatctgccagcccccatgccgcaacggagggagctgtgttcagccaggccgttgtagatgtcccgccggctggaggggagatacctgtcaatccgacgtcgacgaatgctcagccaggaggggagggtgtccacagcggtgcgtgaataccgcgggcagttactggtgtcagtgttgggagggccattctctctccgcagatggaaccctgtgtgtgcctaagggagggccaccacgagtggcacccaatcctactggggtcgatagtgccatgaaagaagaggtgcaacggctgcaaagccgcgtggatttgcttgaagagaaactgcagctggtgttagcacccttacactctctcgccagccaagcactcgagcacgggctgcctgaccccgggagtttgttggtgcactcattccagcaactcggtcggatcgattccctaagcgaacagatttccttccttgaggaacagctcggctcttgttcttgtaagaaggactcctag

SEQ ID NO: 115580 - DNA, 822 bp, synthetic construct
  misc_feature 1..822: note = Description of Artificial Sequence: Synthetic coding sequence
  source 1..822: mol_type = other DNA
atgagggggtcccaggaggtactcctgatgtggttgctcgtacttgccgtgggtggcacggagcacgcctaccgccccggccggcgcgtgtgtgccgtgcgcgctcatggtgaccccgtttccgagagctttgttcaaagggtgtaccagcctttcttgacaacgtgtgatggacacagggcttgctcgacctacaggactatatatcgtacagcatatagacggtctccagggctggcccctgctcgaccacggtatgcgtgctgtcccggctggaagcgcactagcggactgcctggggcatgtggtgcagctatttgccagccaccgtgccgaaatggggggagctgtgtacagccagggagatgccggtgccctgccgggtggcggggtgatacatgccaaagtgatgttgatgaatgctcagcaagacgaggaggatgtccccagcggtgtgtgaatacagcaggttcgtactggtgtcagtgctgggaagggcactcattatcagctgacggaactctctgtgttcctaaaggcggaccgccaagggtggcacctaatcccaccggcgtggattcagctatgaaagaggaggtacaacgcctgcagtcgcgggtcgatctgctggaggaaaagttacaactggtcctcgccccgttgcactctcttgcatctcaagcgctggaacacggtttgccggatcctggctcactccttgtgcatagttttcagcagcttggtaggatcgacagtctctcagaacagatcagctttctcgaggaacagctgggatcatgctcatgtaaaaaggacagctag

SEQ ID NO: 115581 - DNA, 822 bp, synthetic construct
  misc_feature 1..822: note = Description of Artificial Sequence: Synthetic coding sequence
  source 1..822: mol_type = other DNA
atgagaggatcgcaggaagtcttgctgatgtggttgttggtactggctgtagggggaacggagcatgcctatcgccccggcaggagagtctgcgcggtgagggcacacggggaccctgtgtcagagtccttcgtgcagcgggtgtaccaacctttcctcactacgtgcgacggacaccgcgcctgttccacttataggacaatctacaggactgcctatagacgttcccccggtctagcccctgccaggccaagatatgcatgctgtcctgggtggaagcgcacttctggattgcctggggcttgtggtgcagccatttgccagccaccatgccgcaacggaggttcttgtgttcagcccgggcggtgccggtgccccgccggatggcggggcgatacatgtcaatcagatgtggacgagtgcagtgccaggcgggggggatgcccccaacgttgcgtcaataccgccggctcctactggtgccagtgctgggaagggcactccctgagtgcagatgggactttgtgtgtgcctaaggggggcccgccccgtgtagccccaaatcctactggtgtagatagcgccatgaaggaggaagtacagcgtctgcaaagtagagtcgacttgctggaagaaaagcttcagctggttcttgcccctctccactccctggcttcccaagccctggagcatgggctgccagatccgggcagcctgttagtacattcattccaacagctaggtcggatcgatagcttgtctgaacagatttccttcctagaggaacaattgggatcatgctcatgtaaaaaggactcctag

SEQ ID NO: 115582 - DNA, 882 bp, synthetic construct
  misc_feature 1..882: note = Description of Artificial Sequence: Synthetic coding sequence
  source 1..882: mol_type = other DNA
atgggctctcgtgcagaactttgtacgctgctgggcggctttagcttcttgctactgctaattccaggggagggagcgaagggcggctcccttagagagagccaaggcgtgtgtagcaaacagacccttgtcgtcccattgcattacaacgagtcttactctcagcctgtatataagccttacctaacgctgtgtgcaggacgacgcatttgctccacatacagaactatgtacagggttatgtggagggaagtccggcgtgaggtccagcagacccacgccgtttgctgccagggttggaagaagagacaccccggtgctctgacctgtgaagccatttgtgcgaagccttgcctcaacggtggcgtgtgtgtacggccagaccagtgcgaatgcgcgcctggttggggaggcaagcattgccacgtggacgtagatgagtgtagaacgtcaatcacactatgctcccaccattgttttaatacagcgggctcgttcacctgcgggtgcccacatgacttagtgctgggagtcgatggcaggacatgcatggaagggagccctgagcctcccacatcggcctccattttatcagtggcggtcagagaggccgaaaaggatgaacgcgctttaaaacaggagattcatgaactgagggggcgccttgagagattggaacaatgggcagggcaggccggtgcttgggtgagggcggtgttgcctgttcctcccgaagagctacagcccgagcaggtggctgaactctgggggagaggagatcggatcgaaagcctttctgatcaagtgctgctgcttgaggagagactgggagcgtgctcgtgtgaggacaatagcctcggtttgggcgtcaaccacaggtag

SEQ ID NO: 115583 - DNA, 882 bp, synthetic construct
  misc_feature 1..882: note = Description of Artificial Sequence: Synthetic coding sequence
  source 1..882: mol_type = other DNA
atgggatcacgcgccgaactatgtacgttgttaggtgggttctccttcctgttgttactgatcccaggcgagggtgccaagggggggtctttgcgggagtcccagggtgtgtgtagcaagcagacccttgtagtgcctttacactataatgagagctactcgcagcctgtttataagccatatcttacattatgcgccgggaggcgcatttgctcgacttatcgaaccatgtaccgggtaatgtggagagaagtccgccgggaagtgcagcaaacgcatgccgtgtgttgccaaggctggaagaagcggcaccccggcgcgttgacctgtgaggccatatgcgccaagccttgccttaatgggggggtgtgtgtccgacctgaccagtgcgaatgcgcacccggctggggtggaaagcactgtcatgtagatgtggatgaatgccggacgtcaattactctctgcagccaccattgcttcaatactgccggtagcttcacttgcgggtgtcctcatgaccttgtcctgggtgtggatggcaggacttgcatggaaggttctcctgagccccctacaagtgctagtattctctcagtggccgtaagagaggccgagaaagatgagcgcgccctcaagcaggaaatccacgagctgcgcgggcggctggaaagactggaacagtgggccgggcaggctggcgcatgggttagagctgtgctgccggtgcctccggaagaattgcagccggaacaggttgctgaactgtgggggcgcggagaccgaattgagtctctgtctgatcaggtgttgctgctggaggagcgtctcggcgcttgtagttgtgaggataattctctgggattgggggtgaaccatcgctag

SEQ ID NO: 115584 - DNA, 882 bp, synthetic construct
  misc_feature 1..882: note = Description of Artificial Sequence: Synthetic coding sequence
  source 1..882: mol_type = other DNA
atgggatcccgggctgagctctgcacactcctaggggggttttcatttctgctgctgctgattccgggggagggggccaaagggggctccctgcgggagtctcagggagtgtgcagcaaacagacactcgtggttccactgcactataatgaaagctacagccagccggtctataaaccttacctgactctctgcgcaggtcgccgaatttgcagtacttacagaaccatgtatcgcgtgatgtggagggaggttaagagagaagttcagcagacacacgctgtttgctgccagggatggaagaagaggcacccaggagccctcacgtgcgaagccatatgtgcaaagccatgcctgaatggcggggtctgcgtcaggcccgatcaatgtgaatgcgccccgggctggggcggaaagcattgccacgtggatgtggatgagtgccgcacctccattaccctttgctcccaccactgcttcaatacagccggaagctttacctgcggctgtccccacgacctggtactgggagtggatgggcgaacatgcatggagggatcacctgagcccccaacaagcgcctccatcctttccgtcgctgttcgcgaggccgagaaggacgaaagagcactgaagcaggaaatccacgaactgaggggcaggctcgagcgtctggaacagtgggccggtcaggctggagcatgggtgcgcgcggtcctgcccgtgccacctgaagagctgcagcctgagcaggtggctgagctgtggggccgtggtgaccgcatcgagtccctgtcagaccaagtcctgctgttagaagagcgcctgggagcatgctcctgcgaagacaattcactcggcttgggagtgaaccacagatag

SEQ ID NO: 115585 - DNA, 777 bp, synthetic construct
  misc_feature 1..777: note = Description of Artificial Sequence: Synthetic coding sequence
  source 1..777: mol_type = other DNA
atgggatctcgagctgagttatgtaccttgctggggggtttttctttcctgctgctgttaatcccaggcgaaggagccaagggcggaagtcttagagaaagccagggtgtctgctcaaaacagacactggttgttcccctgcactataacgagagctattctcagccggtttacaaaccctatttaacactgtgtgctggacggcggatttgcagcacctatcggaccatgtatagggtgatgtggcgcgaggtgagacgggaggtccagcagacccacgcagtttgttgccagggatggaaaaagcgccatccaggagctctgacctgcgaagccatctgcgctaagccatgcttgaacggcggagtgtgcgtgcgcccagaccagtgcgagtgcgcgcctggctggggaggcaagcactgtcatgtaggcagtttcacctgtggatgcccgcatgatctcgtactcggagtagatgggcggacatgcatggaaggtagtccagaacccccgaccagcgcctccattctgagtgtggccgtgagagaagctgagaaagacgagagggctttaaaacaggagatacacgagctgaggggacgactcgaaagattagagcagtgggcagggcaggcgggcgcatgggtgagggccgtgcttccagttcctcccgaggaattgcagcctgaacaagttgcagagttgtggggaagaggggatcgcatagagagtttaagcgatcaggtgctcctcctggaagagcgtttaggcgcttag

SEQ ID NO: 115586 - DNA, 882 bp, synthetic construct
  misc_feature 1..882: note = Description of Artificial Sequence: Synthetic coding sequence
  source 1..882: mol_type = other DNA
atgggatctcgggcagagctgtgtaccctgctggggggcttctccttcctcctgttgctgatcccgggggaaggagccaagggtggctccttacgggagtctcagggggtatgctctaagcagacactcgttgttcccctgcactataatgagagctatagccagcctgtctacaagccatatttgaccctctgcgccgggcgccggatctgtagtacatatagaaccatgtacagggtgatgtggcgagaggtgagaagagaggtgcagcagacccacgccgtatgctgtcagggatggaaaaagagacacccaggtgccctcacctgcgaagccatatgtgcgaagccatgcctgaacggcggggtttgcgttcgccccgaccagtgtgagtgcgcccctggatggggtggaaaacattgccacgtcgacgtcgatgaatgcaggactagtatcaccttgtgttcacatcattgcttcaataccgcggggtccttcacatgtgggtgccctcatgacctggtgctgggggttgatggtcggacctgcatggagggaagcccggagccacctaccagtgcttcaatcttaagcgtggccgttcgggaggccgagaaggatgagcgggctctgaaacaggagatccacgagctacgcggtcgattggagaggctggagcagtgggcagggcaggcgggcgcttgggtcagggctgtactgcctgtaccgccagaggagcttcagcctgagcaagtcgccgaactgtggggtcggggggataggatagagtcgctgagtgaccaggtgctcttattagaagagagactgggcgcctgctcctgtgaggataacagtttggggctgggcgtgaatcatcgctag

SEQ ID NO: 115587 - DNA, 882 bp, synthetic construct
  misc_feature 1..882: note = Description of Artificial Sequence: Synthetic coding sequence
  source 1..882: mol_type = other DNA
atgggatcacgtgccgaactgtgcaccctgcttgggggcttctcatttctgcttctactgattccaggagagggagctaaaggaggcagcctgagggaatcacagggagtttgtagcaaacagaccttggttgtgccactccactataatgaatcttatagccagccggtgtacaagccataccttacactgtgtgccggacggagaatatgctcgacctataggactatgtatcgcgtgatgtggcgagaggtacggcgagaggtccaacaaacccatgctgtttgctgccaaggatggaagaagagacaccccggcgccttaacttgtgaggctatctgcgcaaaaccatgccttaatggtggcgtttgtgtacgacccgatcagtgtgaatgcgctcccggatgggggggcaaacattgccatgtggacgtcgatgagtgtagaacatctattaccctgtgtagccaccactgtttcaacacagcaggaagcttcacctgcgggtgccctcacgacctagtgctgggcgtggacgggagaacatgtatggagggctcacccgagcctccaacgagcgcgagcatcctgagcgtggctgttagggaggcagaaaaagacgagagagctctgaagcaggagatacacgaactgagaggccgccttgaacgcctcgaacagtgggcgggtcaagccggcgcatgggtacgagcggtcctgccggtgccgccagaagaattgcagcctgaacaggtcgctgagttatggggccggggtgatcggatcgaaagtctatctgatcaagtgttgctactcgaagagcgtctgggagcatgtagctgcgaggataactcactgggcctgggcgtgaatcatcgctag

SEQ ID NO: 115588 - DNA, 882 bp, synthetic construct
  misc_feature 1..882: note = Description of Artificial Sequence: Synthetic coding sequence
  source 1..882: mol_type = other DNA
atgggatcccgggccgaattgtgcactcttttaggcgggttttcattcctgttacttctaatcccaggcgaaggcgcaaagggaggatcactaagagaatcccagggggtgtgttctaagcagacacttgtcgtacccctgcattacaacgaatcctactctcagccagtgtacaagccttacctgacactctgtgctggaaggcgaatctgcagcacctaccggactatgtacagagtcatgtggcgcgaggtgcggagggaggtacagcaaacccatgcggtgtgctgccagggctggaagaagcgacacccaggagcgcttacgtgtgaagctatatgtgcaaagccatgcttgaatggaggagtgtgcgtcagacctgatcagtgcgaatgcgctcctgggtggggcgggaagcactgtcacgtcgacgtcgatgagtgcaggacctctattaccctgtgctcccaccactgtttcaacacagcagggtccttcacatgcggatgcccacatgacctggtattgggcgtcgatggccggacatgtatggagggatctccagagccaccaacatctgcctccatcctgtcagtggcagtgagagaagccgagaaagacgagcgggcattgaaacaggagatccacgagctgagaggtcgactggagcggctggagcaatgggccggtcaggcaggtgcatgggtgcgcgctgtgcttcctgtgcctcccgaggagctccagcccgagcaggtggccgagctatgggggcgtggggatcgcatcgaatcgttgtcagatcaagtgctgcttctggaggagaggcttggcgcctgtagttgcgaagataatagcctcggcctgggggtcaatcacaggtag

SEQ ID NO: 115589 - DNA, 777 bp, synthetic construct
  misc_feature 1..777: note = Description of Artificial Sequence: Synthetic coding sequence
  source 1..777: mol_type = other DNA
atgggtagccgggcggaactgtgcacacttctgggcggattttcttttctgttactcctcattcccggggaaggcgctaaggggggaagcttgcgcgaatcacagggggtgtgctctaagcaaaccctggtggttcctctgcattataatgaatcctacagccagccagtgtataaaccttacttgaccctgtgtgccggtcggagaatctgttctacctacagaactatgtacagagttatgtggcgggaggtccggagagaagtccagcagacacacgccgtttgttgtcagggttggaaaaagcgccacccgggggccctaacctgcgaagccatttgtgctaagccgtgtctgaatgggggggtgtgtgtgcgtccagaccagtgcgaatgcgccccgggatggggcggtaagcactgtcacgtgggttcctttacctgtggctgccctcatgatctcgtgctcggagtagatgggcggacatgtatggaggggtcgcccgaaccccccacttccgcatctatactgagtgtggcagtgagagaggcagagaaggacgaacgggctcttaaacaagagattcatgagcttagaggcagattagagagacttgagcagtgggccgggcaggcaggagcctgggtaagggccgtgcttcccgtgcctccagaggagctgcaacccgagcaagtcgccgagctgtggggccggggggaccgcatagagtccctgagcgaccaggtgctcctgctggaagaacggctcggtgcttag

SEQ ID NO: 115590 - DNA, 777 bp, synthetic construct
  misc_feature 1..777: note = Description of Artificial Sequence: Synthetic coding sequence
  source 1..777: mol_type = other DNA
atgggaagccgcgctgagttgtgcacgctgttagggggattttccttcctgttgctcctgattcccggcgagggagcgaagggtggcagtctcagagaaagccagggagtttgcagcaaacagaccctggtcgttccactccattacaatgaatcttactcacagcctgtttataaaccatatctcacactgtgcgcggggcgccgaatttgctctacctatcgcacaatgtatcgagtgatgtggagagaggtgagaagggaagttcagcagacacatgccgtttgctgccagggctggaaaaagagacatcccggggcactgacttgcgaggccatctgcgctaagccatgtctcaatggcggtgtttgcgtgcgccctgatcagtgtgagtgtgcgcccggttggggggggaaacactgccacgtgggctccttcacctgtggctgtccccatgacctggtgctcggcgtagatggccgcacttgcatggaaggatcacctgaaccaccgacctccgcttccattctgtctgtcgccgtacgtgaggctgagaaggatgaacgagccctaaagcaggaaatccatgagttgcggggccggctggagcgcctggagcagtgggctggacaagcgggagcttgggtgcgggctgtgctcccagtgccaccggaggaattgcagccagagcaggtggccgagctgtggggccgcggcgatcgcatcgagagcttgagcgaccaggtcctcttgttggaagaacgtctaggagcctag

SEQ ID NO: 115591 - DNA, 777 bp, synthetic construct
  misc_feature 1..777: note = Description of Artificial Sequence: Synthetic coding sequence
  source 1..777: mol_type = other DNA
atggggtcacgggctgagttgtgcaccctgctgggggggttttccttcttgctcctactgataccgggagagggggctaagggagggtccttaagagagtctcaaggagtttgcagcaagcaaactctggttgtccccctccactacaatgagtcctacagccaacccgtgtacaagccttatctcaccctctgcgctggccgcagaatatgtagcacatacagaacgatgtacagagtcatgtggcgggaggtgaagcgggaggtgcaacagacccacgccgtatgttgtcagggatggaaaaagagacacccaggagcactcacatgtgaagccatttgcgcaaaaccgtgcctgaacggtggagtatgtgtccgaccagatcagtgcgaatgtgcccctggatggggagggaagcattgtcacgtgggaagctttacatgcggctgcccccatgacctggtgctgggggtcgacggccggacatgcatggaagggtcccccgagcccccgacgagcgcttccatcctgagcgtggctgtgcgggaggctgagaaggatgagcgagccctcaaacaggagatacacgagctgaggggacgactcgagcgattagagcagtgggccggccaggccggagcatgggtgagagcagtgctgcccgttcccccagaggagctacagcccgagcaggtggcagagctgtggggccgcggagaccggattgagagcctcagcgatcaggtgctactgttggaggagaggttgggggcgtag

SEQ ID NO: 115592 - DNA, 882 bp, synthetic construct
  misc_feature 1..882: note = Description of Artificial Sequence: Synthetic coding sequence
  source 1..882: mol_type = other DNA
atgggcagtcgcgcagagctctgtacccttctgggaggcttcagttttctcctgctcctcataccgggcgagggcgccaagggaggctccctgcgtgaatctcaaggtgtgtgctcaaagcagaccctcgttgtgcctctgcactacaacgagtcatattctcagcccgtatataagccttacttgacgctgtgtgcaggaaggcgcatatgctccacttatagaacaatgtacagagttatgtggcgtgaggtccgccgagaggtacagcagactcatgctgtgtgctgccaggggtggaagaagcgtcaccctggggctctcacatgtgaggccatttgcgcgaagccgtgccttaacgggggagtgtgcgtgagacctgaccagtgtgaatgtgctcccggttgggggggcaagcactgccatgtggacgtagacgaatgccgaacctccatcaccctttgctcccatcactgctttaacactgccggtagcttcacgtgcggatgcccgcacgatttggtgctgggggttgatgggcggacctgcatggaggggtcacctgaacctcctacttcagcctcaatcctttctgttgctgttcgggaggccgaaaaggacgagagagcgcttaaacaggaaattcatgagctccgcggccgcctggagcggctggagcagtgggccggccaggccggcgcatgggtccgtgcggtcctccctgtgcccccagaggaactgcagcctgaacaggtggcagaactttggggcagaggtgatcgcattgagtcactgagcgatcaagtcctgctgttggaagagagactgggagcttgttcatgcgaggacaattctctcggattaggagtcaatcataggtag

SEQ ID NO: 115593 - DNA, 882 bp, synthetic construct
  misc_feature 1..882: note = Description of Artificial Sequence: Synthetic coding sequence
  source 1..882: mol_type = other DNA
atgggttctagggctgaactgtgcacactcttgggcgggttttccttcttgctgctgctcattcctggtgagggcgcaaaggggggatccctccgggagtctcagggcgtgtgcagcaagcaaacactggtggtccccctgcattacaatgaaagttacagccagccagtctacaaaccctacctgaccttatgcgccgggagacggatttgctcaacgtaccgaaccatgtaccgagtcatgtggagggaggtgaggcgtgaggtgcagcaaacgcacgccgtctgttgtcaaggctggaagaagcgacatcccggagccttgacctgcgaggctatatgcgcaaagccatgcctgaatggtggagtgtgtgtgcgcccggaccagtgcgagtgcgcccctggctggggcggcaagcactgccatgttgacgttgacgagtgcagaacatctattaccttgtgttcccatcactgcttcaacaccgccggtagcttcacctgtggctgtcctcatgatctcgttctaggcgttgatggtcgcacatgtatggagggaagtcccgagccacccacctccgcatccatcctcagtgttgcagtacgcgaagctgaaaaagatgaacgagccctgaaacaggagatccatgaacttaggggccgcctggagagactggaacagtgggctggccaagcgggcgcatgggtgcgggccgtgttgcccgtgcctcctgaggaattgcaaccggagcaggtggctgagctctgggggcgcggggatcgaatagagagcctgtccgaccaggtgctccttctcgaggaaagactgggggcctgtagctgtgaagataacagcctggggttgggtgttaaccaccgctag

SEQ ID NO: 115594 - DNA, 882 bp, synthetic construct
  misc_feature 1..882: note = Description of Artificial Sequence: Synthetic coding sequence
  source 1..882: mol_type = other DNA
atgggcagcagggccgagctctgtacacttctggggggcttctcatttttacttctccttatacctggagaaggagccaagggtggatccctgagggagtcacagggcgtttgctcaaagcagacactggtggtgcccctccattataatgagtcctatagccagcccgtgtataagccatacttaacactgtgcgcaggcaggcgcatctgtagcacatatagaacaatgtatcgcgttatgtggagagaggtacgccgcgaggtgcagcagacccatgcagtttgctgccaaggctggaagaagcgccatcccggggcacttacctgtgaagccatctgtgccaagccatgcctgaacggcggggtgtgtgtgcgacctgaccagtgtgaatgtgctcccgggtggggcggcaaacactgccatgtggatgtcgatgagtgccgtacgagcatcacactctgcagccaccactgcttcaacactgccgggtccttcacatgtggctgccctcacgacctggtgttaggagtggatggccggacatgcatggaaggcagcccggaaccacctacctctgcctccatacttagcgtggccgtgagagaagctgaaaaggacgagcgcgcccttaagcaagaaatccacgaactgagaggccggcttgaacgcctagagcagtgggccggtcaggcaggggcatgggtacgagccgtgctacccgttccaccagaggagctccagcccgagcaagtcgcagaactttggggccggggagaccgcatagagtcattatccgaccaggtcctgctgttagaggaacgtttaggggcgtgctcttgtgaggacaacagccttggccttggtgtaaaccatagatag

SEQ ID NO: 115595 - DNA, 882 bp, synthetic construct
  misc_feature 1..882: note = Description of Artificial Sequence: Synthetic coding sequence
  source 1..882: mol_type = other DNA
atgggctcgcgtgcggagttgtgcacccttcttgggggctttagtttcctgctgctgctcatccccggggaaggagcaaagggggggtctctccgggagagccaaggagtgtgtagcaagcaaaccctcgtcgttcccctgcactacaacgaatcttactctcagccggtgtataaaccttaccttaccttatgtgctgggcgcagaatatgttcgacctatagaactatgtacagagtcatgtggcgagaagtgaaacgcgaggtgcaacagacgcatgccgtgtgttgtcagggctggaagaaacgccacccaggcgctcttacttgcgaagcaatttgtgcaaaaccatgcctgaatggcggtgtctgcgtgagaccagatcagtgcgagtgcgcccctgggtgggggggtaaacactgccatgtcgatgtggatgaatgtcgtaccagcattactctgtgttctcatcattgcttcaatactgcaggcagctttacatgcggatgtcctcatgatttagtcctgggagttgacggacggacctgcatggaaggttcccccgagcctcctacttcagcaagcatcctgtcagtagccgtaagggaagctgaaaaggatgaacgcgcacttaaacaggaaattcacgagctgcgcggccggcttgagagactcgaacaatgggctggacaggcaggcgcatgggtgagagctgtcttgcctgtgccaccagaagagctgcagccggagcaggttgcagaactatggggaaggggcgaccgcattgagagcttgtctgaccaggtcctccttttggaggaacggctgggagcatgttcctgcgaggacaactcccttggccttggcgtgaatcatcgttag

SEQ ID NO: 115596 - DNA, 882 bp, synthetic construct
  misc_feature 1..882: note = Description of Artificial Sequence: Synthetic coding sequence
  source 1..882: mol_type = other DNA
atgggatccagagctgagctgtgtacccttctgggtggcttctcatttttgctgcttctcatcccaggcgaaggggccaagggcggaagcctgcgcgagtctcagggcgtgtgcagtaagcagactctggtggtccctctgcactacaacgaaagctacagccaacctgtctacaagccctatctgactctctgcgctggccgtcgcatttgtagcacataccgcacaatgtaccgagttatgtggagagaggtaaggcgcgaggtccagcagacacacgcagtgtgctgtcagggctggaagaagcgtcatcccggcgcccttacctgtgaagccatctgcgccaaaccatgtctgaacgggggtgtctgtgtaaggcctgaccagtgtgagtgtgcaccgggatggggcggaaagcactgtcatgtggacgttgacgagtgccggacctccatcaccctgtgctcccaccactgcttcaacaccgccggatcctttacatgtggctgtccacatgacttggtcctgggcgtggacggtcggacgtgtatggagggctctccagaacccccgactagcgcctctatccttagtgtcgctgtccgtgaggccgagaaagacgagagagcactgaagcaggagatccatgagcttaggggacggcttgaacggcttgaacagtgggctggtcaggctggagcttgggttcgtgctgtactgcccgtacctcccgaagaactccaacccgaacaagtggcagagttgtggggaaggggcgaccgtattgagagcctcagtgaccaggtgctcctgctggaagagagactgggcgcttgctcttgcgaggataactcattaggtctgggcgtcaaccacagatag

SEQ ID NO: 115597 - DNA, 882 bp, synthetic construct
  misc_feature 1..882: note = Description of Artificial Sequence: Synthetic coding sequence
  source 1..882: mol_type = other DNA
atggggagcagagccgaattgtgcacactcctgggaggcttctcttttctcttgcttttgatcccaggagaaggcgccaaaggagggagcttacgagagtcacaaggcgtgtgcagcaaacagactctggtcgttcctctgcactataacgagtcctactcccagcctgtgtacaagccttatctcactctttgtgcaggccggagaatatgttccacctaccggacgatgtatagagtgatgtggagggaagtccggagagaggtgcagcaaacacatgctgtatgctgccaagggtggaagaagcgccatccaggagcccttacatgcgaggctatctgcgctaaaccatgtctcaacggcggcgtgtgcgttagacctgatcagtgcgaatgcgctcctgggtggggcggaaaacattgccatgtcgacgtggatgaatgccgcacttccataacattatgctctcaccactgctttaatactgccggttcttttacatgcggatgtccgcatgatctcgttcttggagtcgacgggcgcacctgtatggagggatcccctgagcccccaacttctgcatctatcctttccgtggctgtcagggaagcagagaaggacgagagggcactgaagcaagaaattcatgagctcagaggccgactggagcggttggagcagtgggctggccaggcgggggcctgggtcagagcagttcttcctgtaccccctgaggaacttcagcctgagcaggtcgccgagctctggggtcgaggagatcgaattgaatctttgagtgatcaggtgcttttgctagaagaacggcttggggcttgcagctgtgaggacaattccctgggactaggagttaatcaccgatag

SEQ ID NO: 115598 - DNA, 882 bp, synthetic construct
  misc_feature 1..882: note = Description of Artificial Sequence: Synthetic coding sequence
  source 1..882: mol_type = other DNA
atggggtctagagccgagctgtgcacattgttgggaggattttcgttcctgctgctgctgattcctggggagggagccaagggggggagtctgagagagagccagggagtgtgctcaaaacagacacttgtggtgccgctccattacaacgagtcatatagtcaaccagtttataagccataccttactctatgtgctggtaggcgaatctgctctacttacaggacaatgtacagagtgatgtggagggaagtccgtcgggaggtacagcagacgcacgctgtctgttgccagggctggaagaagagacatcccggggccctcacatgtgaggcaatttgtgctaaaccatgcctcaacggcggggtgtgtgttcgccctgaccaatgcgaatgcgcacctgggtggggcgggaagcattgccacgtggacgtcgacgaatgcaggaccagcataactttatgttcacaccattgtttcaacactgccggctcatttacttgcggctgtccccatgatttggtgctgggtgtggatgggaggacctgtatggagggctcaccggaacctccgacctctgcctcaattctgtccgtcgccgtaagggaggctgagaaagatgaacgggccctcaagcaggagattcacgagctgaggggtcgactggagagactggagcagtgggcaggccaagctggagcttgggtgagagcagttctgcccgtgccacccgaggaattgcagcccgagcaagtggccgagctatggggccggggagaccgcattgagtccctgtccgatcaagtgctgctgttggaggaacgtttgggcgcgtgcagctgtgaggacaattccctgggcctcggagtgaaccaccgctag

SEQ ID NO: 115599 - DNA, 777 bp, synthetic construct
  misc_feature 1..777: note = Description of Artificial Sequence: Synthetic coding sequence
  source 1..777: mol_type = other DNA
atggggtcccgggcagagctgtgcactctgctgggggggttttcattcctgctactgctcattcccggggaaggcgctaaaggtgggagcctgcgcgaaagtcagggggtgtgctcaaagcagacacttgtcgtgccactgcactacaacgagagctatagccaacctgtttacaagccctacctcacactgtgcgccggaagaagaatctgtagtacataccgcaccatgtaccgggtgatgtggcgcgaagtgaggcgggaagtgcagcagacgcacgctgtgtgttgccagggatggaagaagagacaccccggggcactgacctgtgaagcaatctgcgctaagccctgcctgaacgggggggtctgcgtgcgacccgatcaatgtgaatgtgcacctggatggggcggaaagcactgtcatgtggggtccttcacctgtgggtgtcctcacgacctggtgctgggagtggacggccgcacttgtatggaaggatctcctgaaccccctacgagcgcgagtatcctgagcgtagcagtcagggaggccgaaaaggacgaacgagcactgaagcaggagattcacgaactgcgaggtaggctagagcgactcgaacaatgggctggacaggcgggggcgtgggtaagggccgtgcttccggtccctccggaggaattacagcccgaacaggtggccgaactgtggggtcgcggcgacagaatagaatccctttccgaccaagtgctactactggaggagcggcttggggcctag

SEQ ID NO: 115600 - DNA, 882 bp, synthetic construct
  misc_feature 1..882: note = Description of Artificial Sequence: Synthetic coding sequence
  source 1..882: mol_type = other DNA
atggggagccgggccgagttgtgtacacttctcggaggcttcagtttcctgctgctcctgataccgggcgaaggggccaaaggaggatctttgagagagtctcagggcgtgtgttctaaacagactctcgtggtgcctctgcattacaacgagtcttactcacaacctgtgtacaaaccctatctcacactatgcgcaggcagacgcatttgcagcacctacaggacaatgtaccgcgtgatgtggcgggaagtgcgcagagaggtgcagcagacccacgccgtttgctgccaagggtggaaaaaaaggcatccaggtgcattaacgtgcgaagccatctgcgcaaagccctgccttaatgggggcgtctgtgtgcggcctgaccaatgcgagtgtgcacccgggtggggaggaaaacactgtcatgtcgacgtggatgaatgccgaacaagcatcacactttgcagccaccattgctttaacactgcagggagctttacttgtggatgtccgcatgatctcgtgcttggggtcgatggtcgaacctgtatggaaggcagcccggaaccgccgacttcagcaagtattctctccgtcgcagtgagagaagccgagaaagacgagcgggccctgaagcaagaaattcatgaactgcggggacgactggagcggctggaacaatgggcagggcaggcaggagcgtgggtgagggccgtcttgcccgtccccccagaagagctgcaacctgaacaggttgccgagttatggggtcgcggcgaccgtatagaatccctgagtgaccaagtcttactgctggaagagaggttgggagcctgcagctgcgaagacaattcactgggattgggggttaatcatcggtag

SEQ ID NO: 115601 - DNA, 1281 bp, synthetic construct
  misc_feature 1..1281: note = Description of Artificial Sequence: Synthetic coding sequence
  source 1..1281: mol_type = other DNA
atggcaaatgactctgggggacccggagggccaagcccttctgagagggaccgccagtactgtgaattatgcggtaaaatggaaaacctcttgcggtgtagccgctgtcgctcatctttctactgttgcaaagaacatcaaagacaagattggaagaaacataaactggtgtgtcagggcagtgagggggcgctcgggcatggagttggccctcaccaacattcaggaccggctcctccagccgctgtccccccaccaagagccggggcaagagagccccgaaaggctgcagcacgtcgcgacaatgcatcaggagatgctgcgaaaggcaaggtgaaggcgaaaccccccgccgaccccgccgcagccgcctcaccttgtagggcggccgcaggagggcagggttcggccgtggctgccgaagctgagccaggcaaggaggagccacccgcgcgtagttctctgtttcaggaaaaggctaacctatatccgccctccaacactccgggcgacgccttatctccagggggaggcctgcgtcccaatggtcagaccaaacccttgcccgccctaaagttggcactcgagtatatcgtcccctgtatgaataagcatgggatctgtgtggtggatgacttcctaggcaaagagacaggacagcaaattggagatgaggtgcgcgcattgcacgataccggaaagttcaccgacggacagctggtgagccagaagtctgattcaagtaaggatatacgtggagacaaaataacctggattgagggcaaggaaccaggctgtgaaaccatcggactgctgatgagcagcatggacgacctcattcgacactgcaacgggaagctgggatcttacaagatcaatggtcggaccaaggctatggtagcgtgctacccaggcaacggtacaggttatgtgcggcatgtggacaaccccaatggtgatgggcgttgtgtaacgtgcatttactacctaaataaagattgggacgctaaggttagcggaggaatacttaggatctttcccgaaggcaaagcacagtttgctgatattgagccgaaattcgaccggcttttgtttttttggagtgaccgtaggaatccccacgaagttcaaccagcctatgccacacgttatgccatcaccgtctggtacttcgatgctgacgagcgagctcgtgctaaagttaagtatctaaccggcgagaaaggagtccgcgtggagcttaacaaaccatctgattccgtaggaaaggatgtcttctag

SEQ ID NO: 115602 - DNA, 216 bp, synthetic construct
  misc_feature 1..216: note = Description of Artificial Sequence: Synthetic coding sequence
  source 1..216: mol_type = other DNA
atgaacaaacacggcatatgcgttgtggacgatttcttgggcaaagagactggacaacagatcggtgacgaagttcgcgcactgcacgacaccggaaagttcacggatggctcatggtccgctcgccgagtcacaaggccgcggacgagtgaggctattaggtcacccggaagtcgggcaagatccccagcggccaaacctctcggatgttcttag

SEQ ID NO: 115603 - DNA, 1224 bp, synthetic construct
  misc_feature 1..1224: note = Description of Artificial Sequence: Synthetic coding sequence
  source 1..1224: mol_type = other DNA
atggattctccttgtcagccccagcctttatcccaggctctcccgcagctgccaggaagttctagcgagccgttagagccagagcctggcagagctcgcatgggcgtcgagagttacctaccttgccctctcctcccctcttatcattgtccaggggttccttctgaggcctcagcaggcagtggcactcctagagcgacagctacaagcacaaccgcatcaccactgagggacgggttcggcggacaggacggaggagaattgaggcccctgcaatccgagggcgccgccgccttagtgacaaaaggatgtcagagactcgcggcgcagggtgcccgacccgaggcacccaaaagaaaatgggcggaagacggcggggatgcacccagccctagtaaacgtccttgggcgaggcaagagaaccaagaagctgaaagggagggaggaatgtcctgtagctgtagttcaggaagtggagaggctagcgctgggctgatggaggaggcccttccaagcgctccagagcgactcgctctcgactacatagtgccctgcatgcgctattatggcatctgtgtaaaggattctttcttaggagctgcactgggaggaagggtactggcggaggtcgaggctctgaagcgggggggccgtctgcgcgatggacaactagtcagccagagggccatccccccacgatcaattaggggggaccaaatcgcttgggttgagggccacgaacccggctgcaggtccattggggcactcatggctcatgtggatgcggtaattcgtcattgtgccgggagattaggcagctacgtcatcaacggccgaacgaaagctatggtggcgtgctatccgggcaacggtctgggttacgttcggcatgttgacaatccccacggcgatgggcgatgcattacttgcatctactatctcaatcagaactgggacgtcaaggtgcacggtggcctgctgcagatcttccccgaaggtcgaccagtggttgcaaacatagaacccctattcgacagattgctcatcttctggagcgaccgacgtaacccacacgaagtaaagccagcatatgctacaagatacgccataaccgtttggtacttcgacgccaaggagcgcgctgctgccaaagataaataccagctggcaagcggacagaagggagttcaggtgcctgtttcgcaacccccgacccccacctag

SEQ ID NO: 115604 - DNA, 1224 bp, synthetic construct
  misc_feature 1..1224: note = Description of Artificial Sequence: Synthetic coding sequence
  source 1..1224: mol_type = other DNA
atggactccccgtgtcagccgcagcccttatcacaggctcttccccagcttcccggctcaagctccgagcccctggagcccgagccagggagagctcggatgggtgtggaaagctaccttccttgccctctgctcccaagctaccactgccccggggtgccctccgaggcgtccgctggtagtggcactcctcgagccacggctaccagcaccaccgcctcccccctgagagatggattcggaggtcaggacggaggagaactccggccacttcagtcagagggtgcggcagctttggtgactaaagggtgtcagaggcttgccgcccagggcgcccggcccgaagcacccaagcgaaagtgggccgaggatgggggcgacgcaccctccccaagcaagagaccgtgggcgcggcaggaaaaccaagaggcagaaagggaggggggaatgtcttgtagctgctccagtggctcaggcgaagcatcagcaggactcatggaggaggcactgccttcagcacccgagcgattggctctggactacatagttccttgcatgagatattacggtatctgtgtgaaggactcattcctgggtgccgcactcgggggccgcgtgctcgctgaggttgaggccctaaaaaggggtggaagattacgagacgggcagctggtgagccagcgcgccataccaccaagatctattaggggggaccagattgcttgggtcgagggtcacgagcccggctgtcgttcgattggtgcgcttatggcacatgttgatgcagtaataagacactgcgcaggacggctgggatcctacgtcatcaatggacgcaccaaggccatggtggcttgctacccagggaacgggttaggctacgtccgccacgtcgataacccccacggcgacgggcggtgcattacttgtatctattaccttaaccagaattgggacgtaaaggtacacggcggactactccagattttcccagaagggagaccagtggtcgctaatatagaaccgttattcgaccggctgttgatcttctggtccgacagacgcaacccacacgaggtaaaaccagcttacgcaacccgctacgccattacagtgtggtacttcgatgccaaggagcgcgcagcggcaaaggataaatatcagctggccagcgggcagaaaggtgtgcaggtcccagtctctcagccccccactccgacatag

SEQ ID NO: 115605 - DNA, 720 bp, synthetic construct
  misc_feature 1..720: note = Description of Artificial Sequence: Synthetic coding sequence
  source 1..720: mol_type = other DNA
atgcccttgggacacataatgaggctggacttggagaagatcgctctcgagtatattgtgccctgcctgcacgaggtgggattctgttacttggacaacttcctgggcgaggtggtaggggattgtgtgctggagcgtgttaagcaactccactgtactggagcactgagggatggtcagctggccggaccgcgcgcaggtgtgtctaagcggcacctgcgcggagatcagatcacatggattggcggcaacgaggaggggtgcgaagccataagcttcctgctgtcccttatcgaccggctcgtgctgtattgcggcagcaggctgggaaaatactacgtgaaagagcggtctaaggctatggtggcctgctaccccggcaatgggactgggtatgtacgccatgtggacaaccccaacggtgatggacgctgtattacatgtatctattatttgaacaaaaactgggacgcgaaattgcacgggggaatcctgcgtatattcccggaagggaagtccttcatcgcggatgtagagcctatcttcgaccgactcttgtttttttggtccgacaggagaaaccctcatgaagttcagcccagttacgcgacaagatacgctatgacagtatggtactttgacgcagaggaacgggcggaggccaaaaagaagtttcgtaatctgacacggaagactgagagtgcgctgaccgaggactag

SEQ ID NO: 115606 - DNA, 720 bp, synthetic construct
  misc_feature 1..720: note = Description of Artificial Sequence: Synthetic coding sequence
  source 1..720: mol_type = other DNA
atgcccctgggccacataatgcgtcttgacctggaaaagatcgctttggaatacatcgttccgtgtctgcatgaggtgggattttgttacctggataacttcctgggcgaagtggtcggcgactgtgttcttgagcgggtgaaacagctgcactgcaccggcgcactgagggatgggcaactggctggcccaagagcaggcgtgtcgaagagacacctgcggggtgaccagatcacttggatcgggggaaacgaagagggttgtgaggctatatcctttctgctttcactgatcgaccgcctggtgctttattgcggtagtcgacttggaaaatactacgtgaaagagagaagcaaagccatggttgcctgttaccccgggaacggaactggatatgtccgtcatgttgataatcccaatggcgacggaaggtgcatcacctgcatttactatctcaataagaactgggatgcaaaactccacgggggcatcctgaggatcttcccggaggggaaaagtttcattgcagacgttgagcccatattcgaccgcctgcttttcttttggtcagaccggaggaatccccacgaagtgcagccctcttatgctacgagatatgctatgaccgtgtggtacttcgacgccgaggagagggcagaggctaaaaagaaattccgaaatctcaccaggaaaacggagtccgcactcaccgaagattag

SEQ ID NO: 115607 - DNA, 1605 bp, synthetic construct
  misc_feature 1..1605: note = Description of Artificial Sequence: Synthetic coding sequence
  source 1..1605: mol_type = other DNA
atgtttagctgggtgagtaaagatgctcgaagaaaaaaggagcccgagttattccaaaccgtggctgaaggtctgcggcagctttatgcacaaaaactgctacccctggaagagcattacagatttcacgagttccactcccccgctctggaggacgccgactttgacaataagccaatggtgctgctggtggggcaatattccactggaaagactacttttattaggcatctcatcgagcaggattttcctggcatgaggatcggacctgagcccaccacagactccttcattgccgtgatgcatgggcctactgaaggcgttgttcccggtaacgctctcgttgtggacccccgtagaccctttcggaagctaaacgcgttcggcaacgcatttttgaaccggttcatgtgtgcgcaactgcctaaccctgtcctggactctattagtataatagatacacccggcatcctatcaggagagaagcaacgcataagcaggggttacgacttcgcagcagtgttggagtggttcgccgagcgagtagatcgcataatactcttgttcgacgcccataagcttgacatttctgacgaattctccgaggtgataaaagcgctaaaaaatcacgaagacaagattcgggtcgtcttaaataaggcggaccagatcgaaacccagcaattgatgagagtgtatggtgccctcatgtggagtctgggtaaaatcatcaacacaccagaggtggtgagggtttatattggctctttctggtctcatcccctcctgatccctgacaatagaaaactgttcgaggccgaagaacaggacttgttcaaggatatacagtctcttcccaggaatgctgccctgagaaaactgaatgacctcattaaacgagcaagacttgctaaagtacatgcgtacattatatcttccttgaagaaggaaatgcctaacgtgtttggaaaggagtcgaagaaaaaagaacttgtcaacaatctgggtgagatataccagaagattgagcgcgagcatcagatctctccaggggactttccttcactccgcaaaatgcaggagttactgcagactcaggatttcagtaaattccaagcactaaagccaaaactgctggacaccgtcgatgacatgttggctaatgacattgccaggttaatggtgatggtgcgccaggaggaatctctgatgcctagtcaggtcgtgaagggaggtgcatttgatggtaccatgaatggtcccttcggacacggttatggcgagggcgcgggcgagggaattgacgatgtggaatgggtggtgggaaaagataagcctacatacgacgaaatcttttataccctgagcccagtgaacggaaagatcacaggggctaatgccaagaaggaaatggtgaaatccaagctacctaacacagttcttggtaaaatctggaagctcgctgatgtcgacaaagacggactcctcgacgacgaagagtttgctctggctaaccatttgattaaggtcaaactggaaggccatgaattaccggctgaccttccaccccatctggtaccaccttccaagcgccgccacgagtag

SEQ ID NO: 115608 - DNA, 1605 bp, synthetic construct
  misc_feature 1..1605: note = Description of Artificial Sequence: Synthetic coding sequence
  source 1..1605: mol_type = other DNA
atgttttcttgggtgagtaaagacgctcgccgcaaaaaagagcctgagctgttccagacagttgccgaggggctcaggcagctgtatgcgcagaagctcctcccactggaagagcattacaggtttcacgagttccactccccagctctcgaggatgccgatttcgacaataagccaatggtgctcctggtgggacaatactctacagggaaaaccacgttcattagacatctgattgagcaggattttccaggcatgaggatcggtcctgagccaactaccgattcttttatagcggtgatgcatggacccacagaaggggtggtgcctggcaatgctctcgtcgtggatccgcgacgaccatttcggaagttgaatgcctttggaaacgccttcctgaacagatttatgtgtgctcagctccctaaccccgtgctggactcgatcagcattatcgatactcctggtatcctgagcggggagaaacaaaggatcagccgcggatatgactttgccgccgtgctcgagtggttcgctgagcgagtggaccgcatcatcctgctgttcgacgctcacaagctggacatttctgatgaattctcggaagtgatcaaggccctgaaaaatcacgaagacaagatcagggtggtactgaataaggctgatcagattgagacacagcagctgatgagagtgtacggagccttgatgtggagcctgggcaaaatcatcaataccccggaggtggttagagtgtatattggctcattctggtcccatccactgcttatccctgacaaccgtaaactgtttgaggcagaagaacaggacctcttcaaggatatccagagcctccccaggaatgcagcactccgcaaactgaatgatttaatcaaacgagccagattggccaaggtccacgcatacatcatatcttctttgaaaaaagagatgcctaacgtatttggtaaggaatccaagaaaaaggaactagtgaataacctaggggagatatatcaaaaaatcgaaagggaacatcagatctctccaggtgactttcccagcttgagaaaaatgcaggagctcctccaaacccaggatttctctaagttccaggccctaaaacctaaactactggacaccgtcgacgacatgctggccaatgacatcgctcgtcttatggtaatggtcaggcaagaggaaagtctcatgccaagccaggtggtgaagggtggcgctttcgacggaaccatgaacggcccctttgggcacggatatggagagggggccggcgagggcatcgacgatgtcgagtgggtcgttggaaaagataaacccacctatgacgaaattttctacaccctgtcccctgtgaacgggaaaattactggtgctaacgcaaagaaggagatggtaaaaagcaaattgccaaacacagtactgggcaaaatctggaagctggctgacgttgacaaggacgggctattagacgacgaagagtttgcactggctaaccatttgattaaagtgaagctggaaggacacgaattacctgctgacctgcctccccacctcgtcccccccagcaagagaagacacgaatag

SEQ ID NO: 115609 - DNA, 438 bp, synthetic construct
  misc_feature 1..438: note = Description of Artificial Sequence: Synthetic coding sequence
  source 1..438: mol_type = other DNA
atgttctcctgggtgtcaaaggacgcgagacgcaagaaagaaccagaactctttcagactgttgccgagggactgaggcagctttatgcacagaagctcctgcctttggaggaacattatcgcttccatgagttccacagccctgcccttgaggacgcggatttcgacaacaaacctatggtgctattggtgggacagtatagcacagggaagactaccttcatccggcacctcattgagcaggactttccaggtatgaggatcggcccagagcccaccacagactctttcattgccgtgatgcatggcccgacggagggggtggtgcccggcaatgccctagttgtggacccccgccggccatttaggaaattgaacgctttcggcaacgccttcctcaatcgatttatgtgcgcacaactgccgaacccagtatag

SEQ ID NO: 115610 - DNA, 1296 bp, synthetic construct
  misc_feature 1..1296: note = Description of Artificial Sequence: Synthetic coding sequence
  source 1..1296: mol_type = other DNA
atggagcagcccggcaccgccgcgagtcccgttagcggtagtatgttttcctgggtgagtaaggacgccagacggaaaaaggagccagaattgttccagaccgtagccgagggtctccgacagctttacgcccagaaattgctcccactggaggaacattatcgattccacgaatttcactccccagccctggaggatgccgatttcgacaataagcccatggtgctgctggtaggacagtactctaccggtaagacaaccttcatcagacatttgatagagcaggacttcccagggatgagaatcggccctgaacccaccaccgactcattcatcgccgtcatgcatgggcccactgaaggagtggtcccgggcaatgccttagtggtcgacccccggaggccatttcgaaaactgaacgcgtttggcaacgcctttctcaaccgttttatgtgcgcccagctgcctaatcccgtcctggatagtatcagtattattgatactcctggaatcctgagcggggaaaagcagagaatctcaaggggctatgattttgcagctgttctcgagtggtttgccgagagagtggatcgcattatactgcttttcgatgcccacaagctggacatatctgatgagtttagcgaagtgatcaaggcattgaagaaccacgaagataagatcagagtggtgttaaataaggccgatcagattgaaacccagcagttgatgcgagtgtacggcgccctgatgtggagcttgggcaaaatcattaatactcccgaggttgtccgagtgtatattgggagcttctggtcgcacccactgttaatcccagataacaggaaactgttcgaagcagaggagcaggacctttttaaggacattcagagccttccccgaaacgcagccctgcggaaacttaatgacttgataaagagagcccggttggcaaaggtacacgcctacatcataagctctctgaaaaaggagatgcctaatgtattcggcaaggaatctaagaagaaggaattggtgaacaacctcggagagatttaccaaaagatcgaacgcgaacaccagatctccccgggtgatttcccaagcttgcgtaagatgcaagaattgttgcagacacaggatttttcaaagttccaagctctgaagcctaagctcctcgatgacgaggagttcgccctcgcgaatcacctgattaaagtcaagttggagggccacgagctccctgcagacctgccccctcatttagtccccccatcaaaacgaagacacgagtag

SEQ ID NO: 115611 - DNA, 447 bp, synthetic construct
  misc_feature 1..447: note = Description of Artificial Sequence: Synthetic coding sequence
  source 1..447: mol_type = other DNA
atgttttcctgggtgagtaaggacgcccgccgcaagaaagagccagagttattccagaccgtggctgagggcttgaggcagctatacgctcagaagctgttgccactggaagagcactaccggtttcacgaattccacagccctgccttggaggatgctgatttcgataacaaaccaatggtgctcctcgtgggtcagtacagtaccggcaagaccaccttcattcggcacctgattgagcaggactttcccggcatgagaatcggtcctgagcctactacggatagcttcatagcagtcatgcacggaccgactgaaggagtggtaccaggaaacgccctggttgtcgacccccgcaggccatttcggaagctcaacgcctttggcaacgccttcctgaatagattcatgtgtgcccagctgcctaacccagtgttagacagttag

SEQ ID NO: 115612 - DNA, 1533 bp, synthetic construct
  misc_feature 1..1533: note = Description of Artificial Sequence: Synthetic coding sequence
  source 1..1533: mol_type = other DNA
atgttcagctgggtgtctaaagatgctcgccgtaagaaggaacactataggtttcacgaattccatagcccagccctcgaggacgccgatttcgataataagcctatggtcctcttggtgggacagtattctactgggaagaccacctttatcaggcacctgatcgaacaggacttcccaggaatgaggatcggacctgaacctaccacagactcatttattgcagtgatgcacggcccaacggagggcgtggtgcctgggaatgccctcgtggttgacccgcggcggccttttaggaagctgaatgcttttggaaacgcattccttaaccgattcatgtgcgcacagctaccaaacccagtactcgatagtatctctataattgacacgcccggcatcctctccggtgaaaagcagcgcattagccgaggttatgattttgcagccgtgctggagtggttcgctgaaagggtggatcgaatcatactgctgttcgacgctcacaaactcgacatctccgacgagtttagcgaagtgattaaggctctcaagaatcacgaggataagatccgcgtcgtgctcaataaggctgaccagattgagacccaacagctgatgcgtgtgtatggcgcgctgatgtggtctctcggtaagattatcaatacgcccgaagtggttagagtatatatcggctccttttggtcacaccctctgctcatcccggacaaccgcaagctttttgaggcagaagaacaggacctgtttaaggatattcagtcgctcccaaggaacgcggctctgagaaaattaaatgaccttatcaaacgagcacgtctggccaaagtacacgcatatatcatctcttcattgaagaaggaaatgccgaatgtgttcgggaaggaatccaaaaaaaaagagctggtcaacaatttaggggagatctatcagaaaatcgagagggaacaccagataagccctggggattttccaagcttgcgcaaaatgcaggaactgttgcagacacaggacttctcgaagttccaggccctcaagccaaagctcctggacacagtggacgacatgttggcaaatgatattgctcggctcatggtgatggtgcgacaggaggagtccctcatgccttctcaggtagtgaagggcggcgcattcgacggtacaatgaacgggccattcgggcacggatacggggagggcgcgggcgagggaatcgatgacgtcgaatgggtcgtggggaaagataaacccacgtacgacgaaattttttacaccctatcccccgtcaacgggaagattacaggcgcaaacgctaaaaaggaaatggtcaaatccaagcttcccaatacggtgctgggtaaaatctggaaactagcagatgtcgataaggacggcctactggatgatgaggaattcgctttggccaaccaccttattaaggtgaagctggagggtcatgaacttccagccgacttacctccacacctagtgcctccttctaagcgacgacatgaatag

SEQ ID NO: 115613 - DNA, 1632 bp, synthetic construct
  misc_feature 1..1632: note = Description of Artificial Sequence: Synthetic coding sequence
  source 1..1632: mol_type = other DNA
atgttctcatggctgaaacggggcggagctcgtggccagcaacccgaggccattcgcacggtgaccagcgcactgaaggagctctacagaaccaaactgctgccgctcgaagagcactacaggttcggggcctttcactcccccgcgctggaagatgcggactttgatggcaaacctatggtccttgttgcgggacaatacagcaccgggaaaaccagttttattcaatacttgcttgagcaagaggtccctgggtcgcgtgtggggccggagcctaccactgactgtttcgttgccgtgatgcatggagacaccgagggcactgtgcctggcaacgctcttgtggttgatccagacaagccttttcggaagttgaacccattcggaaacaccttcctgaatcgcttcatgtgcgcacagctccccaaccaagtgctagaatctatctctatcattgacactccaggtatcctttccggggccaagcagcgcgtgagcagaggctacgactttccagcagtcctacgttggttcgctgagcgcgttgatctgattatcctgctctttgacgcccataaattggagatttctgatgaattcagcgaagctattggcgctctgagaggccacgaagataagattagagtcgtgctaaataaggccgatatggtggaaactcaacagctgatgagagtgtatggcgctttgatgtgggccctcggaaaggttgtggggacacctgaggtgctcagagtgtacatcggatccttttggagccaacctctcctcgttcccgacaatcgcagattgttcgagttggaggagcaagatcttttcagggacatccagggcctcccccggcatgcagcactgagaaagctcaacgatttagtcaagagagcccggctagtccgggtgcacgcttatatcatttcttacctgaagaaagagatgccgtccgtttttggaaaggagaataagaagaagcaattgatcctcaagttgcctgtgatatttgcaaagattcagctcgaacatcatatctcgccaggcgacttcccagactgtcagaaaatgcaagaactgctgatggcccacgactttaccaagtttcacagtctcaagccaaaacttctcgaggctcttgacgaaatgctaacgcacgacatcgccaaactgatgccgctcctgaggcaggaggaactggagtccaccgaagtgggggtccaggggggtgctttcgagggcactcatatggggcccttcgtcgagagaggaccagatgaagcaatggaggacggagaggagggaagtgacgatgaagccgagtgggtggtcacaaaggataagtccaaatatgacgaaatcttctataacctggcccccgccgatggtaaactgagcgggagcaaggcaaaaacttggatggtgggaacgaagctccccaattccgttctggggaggatctggaaacttagcgatgttgatcgtgatggtatgctcgacgacgaagagttcgcactggccagtcacctcatcgaagcaaaactggagggtcacgggctgccggccaacctgccacgacgcctcgttccgccaagtaaaagaagacacaaaggaagcgcagagtag

SEQ ID NO: 115614 - DNA, 516 bp, synthetic construct
  misc_feature 1..516: note = Description of Artificial Sequence: Synthetic coding sequence
  source 1..516: mol_type = other DNA
atgccttcggtctttggcaaagagaataagaagaagcaactcattctcaagctccctgtcatcttcgccaagattcaacttgagcatcacatttctcctggcgatttcccagactgtcagaaaatgcaggaactgctcatggcccacgattttaccaagttccactctctgaagcccaaacttctcgaagccctagatgagatgctgactcatgatatcgccaaactgatgcccttactgcggcaggaggaactcgaatccaccgaggtcggcgtgcaaggaggggcctttgaaggcacacatatgggcccttttgtcgagcggggaccagatgaggccatggaagaccagggccaggtgcagatccgtcgcgacctgttacagccaggtgcatgcagacgccaggcggaaaggctgcaagggcaggacttggatggaggggaccaggctccccagttatccgccggtgctcacttggaggcccagcgctgcggcccaaggcgtcatgcagggtag

SEQ ID NO: 115615 - DNA, 1224 bp, synthetic construct
  misc_feature 1..1224: note = Description of Artificial Sequence: Synthetic coding sequence
  source 1..1224: mol_type = other DNA
atgtgcgctcaactgccgaaccaggtgctggagtctattagtatcattgatacacccggcatcctgtctggagccaagcagcgcgtcagccggggatatgattttcctgcggttctcagatggttcgccgaacgtgttgacctcatcatcctcctgtttgacgcccataaactcgaaatcagcgatgaatttagcgaagccattggcgccttgagggggcacgaggacaaaatccgggttgttctaaacaaagccgacatggtggaaactcagcaactcatgagagtgtatggcgccttgatgtgggccctgggaaaagtagtcggaacgcccgaggtgctgcgggtatatatcggctccttttggagtcagccgttactcgtcccagacaacagacggctgttcgagttggaagagcaggacctctttagagatattcaggggctcccacgacacgctgccctgaggaagctgaatgaccttgtaaaaagagcccggctggtgagagtacacgcttacattatttcgtatttgaaaaaagagatgccctcggtgtttggtaaggagaacaaaaaaaagcagcttatcctgaaactgcccgtgattttcgccaaaatccaattagagcatcatataagccctggcgacttccccgactgccagaaaatgcaggagctgctgatggcccacgacttcactaagtttcatagccttaaaccaaagctgctggaggccctcgacgaaatgcttacgcacgacatcgccaagttaatgccactacttagacaggaagagttggagtccacagaggttggcgtgcaaggtggtgcttttgaggggacacacatgggcccttttgtagaaagggggcccgacgaggctatggaggacggggaagaggggagcgatgacgaggccgaatgggtcgtgaccaaggataaaagcaagtatgacgagattttttataacctggctcctgccgacgggaagctttccggttctaaggcaaaaacatggatggtcggcacgaagctgccgaattccgttcttgggcgcatttggaagctgagcgacgtcgatagagatggtatgttagacgatgaagaatttgctctggcttcgcaccttatcgaggctaaactggagggacatggtttgcctgctaacctgcccagaagactcgtgcccccatccaaacggagacacaagggatcagccgagtag

SEQ ID NO: 115616 - DNA, 1242 bp, synthetic construct
  misc_feature 1..1242: note = Description of Artificial Sequence: Synthetic coding sequence
  source 1..1242: mol_type = other DNA
atgttcagttggctgaaacgcgggggcgctcggggtcagcagccagaggcaattcgaacagtcacaagcgccctaaaggagctttaccgcactaagctgctgcccctagaggagcactaccgattcggcgcgtttcattctccagcactggaggacgccgactttgatggaaaaccaatggtcctggtggccggtcagtactctacagggaagacctcattcatccaatacttactggaacaagaggtaccgggaagcagagtgggacctgaaccaactaccgactgctttgtggctgtgatgcacggcgacaccgaaggtaccgttccaggcaacgctttggtcgtagatcccgacaagcctttccgcaagctgaacccctttggtaataccttcctcaaccgattcatgtgcgcccagctgcctaaccaagtattagaaagcatcagcattattgatactccaggtattctgtctggggccaagcagagagtgagccgtggatacgacttcccagccgtcctgaggtggtttgcggagcgtgtggacctgattatactgctgtttgacgctcataagttggagatctcggacgagttctccgaagcaatcggggcattgagaggtcatgaggataagatcagggtcgtgctaaataaagcagacatggtggaaactcaacaactgatgagagtctacggtgcactgatgtgggctctgggcaaggttgtggggacacctgaagttctgagagtttatattggcagtttctggagccaaccactgctagtgcccgacaatagaaggttattcgaactggaagaacaggatctgttcagagatatccagggcctgccccggcatgcagcgctgagaaaactgaacgatctggtgaaacgcgccagactggttagggtgcatgcttatataatttcatacctgaagaaggagatgccttccgtgtttggaaaggaaaacaagaagaagcagctaatcctcaagctacctgtgattttcgccaaaattcagcttgagcaccatatttctcccggggacttccctgactgtcagaagatgcaggaactgttaatggcccacgacttcactaaatttcacagcctcaaacctaaactcttagaagcgttagacgaaatgttaacacacgatatcgccaagttaatgccattactacggcaagaagaactggaaagcagcccagtcgccgagatgacatcccgttag

SEQ ID NO: 115617 - DNA, 1602 bp, synthetic construct
  misc_feature 1..1602: note = Description of Artificial Sequence: Synthetic coding sequence
  source 1..1602: mol_type = other DNA
atgttctcttggcttaagagaggcggcgctcgcggacaacagccagaggcaatccggacagttacctcagccctcaaggagctgtatagaaccaaacttctgcctctggaggaacactacagattcggagcttttcatagccctgcactggaggacgccgattttgacggtaaacccatggtactagtggcagggcagtacagcactggtaaaacctcttttattcagtacctgttggaacaggaagttccggggagcagagtcgccgttatgcacggagataccgaggggactgttcctggtaacgctctggtggtggaccctgataaaccatttaggaaattaaacccctttggtaacactttccttaaccgcttcatgtgcgctcagctgcctaatcaggtactagaatctatctccatcatcgacaccccgggaattctatccggcgcgaaacagagggtttctcgtggctacgattttcccgctgtgctgaggtggtttgccgaacgcgtggacctgattatacttcttttcgacgctcacaaactagaaatttcagacgagttttcagaggccattggcgcactgcgcgggcatgaagataaaatccgcgtagttctgaataaagcagatatggttgagacccagcagctgatgcgggtgtatggagctctcatgtgggctctcgggaaggtcgtggggacgccagaagtgctgagagtgtacatcggatctttctggtctcagcctctcctcgtgccagataaccgccggctgttcgagctagaggaacaggatctattcagggacattcaaggccttccacggcatgccgcgcttagaaaactgaacgatcttgtcaagagagcccgcctggtgagagtccatgcctacatcatcagctatctgaagaaggagatgccatcggtctttggaaaagagaacaagaaaaaacagttgattctgaagctccccgttatctttgccaaaattcagttggagcatcatattagtcccggtgacttcccagattgtcaaaaaatgcaggaactgctcatggctcatgacttcactaagtttcacagcttaaaacctaaacttctggaagctcttgacgaaatgttgacccatgacatagcaaagctgatgccacttctacgccaagaggagctcgagtcaaccgaggtaggggtgcaggggggcgcgtttgagggcacccatatggggccttttgttgaaaggggacccgatgaggctatggaggacggcgaggaggggagcgacgacgaggccgaatgggtcgtgaccaaggacaagagtaagtacgacgagattttttataatctggccccggccgacggaaagctcagcgggagtaaggcaaaaacctggatggtaggaacaaaactgccaaatagcgtgcttggtcggatttggaaacttagtgacgtggaccgggacgggatgctggatgatgaggagtttgcgctcgcctcacacctgatagaagcaaagctggagggccacggcctgcccgccaatttgccgcgaaggctggtccccccatcaaagcggcgacataagggttccgctgaatag

SEQ ID NO: 115618 - DNA, 681 bp, synthetic construct
  misc_feature 1..681: note = Description of Artificial Sequence: Synthetic coding sequence
  source 1..681: mol_type = other DNA
atgccaagcgtctttgggaaggaaaataagaaaaagcagctcatcctgaagctacctgtgatatttgccaaaattcaactggaacatcacatctctcctggtgatttccccgactgtcagaaaatgcaggaattgctgatggctcatgatttcaccaaatttcacagcctgaagcccaagttgttggaagcactcgacgaaatgctgacccatgacatcgcgaaactgatgccgttgctgcgccaggaggaattagagtcgacagaagtcggagtgcaggggggtgcctttgagggcacacacatgggaccttttgtagaaagaggaccagatgaggccatggaggatggggaggaggggtcagacgatgaagctgaatgggtggtaacgaaagacaaatctaaatacgatgagatcttttacaaccttgcaccagctgacggaaagctgagcggatcgaaggccaagacttggatggtggggacaaagctgccaaattcagtcctaggccgaatatggaaattgagcgacgtcgacagggacggcatgctagatgatgaagagtttgcccttgcatcacatttgattgaagctaagcttgaaggccacggcctacctgctaatctgccgagacgcctcgtacctccatctaaacgccgacacaaaggcagtgcagaatag

SEQ ID NO: 115619 - DNA, 1608 bp, synthetic construct
  misc_feature 1..1608: note = Description of Artificial Sequence: Synthetic coding sequence
  source 1..1608: mol_type = other DNA
atgttctcctggttaggtactgacgatcggcgcaggaaagacccagaggtatttcagactgttagtgaagggctcaaaaaattatataagtccaaactgttaccactggaggaacactataggttccacgagtttcacagccccgctttagaagacgccgattttgacaataagccaatggtcttgctggttggccaatactctacaggcaaaacgacctttatcaggtacctgctggagcaagacttccccggcatgagaatcggccccgagcccaccacggatagctttattgctgtaatgcagggcgatatggagggcataataccgggtaacgctctagtggtcgacccgaagaagcccttcagaaaacttaatgcctttgggaacgcctttttaaaccgattcgtgtgcgcccaattgcctaacccagtactggagtctatcagcgtgattgacactcctgggatcctgtctggggagaaacagcgaatttcacgcggctatgattttgcagccgtgctcgagtggtttgctgaacgcgtagacagaattatcctgctcttcgatgcccataagctcgacatctcagatgaattcagtgaagtgataaaggcccttaagaaccacgaggataaaatgagagttgtgctaaacaaagccgatcagatcgaaacccaacagctgatgcgcgtgtacggggcacttatgtggagcctcggcaagattgttaacactccagaggtgattcgcgtgtacataggaagtttctggtcacacccactgctgattccagacaacaggaagctcttcgaggcagaagagcaggacctattcagggacatacagtccctacctcggaatgccgccttgcggaagcttaatgaccttatcaagcgtgctcggctggccaaagttcatgcgtacattatcagttccctgaagaaggaaatgccttctgtctttgggaaggataataagaaaaaggagttggttaacaatttggccgaaatctatggccgcatcgagcgggaacatcagataagcccaggcgatttccctaacctgaaacgcatgcaagatcagctgcaagcgcaggactttagcaagttccagcccttgaaaagcaaactgctcgaggtcgtggatgacatgttggcacacgatatcgctcagcttatggtgctcgtcagacaagaagaatctcagagaccaatccaaatggtgaagggcggggcattcgaaggcaccctacacgggccttttggacacggttatggcgaaggagcaggtgaagggatcgatgatgccgagtgggttgttgctcgggacaaaccaatgtacgacgagattttctatacccttagcccggtggacggaaagatcacaggggccaacgccaagaaagaaatggtccgctcaaagctgccaaacagcgtcctggggaagatttggaaactggccgatattgacaaggacgggatgttggacgatgacgaatttgctcttgccaaccatctcattaaggttaagttggagggccatgaacttcctaacgagctgccagcccatttacttcccccatccaagcggaaagtcgccgagtag

SEQ ID NO: 115620 - DNA, 528 bp, synthetic construct
  misc_feature 1..528: note = Description of Artificial Sequence: Synthetic coding sequence
  source 1..528: mol_type = other DNA
atgttcagttggctcgggactgacgaccgccgcagaaaagaccccgaggtatttcagaccgtttctgagggattaaaaaaattgtataagagcaaattgctgccgctcgaagaacattaccgcttccacgaatttcattctcccgccttagaggacgcagactttgacaataagcctatggttctgttggtgggacagtactccacgggcaagacaacattcatccgctacctgctcgaacaagattttcccggtatgcgcatcggaccagaacctaccactgattcgtttatcgcagttatgcagggggatatggagggtataatccctgggaatgctctggttgttgaccccaaaaaaccatttaggaagctgaacgcgtttggtaacgcattcctcaatcggtttgtctgtgctcagttgccaaatcccgttctagaatcgatatccgttatcgacacccccggaatcctaagtggtgagaagcagcggatctcaagaggccctgctgccgggccgggtctgtag

SEQ ID NO: 115621 - DNA, 4086 bp, synthetic construct
  misc_feature 1..4086: note = Description of Artificial Sequence: Synthetic coding sequence
  source 1..4086: mol_type = other DNA
atgggtgcggccggtagacaggattttctgtttaaggccatgctcacaatctcatggcttactctgacttgtttccctggagcaacatcgaccgtagcggcaggttgcccagatcaaagcccagagcttcagccttggaaccctgggcacgatcaggaccatcacgtgcacattgggcaggggaaaactcttctgctcacctctagcgctactgtgtattctatccacatttctgagggcgggaaattagtcatcaaggatcatgacgagcccatcgtcctgcgcactaggcacatccttatcgacaatggaggagagctgcacgctggatcagccctttgtccattccagggtaattttaccatcattctgtatggacgcgctgacgagggtattcaaccagatccctactatggtctaaagtatattggcgtagggaaaggtggagcgttggagctgcacggtcagaagaaactgagctggacgtttctgaataagacactgcaccctggggggatggccgaaggaggatacttctttgagcgctcctggggtcaccggggagtgatcgtgcacgttatcgacccaaaatcaggaacagtgattcattcagacagattcgacacatatcgaagtaaaaaagagtccgagcggctggtgcaatacttaaacgccgtccctgacgggcgcatcttgagcgtcgcagttaatgacgagggatcaaggaaccttgatgacatggcgaggaaggcaatgacgaaactcggtagcaaacacttcctacacttgggcttccggcacccatggagctttctgacagtgaaaggaaatcctagctcgagtgtagaggaccacatagaatatcacggacaccggggaagcgccgccgcccgagtctttaaactgtttcagactgaacatggcgaatattttaacgtgtcgctgagctctgagtgggtgcaggacgtggagtggaccgaatggttcgatcacgataaggtctcccaaacgaagggaggggaaaaaataagcgatctttggaaggcacatccaggtaagatttgtaaccggcctattgatatacaagccactaccatggacggtgtaaacctgtccacagaggtggtgtacaaaaagggacaagactatcgattcgcctgttacgatcgaggacgcgcttgtcgcagctacagagtgagatttctgtgcggcaagcctgtgaggccgaagctcaccgtgacgattgacactaatgtgaattccacgatcttgaatctggaagataatgtgcagagttggaagcctggagacaccctggtgatcgcttctactgattacagtatgtaccaagctgaagagttccaggtcctgccttgccgcagttgcgcgccgaatcaggtgaaggtggctgggaagcctatgtacttgcatataggcgaagagatcgacggtgtcgacatgagagccgaagtgggcttactgtcacggaacattattgtgatgggtgagatggaggacaaatgctacccataccgaaatcatatttgcaattttttcgatttcgacactttcggtggacacatcaaatttgcccttgggttcaaagccgcacacctagagggaacagagctgaagcacatggggcaacagcttgttgggcaatacccgattcacttccacctcgcaggagatgttgatgagagaggtggctacgaccccccaacttacattagagacctctccatccaccacaccttttccaggtgtgtgaccgtgcatggcagtaacgggctcctgatcaaagacgtggtggggtacaatagtttaggccattgcttctttaccgaagatggtcctgaagagcgcaacaccttcgatcattgtcttggactgctggtgaaatcgggcacgttgctgccttccgaccgtgactcaaagatgtgtaagatgatcacagaagacagttatccgggctacatcccaaagcctagacaggattgtaatgctgttagtacattctggatggcgaaccccaacaataacctgattaactgcgctgcagcgggcagtgaggagaccggcttctggtttatcttccaccatgttccaacaggtcctagcgtggggatgtactcccccggctactcagaacacatccccctcggcaagttttacaataatcgcgcacactctaactatcgggccggcatgattattgacaacggagtgaagacaaccgaagcgtctgctaaagataagcgcccgtttcttagcatcatctcagcccggtactccccccatcaggatgccgatcccctcaagcctcgggaacctgctattataaggcattttatcgcatacaaaaaccaagatcatggagcatggctccggggcggcgacgtgtggctagactcctgtcgtttcgcagataacggaattgggctgacgctcgccagcggcggaacattcccgtacgatgatgggtccaaacaggagattaaaaactcattattcgtcggagaatctggaaatgtggggactgaaatgatggacaaccggatttggggacctggcggcctggatcactccggcagaacccttcctataggacagaacttccctatccgaggaatccagctgtacgatgggcctatcaatattcagaactgtactttccgaaagttcgtggccttagaagggagacatacttccgcactggcttttcgactgaataacgcctggcaatcttgtccccataataacgtgacggggatcgccttcgaagacgtccccattactagcagggtgttttttggcgaacccgggccctggtttaatcagttggacatggacggagacaaaaccagcgtgtttcacgatgtggatggtagcgtaagtgaatatcccggatcatatctcacaaaaaacgataattggctggtgcgtcatcctgactgcattaacgtgcccgactggagaggggcaatctgctctggctgctatgcccagatgtatatccaggcctacaagacttcaaatctccggatgaagatcattaagaatgatttccctagccatcccctttacctggaaggtgctctgacccgatctactcactatcaacagtatcaacccgtggttacactgcagaaggggtataccatccactgggatcagacggcccctgcagaactggccatatggctcataaactttaataagggcgactggatcagagtaggcctgtgttatcccaggggaaccacgttttctatcctgagtgacgttcataatcggctcctgaagcagacttcaaaaacaggtgtttttgtgagaacattgcagatggacaaggtcgagcaatcctacccgggtaggtcccattactattgggatgaagatagtggattgctcttcctgaagcttaaggctcaaaatgaacgcgaaaagttcgccttttgtagcatgaaaggttgtgagaggatcaagatcaaggcactgatccccaaaaacgccggagtgtctgattgcactgctacggcctatcctaagtttaccgaacgtgccgtggtggacgtcccaatgccaaagaagctttttggcagccagttgaagacaaaagatcactttctggaggtcaagatggaatcctcaaaacagcactttttccacttgtggaatgactttgcgtatattgaggtcgatggcaaaaagtacccctcctccgaagatggcattcaggtagtcgtaatcgacggtaaccagggcagagtggtcagccatacatctttccggaactctattctgcagggaattccctggcagttattcaattatgtggctacgatcccagacaatagcatcgtcctaatggcctcaaagggcagatatgtatcaagaggcccgtggacaagagtgctggaaaagctcggcgcggacaggggtcttaaactgaaggagcagatggccttcgtgggcttcaagggcagctttcgaccaatatgggtaacactcgataccgaggatcacaaggccaaaatatttcaagtcgttcccattcctgtcgttaagaagaaaaagctctag

SEQ ID NO: 115622 - DNA, 1092 bp, synthetic construct
  misc_feature 1..1092: note = Description of Artificial Sequence: Synthetic coding sequence
  source 1..1092: mol_type = other DNA
atgagtatggacgtaacgtttctcggaaccggagcagcatacccctcacctactcggggggcctccgccgtagttttgcgatgcgaaggtgaatgttggcttttcgattgtggagaagggacacagacccaactgatgaaaagtcagcttaaggcaggccgtattacaaaaatctttataacccaccttcacggcgaccattttttcgggctccctggcttgctatgcaccatcagcttgcaaagtggatcaatggtctctaaacaacctatagagatttacggcccagttggcctacgagacttcatctggcggacgatggaacttagccatacagagctcgtgtttcattatgtggtgcatgaattggttcccactgcagaccaatgccctgccgaagagctcaaagagttcgcccacgttaacagagccgacagtccacccaaagaagagcaggggcgcaccatcctgttggactccgaagagaattcttatctcctttttgatgatgaacagtttgtagttaaagctttccgcttgtttcatcgcattccatctttcggattcagcgtggtggagaaaaagcggccagggaagctgaacgcacagaagcttaaagatttgggcgtgccacctgggccagcctacggcaaattaaagaatggcatctctgtggttcttgaaaatggcgttactattagcccccaggacgtgctcaaaaaaccgattgtaggaagaaagatctgtatactgggcgactgttcaggtgttgtaggcgatggcggggtcaaactctgtttcgaagctgacctcctgattcatgaagccaccctggatgacgcacaaatggacaaggcgaaggaacatggtcactccacgcctcagatggccgccaccttcgccaaactttgcagagcaaagcggctggtcctcactcacttctctcagagatacaaacctgttgcactcgccagagagggagagacagacggaatagctgagctgaaaaagcaagctgagtctgtgctggatctccaggaggtaaccttggctgaggacttcatggtgatctcgatccccattaagaagtag

SEQ ID NO: 115623 - DNA, 2481 bp, synthetic construct
  misc_feature 1..2481: note = Description of Artificial Sequence: Synthetic coding sequence
  source 1..2481: mol_type = other DNA
atgtgggcattgtgcagcctgctgagatcagcggccgggaggactatgtcacagggccggaccatatcacaggcccctgctcggagggagcggccccggaaagaccccctcagacacctacggacacgagaaaagagagggccaagcgggtgcagcgggggaccgaacacagtttatctgcaagtggttgccgctgggagccgggactctggcgccgccttgtacgtatttagtgaatttaatagatacctttttaattgtggagaaggtgtgcaacgattgatgcaggaacacaagctgaaggtggcgcggctcgataacattttcctcacacgcatgcactggagcaacgtaggtggcctgtcaggaatgattttgacacttaaagaaaccgggctgcctaagtgtgtgctgtcagggcctccccagctggaaaaatacctggaggctattaaaatcttttcaggaccgttgaaggggatcgaactggccgtccgcccgcactctgccccagagtacgaagacgaaacaatgactgtgtatcaaattccaatccattcagaacagagacggggtaagcaccagccctggcagtcaccagaacgtcctttgtcaaggctaagccctgaaagatcgagcgactccgaatctaacgaaaatgaaccacacctgccccatggggtcagtcagcggcggggagttcgggactcttccctggtggtggcgttcatctgcaagctgcacctcaaacgagggaacttcttagtgctaaaggccaaggagatgggactgccagtcggcaccgccgctatcgcgccgatcattgccgctgtgaaggatggaaaatctattacacacgagggcagggagattcttgcggaagagttgtgtaccccccccgatcctggagcagcctttgttgtagttgagtgccctgatgaatccttcatccagcccatttgcgagaatgctactttccagcgatatcagggcaaggccgacgctccagtagcacttgtggtccatatggccccggcctctgtcctggttgattcgcggtaccaacagtggatggaaaggttcgggccggatacccagcaccttgtcctgaacgaaaactgtgcttccgttcataatctgcggagccacaagatccagacccagctgaacctgattcaccctgacatctttccgctcctgactagcttccgatgcaagaaggaggggcctactctgtcggtgccaatggtgcagggagaatgcctcctcaaatatcagctcagaccccgtcgtgaatggcaaagggatgccatcatcacgtgtaaccccgaagaattcatcgtcgaagctctgcagctgcccaatttccagcaatccgtgcaggaatataggcgcagtgctcaggacggcccagctcccgccgaaaaaagatcccaatatcccgaaataattttccttggtaccgggtctgcaatccctatgaagattaggaacgtaagtgccaccctcgtcaacatttcccctgacacctctctcctccttgactgtggggagggcacattcgggcaactgtgtcgtcattacggtgaccaggttgatcgggtattaggcaccttggcagcagtgtttgtgagccacctgcatgcggaccaccacacgggcctgccgagcatactcctccaaagagaaagggcccttgcaagcttggggaagcctttgcatcctctgctcgtggtggctcccaatcaactgaaagcttggttacagcaatatcataaccagtgccaggaggtgctgcatcacatatcaatgatcccagccaagtgcttacaggagggggctgagatatcctccccagccgtcgaaaggttgatctcctccctccttcggacatgcgacctggaggaattccagacgtgccttgtgagacactgcaagcacgcctttggctgtgcactcgtgcatacaagtgggtggaaggtcgtgtatagcggtgacaccatgccatgcgaagccctggtgaggatgggaaaagacgcaactctccttatccatgaagcgactcttgaggatggtcttgaagaagaagctgttgagaaaacgcactcgacaacctctcaggcaattagcgtcggcatgagaatgaatgcagagtttataatgttgaaccatttttcgcagaggtatgcaaaagttcctctgttttcgcccaacttttccgagaaagtcggcgtggccttcgatcacatgaaagtctgcttcggagatttccctactatgccgaagttgattccccctctgaaagctctctttgcgggcgacattgaggaaatggaggaacgcagggagaagcgggagttgcgacaggtgagagccgctttgctgtccagagaactcgcaggtggcctggaagatggcgagccccaacagaaacgagcacacacagaagagccccaggcaaaaaaagtgcgcgcccagtag

SEQ ID NO: 115624 - DNA, 2424 bp, synthetic construct
  misc_feature 1..2424: note = Description of Artificial Sequence: Synthetic coding sequence
  source 1..2424: mol_type = other DNA
atgtgggccctctgttcactcctgcgatctgccgccgggaggactatgagccagggccgcacgataagccaggcgccagctcgacgcgaacggcccagaaaagacccactgcggcatcttcgcacaagggaaaaacgcggcccttccggctgctccggcggccccaacacggtgtacttacaggtggttgctgccggctcccgggactccggtgttcagcggttaatgcaggagcataaattgaaagttgcccggttggacaacatatttttgacgcgcatgcattggagcaacgtgggcggcctctcaggaatgatacttacgctgaaagagactggtctaccaaaatgcgtgctctctggtcccccacaactggaaaaataccttgaggccataaagattttttctggcccattaaaaggcatcgagctggcagtcagaccacacagtgcacccgagtatgaagatgaaacgatgacagtatatcagatccctattcattccgagcagcggcgcggaaagcaccaaccttggcagagccctgaacgcccactgagccggctctcccccgagaggagcagtgatagcgaatcgaacgaaaacgagccccatctgccgcatggggtatctcagagacggggcgtgcgggactcctccctcgtggtggcctttatatgcaagctgcatctgaagcgaggcaatttcttggtgttgaaggcaaaggaaatggggctgcctgtcggaaccgctgccattgccccaataattgccgcggtgaaggatggcaaaagcatcacacatgaaggtagggagattctggcggaagaactttgtacacctccagaccctggggccgctttcgtcgtcgtcgagtgccctgacgagagctttatccagccaatttgtgaaaatgccacttttcagcgataccaggggaaagccgacgctcctgtagcattggtggtacatatggcacccgcaagtgtcctggtggactctcgctatcagcagtggatggaaaggttcggccctgacacacagcacctggttctgaatgagaactgtgctagcgttcacaaccttagaagccacaaaatacaaacccagctcaacctgatacaccctgatattttccctctgcttacaagctttcggtgtaaaaaagagggccctaccctgagtgtgccaatggtgcagggggaatgcctactgaagtatcagcttagaccccgccgggagtggcagcgcgacgcaattataacgtgcaaccccgaagagtttatagtcgaggctttgcaacttccgaatttccagcagagcgttcaggaatacagacgcagtgcacaggacgggcccgcccctgccgagaaacggtctcagtaccccgagatcatcttcctcggaactgggagcgcgatccctatgaagattagaaatgtctccgccaccctagtgaatatatcaccagacactagcttgctgctggactgtggtgaggggacttttgggcagctatgcagacattacggtgatcaagttgaccgcgttcttgggaccctggccgcagtgtttgtgtctcacctacacgccgaccaccacaccggactcccatccattctattacagcgggagagagcactggcttctctcggaaaaccactgcatccactgttggtcgtcgcaccgaaccaactgaaggcctggctgcagcagtaccacaaccagtgccaggaagttctgcatcatatctctatgattcccgccaagtgcttgcaggaaggagcagagatctcttcaccagccgtggagagattgattagtagcctcctgaggacttgcgacctcgaagaattccagacgtgtctagttcgccactgtaagcacgcctttggttgcgcacttgtccacaccagcggctggaaggttgtttactctggcgataccatgccgtgcgaagccttagtgcggatgggcaaagacgcaacattgctgattcacgaagcaactcttgaagacggacttgaagaagaggcagtcgagaagacccatagtactacaagtcaggccatttctgtggggatgcggatgaatgctgaattcattatgctcaatcactttagtcaaaggtatgcaaaagtaccgcttttcagccccaatttctctgaaaaggttggggtcgccttcgatcacatgaaagtttgtttcggcgacttccccacaatgcctaagcttattccccccttgaaggcattgttcgcaggcgacattgaggagatggaagagcggcgggagaaaagagagctcagacaggtgagggctgccttgctctctagggagctggctgggggattggaagatggggagccccagcagaaaagagcacatactgaggagcctcaagccaaaaaggttcgggcccagtag

SEQ ID NO: 115625 - DNA, 2361 bp, synthetic construct
  misc_feature 1..2361: note = Description of Artificial Sequence: Synthetic coding sequence
  source 1..2361: mol_type = other DNA
atgtgggcactctgttcactgctgcgctcagccgccggcagaacaatgtcacagggacggacgatctcacaagcccccgctcgacgggagagacctcgcaaagatcccttaaggcatctgaggactcgggaaaaaagaggacctagtggctgctcaggaggccctaatactgtttacttgcaggtggtagcagctggcagccgcgattcaggagccgccctgtatgttttctccgagtttaatcggtatcttttcaactgcggtgagggcgttcaaaggctcatgcaggaacacaagctcaaagtagcaaggcttgacaatatttttttgacgcgcatgcattggtctaatgtgggaggtctaagtggcatgatcctgacactcaaggagacggggctacccaaatgtgtcctttccggaccaccacaactcgagaagtacctagaagccatcaaaatattttcgggtccactcaagggaattgaacttgccgtaagaccgcacagtgcccctgagtacgaggacgagacgatgactgtgtaccaaattccaatccactcagtgtcccagcgcagaggggtgcgggactcctctctggtcgtggcttttatctgcaagctacatcttaaacgggggaatttcctagtgcttaaggcaaaagaaatgggactgccggtgggcacagctgctattgctcctatcatcgccgccgtaaaagatggaaagagcatcacacacgaaggaagagagattctggcagaagagttatgcacccctcccgatcctggtgccgcgtttgttgtcgtggagtgccctgacgagagttttatccaaccgatctgtgaaaatgcaacatttcaaaggtatcagggaaaggccgacgcgccggtggccctggtggtgcacatggctccagccagcgttctcgtcgatagcaggtatcagcagtggatggagcgttttggccctgatacccagcacttagtcctgaacgagaattgtgcctcggttcacaacctgaggagccacaagatccagacacagcttaatctgatccaccctgatatcttcccacttctgacctccttccgttgtaaaaaggaaggacccactctgtctgtgcctatggttcagggcgagtgccttctaaaataccagctccggccgcgcagggagtggcagcgggacgctatcatcacctgtaatcccgaggaattcattgttgaagcactccagctccccaatttccagcagagcgtccaggaatatagaagaagcgcacaagatggccctgccccagcagagaagcgatcccagtaccccgaaattatctttttaggaacaggaagtgcaattcccatgaaaatcaggaatgtatccgccactctggtgaacatttctcccgacacctccctcctgctcgactgcggtgaggggacattcggtcagctgtgtcggcattacggcgatcaggtggatcgggttttaggtaccctcgccgcagtattcgtgagtcacctacatgctgaccaccatactggactgccatctatacttttacagcgcgaacgggccctagcaagcttgggcaaaccgctgcatccgctattggtcgtagcacccaaccagctgaaggcatggctgcagcagtatcataaccagtgtcaggaagtgttgcaccacatcagcatgatcccagccaagtgtctgcaggagggagcggagatatcttcgccagctgtggagcgcctcattagcagtctcctccgcacctgtgacctagaggaattccagacttgtttggtgcgccattgcaaacacgcattcggctgcgctctcgtccacacgagcggatggaaggtggtgtactcaggcgatacgatgccttgcgaagctctcgtgagaatgggaaaggacgcgacgctgctcattcacgaggctacgcttgaggatgggcttgaagaagaagctgtagagaagactcattccactaccagccaggcgatctccgtcggaatgcgcatgaacgccgaatttattatgttgaatcatttcagtcagcggtacgcaaaagttccactgttctccccaaacttctccgagaaggtgggagtggcattcgatcacatgaaggtgtgttttggagatttccctacaatgccaaagttgataccccctcttaaagccttatttgcaggggacatagaggagatggaggagcggagagagaagcgcgaactacggcaggtccgggccgccctgctcagccgagagttagcgggtggtctagaagacggggaaccacagcaaaagagagcacatactgaggagccccaggccaagaaggtgcgagctcagtag

SEQ ID NO: 115626 - DNA, 861 bp, synthetic construct
  misc_feature 1..861: note = Description of Artificial Sequence: Synthetic coding sequence
  source 1..861: mol_type = other DNA
tgacctcacggagttagccagcgccgaggagtgagagattcctctctggtggtggccttcatctgcaaactgcatctgaaacgtggaaacttcctggtgctgaaagccaaggagatggggctgcccgtaggaaccgctgccatagcccccattatcgctgccgtgaaagatggaaaatccattactcacgagggtcgggaggtgctccagattctagccgaggagttgtgtaccccccccgaccctggcgcagccttcgtggtggtggaatgccccgacgagtcgttcatccagcccatctgcgaaaacgcaacctttcagcgataccaaggcaaggccgatgcccctgtcgccctggtggtgcatatggcacccgcctcggtgctggtcgatagccgataccagcagtggatggaacggtttggtcccgatacgcagcaccttgtcctaaatgaaaactgtgcctcggtgcataatcttcgaagtcataaaatccaaactcagcttaacctaatccatcccgatatctttcccctcctcaccagttttcgatgcaagaaagagggtcctactctcagcgtgcctatggtgcagggcgagtgccttcttaagtaccagctccggcctcgcagggaatggcagagagacgcaattataacatgtaaccccgaggagttcatagtggaggcactgcagctgcctaattttcagcaatcagtgcaggaataccggcggtccgcccaagacggcccagctcctgctgaaaaaaggagccagtatccagagattattttcctgggaaccggttctgccatcccaatgaaaatcaggaacgtctcagccaccctggttaatatttag

SEQ ID NO: 115627 - DNA, 837 bp, synthetic construct
  misc_feature 1..837: note = Description of Artificial Sequence: Synthetic coding sequence
  source 1..837: mol_type = other DNA
atactggccgaagagctctgcaccccccctgatcctggggcggctttcgttgtagtagagtgccctgacgagagctttattcagcccatatgtgagaacgccacctttcaaagatttgggcctgacacccagcatctcgtcctcaatgagaactgcgcgtctgttcataacctgaggtcccacaaaatccagacacagttaaatctcatccaccctgatatcttccccctgctgaccagcttcaggtgtaagaaggaaggacccaccttgagtgtgccaatggtgcaaggtgaatgcttactgaagtatcagctcagaccacgccgagagtggcaaagggatgcgataatcacgtgcaatccagaagaattcatcgtggaagctctccagttgcctaactttcagcagtccgtgcaggagtaccggcgttcagcccaggacggtcctgcaccagccgagaagaggtctcagtatccagaaatcatattccttggcacaggctcagccatccccatgaaaataagaaatgtgtccgctacgctggtcaacatctccccggatacctctctgctcctggactgcggagaggggacctttggacagctgtgtaggcactatggagaccaggtcgaccgagtcctcgggacactggccgcggtctttgtgagccacttgcatgcggaccaccatacaggactgccatctatactcctgcagcgtgagcgcgctctggcctcacttggtaaacctctgcatccactgctcgtggttgcccctaaccagcttaaggcctggttgcaacaatatcacaatcagtgccaagaggtccttcactag

SEQ ID NO: 115628 - DNA, 804 bp, synthetic construct
  misc_feature 1..804: note = Description of Artificial Sequence: Synthetic coding sequence
  source 1..804: mol_type = other DNA
atgaccctcggccggcgcctggcttgcctgttccttgcctgcgtgttacccgctttgctgttgggaggaacagccttggcctcagagattgttggcggtcggcgcgctcggccccacgcatggccatttatggtgtcgctacaactacgcgggggccatttttgcggagcaaccctgatcgctcccaactttgtgatgagcgccgcacattgtgtagccaatgtcaatgttcgcgcggtgagagtcgttctcggcgcacataacctgagtcgcagagaacctactcgccaagtcttcgccgtccagaggattttcgagaatggatatgatccggtcaacctcctcaatgatattgtgatcttgcaattgaacggatctgctaccattaatgccaatgtgcaggttgcacagctgccagcccagggccgccgcctgggaaatggtgtgcaatgtctggctatgggatgggggttactggggcgcaacaggggtatcgccagtgtgttgcaggagctaaatgtaaccgttgtaactagcctgtgccgaaggtcaaatgtgtgtacgttagtgcgcggcagacaggccggtgtgtgttttggggattctgggagcccgctagtctgcaatggcctgattcacggtattgcctccttcgtgcgaggcgggtgcgcaagtggcctgtatcctgacgcttttgcacctgtagcccagttcgtgaactggatcgacagtatcatccagcgaagtgaggataacccatgtccacacccgagagatccagacccagctagcagaacacattag

SEQ ID NO: 115629 - DNA, 804 bp, synthetic construct
  misc_feature 1..804: note = Description of Artificial Sequence: Synthetic coding sequence
  source 1..804: mol_type = other DNA
atgaccctcggacgtcggcttgcctgcctgtttctggcgtgtgtcctgccagctttgctactcggggggacagccctggcctccgagatagtgggcgggaggcgcgcccgtccccacgcctggccctttatggtgtccttgcagctacgcggcggccatttttgcggtgccaccctgatcgccccgaattttgttatgtctgccgcccactgtgttgctaatgtgaatgtgcgtgctgtcagagtggtgctgggagcacataacctgtcgcgcagagaaccaacgcgccaggtgtttgccgtgcaacgaatcttcgagaatggatacgatcccgtgaatctgctgaacgacattgtcatcttgcagttgaatgggagtgccactattaatgctaacgtgcaggtcgcacagctcccagcgcaaggccggaggctgggtaacggtgtgcagtgtttggccatgggttggggattgcttgggcgtaacagaggaatagcatcggtcctgcaggagctgaatgtgaccgtagtcacaagcctgtgccgccggtcgaacgtttgtacgctggtgagagggaggcaggcgggcgtgtgcttcggggactcggggtcccccctggtctgcaacggattaatccacggaatcgcaagtttcgttcgtgggggatgcgcctccggattgtaccctgatgcctttgctcctgtggcccagtttgtcaattggatcgacagcatcattcagaggtcagaagataatccgtgcccccatccaagggatccagaccccgcctccagaactcattag

SEQ ID NO: 115630 - DNA, 3051 bp, synthetic construct
  misc_feature 1..3051: note = Description of Artificial Sequence: Synthetic coding sequence
  source 1..3051: mol_type = other DNA
atggccccgaggacgctgtggtcctgttacctgtgttgtctgctgaccgctgcggctggcgctgcatcctatccgccccgcggattcagcctatataccggaagctcaggcgccttgtccccaggagggcctcaggcacagatagcaccgcggcccgctagcaggcaccgcaactggtgtgcatacgtggtcacgcggaccgtctcttgcgtgctggaggacggggtggagacttacgtcaagtaccaaccgtgtgcttggggacaaccccagtgcccacagtctatcatgtaccggcgatttctgcgacctcggtatagagtggcctacaaaacagttacagatatggaatggcggtgttgtcagggctatgggggggacgactgtgcagagagccccgccccagccttgggtcccgcttctagcactccacggcctctggcccaacccgccaggcccaatctgagcgggagttcagcaggtagcccgttgtcggggctaggtggggagggacccggagagagcgaaaaggtgcaacagctggaggagcaagtgcagtctctgacgaaggaactccagggtctgaggggggttctgcaggggctgtctgggagactggctgaggacgtgcagcgggcggtggaaacagcgtttaacggacgacagcagccggccgatgccgccgctcgtcctggtgtgcacgaaaccttaaacgagattcaacaccagctgcagttgctcgacactcgagtatcaacccacgatcaggagctgggccatctgaacaaccatcatggtggatcctccagcagcggcggtagtcgagcacctgctcctgcttccgccccaccaggccccagtgaagaactgctgcggcagttggagcaacgattgcaggaatcttgctccgtgtgcctagctggactcgatggatttcgcaggcagcagcaggaagatagggaacgtctgcgggcgatggagaagctactagccagcgtcgaggagaggcaaagacatctcgccggccttgctgtgggaagacgtcctccacaggagtgctgttccccagaactgggccggaggttggccgagctcgagcgaagattagacgtggttgctgggtctgtgaccgtactatccggtcgacgaggtactgagctaggcggcgcggcagggcaaggaggacacccacccggatatacgtcacttgcctctcgcctttctcgattggaggatcggttcaattccacgctgggaccatctgaagaacaagaggagagctggcctggcgcccctggaggcttgtcacattggctcccggccgctcgtggccgcctggaacaactgggcggcctgcttgcaaacgtcagcggggaacttggagggcgactggacctgttggaagagcaggttgctggcgcaatgcaggcttgtgggcagctgtgctccggggcccccggagaacaggattcccaggtgagtgaaattctttctgccctggaaagacgggtgcttgactctgaggggcagcttcgcctggtcgggtcaggtttgcatacagtggaggcagccggagaggctaggcaggctactctagaaggtcttcaagaggtcgtggggcggctgcaagaccgggtggatgcccaagacgagactgccgccgaattcacactccgcctcaatctaactgccgcacggttaggacagctggaggggttgcttcaggcccatggagatgagggctgcggcgcctgcggcggtgtgcaggaggagttggggcggcttagggacggggtggaacgatgcagctgccccctgctgccaccaagaggcccgggcgcaggtcctggtgtgggtggtccttcgcgtggccccctggatgggttcagcgtcttcggagggagtagcggcagcgctctgcaggctctgcagggagaactgagcgaggtcatcctttcattctcgtctttaaatgacagtttgaatgagctgcaaaccactgtggagggccagggagcagacctcgcagacctgggtgccaccaaagatcgcattatcagcgaaataaaccgcctccaacaagaggcaacagagcacgccacagagagcgaggagagatttagaggactggaggagggccaggcccaggcaggccaatgccccagcctggaaggcaggttgggtcgcttagagggggtgtgcgaaaggctggataccgtggcaggcggcctccagggtctccgcgaaggactgagccggcatgtcgccggcctgtgggctggcttgcgagaaacgaatacaactagtcagatgcaggcagccctcttggagaaactagtaggaggtcaggccggacttggaagaaggctgggcgcccttaactcctccttgcagttgctggaagaccgtttacatcaactgtccttaaaagacctaactgggcccgctggcgaagctggtcctccaggcccaccagggctccaaggcccacccggcccagccggcccccccgggtcccctggcaaggacggacaggagggccctattggcccaccgggccctcagggcgaacagggggtagagggggcccctgcagcgcccgtgcctcaggtggcattttctgccgccctgtcactgcccagatctgaacccggtactgtccccttcgatcgagtgttgctgaacgatggcggatactacgaccccgagaccggcgtctttacagcgccgttagctggacgctacttgctcagcgctgttctgaccggccaccggcacgaaaaagtggaggctgtcctcagccgctctaatcagggagtagctagagtggactccggaggatatgaacctgagggcctggaaaataaacccgtggccgagtctcagccatcccccggaacccttggcgtcttcagccttatcctgccactgcaggccggggatacagtctgcgttgatctagtcatgggccagctggcccattcagaagagcccctgactattttctcaggtgctctgctgtacggagacccagaactcgagcacgcctag

SEQ ID NO: 115631 - DNA, 1044 bp, synthetic construct
  misc_feature 1..1044: note = Description of Artificial Sequence: Synthetic coding sequence
  source 1..1044: mol_type = other DNA
atggccgacttgggggccacaaaagatcggattatctcagagattaaccgtttgcagcaggaagccacagagcacgccacagaaagtgaagagcggttcagaggcctggaagagggacaagcacaggccgggcaatgccctagcctcgagggaaggttggggcggctggaaggggtctgcgaaagattggatacagtggctggagggcttcagggtctccgtgagggtctaagcagacacgtcgcaggcctttgggccggattgagagagacaaatactacaagccagatgcaggcagccttactggaaaagctcgtggggggccaagcgggccttgggagacggctgggcgctctaaattcatctctgcaattactcgaagacaggctgcaccaactgtccctcaaggacctcacaggtgaaggaacaaaagggccagccggcgaggccggccctccgggtccacctggattgcagggcccccccgggcccgcaggccctccgggaagccccggtaaagatggacaggagggacccatcggaccgcccggccctcagggagagcagggtgtggagggagcgcctgccgcgccagttccacaggtagccttctcagccgcactgtcccttcccaggagcgaaccaggcacagtacctttcgaccgggtcctgttaaacgacggagggtactacgatccagagactggagtcttcaccgcacccttggcgggcaggtatcttttgagcgccgttctcactggacatcgtcacgagaaggtcgaggctgtgctgagtcgtagtaatcagggtgttgctcgggtggactctggtggatacgagccagaagggctggagaacaagcccgtcgccgagtcccaaccctctcctggtacactgggggtatttagccttatcttgcccctccaagctggtgatacagtttgtgtcgatttagtgatgggccagctagcccattctgaggagccactcacgatctttagtggcgccctgctgtacggcgaccccgagcttgaacatgcctag

SEQ ID NO: 115632 - DNA, 1062 bp, synthetic construct
  misc_feature 1..1062: note = Description of Artificial Sequence: Synthetic coding sequence
  source 1..1062: mol_type = other DNA
atgggaagtgggggccgctcagcccaggtgtcgacagggcagcgcgcctggctgttaccctgcaggtttttaaagaatactatgtcaaacgggtacgaggatcatatggcagaggattgtcggggggatatagggcggactaatctgattgtaaactacttgcctcaaaatatgactcaggacgaattgcggtcactgttttcttccataggggaagtcgagtctgctaagctgattagagacaaggtcgccggccactctctaggatatggctttgtcaattatgtcactgcaaaagatgccgagcgcgcaatcaatactctgaatggactcagactccagtcaaagactatcaaagtgagttacgcccgaccgagcagtgaagttatcaaagacgcaaacttgtacatttcaggactccccagaacgatgacacaaaaagacgtggaagacatgtttagccgcttcggcagaatcatcaacagcagggtgctcgtagatcaaacaaccggcctaagcagaggcgtggcctttatacggttcgacaagcgatccgaggctgaagaggcaattacatctttcaacgggcataaaccacctggtagctctgagcctatcacagtaaagttcgccgcaaaccctaaccagaataagaatgtggcattgttgtcacagctttaccactcacctgcgaggaggtttggcggccccgtgcaccatcaagctcagagattccgcttctctcctatgggcgtggatcacatgtctggtctttcgggcgtgaatgtgccgggcaatgcctcctctggatggtgcatcttcatctacaatctcggccaagacgcggacgagggaatattgtggcaaatgttcggaccctttggcgccgtcaccaacgttaaggtgattcgagactttaacactaacaagtgtaaaggatttggattcgtgaccatgacaaactatgaggaggccgccatggccatcgcctctttgaacgggtacaggctcggggacaagatccttcaagtctccttcaaaacgaacaagtctcacaaatag

SEQ ID NO: 115633 - DNA, 981 bp, synthetic construct
  misc_feature 1..981: note = Description of Artificial Sequence: Synthetic coding sequence
  source 1..981: mol_type = other DNA
atgagtaatggctatgaggaccatatggccgaagactgtcggggggatatcggccggacaaatttaatcgtgaactatctgccacagaacatgactcaggatgagctacggagcttattctccagtatcggcgaggtggagtcagccaagttaatccgcgacaaagtggctggacatagtttaggttacggctttgtgaattacgtgaccgcaaaagatgccgaaagagctattaatactttgaatggcctaaggctacagtccaagactattaaggtctcctacgctagacccagttcagaggtcattaaggacgccaacctgtatatctccggcctacccagaaccatgactcagaaagatgtcgaggatatgtttagtaggttcggtcggatcattaattccagagttctggtagatcaaaccaccggcctctcaagaggcgttgcattcatccgcttcgacaaaagatccgaggccgaggaggccattactagttttaacggacacaagccgcctggatcttctgagcccattaccgtcaagtttgctgcaaatcccaatcagaataagaacgtggccctgttgtctcagctctaccacagccctgcccgtagatttggcgggccagtgcaccaccaggctcaaagattcagattctctcccatgggggtggaccacatgagtgggctgagcggagtaaacgtccccgggaatgcctcatccggctggtgtattttcatttataaccttgggcaagatgccgatgaaggaattctctggcagatgtttggccccttcggggccgtaactaacgtgaaggtgataagggattttaacactaacaagtgcaagggatttggattcgtaacaatgactaactacgaagaagccgccatggcaattgcgtcattgaatgggtatcgcctgggggataaaattttgcaggtgtcgttcaagactaacaagtctcacaagtag

SEQ ID NO: 115634 - DNA, 828 bp, synthetic construct
  misc_feature 1..828: note = Description of Artificial Sequence: Synthetic coding sequence
  source 1..828: mol_type = other DNA
atgtcgtcccttcataaatcccgcatagctgatttccaggacgtgctgaaagagcctagtatagcactggagaaattgcgggagctttcgtttagcggaataccatgcgagggaggactccgatgtttatgttggaagatactgcttaattatctgcccctcgagcgcgcgtcctggaccagcatcctagccaaacagcgagaactgtacgcgcagtttttgagggaaatgatcatacagcccggcatcgctaaagctaacatgggagtttcgagggaggacgtcacattcgaagatcatccgctcaaccccaatcccgattcaagatggaacacttactttaaagataatgaggtgttgctccagatagacaaggatgtccgaaggttgtgcccagatatctctttctttcaaagggccaccgattacccttgcctgcttattttggatccgcagaatgagtttgagaccttgagaaagagagttgagcagactaccctaaagtcgcagaccgtcgcaagaaacaggagcggtgtgactaaccaggaacagaatattaaaccccagttctttgcctttaggtggcttacattgttgctcagtcaggagttcttgctgccggacgttatacggatctgggattctttgttcgctgatgacaatcgtttcgatttccttctgcttgtgtgttgtgctatgctcatgctgattagagaacagcttctagaaggagactttaccgtcaacatgcgtttgctgcaggattaccccatcacagacgtgtgtcagatcctccaaaaggccaaggagctgcaggacagcaagtag

SEQ ID NO: 115635 - DNA, 1164 bp, synthetic construct
  misc_feature 1..1164: note = Description of Artificial Sequence: Synthetic coding sequence
  source 1..1164: mol_type = other DNA
atggctgtgcggctgtgtgacgtcgcttctctcctccgttccggctcttgggccgcagaaccttggaccggagtcattgcagcgatggaaacacaactgtcaaatggcccaacctgtaacaatacagctaatggtccaaccaccataaataacaactgttcctcacccgtagactcggggaacaccgaggactcaaagaccaatctgattgtcaattatttgccacagaatatgacacaggaagagctcaagtccttattcggctccatcggcgagatcgaatcctgcaagctcgtgagggacaaaatcacaggacagagtctggggtacggctttgtcaattacatagatcccaaggatgctgagaaagcgatcaacacgttaaacggcctgcgcctacaaacaaaaacaatcaaggtatcatacgcccgaccttcctctgctagtattcgagacgctaacctctatgtgtcaggactgcccaagacaatgacacagaaagagctggagcagctgtttagccagtacggaaggattattacctcacgtattctggttgatcaggtgacaggaatctcccgcggtgtgggttttatccgctttgacaagcggatcgaagccgaagaagctattaaagggctgaacgggcaaaagcccccaggcgctacagaacctatcactgttaaattcgcaaataacccatctcagaaaaccaaccaggctatcctgtcccagctgtaccagtccccaaacaggcgctacccggggcctcttgcgcaacaggctcagcggtttagattggataacttacttaacatggcgtatggtgtgaaacgttttagtcccatgactatagacgggatgaccagcctagccgggattaacatccccggccatccaggaacgggctggtgcatcttcgtgtataacctggcgccagacgccgatgagtccatcctgtggcagatgtttggaccgtttggagccgtcactaatgtgaaagtgatcagggattttaatacgaataaatgtaaagggttcggatttgttaccatgacaaattatgatgaggcagcaatggcaatcgcctctctcaatggatacagactgggcgacagagtcctgcaggttagttttaaaacaaacaaaacgcataaagcttag

SEQ ID NO: 115636 - DNA, 1041 bp, synthetic construct
  misc_feature 1..1041: note = Description of Artificial Sequence: Synthetic coding sequence
  source 1..1041: mol_type = other DNA
atggaaacccaactgtccaacggcccgacgtgtaataataccgctaatggacccacgaccatcaacaataattgttcttccccggtggattctggcaacacagaagactctaaaactaatctgattgttaattatctgccgcagaatatgactcaggaggagctgaaatctctgtttggttctataggcgagatcgaatcatgcaaactggtgcgcgacaaaatcacaggccagtcactcggatacggattcgttaactatattgaccccaaggatgccgagaaagcaattaacacactcaacggcctccggctccaaacaaaaaccatcaaggtatcctatgctcgcccttcctctgcgagtattagggacgccaatctgtatgtcagcggactccccaagactatgacccagaaggagcttgagcagctgttctctcagtatggtcgcatcatcacaagcagaatcctagtggaccaagtgacagggatctccaggggagtcggttttattagattcgacaaacggatagaggccgaggaagctatcaaaggtctgaacggccagaagccccccggtgctacagagcctatcaccgtgaagtttgcaaacaaccctagccaaaaaaccaaccaggcgatcctttctcaactttatcaaagtccaaatcgccggtatcctggacctctcgcccagcaggcccagcggtttcggttcagccccatgactatcgatgggatgactagcctcgcgggcataaacatacctggacacccaggcaccggctggtgtatctttgtgtataacctggcgccggatgccgatgagtcgatactctggcagatgtttggccctttcggtgcggtaacaaatgtgaaagtcatcagggatttcaacacgaacaaatgtaagggcttcggtttcgtgactatgaccaactacgacgaggcggcgatggcgatcgctagcctcaacggttatagactgggtgaccgagtgcttcaggtgtcgttcaagactaacaaaacacataaggcatag

SEQ ID NO: 115637 - DNA, 1080 bp, synthetic construct
  misc_feature 1..1080: note = Description of Artificial Sequence: Synthetic coding sequence
  source 1..1080: mol_type = other DNA
atggagacccagctgtccaacggccctacttgtaacaacacagcaaacgggcccactactataaacaacaattgtagctctccagtggacagcgggaacactgaggactccaaaactaatctgattgttaactatctaccccaaaacatgacacaggaagagctcaagtccctgtttggcagtattggcgaaatcgagagctgtaagttggttcgcgataaaatcactgggcagagcctcggatacggctttgtcaattacattgatcctaaagatgcggaaaaagctattaacactctgaatgggctccgtctacaaactaagactatcaaggtctcttacgccaggcccagttcagcctctatacgggacgcgaacctgtacgtctctgggttacccaagactatgacacagaaagagttggagcagctgttctcacagtacggtcgcataattacctcccgtattcttgttgatcaagtgacagggattagtcggggagttggctttattaggtttgataagcggattgaggcagaggaagctatcaaaggccttaacggccagaaaccgccaggcgcaaccgagcctatcactgtcaaatttgccaataatcccagccagaagacgaatcaggccattctgtcccaattataccagtctcccaaccgtcggtaccccggccctctggcacagcaagcccagcggtttcggcttgacaatctgctgaacatggcgtacggcgtaaaacgcttttctccaatgaccatcgatggcatgacttccctcgccggaatcaacataccaggccacccaggcaccggatggtgcatcttcgtttataatctcgcgcctgatgccgacgagtcgattttgtggcagatgttcggaccctttggggcagtcaccaacgtcaaggtgatccgggacttcaatactaacaagtgtaaaggcttcggctttgtcactatgacgaactacgacgaagccgccatggctattgcaagccttaacggataccgtttgggcgaccgcgtgttacaggtgtcctttaagaccaataagacacacaaggcttag

SEQ ID NO: 115638 - DNA, 1080 bp, synthetic construct
  misc_feature 1..1080: note = Description of Artificial Sequence: Synthetic coding sequence
  source 1..1080: mol_type = other DNA
atggaaactcaactgtctaacggccctacctgtaataacacagctaacggccctaccaccatcaataacaattgctcttctcccgtagactctggtaacactgaggattccaagaccaatctgattgtgaattatcttcctcagaacatgacccaggaagagttgaagagcttgttcggttccattggggagatcgagtcatgcaagctggttagggacaagattaccggtcaatcacttggctacggctttgtaaattatatcgatccgaaagatgcggagaaagccataaatacgctcaacggactgagattacagactaaaacaatcaaagtcagttatgctcggccaagctcggccagcattcgggacgctaatctatatgtgtcagggctgcccaaaaccatgactcagaaagaactggagcagctctttagccagtacggtcggatcataacttctagaatcttggtggaccaagtcacaggcattagtaggggtgtggggttcattaggtttgacaagcgcatcgaggctgaggaggcaatcaagggcctcaacggacagaaaccaccaggggctactgagccaataaccgtcaaatttgctaataaccctagtcaaaagactaatcaagcaattctttcacagctctaccagtcccccaatcgaaggtatcccggccctctggcccagcaagcccagcgattcagattggacaacctgctgaacatggcttatggggtcaaacgcttctcccccatgaccatagacggcatgaccagcttagcaggcataaacataccaggccacccaggaacagggtggtgcattttcgtgtacaatctggcacctgatgccgacgagtccatactgtggcaaatgtttggaccttttggagccgtgaccaatgtgaaggtgataagggatttcaacacaaacaagtgtaagggcttcggctttgtgacaatgacaaactatgatgaggcggctatggccatcgctagtctaaacggatatagactgggtgatagagttctacaggtgagtttcaagactaataaaacacacaaggcctag

SEQ ID NO: 115639 - DNA, 273 bp, synthetic construct
  misc_feature 1..273: note = Description of Artificial Sequence: Synthetic coding sequence
  source 1..273: mol_type = other DNA
atgactcagaaggagctggagcagctgtttagtcaatacggccggattattacttctcgaatcctcgtggaccaggttaccggaatttcccgcggcgtaggattcatccgattcgacaagaggatcgaggcagaggaggcaattaaaggattgaacggacagaaaccacccggggccacagagccaataactgtaaaatttgccaataatcccagtcagaagactaaccaggccatcctcagccagttataccagtcccctaaccgaaggtag

SEQ ID NO: 115640 - DNA, 570 bp, synthetic construct
  misc_feature 1..570: note = Description of Artificial Sequence: Synthetic coding sequence
  source 1..570: mol_type = other DNA
atggagacccagctgtctaacggtcccacttgtaataatacagcaaacggtccaaccacaattaataacaattgctcttctcccgtggattccggaaacaccgaggactcgaaaacaaatctgattgtgaactacctcccgcagaatatgacccaagaagagctgaagagcttattcgggtctatcggagagattgagagctgtaagctggttcgagataagattaccgggcagtcactcggctatggattcgtcaattatattgaccctaaggacgctgagaaggcgatcaacaccctaaacggcctaaggttacaaaccaagactattaaggtgagttatgctaggccatcttccgcaagtatccgggacgctaacctgtacgtgagcggcctcccaaaaactatgacacagaaagaactcgaacagctcttctcccaatatggtaggataattacatccaggatcttagtggaccaagttacaggaatcagtcgaggggttggatttatcaggttcgacaagcgaatagaggccgaagaggccatcaaagggctcaacggacagtag

SEQ ID NO: 115641 - DNA, 1080 bp, synthetic construct
  misc_feature 1..1080: note = Description of Artificial Sequence: Synthetic coding sequence
  source 1..1080: mol_type = other DNA
atggaaacccagctgtcaaatggcccgacctgcaacaacaccgccaacgggccgaccactattaacaacaattgctcatcccctgtcgattcgggcaacaccgaagacagcaagactaaccttattgtgaattacctgccccagaatatgactcaggaagaactgaagtcccttttcggcagtataggggagatcgaatcctgtaaactggtgcgcgacaagattaccggacagtcattgggatatggattcgttaattatatcgatccaaaagatgccgagaaggctattaacaccctcaacggtctgcgtctgcaaaccaagaccatcaaagtatcttacgcgagaccgtcaagtgcatctataagggacgcaaacctgtacgtttcaggcttgcccaagactatgacacaaaaggagctcgagcaactttttagccaatacgggcggataattactagccgtattctagttgaccaggttacagggataagccgcggcgtaggctttattcgattcgataagcgcattgaagcagaagaggctattaagggcctcaatggccaaaagcctcccggagccaccgaaccaattacagtcaaatttgcgaacaaccccagccagaaaacaaaccaggctattctctcccagctatatcaatcccccaacaggcgctatccaggccctctggcacagcaggctcagcgatttagacttgacaacctgctgaatatggcatacggcgtgaagagatttagtcccatgacaattgacggcatgacctctctcgcaggcatcaacattcctggtcatcccgggaccggctggtgcatcttcgtatacaacctggcccctgacgccgatgaatctatcctgtggcaaatgtttggccctttcggcgccgtgaccaatgttaaagtcatccgagactttaatacgaacaaatgtaaagggtttggattcgtgaccatgactaactacgacgaagccgccatggccatcgcctcactaaatggctataggttgggggatagagtgttgcaggtttcgttcaaaaccaataaaacccataaagcctag

SEQ ID NO: 115642 - DNA, 1104 bp, synthetic construct
  misc_feature 1..1104: note = Description of Artificial Sequence: Synthetic coding sequence
  source 1..1104: mol_type = other DNA
atggtcacgcagattttgggtgccatggagtctcaggtcggcggaggccctgccggcccagcactgccgaatgggccgctgctgggtacgaacggagcaacagacgactccaaaacaaacctcattgtcaattaccttccccagaacatgacccaggatgagttcaaatcccttttcggctcgattggtgacattgagtcatgcaagcttgtccgcgataaaattaccggacagtccctggggtatggattcgtgaattactctgatccgaacgacgcagacaaggccattaacactctaaacggtctaaaattacagacaaaaacaataaaggtgagttacgctcgaccttctagtgcctctatcagggacgccaacctgtacgtttcgggcctgcctaaaacaatgtctcaaaaggagatggaacagttgttctcacagtacggtcggatcattacaagtaggattctggtggatcaagtgaccggggtgagcaggggtgtcgggttcatccgttttgacaagcgcatcgaggccgaagaagcgattaagggactgaacggtcagaagccgctcggtgccgcagagccaattacagtgaaattcgctaacaatccttcccagaagactggacaagccctgcttactcacctttaccagagttcggctcgccggtacgccggaccccttcatcaccaaactcaacgattccgactcgacaacctgctgaatatggcatacggtgtcaaaagtccactctccctgatcgcccgttttagtccgattgctatcgacggaatgtccggactcgcgggcgtcggactgtcaggcggagcagctggtgccggatggtgtatttttgtttacaatctgagcccagaggccgatgaaagcgtcctctggcagctttttggcccatttggagccgttacaaacgtcaaggtcatcagagatttcactacaaataagtgcaaggggtttggctttgtcaccatgacgaactacgatgaggctgcaatggctatagccagcctgaacggttatcgattgggcgaaagagtgctgcaggtgtcctttaagacctcaaaacagcacaaggcctag

SEQ ID NO: 115643 - DNA, 1083 bp, synthetic construct
  misc_feature 1..1083: note = Description of Artificial Sequence: Synthetic coding sequence
  source 1..1083: mol_type = other DNA
atggtcactcagatccttggggctatggagtcacaagtgggtgggggccccgctggtcctgctctgccaaacggccctttactgggaacaaatggcgctaccgatgattcaaagacaaatctcatcgtgaactatctgccacagaacatgacacaggacgagttcaaatccctcttcggtagtatcggcgatatcgagtcatgcaaactagtgcgcgacaagattaccgggcaatctctcggatacggctttgttaattactcagaccctaatgatgctgacaaggccatcaacaccctgaatggacttaagctgcagaccaagaccataaaagtttcttatgctcgccctagcagcgcatccatcagagacgctaatctctacgtcagcggactgcccaagaccatgtctcagaaggaaatggaacaactcttctctcagtatggacgtataatcacgtcccgtatactagttgatcaggtgactggtgtctcacgaggcgtgggcttcataaggttcgacaagagaatcgaggcagaggaagcaatcaaagggttaaacggtcaaaaaccactgggcgccgcagagccaatcaccgtcaaattcgcaaacaatccaagtcaaaaaaccggccaggcactgctcactcacctatatcagagctcagccaggcgatacgcaggtcctttacaccaccaaacccaacggttccggcttgataacctgcttaacatggcctatggcgtcaaacgcttctcccctattgcgatcgacggcatgtctgggctcgctggcgtcggcctctcaggtggggctgccggtgccgggtggtgcatcttcgtgtacaatctctcgcctgaagctgacgagagtgttctgtggcagctttttgggccattcggcgccgtgaccaacgtcaaagtgattcgagatttcacgaccaacaaatgcaaagggttcggctttgtcacaatgactaattatgatgaggctgcaatggctattgcctccctgaacggctacagattaggtgaacgggtgctccaggtaagcttcaaaacatcaaaacagcacaaggcgtag

SEQ ID NO: 115644 - DNA, 1152 bp, synthetic construct
  misc_feature 1..1152: note = Description of Artificial Sequence: Synthetic coding sequence
  source 1..1152: mol_type = other DNA
atgagactcttgcttctgagagaaatagttataaacgagagtaggaactgcagttttatgattattagtacaatggagcctcaggtcagcaacggccctacctctaatacatccaacgggccctctagtaacaaccggaattgcccgtctcccatgcaaacaggggccaccactgatgactctaaaaccaacttgattgttaactatctcccccagaacatgactcaagaagagtttcggagtcttttcggctctatcggggaaattgagagttgcaagctggtccgcgacaaaatcaccgggcagagcctcggctacgggtttgtgaactatatcgaccccaaggatgcagagaaagcgatcaacacgctgaacggcttgaggctccaaaccaagacgatcaaagtgtcatacgctcgccctagctccgcatccattcgagatgctaatctgtacgtaagcgggttaccaaaaaccatgactcagaaggagctggagcaactctttagtcagtacggccgaatcattacgtcccgaattctagttgaccaggtgacaggagtgtcccggggggtcggctttatacgctttgacaagcggatcgaggcggaggaggccatcaagggacttaacggccagaaaccttcaggggcaactgagcccataacagtgaaatttgcaaacaaccccagtcagaagtcttcacaagccctcttgagtcaactgtatcagtccccaaacaggcggtaccctggacccctgcaccaccaggctcagcgattccggctcgataatctgctgaatatggcttatggagtgaagagattttccccaattaccattgacgggatgacctctttggtgggcatgaacattcctgggcatacaggcaccgggtggtgtatcttcgtttacaacctctcaccggacagcgatgagagcgtgctatggcaactatttggaccatttggcgccgtgaacaatgtcaaggtgataagggattttaacacgaataaatgcaaaggcttcggcttcgtgactatgactaactacgacgaagctgcgatggcaattgctagcctgaacggctaccgcctgggagacagggtgttgcaggttagcttcaagaccaacaaggctcacaaatcctag

SEQ ID NO: 115645 - DNA, 1116 bp, synthetic construct
  misc_feature 1..1116: note = Description of Artificial Sequence: Synthetic coding sequence
  source 1..1116: mol_type = other DNA
atggaatggaacggcttgaagatgattattagcactatggagccccaggtgtccaatgggcccacctcaaatacaagtaatggcccctcctcgaacaaccgtaattgcccaagtccaatgcagacgggcgcaaccaccgatgactccaaaacgaacttgattgtgaactacttacctcaaaacatgacacaggaagaatttaggtcgttatttggatccataggggaaattgaaagttgtaaacttgttagggataaaatcactggtcagagtctgggttacggcttcgtgaattacattgatcccaaagatgcagaaaaggccatcaatacattaaatgggctccggcttcagaccaaaactattaaggtctcttatgcccggccctcttccgcctctatcagagatgcgaacttgtacgtgtcagggctgcctaaaaccatgactcagaaggagctggaacagttattctcgcagtatggcagaatcatcactagtagaatcctggtcgatcaagtaacgggcgttagtcgaggcgtcggatttattaggttcgacaaaaggatcgaggcagaagaagccatcaaaggactcaacggccaaaagccctcaggagcaacagagcctatcaccgtgaagtttgccaacaatcctagtcaaaagtcctcacaggctctgcttagccagctctatcagtcccccaatagaagatatcctgggccattgcatcatcaagcccagaggttccggttggataatcttcttaatatggcttacggtgtgaagcggttctcacccataacaatcgacggaatgacttcccttgttggtatgaacatccccggccacacaggtacaggatggtgtattttcgtgtataacctgtcacctgacagtgatgagtctgtactctggcagctttttggacccttcggagccgtgaataacgtcaaagtcattagggatttcaacacaaataagtgtaaggggttcggatttgtgactatgaccaattatgatgaggccgctatggccatcgcatctcttaatggctatcgtctgggagaccgcgttctgcaggtctctttcaaaaccaataaggcccacaagtcctag

SEQ ID NO: 115646 - DNA, 1158 bp, synthetic construct
  misc_feature 1..1158: note = Description of Artificial Sequence: Synthetic coding sequence
  source 1..1158: mol_type = other DNA
atggaatggaacggactcaaaatgatcatatccaccatggagccacaagtctcaaatggccctacatccaatacctcgaacgggccttccagtaacaataggaactgcccatctcctatgcaaactggtgccacaaccgacgactctaaaactaacctcattgtgaattacctgccacagaacatgacacaagaagagtttcgctcactgtttggctctataggcgaaattgagtcttgcaagctcgtcagagataaaattactggacagtctttgggttacggtttcgtaaactacatagatccaaaggatgcggaaaaggcgattaataccttaaacggtttgaggctgcaaaccaaaactattaaggtctcttatgctcgcccatcctctgccagcattcgagacgctaatctctacgtgtccggacttcctaaaactatgacccagaaggagctagaacagttattcagccagtatggacgcatcataactagtcggattctggtcgatcaggtgacaggcgtgtctagaggcgtgggctttatccggtttgacaaaagaatagaggccgaggaggcaatcaagggactgaatggacagaagccttctggcgccaccgagccgatcactgtcaagttcgcgaacaatccatcacaaaagtcctcccaagcgctcttgtcccagctgtatcagagtcctaatcgacgataccccggccccttgcaccatcaagcccaacgattccggctggataatctgctgaacatggcatacggggttaagagattaatgtccggtcctgtccccccctccgcctgtccccccaggtttagtcccattacaatcgacggtatgacttcactggtgggcatgaacatccccggacatactgggaccggatggtgcatatttgtgtacaacctctcacccgactctgacgaaagtgtcttgtggcagctttttgggccctttggcgcagtaaacaacgtgaaagttatccgggactttaacaccaacaaatgtaaggggtttggattcgtaaccatgactaattacgatgaggctgccatggctattgccagcctcaacggttaccgcttgggtgatcgcgtgcttcaggtaagtttcaagactaataaagctcacaagagttag

SEQ ID NO: 115647 - DNA, 1143 bp, synthetic construct
  misc_feature 1..1143: note = Description of Artificial Sequence: Synthetic coding sequence
  source 1..1143: mol_type = other DNA
atggtgatgatcatcagtaccatggagccacaagtctctaatggacctaccagtaacacctcaaacggccctagctctaacaatagaaactgtccatcccctatgcagacgggggccaccacggacgatagcaaaactaatcttatcgtgaattatctaccacagaatatgacacaagaagaattcagaagcttgtttggaagcattggcgagatcgagagctgtaagctggtcagggataaaataaccggtcagtccctgggctacgggttcgttaactacatcgacccgaaggacgctgagaaagccattaacacgctaaatggcttgcgactgcaaactaaaacgattaaggtatcttatgcacggccctctagcgcatcgatccgtgatgcaaacctctacgtgtcaggcctcccaaaaacaatgacccagaaagagctcgaacaactgttctctcagtatggccgcattattacgtcccggatactagtggatcaagtgacaggtgtctctaggggtgtcggcttcattagatttgataagcgcattgaggcggaagaggcaattaagggactaaacggacagaagcccagtggcgcaacagagcctatcacggtgaaatttgcaaataatccttcacagaagtcatcgcaagccctgctatctcagctgtatcagagtcccaacaggaggtacccaggccctctgcatcatcaagctcaaaggtttcgactggataatcttcttaatatggcctacggagtgaagagattaatgagcgggccagtgccaccatctgcctgtccaccacgcttttctcctatcactatcgacggcatgacgagcctcgtgggcatgaacataccagggcacaccgggaccggttggtgcatctttgtatacaacctatcaccagattccgatgagtccgtcctgtggcagctgttcggtcccttcggtgccgtaaacaatgtgaaggtgattagggactttaataccaacaaatgcaagggatttggatttgtcacgatgactaactatgatgaagccgcaatggccatcgcttcactcaatggttaccggctcggcgatagagtgctgcaagtatcttttaaaaccaacaaagcccacaaatcctag

SEQ ID NO: 115648 - DNA, 1101 bp, synthetic construct
  misc_feature 1..1101: note = Description of Artificial Sequence: Synthetic coding sequence
  source 1..1101: mol_type = other DNA
atggtgatgatcatttccaccatggagccacaggtttcaaatggacctacatccaacaccagcaatggacccagcagtaacaatagaaactgcccctcacccatgcagactggagcaactaccgacgacagcaaaactaacttaatcgtgaactacttgcctcagaacatgacgcaggaagagttccgctccttatttggaagcatcggggagattgaatcctgcaagctggtccgggataagatcaccggccagtctctgggctacggtttcgtgaactacatcgatccgaaggacgcagaaaaagccattaacacattaaacggcttgcgcctgcagacaaagactatcaaagtatcatatgccaggcctagcagcgcctctatccgcgacgcgaacctgtacgtgagcggcctcccaaaaactatgacacagaaggaactggagcagctttttagtcaatatggacggatcatcacgtctagaattctggtggatcaagttacgggcgtgtctcggggcgtggggtttatcagattcgacaaacggatcgaggctgaggaggcaattaaaggcctgaatggccagaagccaagtggtgcaacagagccgattactgtgaaattcgccaataatccatcccagaagagcagccaggcactcctgtcacagctgtaccagagtccaaaccggaggtacccagggcccctacaccatcaggcacagcgattcagactggacaacttgctgaatatggcctacggagtgaaacgattttcacctattacgatcgacggcatgactagtctagtgggcatgaatattcctggacatacggggaccggctggtgtattttcgtctacaatttgtcccccgactcagacgaatccgtgctgtggcagttgttcggaccttttggggcagtaaacaatgtcaaagtcatccgcgacttcaatactaacaagtgcaaagggttcggattcgtcaccatgacaaactacgacgaagccgccatggcaatcgcaagcctcaacggttatcgacttggggatagggtgctgcaagtgtccttcaagaccaataaggcccacaaatcctag

SEQ ID NO: 115649 - DNA, 1101 bp, synthetic construct
  misc_feature 1..1101: note = Description of Artificial Sequence: Synthetic coding sequence
  source 1..1101: mol_type = other DNA
atggagcagattatttctacaatggagcctcaggtcagtaacggccctacaagcaacacgtctaatgggcccagctcaaacaaccgcaactgcccgtcaccgatgcagacaggcgctacgacggacgattccaagaccaacctcattgtcaattatctgcctcagaacatgactcaggaagaatttaggtctctctttggctcaataggagagattgagtcttgtaagcttgtgagagacaaaatcaccggacagtccctcggatacggattcgtgaattatattgatcctaaggatgctgagaaggctattaacacactcaatgggctgcgcttgcaaaccaagactatcaaagtctcatatgcccgacctagtagcgcctcaataagggatgctaacttgtacgtaagcggtctgcctaaaactatgacacagaaggaacttgaacagctgttttcccagtacggaaggataatcacatctcgaatcctcgtagaccaggtgactggcgtgtcccgcggggttggtttcatccgattcgataagcgaatcgaggccgaagaagcgattaaggggctgaacggtcagaagccatccggcgccacagaacctataacagtgaaattcgccaacaaccctagccagaaaagctctcaggcgctcctttctcagctgtatcagtctcctaatcgccggtatccaggccctctccaccaccaggctcagcgctttaggctcgacaatttgcttaatatggcctatggagtgaagcgcttcagccctatcaccattgacggtatgaccagcttggttggcatgaacatccctggacacaccggcacaggatggtgcatctttgtttacaatctcagcccagattcagacgagagcgttctgtggcagctgttcgggccgtttggtgccgttaacaacgtcaaagtcatcagagattttaacacaaacaagtgcaaaggcttcggcttcgtgaccatgaccaattatgacgaggctgccatggccatcgcgagcctgaacggctacaggctgggtgatcgggtgttgcaagtctcttttaaaaccaataaggcacacaaaagctag

SEQ ID NO: 115650 - DNA, 1110 bp, synthetic construct
  misc_feature 1..1110: note = Description of Artificial Sequence: Synthetic coding sequence
  source 1..1110: mol_type = other DNA
atgagactcaaaaatcagataataagtaccatggagccccaagtaagtaacggacctacaagtaacacctctaatggtccctccagcaacaacaggaattgcccttccccaatgcaaacaggagctaccactgacgattcaaagacaaacctgatagtgaattacctgcctcagaacatgacccaggaagaattccgcagtctgttcggctccataggtgaaattgaatcatgcaaactagtacgagacaagattacagggcagtctctgggctatgggttcgtgaactacatcgacccaaaggatgcagagaaagccattaataccctgaacgggcttcgacttcagaccaagaccattaaggtgtcgtacgcccgccctagctccgccagcatccgtgatgcaaatctgtacgtgtctggcctgccaaaaacgatgacccagaaggaactcgagcaactgttttctcagtacggaaggattattacgtcgcgcatcctggttgatcaggtcactggagtgagcagaggagttgggttcatcagatttgacaagagaatagaggcggaagaggccattaagggcctgaacgggcagaagcccagtggcgcaaccgagccgataactgtaaagttcgcaaataatcctagccagaagagttcccaagccctgctgtcccagctgtaccagagcccaaatcgcaggtacccaggaccattacatcaccaggcacagcgctttcgcttggataatcttcttaacatggcttatggggtcaagaggtttagcccaatcaccatagatgggatgacttccttggtggggatgaatattcctggccataccgggacaggatggtgtatctttgtctataatctgagcccggatagtgatgaatcagtcctttggcaattgttcggcccattcggtgctgttaacaatgtgaaggtaattcgggattttaacaccaataaatgcaagggatttggcttcgtgacaatgactaattatgacgaggccgcaatggcaatcgcttctctgaacgggtaccgactgggcgatagggtccttcaggtttctttcaaaacaaataaagcccacaagagctag

SEQ ID NO: 115651 - DNA, 855 bp, synthetic construct
  misc_feature 1..855: note = Description of Artificial Sequence: Synthetic coding sequence
  source 1..855: mol_type = other DNA
atgttccgggctgccgcgccaggtcagctcagacgcgcggtggctcaggatctgtgtaaggtcgcaggtatcgcaaaagtgttggtcgcgcagcatgacgtgtataaaggtcttttgcccgaggagctcactccattgatcctggcaacccagaagcaattcaactatacccatatttgtgccggcgcaagtgctttcggaaagaatctgttgccacgcgtggcggctaaactggaggtggcacctatctctgatattattgctattaaatcgccagatacattcgtcaggaccatctacgctggaaacgccctttgcaccgtcaaatgcgatgaaaaggtgaaggtgttctcagtacggggaacctcatttgatgcagccgccaccagtggtggctctgccagcagcgaaaaagcctcctcaacctctcctgtggagatctctgagtggttggaccagaaactcactaagagcgatcgacctgagctcaccggggccaaggtggttgtgtcaggcgggaggggcttaaaaagtggggaaaactttaaactgctgtacgacttagccgatcaactgcacgccgctgttggagcgtccagggccgcagtcgacgccggctttgtccctaacgacatgcaagttggacagacaggaaagatcgtggccccagagctctacatcgctgtgggcatcagcggcgcaatccagcacctcgctggcatgaaagattcaaagactattgttgccatcaacaaagaccccgaggctccaatctttcaagtggctgactatggaattgtggccgatctctttaaggtggtaccagaaatgacggagattcttaagaagaagtag

SEQ ID NO: 115652 - DNA, 1002 bp, synthetic construct
  misc_feature 1..1002: note = Description of Artificial Sequence: Synthetic coding sequence
  source 1..1002: mol_type = other DNA
atgttccgcgcagcggcaccaggccagcttcgcagagccgccagcttgctgcgttttcagtctactttagtgatcgcagagcatgctaacgattccctggcccctattacactgaacacaataacggcggccactcgacttgggggtgaagttagctgtcttgtcgcgggcaccaaatgtgacaaggtcgcccaagatctgtgtaaagtggccggaatcgctaaagtgctagtggcccaacatgatgtgtacaagggacttctcccagaagagctgacacccttaatccttgcaacccagaaacagtttaactatactcatatttgtgcaggagctagcgctttcggcaaaaacctgctccctagggtagcagctaagctggaggtggcaccaatttccgatatcatcgcaatcaaatctcccgacacattcgtcagaaccatctatgctggaaatgcgctgtgcactgtgaaatgcgatgaaaaagtcaaagtgttcagcgtccgcgggacaagctttgacgccgctgccacaagtgggggcagtgcaagttctgaaaaagcttcctccacctctccagttgaaatctccgaatggttggatcaaaagctaaccaaaagcgacaggcccgagctgactggggcaaaagttgtggtgagcgggggccggggactcaaatcaggagagaatttcaagctactgtatgatctagcggaccagcttcacgcagctgtgggggcctcaagagccgcagtggatgccgggttcgtgccgaacgatatgcaagtgggtcagaccggcaagattgtggcccccgaactttatatagcagtgggtatcagcggcgctatacagcacctcgctggcatgaaggacagcaagaccatcgtggctatcaataaagacccagaggcaccgattttccaggtggcagactacggcatcgtggctgacctgttcaaggtggtgccggagatgaccgaaatcttgaaaaagaaatag

SEQ ID NO: 115653 - DNA, 768 bp, synthetic construct
  misc_feature 1..768: note = Description of Artificial Sequence: Synthetic coding sequence
  source 1..768: mol_type = other DNA
atggccgagctgagggtgctggtggccgtcaagcgtgtgattgattatgcagtgaagatcagagtgaaacctgacagaacaggagtcgttactgacggggtcaagcattccatgaatcccttctgcgagattgccgttgaggaagctgtacgccttaaggagaagaagctcgttaaggaggtgatcgcagttagttgcgggcctgcccagtgccaggagacgattcggaccgccctggccatgggcgcggatagggggatccacgtagaggtgccgcctgccgaagctgagaggctaggtcccctccaggtggcacgagtgctggctaagctggccgagaaggagaaggtggatctggtgttactcggaaagcaggccatcgatgacgattgtaatcagacaggacagatgacggctggtttcttggattggccacaggggaccttcgccagccaagtaacattagagggggataagttgaaggtggaacgcgaaattgacggagggcttgagacactccggttaaagctcccggctgtggtcaccgcagacctgcgattgaacgaaccccggtacgcaacgctcccgaacatcatgaaggcgaaaaagaaaaagatagaggtgatcaaaccaggtgacctcggagttgacctgacttctaagttgtcagtcattagtgtggaggaccccccgcagaggactgcaggggttaaggtagaaacaacggaggatctggtggccaagctgaaagagatcggtagaatatag

SEQ ID NO: 115654 - DNA, 1041 bp, synthetic construct
  misc_feature 1..1041: note = Description of Artificial Sequence: Synthetic coding sequence
  source 1..1041: mol_type = other DNA
atgtacctcagtttgtgggtcactatcaacaccgtgaacctccgcaacactctgagcggactccggggagccgtcaccactgtgggcatgattaagtccgatgttcctggcacccaggaatggctggacgagcggaggcgccaaggagacctcccactcccgaccaattcaaatccagtcctgagtttggagctgtgtgaccctgggcaggggccagccccattccaggccgtagtggtgctgatccagcccggccgtggcttagcccttcgaccaccccctagttgcctctttcctccggatccaacaccctcccctcctgctggtcagattagagtgaaacctgaccgaacgggcgtggtaaccgatggggtaaaacatagcatgaaccctttctgcgaaatcgccgtagaggaggccgtccgcctcaaggagaagaagctggtcaaggaggtgatagctgtctcatgtggtcccgcccagtgccaagaaacaatccgaaccgcattggcaatgggagcagacagagggatacatgtggaagtgccacccgccgaagccgagagactgggacccctgcaggtggcccgggtattagccaaactggctgaaaaagagaaggtcgatctggttctgctcgggaaacaggccatagacgatgattgcaatcagactggtcagatgaccgccggcttccttgattggccacagggcacattcgcctctcaggtaacactggagggcgataagctgaaggtggaacgtgaaatcgacgggggcctggagacattgcgactgaaattacctgctgtagtgactgcggatttgcggctcaatgagccacgttacgcaacactgccaaatataatgaaagcaaagaagaaaaagatcgaagtgattaaacctggtgacctcggggtggatttgacatccaagttgtcagttatctctgtggaggatcccccccagaggacagcaggcgtgaaggttgagacgactgaagatctggtggcaaagctcaaggaaatagggagaatttag

SEQ ID NO: 115655 - DNA, 1713 bp, synthetic construct
  misc_feature 1..1713: note = Description of Artificial Sequence: Synthetic coding sequence
  source 1..1713: mol_type = other DNA
atgctggtgcccctggccaagctgagttgtttgggagttaatatggaacgcttcgctgaggaagctgatgtagtgattgtcggcgccgggcccgccggtctgtccgctgcggtgcgcttgaaacagctggccgtcgcacacgaaaaggatatccgggtgtgtttagtcgagaaggccgcccagatcggcgctcatactctgtctggggcttgcctggaccctggagccttcaaagaactcttccccgactggaaagagaagggcgctccactgaacacacccgtcaccgaggatcgcttcgggatactcacagagaaataccgtatcccggtccctattctaccgggcttgcccatgaataatcacggcaattacattgtaagactgggccacttggtgtcctggatgggggaacaggcagaggcgcttggggttgaagtatacccagggtacgcagctgctgaggtcctgttccatgatgatgggtctgtgaagggaattgccactaatgatgttggtatccagaaggacggcgctccaaaagccacttttgaacgtggactggaactgcacgcgaaggtgacaatttttgctgagggctgccacggtcatctcgccaaacagctatacaaaaagttcgatctacgggctaattgtgaacctcagacatatgggatcggactgaaggagttgtgggtgatcgatgagaagaactggaaacccggccgggtcgatcacaccgtgggatggcctctcgaccgccacacctacggtggttcttttttgtatcatctgaacgagggtgaacccttggttgcactcggcctagtggtcggtttggactatcagaatccctatctgagcccttttcgagagttccagcgatggaaacaccacccatcaatccggcctactctggaggggggaaaacggatagcctacggtgctagggccctcaacgaaggaggctttcagagtatcccaaagctaacgtttccaggcggccttttaattgggtgctctcccggcttcatgaatgtgccaaagattaagggtactcatactgcgatgaaaagcggcattctggccgcagagtctatttttaaccaactgacttccgagaacctgcagagtaagacgataggcttacatgttacagagtacgaggataatctgaaaaactcttgggtatggaaagaactgtattccgttcggaacattaggccctcctgtcacggtgtgctgggcgtgtatggcgggatgatctataccggcatcttttattggatcctgaggggaatggagccatggacactgaaacacaaagggagtgacttcgagaggttgaagcctgcaaaagactgcacaccaatagagtatccgaagccggatggccaaatctcttttgacctactgtcatcggtcgctctttcaggtaccaaccacgagcatgatcagcctgctcatctcacattgcgtgatgattcaatccctgtgaaccgaaacctctccatctatgacggcccagagcagaggttctgtccagctggcgtgtatgagttcgtccctgtcgagcagggggatggctttaggttgcagatcaacgcacagaattgcgtgcactgtaaaacatgtgatattaaggatccctcacaaaacattaactgggttgttcctgaggggggtggtggcccggcatataacggcatgtag

SEQ ID NO: 115656 - DNA, 1854 bp, synthetic construct
  misc_feature 1..1854: note = Description of Artificial Sequence: Synthetic coding sequence
  source 1..1854: mol_type = other DNA
atgctggtgccactggccaagctgagctgcctcgcctaccagtgcttccacgctctaaagattaagaaaaattacctccctttatgcgctactaggtggtcttcgacctcgaccgttccaaggattactacccactatactatttaccctcgggacaaagacaagcgctgggagggagtgaacatggagaggtttgccgaggaagccgatgtcgtcatcgtgggagcgggccctgccggtctttccgccgcagtgcgactcaagcagctggccgtcgcccacgagaaagacataagagtgtgccttgtggaaaaggctgcccagatcggggctcatacattatccggggcctgcctggatcccggcgcttttaaggagctctttcccgattggaaggagaagggtgcacccctgaacacaccagtcactgaagatcgtttcggcatcctgaccgaaaaatatcgcatccccgtgcctattttacccggccttcccatgaacaaccatggcaactacatagtacgccttggccatctagtatcctggatgggcgaacaggccgaggccttgggagttgaagtgtatccgggttacgcagccgcagaagtcctgtttcatgatgatggcagtgttaaaggcatcgccactaatgacgtcggaatacagaaggacggagcgcctaaggctaccttcgaacgtggtctagagctgcatgctaaggtgactatttttgccgaaggctgtcatgggcacttggcaaaacagctatataaaaaattcgatctgcgcgccaactgtgagccccagacatacggtataggcttaaaagaactttgggtgatagatgaaaagaactggaaacccggccgagtggaccacactgttggatggcccctggataggcacacctacgggggatcattcctgtaccatctgaacgaaggagaaccgctcgtagcgctggggctcgtggtcggtttagactaccaaaacccatacctcagcccatttcgagaattccagcggtggaaacatcacccatctatccggccaacccttgagggggggaaacggatcgcatatggtgcccgggctctgaacgaaggggggtttcaatccattcccaagctaacgtttcctggcggcctcctcatcggctgctctcctggctttatgaacgtgccgaagatcaagggcactcacaccgctatgaagagcggcatcctggcagccgagagcatattcaatcaactgacttccgaaaatctccagagcaaaactatcgggctccacgtgaccgagtacgaggataacctcaaaaattcctgggtgtggaaagagctctacagcgtcaggaacattcggccaagctgccacggagtgctgggcgtttacgggggcatgatatatactggtattttttattggatactacgggggatggagccctggaccctcaagcacaaaggctctgatttcgaaagactcaagcctgctaaagactgcacccctatagagtacccaaagcctgacggacagatttcctttgacctgctgtcctcagttgccctctccggcactaaccatgaacatgaccagcccgcccatctgactcttcgtgatgattctatccctgtgaaccggaacctgagcatctatgacggacccgaacaaagattttgtccggcaggagtatatgagttcgtgcctgtggagcaaggtgatgggttccggctgcagatcaatgctcaaaactgcgtgcactgtaaaacctgtgacatcaaggatccatcacaaaacataaattgggtagtcccagaagggggggggggccctgcctataacgggatgtag

SEQ ID NO: 115657 - DNA, 1287 bp, synthetic construct
  misc_feature 1..1287: note = Description of Artificial Sequence: Synthetic coding sequence
  source 1..1287: mol_type = other DNA
atggacccctcagtgacgctatggcaatttctgttgcagctgcttcgagaacagggaaacggacacattatatcatggacgtccagagacggaggggagttcaaactcgtcgacgccgaagaggtcgcacgcctgtggggcctgaggaaaaacaaaaccaatatgaattacgacaaattaagcagagcgctgcgttactattacgataaaaatataatccggaaggtgtcgggccaaaagtttgtttacaaattcgtcagttaccctgaggtggccggttgtagcaccgaggattgccccccccagcctgaagtgtccgtcacttctaccatgcctaacgtggctccggcagcaatacatgctgcccccggggacaccgtaagcggaaagccgggcactcccaaaggggctggaatggcgggacccggaggcctcgcgcgatcttcgagaaacgagtatatgcgatccgggctctattctaccttcacaattcagagcctgcagccccagccacccccacatcctcggcccgcagttgttcttccctccgcggctccagcaggagcagcagctcccccttcgggatccaggagtacttctccatccccactcgaagcctgcttggaggcagaagaagcgggtttgccactgcaagtgattttaactcctccagaagcgccaaatctgaaaagcgaggagctgaacgtggagccaggacttggcagggcactgccgccggaagtgaaagtggagggccctaaggaggagctggaagtggcaggcgagcgcggctttgtaccagaaacaacgaaggccgagccagaggttcccccccaggagggggttccagcaaggctgcctgccgttgtgatggacacagctggacaagcagggggccatgctgcgtcgtcaccggagatatcacaaccccaaaaaggaaggaagcctagggatctggagctgcctctcagcccgagtttactgggaggtcccggtcctgaaagaacgccaggctctggatctggctctggcctgcaagctcctggccctgccctcactcctagtcttctgccaacccacaccctgactcctgtcctgctgaccccttccagtctgcccccatctatacacttctggtccacccttagcccaatcgctcccagatcacctgcaaagctgtcattccagtttccttcatctggatctgcccaggttcatattccgagtattagcgtggatggactgtccactcctgtggtgctgtctccagggcctcagaaaccatag

SEQ ID NO: 115658 - DNA, 1836 bp, synthetic construct
  misc_feature 1..1836: note = Description of Artificial Sequence: Synthetic coding sequence
  source 1..1836: mol_type = other DNA
atgcccgagattgtggatacgtgctcgttggcctcaccggctagcgtgtgccggacgaagcaccttcatcttagatgtagtgtcgacttcactcgacggaccctgacggggactgctgcacttaccgtacagtctcaagaagacaacctaaggtccctggtgcttgatacaaaggatctgaccatcgaaaaggtggtgattaacggccaggaggtgaagtatgccttaggagagcggcagtcttataaaggcagcccgatggagatctctctacctattgctctttcaaagaatcaggagatagtaattgagataagcttcgagacttcgcctaagtccagcgccctccagtggttaaccccagagcagacttctggtaaggaacacccctacctattttcccagtgtcaagcgatccattgccgtgccatcctgccctgtcaggataccccatccgtgaagctgacgtatacggcagaggtcagcgtccccaaggagcttgtcgccctgatgtcagccatccgcgacggtgaaacaccagaccctgaggaccctagcaggaaaatatataaatttatccagaaggtgccaatcccttgttacctgattgctctggtggtaggagctctcgagtccaggcagatcggcccaaggactttagtctggagcgaaaaggagcaggtggagaaatctgcttatgagttttcagagacagagtctatgctgaagatagccgaagatttggggggtccctacgtctggggacagtatgatctcctggttcttccacctagctttccctatggtgggatggagaacccctgcctgacgttcgtgacgcctacactgctggccggcgataagtccctctccaatgtaattgcccacgaaatctcacacagctggacaggcaacctggttacaaacaagacgtgggaccacttctggctcaatgagggacacacggtttacttagaaagacacatctgcggcagacttttcggagagaagttcagacacttcaatgccctcggtggatggggagaactgcagaattccgttaaaaccttcggagagacacacccatttacgaagctcgtggtcgatctcacggatatcgatcccgatgtcgcttactcaagcgtaccatacgaaaagggatttgcgttgctcttctatctggagcagcttctgggcggtcctgagatctttcttgggttcctgaaagcatacgttgaaaaattttcttataagtctattaccactgacgactggaaggatttcctgtactcttatttcaaagataaggttgacgtgctgaatcaagttgactggaatgcgtggttgtacagcccggggctgccgccgatcaaacccaactatgacatgactctgaccaatgcatgcatcgccttatcacagagatggatcactgccaaggaggacgatctcaatagtttcaatgctactgatttgaaagatttgtcctctcatcagctcaacgagttcctggcccagaccctccagagagcgcccctccccctaggccatatcaaaagaatgcaggaggtctataacttcaatgccataaataacagcgaaatacggttcaggtggcttagactgtgtatacagtcaaagtgggaagatgcaatcccactggcattaaaaatggctacggagcagggtaggatgaagttcacaagaccgctgttcaaagaccttgcagcattcgataaatctcacgaccaagccgtcagaacctatcaggaacataaagccagtatgcatcccgtgactgccatgctggttggaaaggacctgaaggtggattag

SEQ ID NO: 115659 - DNA, 117 bp, synthetic construct
  misc_feature 1..117: note = Description of Artificial Sequence: Synthetic coding sequence
  source 1..117: mol_type = other DNA
atggaatccgctatcaccctctggcagtttttgcttcaactgctcttggaccagaaacacgagcatttgatttgctggacctctaacgacggagagttcaaattgctgaaggcctag

SEQ ID NO: 115660 - DNA, 483 bp, synthetic construct
  misc_feature 1..483: note = Description of Artificial Sequence: Synthetic coding sequence
  source 1..483: mol_type = other DNA
atggaaagtgcgattacactgtggcagtttctgctgcagctgttattggaccagaaacatgagcatctcatttgctggacctccaacgacggagagttcaagctgttaaaggctgaggaggtcgctaagctgtggggtttacgaaagaataagaccaatatgaactacgacaagctctctcgtgcattgcgttactattacgataagaatatcattaagaaagtgataggccagaagttcgtttacaagttcgtgagtttccctgagattctgaagatggatccgcatgcggttgagatctctcgggagtcactgctgttgcaagattctgactgcaaggcaagcccagaaggccgagaagcgcacaaacatggcttagccgctttgagaagcaccagccgaaacgagtacatacacagtggtctgtactcctccttcaccattaatagtctgcagaaccctcctgacgcattcaaggcatag

SEQ ID NO: 115661 - DNA, 1218 bp, synthetic construct
  misc_feature 1..1218: note = Description of Artificial Sequence: Synthetic coding sequence
  source 1..1218: mol_type = other DNA
atggactcagcgataactctgtggcaatttcttctacagctgcttcagaagccccagaataaacatatgatttgttggaccagcaatgatggacagttcaagcttctgcaggctgaagaagtggcccgactctggggtattcgcaagaacaagcccaatatgaattacgacaaactcagtagggctctgaggtactactacgtcaaaaatattattaaaaaagtgaacggccagaagtttgtctacaaattcgtgagttaccccgaaatccttaacatggatcccatgactgtcggaagaatagagggagactgcgagtctctaaattttagcgaggtttcttcctccagtaaggatgtcgagaacggaggaaaagacaaacccccccaacccggagccaagactagcagcagaaatgattacatccattctggactgtactcgtctttcaccctgaactctctgaatagttctaatgtcaaactatttaagttaatcaaaactgagaaccctgccgagaagctcgctgaaaagaagagcccgcaggagcccaccccttcagtcatcaaatttgttacaacacccagtaagaaaccccccgtggagcctgtggccgctactatatccattggaccctctatttctccctcttctgaagaaaccatccaagcactggagactttggtaagtcccaaactgccatcacttgaggcccccacttctgcaagtaatgtcatgacagcatttgccaccacccctccaatcagctcgattcctcctctgcaggagcctcctcgcacccccagcccccccctgtccagccatccagacatcgacacggatattgactccgttgcctctcagcctatggagctgcctgaaaacctgagcctggaaccaaaagaccaggattctgtgctcctggagaaagataaggtgaacaattcctccagatcgaagaaaccaaaagggctagaactcgcccctacattggtgatcacctcatcggatccctcccccctggggatactatctccgtctttaccaactgcaagcctgacacccgcctttttcagtcaggttgcttgttctctgtttatggtgtctcccctactgtcctttatatgtcctttcaaacagattcagaacctgtacacccaagtttgtttccttcttctgaggttcgtgttggaaagactgtgtgtgaccgtgatgtag

SEQ ID NO: 115662 - DNA, 1296 bp, synthetic construct
  misc_feature 1..1296: note = Description of Artificial Sequence: Synthetic coding sequence
  source 1..1296: mol_type = other DNA
atggatagtgccatcaccctgtggcaattcctgctccagctgctgcaaaagcctcaaaacaagcacatgatttgctggacgtctaatgacgggcagttcaagctgctgcaggcggaagaggtcgcccgactctggggcattagaaagaacaagccaaacatgaactacgacaaactgagcagggccctccgttattattatgtgaagaacatcatcaagaaagtaaacgggcagaaatttgtgtataaattcgtgagttatccagagattcttaatatggaccctatgaccgtcgggcgtatcgaaggagactgtgaaagcctgaacttttcagaggtatctagctcaagcaaggacgtggagaatgggggtaaggataaacccccccagccaggtgcaaagacctcttctcgcaacgactacatccattctggactgtacagctctttcacgcttaattctctgaacagtagcaacgttaagctgtttaagctcataaaaactgagaacccagctgagaagctagctgagaagaagagtcctcaggaaccgacccccagtgtgatcaaatttgtcaccacccctagcaagaagcctcctgtagagccagtggcagccaccatttcaattggaccaagtatctccccaagcagcgaagagactatacaggctctcgagacgcttgttagtcccaagctccccagtctggaagcaccaacttctgctagtaatgtaatgacagcatttgcaaccactccacccattagctccattccccctctccaagagccccctcgcacgccatctccacccttgagctcccacccagatattgatacagacatcgattcagtcgccagccagcctatggaactgccggaaaatctttctctggagccaaaagaccaggactctgtcttactcgagaaggataaagtgaataactcgagccgtagcaagaagcccaaaggattggagctcgctcccacgcttgttatcaccagctccgacccttctccgttggggattctaagcccaagtctgccgacggcttccttgacccctgccttcttctctcagactcccattatccttacccctagtcctttactctcctctatacatttctggtcaactctcagcccagtggcacccttgagtccagcaaggctacagggcgcgaataccttgttccagttcccatcagtgctgaactcccatggtccattcacactgtctggtctcgatgggcccagcactccgggaccatttagtcctgacctacagaagacctag

SEQ ID NO: 115663 - DNA, 1566 bp, synthetic construct
  misc_feature 1..1566: note = Description of Artificial Sequence: Synthetic coding sequence
  source 1..1566: mol_type = other DNA
cgaccacaggacccaagaagaagatgtcgggtgcggggcagaggagggaggggagcccggtcacgcggcggtggacggtgcggcaggttgcgggccccgggcgggcttgggctggccgcagcagctttctacgggtctgcagccggagtcgcagcagctgctgccccctcatcttcatttcaaagagaggaagaggccgagggtggtgaggcccaccgtgttcggggaggcgatcggggaggggcaccaagagccgcctctctgatagctatggactctgcaataaccctctggcagtttctcctgcagcttctgcagaaaccacagaacaaacatatgatatgttggacctctaacgacggccagttcaagcttcttcaagccgaggaggtcgctcggctttggggtattcgaaagaataagccgaatatgaactatgataaattgtcaagggcccttaggtactactatgtaaaaaacatcattaagaaggttaacggccaaaaattcgtctacaaattcgtgtcataccctgagatcctcaatatggatcccatgacagtcggtcgcattgagggcgattgcgagtccctgaatttcagcgaggtgagtagttcctccaaggacgtggagaacggtggaaaggacaaaccacctcagccgggagctaagacttcttcgcgtaacgattatatccactcaggcttgtactcaagctttactttaaatagtttgaacagctctaacgtaaagttgttcaagttaattaaaacagagaaccccgcggagaagttggcggagaaaaagagtccgcaggaaccaacaccgagcgttatcaagtttgtgaccaccccgtctaaaaaaccccctgtggagcccgtcgccgctacaatcagcatcggacctagtatctctcccagctccgaggagacaattcaggctttagagacactggttagtccaaagctcccttcactcgaggcaccaacatcagcttccaacgtgatgacagcatttgctaccactccccccatctcctcgatcccccctctgcaggagcccccgaggactccatcccctcccctgagttcccaccctgacatcgatactgacatcgatagcgtggcatcccagcctatggaactccccgaaaacctgtcactggaaccgaaggatcaggatagtgttctcctggaaaaggacaaggtgaacaactcttcaagaagcaagaaacctaaagggttggaactggcccccaccttggtaataacttcttccgacccgtctccacttgggatcctcagcccttctctgcccactgcctctctgacgccagcgttcttttcacaaacccccattatcctgaccccatctcccctactcagttctattcatttctggagcaccctctcgcccgtggctcctctgagccctgcccgcctgcagggggccaatacactcttccagttccctagtgttcttaattcccacggcccttttaccttgtcaggcttggatggtccgagtaccccaggaccattttcaccagacctacagaagacgtag

SEQ ID NO: 115664 - DNA, 807 bp, synthetic construct
  misc_feature 1..807: note = Description of Artificial Sequence: Synthetic coding sequence
  source 1..807: mol_type = other DNA
atgaatggcactgccaatcctttgctggatagggaagagcattgtttgcgcctgggtgagagctttgagaagcggcctcgcgcctcttttcataccattaggtacgactttaaacctgcaagcattgatacttcatgcgagggcgagcttcaagtaggcaagggcgacgaggttactataactcttccacatatccccggctcgacaccaccaatgaccgtcttcaaagggaacaagagaccatatcagaaagattgtgtgctcatcatcaaccacgacactggcgagtatgtgctcgagaagctctcttcatcaatccaagtaaagaagactagagccgagggaagcagcaagatacaggcccgaatggagcagcagcctacacgaccgcctcaaactagccagcctccaccccctccgcctcccatgccattcagagcaccgaccaaaccccccgtgggtccgaaaacctcccctctcaaggacaatccaagcccggagcctcagttggatgacataaaaagagaactccgcgccgaagtggatattattgaacagatgtcatcgtccagcggatccagtagttctgactccgagtccagttcaggctctgacgatgactcttcaagtagtggcggagaagacaacggaccagcctcaccgcctcagccctcacatcagcagccctacaattcaagaccagccgtggccaatgggaccagccgtccacaagggtctaaccagctgatgaacaccctcagaaatgacctgcagctgtccgaaagtgggtctgactcagacgattag

SEQ ID NO: 115665 - DNA, 504 bp, synthetic construct
  misc_feature 1..504: note = Description of Artificial Sequence: Synthetic coding sequence
  source 1..504: mol_type = other DNA
atgaagtcccagctacattgtcacatctcactggccgaggggtcatcgaagatccaagcacgaatggaacagcagcccaccaggcccccccagacctcacaaccccccccaccaccaccgccaatgccattcagggcaccaaccaagcctcctgtgggtcctaaaacgtcccctctgaaagacaatccttcacctgaacctcaactcgacgatatcaagcgcgagctcagagcggaggtagatatcatagagcagatgtcatcctcctctggatcgtcatcatcagactcagagagctcttcggggagcgatgacgactcctccagctcaggtggcgaggacaacggaccagctagccccccacaaccttctcaccagcaaccatacaacagcagaccagccgttgcgaacggcacatcacggccccaggggtcaaaccagcttatgaacactcttcggaatgacctgcagctttcagagtccgggagtgacagtgacgattag

SEQ ID NO: 115666 - DNA, 2979 bp, synthetic construct
  misc_feature 1..2979: note = Description of Artificial Sequence: Synthetic coding sequence
  source 1..2979: mol_type = other DNA
atggcacgggggggcgcagcatgtaaatcagacgctcgtttactgctcgggagggatgccctgcggcccgcgccagctctgctggctccagctgtcctgctgggcgccgctctgggcttgggcctggggctatggctagggtgtagagccggtagacagcgcacgcgccaccagaaagatgatacgcagaatttactcaagaacttagaatcgaatgcccagaccccaagcgagacgggatcaccatcacgtcggaggaaacgcgaagtccagatgtctaaggacaaggaggctgtagacgaatgcgaaccacctagtaactccaacataacagcgttcgctctgaaagcaaaggtgatctaccctattaatcaaaaatttcgtccgttagccgacggaagttcgaatccatcccttcacgagaatttaaagcaagcagtgcttccacatcagcccgtggaggcttcgccttcatcctctcttgggtcgctgtcacaaggcgaaaaggatgattgcagctcttcctccagtgttcactctgctacgtcagatgatcgcttcctcagccgcactttcttgcgcgtgaacgcattcccagaagtcctcgcatgcgagtctgtagacgtagatctttgtatttacagcctccacctcaaggatctgctgcacctcgacaccgccctgagacaggaaaagcatatgatgttcatccagatctttaagatgtgtctcctcgatctgctgccaaagaaaaagtcagatgatgagctctatcagaaaatcttgagcaagcaggaaaaagacttggaagaactcgaaaaggggcttcaggtgaagctttccaacacagaaatgagcggcgccggcgactctgaatacatcaccttggctgatgtagaaaagaaagaaagggagtactcagaacaactcattgacaacatggaggcattctggaaacagatggctaacattcagcacttcctggtggatcaattcaaatgtagctcttccaaagctaggcagctgatgatgacccttactgaaaggatgatagcagccgaaggcctcttgtgcgactcacaggaactgcaagccctcgacgccctggagaggaccatgggacgagctcacatggccaaggtgatcgagtttttgaagttgcaagtgcaagaagagaccaggtgccgtttagccgcaatcagtcacggtttggagctcctcgctggtgaaggaaaactaagcggtagacaaaaagaagagctgctgacccagcagcataaggccttttggcaggaggctgaacgtttctcacgtgaattcgtgcaaagagggaaagatctggtcacagcctctctggcccaccaggttgaaggaactgctaagctgacactggcacaggaagaggagcagcggagctttctggctgaagcacaacccacagccgacccggagaaattcctggaggcttttcatgaggtgctggaaagacaacgtctgatgcagtgtgatctggaagaggaggaaaacgtgcgtgcgacagaagctgtggtggctctgtgccaagaactctatttttcaacagtggacacttttcagaaatttgtagacgccttatttctgcagacgctccccggcatgacgggccttccccccgaggaatgcgactatcttcgccaggaagtccaagaaaatgccgcctggcaactcgggaagtcaaataggtttcggaggcaacagtggaagctgtttcaggagctgctcgaacaggaccagcaagtttggatggaggagtgtgcactgagcagcgtactgcaaacgcatctgagagaagaccacgaagggacgataaggggagtgttggggcggctgggcgggctcactgaggaatctacacggtgtgtgctgcagggccacgacctgctgttgcgcagcgctctccgcaggctggccttacgcggcaacgcactggccactctaactcaaatgaggctgtctggtaagaagcacctgttgcaggaattacgagagcagagggccttagaacagggatcctcacagtgcctggacgaacaccagtggcagctcctgagggcactggaggctagagttctcgaggaagccagccgacttgaggaggaggctcagcagactcgcttgcagttgcagcaacgcctgctggcggaggcacaagaggttggccagctcctccaacagcacatggagtgcgctatcgggcaggccctgttggtgcacgccagaaacgcagccaccaaatcccgggccaaggaccgcgatgacttcaaaaggactttgatggaagctgctgtcgagtcagtctacgtcacctcagccggggtatcaaggctggtgcaggcctattaccagcagatagggaggattatggaagaccatgaagagcgaaagctgcaacacctgaaaacgttacagggagagcggatggagaactacaaactccggaagaagcaggagctttctaatccgtcctcaggatcccggacagcaggtggcgcacacgaaacctcccaggcggtgcatcaacgcatgctttcacagcagaaacgattcttagcacagtttcctgttcaccagcaaatgcggttacatgcgcagcagcagcaggccggagtcatggacctcctagaggcccagttagagacgcagcttcaagaggccgaacaaaacttcatctcagaactggccgctctggcgagggtgcccctggcggaatcaaaattactgcctgccaagcgaggactgctcgaaaaaccactccgcactaagcgaaaaaagccgcttccacaggaaagaggggatctcggcgtcccgaacaatgaggacctggccagcggggaccagacctccgggtccctttcctcaaagcgcctctcacagcaggagagcgaggctggtgattccggaaactctaagaaaatgctgaagagacggtcaaatttatag

SEQ ID NO: 115667 - DNA, 2979 bp, synthetic construct
  misc_feature 1..2979: note = Description of Artificial Sequence: Synthetic coding sequence
  source 1..2979: mol_type = other DNA
atggccagaggaggcgccgcttgcaagagtgatgcgcgtctgctgctggggcgcgacgccttgagacccgctccagccttgctagcccctgcagttctgttaggcgctgcactcggactcggactcggcctttggctcggctgtcgcgcagggcgtcagcgcacccgccatcagaaagatgatactcagaacttgctgaaaaatctggaatcaaatgcccagactccatccgaaactggctctccctccaggcgacggaaacgagaggttcaaatgtcgaaagataaggaggccgtagatgagtgcgagcccccctccaactctaacataaccgcattcgccctgaaagccaaggtgatctatccgattaaccagaagtttcgcccattggctgacggcagctctaacccgtcactacatgaaaacctgaagcaggcagtcctccctcatcagcctgtggaagcatctccatcttccagcttggggagcctctcacaaggtgaaaaggacgattgtagttcctcttcaagcgtgcactccgccaccagcgatgaccggttcctttcacgaacattcctgagggtcaacgccttcccagaagtgctcgcctgcgaatctgtagacgttgacctttgtatttactcattgcacctcaaggatctgctgcatctcgataccgcattgaggcaggaaaaacacatgatgttcatccagatttttaaaatgtgcctcctggacctgcttccaaagaagaagagcgacgacgagttgtatcagaagattttaagcaagcaggagaaagaccttgaggagctcgagaaagggctccaggtgaagctctcaaacactgagatgtcaggggccggcgattccgagtacataactctcgcggacgtcgaaaaaaaagaacgggaatattccgagcaacttatcgataacatggaagctttctggaaacagatggctaacatccagcacttcttggtcgaccagtttaagtgttcgtcttccaaggcgaggcagctgatgatgacgctaacagaacgtatgattgccgccgaaggtcttctctgcgactcgcaggagcttcaggcactcgatgccctcgaaagaactatgggccgggcccacatggccaaggttatcgaatttctcaagctgcaggtccaagaggaaacaagatgtagattagccgccatctcgcacggcttggagctgctcgcgggggagggtaagttgagtggcaggcagaaggaggagctccttacacagcagcataaagcgttctggcaggaggctgagcggttctctagagaatttgtacagagagggaaagatctggtcaccgctagcctggcgcaccaggtagaagggactgccaagctgactttggcacaggaagaggaacagcgttcatttttggcggaggcccagcccaccgcagacccggagaaatttctcgaagccttccacgaagttctggagagacaacgactcatgcaatgcgatctcgaggaggaggagaatgttagagcgactgaggccgtggtagcgctgtgccaggagctgtatttcagtacagtcgacactttccaaaaattcgtagatgctctgttccttcagactctgccaggaatgaccggactccctcccgaagagtgcgactatctccgccaagaagtgcaggaaaatgcagcctggcagttggggaagtctaatagatttcggcggcagcaatggaagctgtttcaggagttgctcgaacaggatcagcaagtctggatggaagagtgcgccttgtcaagcgtgttgcagacacatttgcgagaggatcacgaaggaacaatccgcggggtcttaggccgactggggggcctgactgaggaatctacgagatgtgtgcttcaggggcacgacctgctgctgaggtctgccctccgccgcttagccttaagggggaatgcactggccaccttgacacaaatgaggttgagtggcaagaagcacctgctccaggaacttagggagcaacgagctttggaacagggctcatctcagtgcctcgacgagcatcaatggcagctgctgcgggccctggaggcgagggtactggaggaagcgagtcggctagaggaagaagcccaacagactagactccagctgcagcagcgcctgttggctgaagcccaggaagtcggtcagctgctccagcagcatatggaatgtgctattgggcaggcattgctcgtccatgcccgcaatgccgctactaaaagcagagccaaggaccgagatgattttaaacggacactgatggaagccgctgtagagagcgtgtatgtgacaagtgcaggggtgagcaggctcgtgcaggcgtattatcagcagatcgggcgcatcatggaggatcacgaggaaaggaagctgcagcacctgaaaaccctgcagggcgaaaggatggagaattataagttgagaaagaagcaagaactgtccaatccaagcagcggcagcagaaccgctggaggggctcacgagacttcccaggctgtacaccagagaatgttgtcgcagcagaaacgttttctcgcacaattcccagtgcatcagcagatgcgactgcacgcccagcagcaacaggcaggtgtaatggacctgcttgaggctcaactggagacccagctccaggaggcagagcagaacttcatcagtgagctggccgcgctggcacgtgtgcctctcgctgagagcaagctcctgcccgcgaaaaggggcctactcgagaagcctctccggacaaagcgcaagaagcctctcccccaagagcggggcgatctcggagtgcctaacaacgaagatctggcatccggagatcagacaagtggctctctttccagcaagcggctgtcccagcaggagagcgaagctggcgactcaggaaatagtaagaaaatgctgaaaagacgttcgaacctgtag

SEQ ID NO: 115668 - DNA, 3687 bp, synthetic construct
  misc_feature 1..3687: note = Description of Artificial Sequence: Synthetic coding sequence
  source 1..3687: mol_type = other DNA
atgatatggccgaaagttgagtgctgtcatttcaaaaccgctgttgaggctccactcgggatgaagcttgacaagaagatggaggtctttattcctctgtccacctccgccgctagttccggcccttgggcccacagcttgttcgccttcattccgtcttggcctaagaagaacctcttcaaacgagagtctcccattacccatcggctctatggagatatcagccgcgaagtgcagggcaccagtgaaaacggagtgattttccagaagtgcgctctggtaagcggtagcagcgaggcccagaccgcaagaatttggttgctagtgaacaatactaaaacaacctcatcagcgaatctgtcggagctgctgctcctggactccatcgccggtcttacaatttgggactctgttgggaaccgcacttccgaaggattccaggcattctcaaaaaagtttctacaggttggggacgcgtttgcagtcagctacgccgcaaccctccaggcgggcgacctgggcaacggtgagagtctgaaactgcctgcccagttgacctttcagagctcttcccggaatcgaacgcagctgaaagttcttttcagcatcacggccgaagagaacgtgactgtcctgcctcaccacgggctacatgccgccgggttttttatcgccttccttctaagtcttgtgctcacctgggccgcactgtttctcatggtgcgctatcaatgcctgaagggaaatatgctgacaaggcatcgcgtgtggcaatacgaaagtaaactcgagcctctaccatttacctcagcggacggggtgaatgaagacctttctctgaacgaccaaatgatcgacatactgtccagcgaggacccaggctctatgctgcaggccctggaggaacttgaaattgccactctcaacagggcagatgccgaccttgaggcctgtagaacccagatcagcaaggatatcatagccctacttctgaaaaacttgacttcatctgggcacctgtcgcctcaagtggaaaggaaaatgtcggctgtgttcaagaaacagttcctgctgctggagaatgagattcaggaggagtacgaccgtaagatggtggctctaacggcagaatgcgatctggaaactcgcaaaaagatggagaaccagtatcaacgggaaatgatggccatggaagaagcagaggaactcctcaagagagccggtgaacgtagcgccgtggagtgctcaaatttgcttaggacactgcatgggctggaacaggagcacctacgcaagtctttggccctgcagcaggaggaggatttcgctaaagctcaccggcagcttgccgtattccaacggaatgagctgcactcaatcttctttactcaaattaaatctgccattttcaaaggagagttaaagcctgaagctgctaaaatgctgttacaaaactacagcaaaattcaagagaatgtcgaggagctaatggacttctttcaagctagtaagaggtatcacctgtccaagagattcgggcaccgggaatatctggtgcagaatctgcagtcctccgaaactcgagtgcagggactgcttagtactgctgctgctcaacttacccacttgatacaaaaacacgagcgggccggctaccttgatgaggaccagatggagatgctactcgagagggcccagacagaggtcttcagcatcaaacagaagcttgacaacgacctgaagcaggagaaaaaaaagttacatcagaaactgatcactaagagacgaagagaactcttgcagaaacatcgagagcagcggcgtgagcaggcctcagtcggcgaggccttccggaccgtggaggacgcaggtcagtacctgcatcagaaacgtagtctgatggaagaacatggcgcaacactggaagaactgcaggagaggttggaccaggccgccctcgacgatctcaggaccctcacactctccctattcgagaaagctactgatgaactgcgcagactccagaactcagctatgactcaggaacttctcaaaaggggtgtgccctggctcttcctccagcagattttggaggagcacggcaaagaaatggcagccagagctgagcagctcgaaggcgaggagcgggaccgagaccaggaaggggtccagagcgtgagacagcggctgaaggatgacgctcctgaggctgttacagaggaacaggctgaactgaggagatgggagcacctaattttcatgaagttatgttcttccgtgtttagcctaagcgaagaggagctgttgcgcatgaggcaggaggtgcacgggtgcttcgcacagatggataggtcattggctctgcctaagattcgcgcccgcgtgctcctgcagcagtttcaaaccgcgtggagggaggcggagttcgtgaaactggatcaggctgtagcagcacctgaacttcagcaacaaagcaaggtgagaaaatctcgtagcaagagtaagtctaagggcgaattgttaaagaagtgtatcgaagacaagatacacctatgcgaagagcaggcttcagaggacctggtggagaaggtgagaggcgagctgcttagagagcgcgttcaacgcatggaagcacaggaggggggattcgcacagagcctggtcgcgttgcaattccagaaagcctcaagagttaccgaaacactgtctgcgtacaccgcccttctttcaatccaagacctcttactggaggagttgagcgccagcgagatgctgactaagtccgcctgcacgcagatcctcgaaagccactcgcgcgagctgcaggagctcgagaggaaactggaggaccagttagtgcagcaagaggctgcacagcagcaacaggctctcgcgagctggcaacaatgggtcgctgatggtccgggcatattgaatgagcccggggaggtcgatagtgagcgacaggtatctacggtgcttcatcaggctcttagcaagagccagacattgctggagcagcatcagcagtgcctgcgcgaggagcagcagaactccgtggtgctcgaggatttacttgagaacatggaagcggacacattcgcaactttatgcagtcaggagctgcgcctcgcatcctacctcgcccggatggctatggttcctggagcaacacttcgccgcttgttgtccgtagtgctcccgacagccagtcagcctcagctccttgcacttttagactctgcaacggagagacatgtggaccatgccgccgagagcgatgggggagccgaacaggccgatgtgggacgacgcaggaagcatcagtcgtggtggcaagctctggatggcaaactgaggggtgaccttattagcagaggcctggagaagatgttgtgggcccggaaaagaaagcagagtatacttaagaagacatgcctgccgcttagggagcgaatgattttctccggtaaaggttcgtggcctcatctgtccctggagcctatcggcgagcttgcgcctgtgcccattgtaggagctgagactattgacttactcaacacgggggaaaagctattcatcttccggaatcccaaagagcctgagatctctctgcacgtaccacctaggaaaaaaaaaaattttctgaacgctaaaaaagccatgagggcgctaggtatggattag

SEQ ID NO: 115669 - DNA, 3927 bp, synthetic construct
  misc_feature 1..3927: note = Description of Artificial Sequence: Synthetic coding sequence
  source 1..3927: mol_type = other DNA
atggatccctctgggtcgaggggtcgtccaacttgggtactggctgggggccttttagctgttgctcttgcactgggcggccgcggttgtttgggggctagtagcagaccacgctggcgccctctcggggctcagcctccccgggatccccaggttgctcctaggtccggccccgggctgagaatcccgcctggaaggtcaggggccgggcctgagtcatccacccaggacttgccctgcatgatttggcccaaggtcgagtgctgccactttaagactgcagtcgaggccccacttggcatgaagctagacaagaaaatggaggtgtttatccctcttagtacttctgctgcctccagcggtccatgggcacatagcctcttcgcctttatacccagctggcccaagaagaatttgttcaagcgcgaaagcccgatcacgcataggctttacggggatatctcccgggaggttcagggtacgagtgagaacggagtcatcttccagaagtgcgctctggtgagtggctcatctgaggctcagaccgccaggatttggcttttagtgaacaacactaagacaactagctccgccaacctgtcagagctgctgcttctggatagcatcgcgggactaacaatatgggatagcgttggcaaccggacgtccgagggtttccaggcgttctcaaaaaagtttttacaagtgggtgatgccttcgccgtgtcctacgctgctacattgcaagcgggggatcttggaaatggcgaatctcttaagctccctgctcagctgactttccagtcttcttcccggaatcgaacccagctcaaggtgcttttctcaattactgcagaagaaaatgtgactgtgctgccccatcatggcttgcacgctgccgggttcttcattgcgtttcttctgtctctggtactgacatgggccgccctttttctaatggtacgatatcagtgcttgaagggcaatatgcttacacgccacagagtttggcagtatgagtctaaactggagcccttgcccttcacgtcggccgatggagtgaacgaggacttgagtctgaatgatcaaatgatagatatcctgagctcagaagaccctggctctatgctccaggctctggaagaacttgaaatcgctacactgaatcgtgccgacgccgacttggaggcttgtaggacccagatcagcaaagatatcatcgctctgctgctgaagaatctgacttcttccggacacctaagcccccaggtggagcgaaaaatgagtgctgtttttaagaagcagtttctgcttcttgagaacgagattcaagaggaatatgaccgaaaaatggtcgccttaacagcagagtgcgacctggagacgcggaagaaaatggagaatcagtaccagcgtgaaatgatggctatggaggaggccgaggaacttctgaaaagggcaggcgaacgaagtgctgtcgagtgtagcaatctcttgagaaccctgcacgggctggaacaagaacacctccgcaagtcgctcgctctccagcaggaagaagactttgctaaggcgcataggcagctggcagtgttccaacgaaacgaacttcattcaatcttcttcacgcagataaagtctgctatatttaagggtgaattgaaacctgaggctgctaaaatgctgttgcaaaattactctaagattcaggagaatgtggaagagctgatggacttctttcaggctagcaagcggtaccacctttcaaagagatttggacacagagaataccttgtccagaatctacagagctcagagacacgagtgcagggcctgctgtctaccgcagccgcgcagctgacacatctgatccaaaagcacgaacgagccggctacctcgatgaagaccaaatggagatgctcctggaaagggcacaaacggaagtcttttcaatcaaacagaaacttgacaacgatcttaaacaagaaaagaagaaactacaccagaaattaattactaagaggcgtcgcgaacttttgcaaaagcatagagagcaacgcagagaacaggcttccgtcggtgaagcattcaggacagtcgaagacgccggccagtacctgcatcagaagaggagcttaatggaggaacacggcgccaccctggaggagctgcaggaaagactggaccaggccgctctcgacgatcttaggactcttaccttgagcttgttcgaaaaagctacggacgagctgaggagactgcagaactctgcaatgactcaggagcttttgaagaggggggtgccatggcttttcttgcaacaaatactggaagagcacggtaaggagatggccgctcgggcggagcagctggaaggggaggaacgggacagggaccaggaaggagtgcaatctgtgaggcaacgcctgaaagacgacgctcctgaggccgtgactgaagagcaagccgaactccgcagatgggagcatctgatctttatgaagctgtgttccagcgtattctctctgtccgaggaagagctgctcagaatgcgacaggaggtgcatggctgtttcgctcagatggaccgaagccttgccctcccgaagatccgggcacgtgttcttctgcagcagttccagaccgcctggcgggaagcggagtttgtaaagctggaccaggccgtggccgctcccgaactccagcaacagtcaaaagtgaggaagagcaggtcgaaaagcaaatccaaaggcgaacttctaaagaagtgcatcgaggataaaatccacctttgtgaggagcaggcttcggaagaccttgtggagaaggtcaggggggaactccttcgggagagggtgcagcggatggaagctcaggagggcggtttcgcccagagtctggttgcattgcagttccagaaggcttccagagtgacagagacactctccgcttacacagccctgctgtcaattcaggacctgctattagaggagcttagcgcttctgagatgctgaccaaatcagcttgtacccaaatcctggaatcccattcaagagagctccaggaactagaacggaaactggaagaccagctcgtgcaacaggaagccgcacagcagcagcaggcgctggcttcttggcagcaatgggtggcagatggccccgggattttgaatgaaccaggcgaggttgacagcgagcgccaggtctccaccgtgcttcaccaagccctgtccaagtctcaaacattacttgagcagcaccaacagtgcctgcgggaggagcaacagaactccgtggtgcttgaagaccttctggaaaatatggaagccgacacattcgctacattgtgcagtcaggaactgagattggctagttacctggccaggatggcaatggttcctggtgctaccctgaggcgtttgttgtctgtggtgttacctactgcctctcagccacaactcctggctctcctcgatagcgcaactgagcggcatgtggatcacgcagccgaatccgatggtggcgctgagcaggctgacgtcggccggcgccgtaagcaccagtcctggtggcaggcgttggacggtaaactgcgtggcgatctgatctcccgcggactggaaaaaatgctctgggcccgaaagcgcaagcagtctattttaaaaaaaacgtgtctacccctccgggagagaatgatcttcagtgggaaaggctcttggccgcacctaagtctggaacccataggcgaattggcccccgttccgattgtgggagctgaaactatcgacctgctgaacaccggggagaagctgtttatcttcaggaacccaaaggagcccgaaatcagtttgcacgtcccgcctcgaaagaagaagaacttcctgaatgccaaaaaggcaatgcgagcactgggcatggattag

SEQ ID NO: 115670 - DNA, 3741 bp, synthetic construct
  misc_feature 1..3741: note = Description of Artificial Sequence: Synthetic coding sequence
  source 1..3741: mol_type = other DNA
atggacccgagcggaagccgtggaaggccaacatgggtactggcgggcggacttttggccgtggccctagctctcggcggacgcggctgtctgggggcctcttcgcgaccccgttggcgcccattaggggcacagccgcctcgagatccccaagtggctccaagatccggccctgggctacgtataccgcctggcagaagtggggccggcccagaatcctccactcaagacctcccgtgcatgatctggcccaaggttgaatgttgtcattttaagacagctgtcgaggcacctctggggatgaagctggataaaaagatggaggttttcattccactgtctacctccgccgcctctagtggtccttgggcccacagcttgttcgcattcattcccagttggccaaagaagaacctgtttaagcgagagtcccctatcacacaccgcctgtacggcgatatctctcgagaggtgcagggcacgagcgaaaacggtgtgatcttccagaagtgtgcgctcgtgtcaggctcctccgaggcgcagactgctcgaatttggctgctggtaaacaatacaaagacaacatcctcagccaatctctccgagctcctcctgctggactcaatagccggcctcactatatgggatagtgtgggcaacagaaccagcgaaggctttcaggccttttccaagaagtttcttcaagtgggggacgcttttgccgtgagttatgctgctacactccaggccggtgacctaggaaatggggagtcacttaagctgcccgcgcagctaacctttcagtcttcttcgagaaatcggacacagctcaaggtgctattttccattaccgcagaagaaaacgtgactgtgttgccacaccacggactgcatgccgcaggctttttcatcgcctttctgctgagcctggtactcacttgggccgctctcttcctcatggtgagataccagtgtctgaaaggaaatatgctgaccagacacagggtgtggcagtacgagtcaaaactggagccactgcctttcacctccgccgacggagtgaacgaggatctgtcactgaatgaccagatgattgacatactaagtagtgaggatccaggttcgatgctgcaggcactggaagagctggaaatagccacactgaatagggcagatgcagacctcgaagcctgtcggacacaaatctccaaagacatcattgctctcctgctgaaaaatctcacaagtagcggacatctttccccccaggtggagaggaagatgtccgccgtatttaagaaacagtttttgttgttggaaaacgaaattcaggaggagtacgatagaaagatggtcgccttgacggctgagtgcgatctggagaccaggaagaagatggagaaccagtaccagcgtgaaatgatggccatggaggaagccgaggaattactgaagagggccggcgagagatcagccgtcgagtgctccaaccttctccgcacccttcatggcctggaacaggaacatctgaggaagagccttgcgttgcaacaggaggaggattttgcaaaggcccacaggcagctggccgtttttcagagaaatgagcttcattcaattttttttacgcagatcaagagtgcgatttttaagggggagctcaaaccagaagccgccaagatgctgctccagaattattctaaaattcaggagaatgttgaagagcttatggacttcttccaagcttccaagaggtatcacttgtccaaacggtttggccatagggaatatctcgtacagaatctacaaagcagcgaaactagagtacaaggtctactgagcacggcagcagcccagctcacgcacttgatccagaagcacgagcgcgcaggttacctggacgaggaccagatggagatgctcctagagcgagcacagacagaggtcttcagcatcaagcagaagctcgataacgacttaaagcaggaaaaaaagaaactgcaccagaagctgattaccaaaaggaggcgcgagctgttacagaaacatcgtgagcagcggcgcgagcaagcttcagtgggtgaagcatttagaacagtggaagacgccggtcagtacctgcaccagaaacgcagcctcatggaagagcatggtgccaccctcgaagagttgcaggagaggctggaccaggctgctcttgacgatttgcgcaccttgactctaagtctcttcgagaaggcaaccgacgagttgcgaagacttcagaattccgccatgacccaggagctccttaagcgcggcgtgccatggttgttccttcagcagatcctggaggagcacggaaaagagatggccgctagggccgaacaactggaaggcgaggaacgggaccgggaccaggaaggcgtccagtctgtgagacagcggctgaaggacgatgctcccgaggctgttacagaggagcaggccgagctccgccgctgggagcatctaattttcatgaagctgtgcagcagcgtattctccttgtcagaagaagaactgctgcgtatgcgacaggaagttcacggatgtttcgctcagatggatagatccctggctctgcccaagattagagcgagggtcttgctgcagcagtttcagacagcctggcgagaagctgagttcgtaaagttggaccaggcagtagccgcaccagagctgcagcagcagtccaaagtcaggaagtctcggtctaaaagcaagagcaagggcgagctgctcaagaaatgtatcgaagacaaaattcatctctgcgaagaacaggccagcgaagatttggtggagaaagtcaggggagagttattaagagaacgggtgcaacgcatggaggcgcaagagggaggtttcgctcagtcacttgtggccctgcagttccagaaggcctctagagtgaccgagaccctgagcgcttacacggcactgctgtctattcaggacttactgctggaggaattgtcagcgtccgagatgcttaccaagtccgcctgcacccagattctggaatcacactctagggagctgcaggaattagagcgcaagttagaggaccagctggtacagcaggaggcggcccagcagcagcaggctctagcaagctggcagcagtgggtggcagacggcccaggcatcctgaacgaacctggagaggttgatagtgagaggcaggtctccaccgttttgcaccaagctctgagtaaatcacaaacactgttggagcagcatcagcagtgtctgagagaagagcaacagaatagcgtagtactggaagacctgctcgagaatatggaagccgacacattcgctacgctctgttcccaagaactgcgcctagccagctatttggccagaatggcgatggtgccaggggcaacattgcgcagactactctctgtggtgttacccacagccagccagcctcagttactggccctgctggacagcgctaccgagcggcatgtggatcatgctgccgagtccgacggcggagcggaacaggcagacgtcggcaggcgccgaaagcatcagagctggtggcaggcgctggatgggaagcttcggggtgatctcatctcacgaggactagagaagatgctttgggcgaggaagaggaaacagcgatccggtaaccaggaaagcttctggcagtacctggtggggacccccgaaatcggtcttattgaatggatgtcagagaaatag

SEQ ID NO: 115671 - DNA, 882 bp, synthetic construct
  misc_feature 1..882: note = Description of Artificial Sequence: Synthetic coding sequence
  source 1..882: mol_type = other DNA
atgttcatttctctctgggagtttttttatggacacttctttcgtttttggatgaaatggcttttacgccagatgacagggaaatgcgagctgcagaggatctttgacacttatgtgggggcacagcgcacccatcggatagagaattctcttacctattccaaaaataaggtcctccagaaggctacccatgtggtccaatctgaagtggacaagtacgttgacgatattatgaaagagaaaaacataaacccggagaaggatgccagcttcaagatctgcatgaagatgtgtctgctacagattaccggttacaagcagctgtatctcgacgttgagtctgtgcgtaaaaggccttacgattccgataatctgcagcacgaggagctgcttatgaaactgtggaaccttttgatgccgacaaaaaagctgaatgcacgcatctcaaaacagtgggccgagattgggtttcaaggggacgacccaaagacagatttccgcggaatggggattttgggattaattaatctggtctacttttctgagaactacacaagcgaggcgcaccaaattttgtcccggtctaaccaccccaagttgggctacagctacgctatcgtaggcatcaatttgactgagatggcctatagcttacttaaatcagaggccttgaaatttcacctttataatctggtgccaggaatcccaaccatggagcattttcaccaattctactgctacttggtctacgagtttgacaagttctggtttgaggaagagcccgaatcaattatgtattttaatctctaccgagaaaagttccacgaaaaaatcaagggactgttgctggattgcaatgtggccctcacactgaaggtgtag

SEQ ID NO: 115672 - DNA, 507 bp, synthetic construct
  misc_feature 1..507: note = Description of Artificial Sequence: Synthetic coding sequence
  source 1..507: mol_type = other DNA
atgtttatctccctgtgggaatttttttatggccatttcttcaggttctggatgaagtggctgctgagacagatgaccggtaaatgcgaactgcagaggatattcgacacttacgtgggcgcccaacgaacgcatagaattgagaactctctcacatacagcaagaacaaggttcttcagaaagccacccacgtcgtgcaaagcgaggtcgacaagtatgtcgatgacataatgaaagagaaaaacataaatcctgagaaggatgcctcgttcaaaatatgcatgaagatgtgtctgctgcagattacaggttacaaacagctgtacttggacgtcgaatctgtccgtaaaagaccctacgattcagataaccttcagcacgaggagttgttgatgaaactgtggaatctgctcatgcccaccaagaagttgaatgcgagaatttccaagcagtgggcggaaatcggttttcaaggggatgaccccaaaacagacttccgtgggtag

SEQ ID NO: 115673 - DNA, 108 bp, synthetic construct
  misc_feature 1..108: note = Description of Artificial Sequence: Synthetic coding sequence
  source 1..108: mol_type = other DNA
atgtttatctctctgtgggagttcttctacggccacttctttagattttggatgaaatggcttctaagacaaatgaccgggaaatgcgagctacaacgaatcttttag

SEQ ID NO: 115674 - DNA, 1866 bp, synthetic construct
  misc_feature 1..1866: note = Description of Artificial Sequence: Synthetic coding sequence
  source 1..1866: mol_type = other DNA
atggctgcgttaaaggaagaccgctcatacggtctcagctgcggacgggtgagcgatggtagtaaagtgtcagtgttccatgtgaagctgaccgattccgccctgagggcgttcgagtcctatcgtgctcggcaggacagcgtcagcctcaggccctctatccggtttcaagggagtcaaggtcacataagtatcccccagccggactgtcccgctgaagcaaggaccttcagcttctacctctccaacatagggcgcgacaacccccagggttccttcgattgtatccagcagtatgtttcgagccatggcgaggtccacttagactgcctcggctccatacaggataagatcaccgtttgcgcaaccgatgatagttatcagaaagcaagacagagcatggcccaggccgaagaggaaactcgttcccgctccgccatagtgattaaggcaggtggaagatacctaggtaaaaaggtccagtttaggaagccagctccaggcgctaccgatgctgtcccatctcggaagagagctaccccaattaatctggcctctgccattagaaaatccggcgcaagcgccgtctcaggtgggtcaggggtatcacagagaccatttcgcgacagggtgctgcacctgctggcactgagaccttacaggaaggccgagctgctgctgcgcttgcagaaagatggcctgacccaggctgacaaggatgcgttagacggcctgttacagcaagtagcgaacatgagcgcaaaggatggcacttgcaccctccaagattgcatgtataaagatgtacaaaaggactggccaggatacagtgaaggggaccagcagttgttaaagcgcgttctggttcggaagctgtgccagcctcaaagtacgggttcactgcttggggaccctgcggcctcttctccccccggagagcgcggacgctctgcatcccctcctcagaaacgcctccagcctcctgactttattgatcctttagcaaacaagaaacctcgcattagccatttcacccagcgagcccaacctgccgtgaacggcaagctgggagtccccaatggtagagaggccctgcttccaacacctgggccacctgcctccaccgataccctgtccagcagcactcacttacctccaaggcttgagccaccgcgcgctcatgaccccctggccgacgtctcaaacgacctgggacattcaggccgggattgcgaacacggggaggccgctgcgccagccccaaccgtgcgtctcggactgccgctgctcacagattgtgcccagccaagcaggccccatggatcccctagccggtctaaaccgaagaaaaagtctaaaaagcacaaagataaagaacgggcggccgaagataagcccagagcccagttgccagactgcgctccagccacccacgcaactcccggtgctcctgccgacacgcccggcttgaatggaacctgctccgtgtcctctgtacccacttcaacctccgagacgccagattacctactgaagtacgctgctatcagttctagtgagcaacggcagtcttataaaaacgacttcaacgcagaatacagcgaatacagggacttacacgctcgcatcgagagaatcacacgacggttcacccagctggacgcacagctgcggcagctctctcagggtagtgaagagtatgagacaacccgcgggcaaatcctgcaagaatatcgcaaaatcaagaaaacaaacaccaactacagccaggaaaaacaccgctgtgaatacctgcattcaaagctggctcacattaagcgcctgattgcagaatacgatcagaggcaactccaggcatggccatag

SEQ ID NO: 115675 - DNA, 90 bp, synthetic construct
  misc_feature 1..90: note = Description of Artificial Sequence: Synthetic coding sequence
  source 1..90: mol_type = other DNA
attcatcggttggtggtcgcatttcaggacagtgtcagtctgcggccaagtatccggttccagggctcccagggtgaaatgtctctgtag

SEQ ID NO: 115676 - DNA, 1194 bp, synthetic construct
  misc_feature 1..1194: note = Description of Artificial Sequence: Synthetic coding sequence
  source 1..1194: mol_type = other DNA
atggaggagctgcaagaaccacttcgcggccagctgcggctgtgcttcacccaagcagctcggacgtcattattgctattgcggctcaatgatgcagcgcttagagcacttcaggagtgtcagagacagcaagtgaggcccgtcatagcctttcaggggcacaggggctatttgcggttgccaggccccggctggtcatgcctctttagttttatagtgagccagtgttgtcaggagggagctggaggctcccttgacctcgtttgtcagaggtttcttcgctctggccctaacagcttgcactgtcttggatccttgagagagcggttgatcatctgggcagcaatggatagcattcctgcaccctcatctgtccaggggcataatctgacagaagacgcccgacatccagaatcctggcagaataccgggggctatagcgagggggatgccgtgtcgcagccccagatggcactagaggaggtgagtgtatcagatcctcttgcaagtaaccaaggtcaaagcctgcccggtagcagtagagaacatatggcccaatgggaggtgcggagccagacccacgtcccaaacagagaacccgtacaggccttgccttcatctgccagtagaaagcgtctcgacaagaagcgaagcgtgcccgtcgccactgtggagttagaggagaagagattcagaactctgccacttgtgccatctcccctgcagggtctcaccaaccaggatctgcaagagggggaggattgggagcaggaggacgaggacatggatccccggctggaacacagcagctctgtccaagaagactccgagagcccttcgcccgaagatatccctgattacctgcttcagtacagagcgattcattccgccgaacagcaacacgcgtacgagcaggacttcgagacagactatgctgagtacaggatacttcacgcacgagtgggcactgcgtctcagaggtttatcgaacttggcgctgaaataaagcgggtcaggcgcggaaccccagaatacaaggtgttggaagataaaataattcaggaatacaagaagttccggaagcaatacccgtcctaccgggaagaaaaaagacgttgtgaatatctgcaccaaaagctttcccacattaagggtctgattttggagttcgaagaaaagaacaggggctcatag

SEQ ID NO: 115677 - DNA, 2889 bp, synthetic construct
  misc_feature 1..2889: note = Description of Artificial Sequence: Synthetic coding sequence
  source 1..2889: mol_type = other DNA
atggacacagacctgtatgacgaattcggtaattacataggtcctgagctcgactctgatgaagatgacgatgagctggggagagaaacaaaggacctggatgagatggacgatgatgacgacgatgacgatgtgggagaccatgatgatgatcatcccggtatggaggtggtcctccatgaagtgtatggtcccgaagtggagacaatcgtccaggaagaggatacgcagccattaaccgagcccataatcaagcctgttaaaacgaaaaagtttaccttaatggagcaaactcttcctgttacagtgtatgagatggatttcctggccgatctaatggacaactccgaactgatcagaaacgtcacactgtgcggccatttgcatcatgggaagacttgcttcgtagactgcctcatagaacagactcaccctgagatcagaaaaagatacgaccaagacctgtgttataccgacatcttattcaccgaacaggaaaggggcgtcggaatcaaatccactcccgtaaccgtggttctgcccgataccaaggggaagtcatatctcttcaatattatggacaccccagggcacgtcaatttttccgacgaggtgactgctgggctccggattagcgatggcgtggtgctcttcattgatgctgcagaaggggtgatgctaaacactgagaggctgatcaagcatgctgtccaggagcgcctcgccgtcacagtgtgcattaacaagatcgatcggcttatcttagagctgaaactgccccctacagatgcttattacaagctcagacatattgtagacgaggtaaacgggctgatctccatgtattcaacagacgaaaacctgattctgtctcccttgctgggcaacgtgtgcttcagttcctcacagtattctatctgttttacgctgggttcattcgccaaaatctacgccgatactttcggcgacattaattaccaggaattcgccaaacgcctctggggagatatctactttaacccaaaaacccggaaattcacaaaaaaggcaccgacctcctcttcccaaagaagctttgttgagttcatcttggaacccctatataagattttagcacaagtggtcggcgatgtcgacacatccctgcctcgtacattggatgagctcggaatccaccttacaaaagaggaattgaagctgaatattcgcccgttgctgagactcgtgtgtaagaagttctttggagaatttacagggttcgtggatatgtgcgtccagcacatcccgtctcccaaagtgggagccaaacccaaaatcgagcatacatacactgggggagttgattccgacctcggggaggccatgagcgactgtgatccagacggtcccctgatgtgtcacacaaccaaaatgtattcgaccgatgacggggtgcagttccatgcttttggccgagtgttgtccggaacaatccacgccggacaaccagtgaaggtattgggcgaaaattatactctggaggacgaagaagactctcaaatatgtactgtggggcgtctgtggatttccgttgccaggtatcacatcgaagtaaaccgagtccccgccggcaactgggtgctgattgagggcgtagaccagccaattgttaaaactgccactatcaccgagccccggggcaacgaggaagcgcagatcttcagacccctcaaattcaacaccacttcagtgataaaaattgcagtggaacctgtgaaccccagcgagctccctaagatgctggatgggctgcgtaaagtgaacaaatcctacccttctctcaccaccaaagttgaggagtcaggcgagcacgttattctgggcacaggtgaactatacctcgactgcgtgatgcacgacctgagaaagatgtattccgagattgacataaaagtcgcagaccctgtagtgactttctgcgagacagtggtggagacatctagcctgaagtgctttgccgagacccctaacaaaaaaaacaagatcacaatgatcgccgagccacttgaaaaaggactggcagaagacatcgaaaacgaagtcgtccaaatcacctggaaccggaagaaacttggagagttctttcaaacaaagtatgattgggatctcctggccgccagaagtatttgggcttttgggccagatgcaacaggaccgaacatactggtggatgacactttgccctcggaggtagataaggccctgctgggcagtgtcaaggatagtattgttcagggctttcagtggggtacaagagaggggccgttatgcgatgaactgatacggaatgtgaaattcaaaatcctggatgcggtcgtggcccaggagccattgcatcgcggtggcgggcagataattcccaccgctaggcgtgttgtgtacagcgcttttctcatggcaaccccaagactgatggagccctactacttcgtcgaggtgcaggctcccgctgattgtgtctcggcagtttacactgtgcttgcccgtagacgtggccatgttacgcaagatgcccctattccaggctctccgctctacacaattaaggcctttatcccagccattgattccttcggcttcgagactgaccttagaacccatactcaggggcaggcctttagtttgagcgttttccaccattggcaaattgtccccggcgatcccctggacaagagcattgtgataaggcccctggaaccccagcctgccccacacctggccagggaatttatgatcaagactcggcggagaaagggactatctgaggatgtttccatctcaaaattcttcgatgatcccatgttattggagctcgctaaacaagatgtggtgctaaactaccccatgtag

SEQ ID NO: 115678 - DNA, 2814 bp, synthetic construct
  misc_feature 1..2814: note = Description of Artificial Sequence: Synthetic coding sequence
  source 1..2814: mol_type = other DNA
atggacgacgacgacgacgatgacgacgtgggcgatcatgatgatgaccaccccgggatggaggtggtcctgcacgaggacaaaaagtattatccaactgccgaggaggtgtacggtcctgaggttgagaccatcgttcaggaagaagacactcagccattaactgaacctatcattaagccggtgaaaacgaaaaagtttaccctcatggaacaaactcttcccgtcacagtgtacgagatggactttctggctgacttgatggacaattctgagttgatccggaacgtcacactatgtggccacctgcatcacggtaagacctgctttgtagactgtttgatcgaacagacccacccagagattcggaaacgctacgaccaggacctttgctataccgatatcttatttaccgagcaggaaaggggcgtcgggatcaaaagcacaccagtgactgttgtgctcccagacacaaaagggaaatcttacctgtttaatattatggatacacccgggcatgtcaattttagtgatgaggtgacggccggattgagaatttctgatggagtagtgttattcatcgacgccgcagaaggggtgatgcttaatacggagcgtttaatcaaacatgccgttcaggagcggctcgccgtgactgtttgcataaacaagattgatcgattaatcctggagctgaagctgccgcccactgatgcctattataagctgagacacatagtggacgaggtgaacggcctgatctccatgtactccacagatgaaaacctcatactgagccccctgcttgggaatgtgtgcttctctagcagccagtactctatttgttttacactcgggtccttcgcaaaaatctatgcagatacttttggcgacattaactaccaggagtttgcaaagagactctggggggacatttacttcaatccgaagactaggaagttcaccaaaaaggcacccacttcttcatcgcaacggagctttgtagagttcattctggagccgctctacaaaatactggcccaggtcgtcggagacgtggatacgagcctgccgcggactcttgatgagctcggcatccacctcacaaaggaggagctaaagctgaatatccgaccactgctccgcctggtctgcaaaaaattttttggggaattcacaggttttgttgacatgtgtgtgcaacacataccatccccaaaggtcggcgctaagcctaaaatcgagcatacgtatacaggcggagtggactcagatctgggggaggctatgagcgattgtgaccctgacggacccctaatgtgccatacaacaaaaatgtattccactgacgacggggtgcagtttcacgctttcggacgcgtgctgtctggcaccattcacgccggccagcctgttaaagtgttgggagaaaactatacactcgaggatgaggaggactctcagatctgtaccgtgggtagattgtggatctcggtggctcgttaccacattgaagtaaaccgggtccccgccggaaactgggttcttatcgaaggagtggatcagccaatagtgaagacagcaacgataaccgaacctcgagggaacgaggaggcacagatattccgccccctgaaattcaataccacatccgtcattaaaatcgctgtcgagccggtgaacccaagcgaacttcccaagatgctcgacgggttgcggaaagtgaacaagagctacccatcactaacaactaaggtggaggaaagtggggagcatgttatactgggcaccggggagttatatctggattgtgtcatgcacgatctgagaaagatgtactccgagattgatatcaaggtggctgatcccgtggtcacattttgcgaaaccgtggtggaaacctcttcgcttaagtgcttcgctgagaccccaaataaaaaaaataaaatcacaatgatagccgagcctttagagaagggactggctgaagacatcgagaacgaggtggtgcagattacgtggaacagaaagaagctcggcgaattcttccagaccaagtatgattgggatctgttggcagccagatcaatctgggcttttggcccagatgccaccggcccgaatattctggtggacgacacgctgccatccgaggtggacaaggccctactcggcagcgtgaaagattccattgttcaaggattccagtgggggacccgagagggtccgttgtgtgacgagctaatacgcaacgtcaagttcaaaattctcgacgctgtggtggcgcaagaaccacttcacagaggaggcggccaaatcattccgacagcgaggcgcgtcgtatacagcgcctttcttatggcgaccccccgtctaatggaaccctactacttcgttgaagttcaggccccggctgactgtgtgtctgccgtgtataccgtgttggcccgcagaaggggccatgtgactcaggacgcccctatccctggctcccctttatataccattaaagcttttatccccgccatagactctttcggctttgagactgatctccgcacacacacgcaaggccaggcattcagcctgagcgtgtttcatcactggcagatcgtgcccggagaccctcttgataaatccatcgtaattcgaccactagagccgcagccagccccccacctggctcgggaatttatgatcaagactagacgccgcaaaggtctgagcgaggacgtgtccatctcaaagttcttcgatgatcctatgctgctcgagttagccaagcaggacgtcgttctgaattaccccatgtag

SEQ ID NO: 115679 - DNA, 2919 bp, synthetic construct
  misc_feature 1..2919: note = Description of Artificial Sequence: Synthetic coding sequence
  source 1..2919: mol_type = other DNA
atggacaccgatctgtatgacgaatttggaaattacatcggtccagagctggatagcgacgaggacgacgacgagctcggacgcgagacaaaagatctggatgaaatggatgatgacgacgacgatgacgatgttggagaccacgacgacgatcatcccggcatggaggtcgtcctgcacgaggacaaaaagtactaccccaccgcagaggaggtttacggtcctgaggtagagaccattgttcaggaggaggacactcagccgctcactgaacccatcatcaagcctgtcaaaacaaaaaaattcacattaatggaacagaccctccctgtcaccgtttacgagatggattttctggccgacctgatggacaactcagaactcattaggaacgtgaccctctgcggacatctgcatcatggaaagacatgtttcgtcgattgcctgatagaacagactcaccccgagatcaggaaacgatatgatcaggacctttgttatactgacattctgtttactgagcaagagcgaggcgttggcattaaaagcacccccgtgaccgtcgtgctgcccgataccaagggaaagagttatctgttcaacataatggataccccgggacacgtgaacttttctgacgaagtaacagctggcctccgcataagcgacggcgtcgtgctcttcatcgatgccgccgagggagtcatgcttaacacagagcgcctgatcaagcatgctgtacaggaaaggctcgctgtcacagtttgcatcaataaaattgatcgcctgatcctggaactgaaactcccccccactgatgcctactacaagctcaggcacatcgtagacgaagtgaatggacttatctctatgtacagcacagatgagaatttgatcttgagcccattactggggaacgtgtgtttttcctccagccaatattctatatgcttcaccctaggctcctttgctaagatttatgccgacaccttcggggacatcaactaccaggaattcgcaaagagactctggggtgacatttacttcaacccaaaaacccgcaagtttaccaagaaggcccctacaagttcctctcagagaagtttcgtagagtttatattagagcctctctataaaattctcgcacaggttgtaggtgacgtggacacaagccttccacgcacccttgatgagctcgggatccatctcacaaaggaggagctcaaactgaacattagaccactgttgcgccttgtgtgcaaaaagttcttcggcgagttcacaggctttgttgatatgtgcgtgcagcacatccccagccctaaggtaggggcaaagccgaagatagaacacacctacaccggaggcgtcgactccgacttgggcgaggccatgagcgactgcgaccccgacggtccactaatgtgtcacaccaccaagatgtacagtacagacgacggggttcagtttcatgctttcggcagggttctcagcggcaccatccacgccgggcagccggtcaaagtactgggcgaaaactatactctggaagatgaagaggactcgcagatctgcactgtgggtcgtctgtggatttcagtggccaggtaccatatcgaagtgaatagagtccctgccggaaactgggtacttattgagggtgtggatcagccaatcgttaagactgctactattactgagcccaggggcaacgaagaggctcagatttttcggcccttgaagttcaacactacaagtgtgattaagattgcggtagagcccgtgaacccaagtgagcttcccaagatgttggacggactgagaaaagttaataaatcatatccctctctgacaaccaaggtggaggagtccggcgaacacgttatacttggcacaggggaactgtacctagattgtgtgatgcacgacctccgcaagatgtactctgaaattgacattaaggtggcagacccagtcgtgactttttgtgaaacggtcgtagagacatcatcactcaagtgttttgccgaaaccccaaataaaaagaacaagatcacaatgatcgccgaacccctggagaaaggactagcggaagacattgaaaacgaggtagtccagattacatggaatcggaaaaagctcggggagtttttccaaacaaagtacgactgggacctcctagcagctagaagtatctgggcctttggcccagatgccacaggcccaaatatcctggtggatgatacgctgccctccgaagtggacaaggctctgctgggttctgtcaaagattcaatagtgcaggggttccaatgggggactcgggaagggcccctctgtgatgaactgattcgtaatgtgaaattcaagatcctggacgccgtcgtggctcaagaacctctgcatagaggtggcggtcaaatcatccctaccgctcgcagagtggtatattcagcctttctgatggctacgcccagactaatggaaccttattacttcgtggaagtgcaggccccagcagactgtgtcagtgccgtgtacaccgtactggcccggcggagaggccacgtgacacaggatgccccgatccccgggtctccgttatacaccatcaaagcattcataccagcgatcgattctttcgggtttgagaccgatctccggactcacacacaggggcaggcattcagcctctccgtgtttcaccactggcaaatagtaccaggggatcctcttgataaatccatagtgattagacccctggagccccaacctgcacctcaccttgcccgcgagtttatgattaagacacgccggagaaagggtctaagtgaggacgtcagcatcagtaagttctttgacgaccccatgctcttggaactcgccaaacaggatgtcgtcctgaactatcctatgtag

SEQ ID NO: 115680 - DNA, 1923 bp, synthetic construct
  misc_feature 1..1923: note = Description of Artificial Sequence: Synthetic coding sequence
  source 1..1923: mol_type = other DNA
atggccgcaggtggtacgggcggcctgcgggaggaacagcgatacggcctttcgtgcggcagactgggccaggacaatatcactgtattacatgtcaaactcacagagacagctatccgtgcactcgagacataccagagccacaaaaacttaattccattcaggccctccatccaattccagggactccatgggttggtcaaaatccctaagaatgatcccttgaacgaagtgcataacttcaacttttacttgtcgaatgttgggaaggacaacccacaagggtcattcgactgcatccaacaaacattcagtagcagcggggcatcccagctgaattgtctgggattcatccaggacaaaattaccgtatgcgccacaaacgattcataccagatgactcgggaaagaatgacacaggccgaggaagagagcaggaacaggtcaaccaaagtcattaaacccggtggaccctatgtggggaaacgtgtccagatacgcaaagcaccacaggcagtctcagatacggttcccgagaggaaaagatcgacaccaatgaaccccgctaataccatcaggaaaacccacagttcttcaactatttcacagcgcccctacagagatcgcgtgatccacctgctggccttgaaggcctacaagaagccagaactcctcgccaggctacagaaagatggagtgaatcagaaggacaagaatagcctgggcgctatactgcaacaggtagccaatctgaatagcaaggacttgtcctacacattgaaggactacgtgttcaaagagctgcaaagagattggcccggatactctgagatagatagaaggagcctcgaaagtgtgctgtcacggaagctaaatccaagtcaaaatgccgccgggacaagtagaagcgaaagtcccgtgtgttcttcacgagatgcggtctccagtcctcagaaaagactgctcgattccgagtttatagatcccctgatgaacaagaaggctaggattagccacctgactaatagggtgcccccgactcttaacggtcacttaaatccgacctcagaaaaatccgccgcagggctcccactgcccccagctgccgcggccatccccacaccgcctccacttcccagtacatacctccccataagccaccctcctcaaatagtgaattcaaactctaatagtccttcaactcctgagggccgcggtacccaagacctccccgtagattcatttagccagaacgactctatttacgaagatcagcaggataagtataccagcagaacctcgctagaaaccctgccgcccggcagcgtactgctgaaatgcccaaaacctatggaggagaatcattccatgagccataaaaagtccaagaagaaatccaagaagcacaaagaaaaagatcagatcaaaaaacatgatatcgagactattgaggaaaaagaagaggacctaaagcgtgaggaggaaattgcaaagctgaataattcatctcccaattcatctggcggagtgaaagaggactgtactgcatcgatggaaccttccgctatcgagctgccggactaccttattaagtatatcgctattgtgagttatgaacagagacagaattataaggatgatttcaatgctgagtacgacgaatacagagctctgcatgcccgaatggaaaccgtggccagacggttcatcaaactcgacgcccagcggaagaggctgtcaccagggtccaaagagtaccagaatgtacacgaggaggtgttacaggaataccagaagattaagcaaagctcccccaactaccatgaggagaagtaccgctgcgaataccttcacaacaagctcgcccacataaaacggctgatcggcgaatttgatcagcagcaggctgagagctggtcttag

SEQ ID NO: 115681 - DNA, 1173 bp, synthetic construct
  misc_feature 1..1173: note = Description of Artificial Sequence: Synthetic coding sequence
  source 1..1173: mol_type = other DNA
atggccgcggggggcaccggggggctgagagaagagcagaggtatgggttgtcctgcggccggctgggacaggataacatcacagtcctccacgtgaaactgacagagacagcgatacgtgctctcgagacctatcagtcccataagaatctaatccctttcaggccctcgattcagttccaggggctgcacgggctggtcaaaatcccaaaaaacgaccctctgaacgaagtccacaacttcaatttctatctgtcaaacgtcggcaaagacaatccacaggggagctttgactgcattcaacaaacattctcaagctccggcgcatcgcaactgaactgtctcggcttcatccaggacaaaatcaccgtgtgtgccacaaacgattcctaccagatgacccgggagcgcatgacacaaatagtgaattctaatagtaattctccatcaaccccagagggccgagggacacaggatttgcccgttgacagtttcagtcaaaatgactccatttacgaagatcagcaggacaaatacacgagtcggacctcattggagactctcccaccgggaagtgttctgctgaagtgcccaaaacctatggaagagaatcatagtatgagtcataaaaaatccaagaagaagtcaaaaaaacacaaggaaaaggatcagatcaagaagcacgacatagagactatcgaagaaaaggaggaggatttgaaacgcgaggaggagatcgcaaaattgaataactcttccccaaacagtagcggaggcgtcaaagaagactgcaccgcgagcatggagccttcggctatcgaactgcccgactatctgatcaagtacatcgctatcgtgagctatgagcagcgccagaactacaaggacgactttaacgctgagtatgacgaataccgcgctctccacgctcggatggagacggtggctcgtcgctttataaagcttgacgcacagaggaaaaggctttccccaggctcaaaggagtaccaaaatgtccatgaggaagtcctgcaggaatatcagaagataaaacagagctcccccaattaccatgaggaaaagtatcggtgtgaatatctccataacaagctagctcacatcaagaggctcatcggagagtttgaccagcagcaagcagaatcctggtcctag

SEQ ID NO: 115682 - DNA, 1644 bp, synthetic construct
  misc_feature 1..1644: note = Description of Artificial Sequence: Synthetic coding sequence
  source 1..1644: mol_type = other DNA
atgaggcaaaaacgcaaaggagacttgtctccggccgaattgatgatgttgacgatcggcgatgttatcaagcagctaatcgaggcccacgaacagggaaaggacatagatttaaataaggttaagacaaaaacagccgccaagtacggtttgagcgcccaaccaagactggttgacatcatcgccgcagtgcccccccagtatcgcaaggtcttaatgcctaagcttaaggccaagccaattcggacagctagtgggattgccgtggtggccgtgatgtgcaagcctcacagatgcccccatattagtttcacaggcaacatctgcgtgtactgtcccggaggtcctgactcagactttgaatattcaacccaatcttacaccggctatgaacccacatctatgcgcgccatacgagcccggtacgacccatttctgcagacccggcatcggatagaacagctcaaacagcttggacacagcgtagacaaagtggaatttattgtgatgggaggtacgtttatggccctacccgaggaatatagggattatttcattcgcaacctgcacgacgccctttcaggccatacgtccaacaatatatatgaggcagtgaagtattctgagcgctctctgacaaagtgcataggcatcacaatcgaaaccagacctgattactgcatgaagcgtcatttgagcgacatgctaacttacggctgcactcggctcgaaattggcgtccagtctgtgtatgaggacgtggccagggatactaaccgaggacacacagtgaaggccgtgtgcgagtccttccatctcgccaaggactccggattcaaggttgtggcacacatgatgcccgacctgcctaatgtgggcttggaacgggatatcgaacagttcaccgaatttttcgagaatcccgcttttcggcccgatggtctgaaattataccccacattggtgatccggggcacagggttatacgaattgtggaaatcgggccgctataagtcctacagccctagcgacttagtggaactggtggcacggatcctggccttagttcctccttggacccgtgtgtatcgggtccaaagggacatacccatgccattggtcagttctggcgtggagcatggcaacctccgggagttggccttggctcggatgaaagatctgggcatccaatgtagggacgtgagaacccgtgaggtgggcatacaggagatacaccataaggtgcgcccttaccaagtagaactggtgcgccgggattacgttgccaacggggggtgggagacctttctgtcgtatgaagatccagatcaggatatcctgatcgggttgctacgtcttcggaaatgtagcgaggaaacctttaggttcgaactcggcggaggcgtcagcatcgtgagggagctgcacgtgtacggctccgtcgtgcccgtttccagcagggaccctactaaatttcagcaccagggattcggtatgctcctcatggaagaggcggagcgcatcgctagggaggagcatggtagtgggaaaattgccgtaattagtggggtggggaccaggaactactatcgaaagattggttacaggctacaggggccttatatggtaaaaatgctgaaatag

SEQ ID NO: 115683 - DNA, 1368 bp, synthetic construct
  misc_feature 1..1368: note = Description of Artificial Sequence: Synthetic coding sequence
  source 1..1368: mol_type = other DNA
atgtgcaagccccacaggtgcccccacatatccttcactgggaatatttgtgtgtattgtcctggcggacccgattctgatttcgagtacagtacgcaaagctacactggatacgagccaacaagcatgcgcgcaattcgcgccagatacgacccctttctgcaaaccagacatcgcatagaacagctgaagcagttgggccactctgtcgataaggtggagtttattgtgatgggaggtacatttatggccctgccagaggagtacagggattacttcatcaggaacttgcacgatgctctgagcggacatacatcaaacaacatatacgaggctgtgaaatacagcgagcggagcctgactaaatgtatcggcattactatcgaaactcgcccagattactgcatgaagaggcatctgtccgatatgctcacctacgggtgcacaagactcgaaataggcgttcagagtgtctacgaggacgttgcccgggacacaaaccgagggcacacagtcaaagccgtctgtgaaagtttccatctggcaaaagattctggttttaaggttgtggcccatatgatgccagatctaccaaacgtggggctggaaagagatattgagcaattcaccgagtttttcgagaacccagcttttcggccggatgggctgaagctgtatccaacactagttatcagaggtaccgggttgtacgagctctggaagtcgggtcggtataaaagctattcccccagcgatctggtggagttagtagcgagaattctggcactggtgccaccctggaccagagtttacagagtacaacgcgatatcccgatgcccctggtctctagcggcgtggagcacggaaacctgcgtgaactggcactggcccgaatgaaggatctgggaattcagtgccgcgatgtcaggacgcgagaagttggcattcaggagattcaccataaggtgagaccttatcaggtagaactcgtgcgacgggactatgtggcaaatggcggatgggaaacgttccttagctatgaagaccccgaccaggacatcctcattggacttctccggctgcgaaaatgtagcgaagaaacttttcgtttcgaactggggggcggagttagtattgtgcgggagctgcacgtctacggttccgtcgtaccagtctcttcaagagacccgacaaaatttcagcaccagggctttgggatgctgctgatggaagaggccgagcggatcgcccgtgaggaacacggttcaggaaagatcgctgtgatctccggggtgggcacacggaactactatcgcaaaattggctatcggctgcagggcccatatatggtgaaaatgctaaagtag

SEQ ID NO: 115684 - DNA, 342 bp, synthetic construct
  misc_feature 1..342: note = Description of Artificial Sequence: Synthetic coding sequence
  source 1..342: mol_type = other DNA
atgatgctgaccatcggagacgtgataaagcaactgatcgaggctcatgagcagggtaaagatattgacctcaacaaggttaaaacgaagaccgccgccaagtatggcttgagcgcacagccaaggctggtcgatatcattgcggcagtcccccctcagtaccgcaaagtcctcatgcctaagttaaaagccaagccaatacgcaccgcatcagggatcgccgtcgtggccgtgatgtgtaagcctcacagatgcccccacatatcctttacaggaaacatttgcgtgtactgccctggcggaccagattctgatttcgaatattccacacagagctactag

SEQ ID NO: 115685 - DNA, 1602 bp, synthetic construct
  misc_feature 1..1602: note = Description of Artificial Sequence: Synthetic coding sequence
  source 1..1602: mol_type = other DNA
atgatgctgacaattggagacgtgatcaagcagctaattgaagcccatgaacagggaaaagacatagacctcaataaagtaaaaaccaaaacggccgccaagtatggcctgtccgcccaaccccggctggtcgacattatagccgccgtccctccacagtatagaaaggtgctcatgcctaagctcaaggccaagccgatccgtacagcgagtggcatcgcagtggtcgctgtcatgtgtaaaccgcacaggtgtccacacattagctttaccggtaacatttgcgtgtactgccccggcgggcctgatagtgatttcgagtacagcacgcaaagctatacaggatacgaacctacaagcatgcgggccatccgcgctaggtacgatcccttcttacagaccagacacagaattgagcagctcaagcagctgggtcattctgttgacaaagtggaatttatagtaatgggcgggacatttatggccttgcctgaagaataccgcgactacttcatccgaaatctgcatgatgccctttcgggacatactagtaataacatatatgaggctgtaaagtactctgagcggtctcttactaagtgtattggcatcaccattgagacacggcccgattattgcatgaagcgccacctgtcagatatgcttacctacggatgcacacgcctggagattggggtccagagcgtatacgaagatgttgcccgagatactaacaggggccatacagtgaaggcagtatgtgagagcttccatcttgccaaggatagtgggttcaaggtggtggcccacatgatgccagacttgccgaacgtggggctggaacgcgacatcgaacaatttacagagttcttcgaaaatcctgccttcaggcccgacggactcaagctatacccgactctcgtgatacggggaacagggctgtatgaactgtggaagagtggcaggtataaaagttatagccccagcgatctggtggagttggtggcacgtatcctagcactcgtccccccctggacgcgtgtttacagggtacaaagggatatacctatgcccctggttagtagtggtgttgaacatgggaatctcagagaactcgctctggcccgcatgaaggacctaggaatccaatgtcgggatgtgcggaccagggaggtcggcatccaggagattcaccataaagttcgcccttaccaggtggagctggtgagacgcgattatgtggccaatggcggctgggaaaccttcttgagttatgaagatcctgatcaagatatactgatcggcctgctgagactgcggaaatgcagtgaagaaaccttccgctttgaactgggaggtggagtgagcattgtgcgggaactccacgtatacggcagcgtcgtacccgtgtctagccgcgatccgacgaaatttcagcatcagggatttggcatgctgctgatggaagaggctgagagaatcgcgagggaggagcacgggtccggaaagatcgccgtcatctctggagtcggtactcgaaactactatcgaaaaattgggtacagattgcagggaccatacatggtcaaaatgctcaaatag

SEQ ID NO: 115686 - DNA, 576 bp, synthetic construct
  misc_feature 1..576: note = Description of Artificial Sequence: Synthetic coding sequence
  source 1..576: mol_type = other DNA
atgatgctcaccatcggggatgtgataaagcagctcatcgaggctcatgagcaggggaaggatatagacttgaacaaagtgaaaacgaaaaccgctgctaaatacggcttgagcgcgcagccgagactggtggatatcatagcagcagtcccacctcagtacaggaaggtccttatgcccaaactcaaagctaagcccattaggaccgccagcggcatagcggtcgtggcagtaatgtgcaagccccaccgttgcccacacatctcattcacagggaacatctgcgtgtactgtccaggcggccctgactctgactttgaatactccacacagtcatacaccggatatgagccaacaagcatgagagccattagggcgcgctatgatcctttcctgcagaccaggcaccgcattgagcaactgaaacagctgggccattccgtagacaaggtagagtttatcgtgatgggcgggacctttatggcgcttcccgaggagtatagggattatttcatccgtaacttgcacgatgcgctgagtgggcacactagcaataatatctatgaagcggtttag

SEQ ID NO: 115687 - DNA, 1287 bp, synthetic construct
  misc_feature 1..1287: note = Description of Artificial Sequence: Synthetic coding sequence
  source 1..1287: mol_type = other DNA
atgagtacacatcaattctatcgcaaatatatgtgccccacaagcatgagagccatcagagccagatatgatccctttcttcagacaaggcacaggattgagcagctcaagcaactgggccattccgtagataaagtggaatttatcgtgatgggcggcacttttatggctctacctgaagagtaccgagattattttatacgcaacttacacgacgccctgagtggccatacttcaaacaacatctatgaggcagtgaaatatagtgagcggtctctgactaaatgtatagggattaccattgaaacaaggcctgattactgcatgaagcgacacctctcagatatgcttacttatggttgtacccgtctggaaattggtgtccaaagcgtatacgaagacgtggctcgggacacaaatcgcggccacaccgtgaaggccgtctgcgagagctttcatctggccaaggattccgggttcaaagttgttgctcatatgatgccagacctgcccaacgtcgggctcgaacgcgatatagaacaattcacagagttctttgagaatccggccttccgccccgatgggctgaagctgtatccaaccctggtgattaggggcactggtctttacgaactgtggaagtcaggtaggtacaagtcttactcaccctctgacctggtggaactggtggcaagaatattggctttagtccccccttggacacgcgtgtatcgtgtacagcgcgacataccaatgccactggtttcttccggggtggaacacggcaacctgcgggagctcgccctcgccagaatgaaggatcttgggattcagtgtcgggatgtgcgcacgcgcgaggtgggaattcaggagatccaccacaaagtccgaccataccaggttgagctggtcaggagagattacgtcgcaaatggaggctgggagaccttcttatcctatgaagatcctgaccaggatattctcatcggcttgctgcgcctacggaaatgttcagaagagaccttccgcttcgaacttggcgggggggtgagtattgtgcgcgagctacacgtatatgggagcgtggttcctgtcagctcacgtgaccccaccaagtttcagcatcagggattcggaatgttactgatggaagaagcggagaggatagctagggaggaacacggcagcggcaaaatcgctgtcataagtggcgttggcacgcgcaactactatcgcaagataggctaccgcttacaggggccttatatggtgaaaatgctgaaatag

SEQ ID NO: 115688 - DNA, 1257 bp, synthetic construct
  misc_feature 1..1257: note = Description of Artificial Sequence: Synthetic coding sequence
  source 1..1257: mol_type = other DNA
atgtgtcctacttcaatgagagcaatcagggccaggtacgatcccttcttacagactagacatagaatcgagcagcttaagcagttgggacactcagtcgataaagtcgagtttatagtcatgggcggcaccttcatggctcttcctgaggagtaccgtgactacttcatcaggaacctacatgatgcgctgagcgggcatacctcaaataatatctacgaggctgtgaagtactcagaaagaagcctcaccaaatgcatcgggatcactatagagacacgccctgactactgtatgaagagacacctgtccgacatgctgacttacggttgtacccggctagagattggcgtgcagtccgtgtacgaggatgttgcgcgagatacaaaccgggggcacacagtgaaagcagtgtgtgaaagcttccacttagctaaagacagtgggtttaaagtcgtcgcccatatgatgcccgacctgcctaatgtagggctggagcgggatatcgagcagttcacggagtttttcgagaaccccgccttcagacctgatgggctcaagctgtatccaactttagttattcgcgggacaggactctacgagttatggaagtctggaagatataagtcctactccccttctgatttagtggagctagtggccagaatcctcgccctagtcccaccctggactagggtctatagagtgcaaagagacattcctatgcctctggtatcctctggggttgaacacggcaacctccgagagctggctctagccagaatgaaggacctgggaatccagtgtcgcgacgttagaaccagagaggtgggcatccaagagattcaccataaagttcgtccctatcaggtcgagctggtccggcgagactatgtggccaatggtggctgggagaccttcctctcgtatgaggatcccgaccaagatatacttatcggccttttacgactgaggaagtgctccgaagagactttcaggttcgaattgggagggggggtgagcattgtgcgggagttgcatgtttacggctcagttgtgcccgtcagctctagagaccctactaagtttcagcaccaaggttttggaatgcttctgatggaagaggcagaacggatagcaagagaggagcatggcagcggcaagattgcagtgatatccggcgtgggcacccggaactactaccggaaaattggttacagactgcagggcccatacatggtgaaaatgcttaaatag

SEQ ID NO: 115689 - DNA, 1275 bp, synthetic construct
  misc_feature 1..1275: note = Description of Artificial Sequence: Synthetic coding sequence
  source 1..1275: mol_type = other DNA
atggccgccgtagcgacctgcggtagtgtggccgcatccaccggcagcgctgtggctacggccagtaagtctaatgtcactagtttccagcgcaggggtccccgggccagcgtaaccaacgacagtggcccccgactagtgagtatcgccggaaccagaccgtctgttcgtaacggtcagctgctagtatcaaccggactgccagctttggaccaactgcttgggggcggcctcgccgtgggaacagtactgctgattgaggaggataagtacaacatctatagcccgctgttgttcaaatactttctcgcagagggcatagtcaacggacatacactgctggttgcctctgccaaagaagacccagccaatattttgcaggaacttcctgcccctttgctggacgacaagtgcaaaaaggagtttgacgaagatgtttataatcacaagactcccgagtcaaatattaaaatgaaaatcgcctggcgctaccagctgttgcccaaaatggagattggacctgtctcttccagcaggtttggacattattatgacgcaagtaaaaggatgccccaggaactgatagaagcctccaactggcatggcttcttcctgcccgaaaagattagcagcaccttaaaagtcgaaccttgctcacttacaccagggtatacgaagttgctgcagttcatacagaacatcatctatgaagaaggcttcgacggctcaaacccccagaagaagcagcgcaacattctgaggatcgggattcagaacctgggttcaccactgtggggggatgatatttgctgtgctgagaacggtggaaattctcattctttgaccaaattcctatacgtcctccgcggactcctccgcaccagcctctcagcctgtatcatcaccatgccaacacaccttattcaaaacaaggcgatcattgctcgtgttacaacgctgagcgacgtggtagtcggactggagagtttcattggttcagagcgggaaaccaatccactgtacaaagattatcacggtctgatccacatacgacagataccccgacttaataacctcatctgcgatgaaagcgatgtgaaagatttagcgtttaagctgaaaagaaaactgtttaccatcgaacgtctgcatctgccaccggatttaagcgataccgtctccagatccagcaaaatggacctcgccgagtctgcaaaaaggctgggccctggctgtggcatgatggccggcggcaaaaaacatctggacttctag

SEQ ID NO: 115690 - DNA, 1431 bp, synthetic construct
  misc_feature 1..1431: note = Description of Artificial Sequence: Synthetic coding sequence
  source 1..1431: mol_type = other DNA
atggcagccgtggctacttgcgggagcgtggctgcaagtaccggctccgcggtggctacagcatccaaatcaaatgtgacatcgtttcagcgcagaggcccaagggcatcagtcactaatgactcaggacccagattggtatcaatcgcgggaacacgcccttcggttcgcaacggccagctgttggtgagcactggtcttcccgccttagaccagctgctcggcggcggcctggctgttgggacagtgctgctgatcgaggaggacaagtacaatatctattcgcctttattgttcaagtactttcttgcagagggcattgtcaacgggcacacgctgctggtagcatccgctaaggaagatccggcaaatatattgcaggaactgcctgctcctctcctggacgataagtgtaaaaaggagtttgatgaagatgtctacaatcacaagactcctgagtcaaacataaaaatgaagattgcatggagataccagctcctgcccaagatggaacagattggccccgtgtcctcttcaagatttgggcactactacgacgctagtaagcgcatgcctcaggagttgatcgaagcgtctaactggcacggatttttcttacctgaaaaaattagctctaccctaaaggtggaaccttgcagtcttacacctgggtatacaaaactgcttcagtttattcaaaacatcatttacgaagaggggttcgacgggagcaatcctcaaaaaaaacagcgcaacattcttagaattggcatccagaacttggggagcccattgtggggggacgatatttgttgtgcagaaaacggagggaactctcattcacttactaagttcttgtatgtgctgagaggactcctaagaacctccctgagcgcctgtataataacaatgcctactcatctgattcaaaataaagcaatcatcgccagagtgactaccctgtctgacgtggtggtaggtcttgagagctttatcggctcagaacgagagacaaatcctctgtacaaggactaccacgggctgatccatattcggcagatcccccggctgaacaacctgatatgtgatgaatccgacgtcaaggatctagcctttaagctgaagcggaagctgtttacgatcgagtgggttcaagataactatctccgacaggaacgaaatatctatccccccgggttttcctaccttctgaaacagaaagattctgcatggggagaaggctctttgcagcatagtacctttctcatgtccttcctagcaaaagcaactgctttcgcaagccgcctggttagacattccgaacccttaaaacaaaatgggtctgggaggattcggcaggcggctggaccccgactatggcatgacggccggcggcaggaagcccccgggctcttaggaattccaccctag

SEQ ID NO: 115691 - DNA, 1608 bp, synthetic construct
  misc_feature 1..1608: note = Description of Artificial Sequence: Synthetic coding sequence
  source 1..1608: mol_type = other DNA
atggccgccgtggcaacctgcggtagtgtggctgcctctacagggtctgcagtagcaaccgcaagcaaatctaacgttacgtcttttcagcggcgcggaccacgagccagtgtgacaaatgattccggcccccggcttgtctcgatcgctggaaccagaccatccgtgaggaacggccagctgctggtgtctacaggactcccagctctggaccaactccttggcggcggcttagccgtgggcaccgtgctcctcattgaggaagacaaatacaatatttacagccctctactctttaagtatttcttggccgagggtatcgttaatggccacacactgctggtggcaagcgctaaggaagatcccgctaacatcctccaagaactgccagcgcctctgctggatgacaaatgcaaaaaggaattcgacgaagatgtatacaatcacaaaacgccagaatcaaatataaaaatgaagatagcgtggcgttaccaactgttgccgaagatggagattggaccagtgagttcttcacgcttcgggcactactacgatgctagtaaacggatgcctcaggaactgattgaggcttctaattggcatgggtttttcctgccagagaaaatcagctccacgcttaaggtcgagccctgcagtctaactcccggctatactaagctgcttcagtttatccaaaacataatctacgaggagggatttgacggaagtaaccctcagaaaaaacaaagaaatattctgaggatcgggatacagaacctgggaagtcccttgtggggagacgacatttgttgcgcggagaacgggggtaactcacacagtctaaccaagttcctgtacgtactgcgtgggctgctgaggacatctctgtccgcctgtattatcaccatgcccacacacctaatccaaaacaaggccattatcgcaagagttacaaccctctccgacgtggtcgtgggcctcgagtcctttataggtagtgagagggagactaacccactctataaggactaccacggactaatccatatacggcagattccgcggctgaataacttgatctgtgacgaaagcgacgtcaaagatctggctttcaaactaaagagaaaactgtttactatcgaggccggggtacaatggcacgatctggggtcccggcaacctcggctgttgggttcctcgaacagccccgccagtgctagcctggtggcggggatcactggtgctcaccaccatacccagctgatcttcgtgtttctggtcgagatgggatttcaccacgtagggcaggccggcctcgagctgttgacatcgggggacagcagtgcatcggcctcccagagcgccggaataaccgggatgtcctacagagcacggccacgcgcactgtatttcaaagaaaataagtccaaggtgggcgctcgtcagctgctggaaacacgtgaggagcacctttcatcgcggctcctcatcctgacacaagctgaaaggctgtgcatgggacgcagattctttaccgcttttcacattttcaacgagctcccttgtaaaggcgattgcatatgcctgcagacatgccagacacagtag

SEQ ID NO: 115692 - DNA, 840 bp, synthetic construct
  misc_feature 1..840: note = Description of Artificial Sequence: Synthetic coding sequence
  source 1..840: mol_type = other DNA
atggaagctgtggtaaacctctatcaggaggtaatgaagcatgccgaccctagaatacagggctaccctttgatgggaagccccttactgatgacaagtatcctcctgacctacgtgtactttgtgttatcactggggccgagaattatggcaaacaggaagccattccagctgcgagggtttatgatcgtgtacaatttctcactcgtggcgctcagcctatacatcgtgtacgagttcctcatgtccggatggcttagtacctatacctggcggtgtgaccctgtagactactcaaatagccctgaggctctccggatggtccgagtggcatggttatttctcttttctaagtttatagaactgatggacaccgtaattttcattctgaggaaaaaagacggacaggtgactttcctgcacgtcttccaccattctgtacttccttggtcctggtggtggggcgtgaaaatagcccccggaggaatgggcagcttccatgcgatgatcaattcttcagtgcacgtcatcatgtacctgtactatggcctctctgctttcggtccagtagcccagccctacctctggtggaaaaagcacatgactgctattcagctgattcagtttgtgctcgtcagtctccatataagccaatactattttatgtcgtcttgcaattatcagtatccagtgataattcacctgatctggatgtacgggactatcttcttcatgctcttctccaatttctggtaccatagctacactaaagggaagcgccttccaagagccctccagcagaatggcgcaccaggcatagccaaggttaaggccaattag

SEQ ID NO: 115693 - DNA, 759 bp, synthetic construct
  misc_feature 1..759: note = Description of Artificial Sequence: Synthetic coding sequence
  source 1..759: mol_type = other DNA
atggaagcagttgttaacctgtaccaggaggtgatgaaacacgccgatccacgcatccagggatacccactgatgggatcccccctccttatgacgtcgatactcctgacctatgtgtatttcgttctgagtttaggcccaaggattatggctaacaggaaaccgttccaacttagaggattcatgattgtctacaacttctccttagtggctctcagcctctatatcgtgtacgaaatggtgagggttgcttggctgttccttttctccaagtttatcgagctgatggacaccgtgatatttatcctgaggaagaaagatgggcaggtgacatttctccatgtgtttcaccattcagtgctgccgtggagctggtggtggggcgtcaagatcgcccccggcgggatggggagctttcatgccatgatcaattcgagtgtccacgtcattatgtacctttactatggcctgtcggcattcgggcctgtcgcacagccatatctgtggtggaagaaacatatgaccgccatacagcttatacagtttgtactcgtgtccctgcacatatcacagtattacttcatgagtagctgcaattatcagtatcctgttattattcatttgatctggatgtatggaacaatcttctttatgctattctcaaacttctggtatcactcctacaccaagggtaagcgcctacctcgagccctgcagcaaaacggggctccaggcattgcaaaggttaaggccaattag

SEQ ID NO: 115694 - DNA, 891 bp, synthetic construct
  misc_feature 1..891: note = Description of Artificial Sequence: Synthetic coding sequence
  source 1..891: mol_type = other DNA
atggagcaccttaaggccttcgacgacgagatcaatgcctttctggataatatgtttggtccgcgagatagccgcgtgagaggatggtttatgctcgactcctacctgcctacctttttcttaaccgtgatgtacctcctttcgatttggctgggcaacaagtacatgaagaacaggcccgcgctgtccctcagaggaattttaactctgtataatctggggatcacccttctctcagcctacatgttggctgagctaattctcagtacttgggagggcggctacaatttgcagtgccaggaccttacaagcgcaggcgaagccgatattagggtcgccaaagtactgtggtggtattatttctctaaatcggtggagtttctcgacacaatcttcttcgtgttgagaaaaaaaacctcacagatcacctttctgcatgtttaccatcatgccagcatgttcaatatttggtggtgcgtgctgaattggataccctgtgggcaatccttctttggccctaccctgaatagctttatccacattcttatgtatagttactatggcctgtctgtgtttccctccatgcacaagtatttatggtggaaaaaatatctaacccaggcccagctggtgcagttcgtacttaccattacccacacgatgtcagccgtcgtaaaaccatgcggatttccatttggctgtctgatcttccagtccagttacatgctcacactcgtcattctgtttctgaatttttatgtccaaacctataggaagaaaccaatgaagaaggatatgcaggaaccaccagcgggcaaagaggtcaagaacggctttagcaaggcctactttacggctgctaacggagtgatgaacaagaaggcgcagtag

SEQ ID NO: 115695 - DNA, 813 bp, synthetic construct
  misc_feature 1..813: note = Description of Artificial Sequence: Synthetic coding sequence
  source 1..813: mol_type = other DNA
atggttactgctatgaacgtgtcacatgaggtgaatcagctgtttcaaccctacaatttcgagctatccaaagatatgaggccgttttttgaggagtactgggccacctcctttccgatagccctcatctatttagtgctcattgccgtaggccaaaactatatgaaggagagaaaaggctttaacctgcagggtccgctaatattatggagcttttgcctcgccattttcagtattctcggtgctgtccggatgtggggtattatgggtactgtcctcctgaccggaggactgaaacaaaccgtttgctttattaacttcatcgataactccacagtgaagttttggtcctgggttttcctgctgagtaaggttattgagctcggcgacactgcattcatcatcctgagaaagagacccctgattttcattcattggtatcatcacagtaccgtcttggtttacacatcatttggctacaaaaataaggtccccgccggggggtggttcgttactatgaactttggggtacacgccatcatgtacacatactacacactgaaggccgctaacgtgaagcctcccaagatgctgcccatgctcattactagtttacagatcctgcaaatgtttgtgggagccatcgttagtatcttgacctacatctggaggcaggatcaaggctgccatacaactatggagcacctcttctggagctttatcctgtacatgacttactttatcctgttcgcgcattttttctgccagacttatatacgaccaaaggtgaaagctaaaacgaagagccagtag

SEQ ID NO: 115696 - DNA, 945 bp, synthetic construct
  misc_feature 1..945: note = Description of Artificial Sequence: Synthetic coding sequence
  source 1..945: mol_type = other DNA
atggggcttctcgattctgagcctggcagtgttctgaatgtggtatctacagcactgaacgataccgtggagttttatcgctggacctggagtatagccgataagcgggtcgagaattggccactgatgcaaagtccttggcctactctgagcattagtaccctttacttgctgttcgtgtggcttggacctaaatggatgaaggacagggagccttttcaaatgaggctcgtgctgattatttacaactttgggatggtcctgttgaatctattcatttttagagaactcttcatgggctcctacaacgccgggtacagctacatatgccaatccgtcgactattccaataatgtgcacgaggtgcgaattgcggctgccctgtggtggtattttgtaagcaagggagtggagtacctagatacagtgttctttatcctcagaaagaagaacaatcaggtaagtttcctccacgtctatcaccattgcacaatgttcaccctctggtggattggaatcaagtgggtcgcagggggacaggcattcttcggagctcagttgaactccttcatacacgtgatcatgtatagctactatggactgactgcctttgggccttggattcagaaatacctctggtggaagcgatatctgactatgctgcagctgatccagtttcacgtgacgattggtcacaccgctctgagcctgtacaccgattgcccattccccaaatggatgcactgggcgcttatcgcatacgccatctcttttatctttctgtttctcaacttctatattaggacctataaggagcccaaaaagccaaaggctggcaagaccgcaatgaacgggatttctgctaacggagtctcaaagtctgagaagcagctgatgatcgagaacggcaagaagcaaaaaaatggcaaggccaaaggtgattag

SEQ ID NO: 115697 - DNA, 900 bp, synthetic construct
  misc_feature 1..900: note = Description of Artificial Sequence: Synthetic coding sequence
  source 1..900: mol_type = other DNA
atggaacacttcgatgctagcctgtccacctattttaaagctcttttggggccccgcgatacccgggtaaaaggttggtttctgttggacaactatatacccaccttcatttgctctgtcatttatctcttaatcgtgtggcttggaccaaaatacatgcgcaataagcagccattttcttgccggggcattctggttgtttacaatctcggcctcactctgctgtccctttacatgttttgtgagttagtgaccggggtttgggaaggaaagtacaactttttttgccaagggacccgaacagccggggagagcgatatgaaaattatccgggtactctggtggtattacttttctaagctcatcgagttcatggacaccttctttttcatcctccgaaagaataaccaccagattaccgtgttgcatgtctaccaccacgcatctatgttaaacatttggtggttcgtaatgaattgggtgccatgtggccactcctactttggagctaccctgaattcatttatccacgttctgatgtactcatattatggtctgagctccgtcccatcaatgcgaccttatctttggtggaagaagtacataactcagggccagttgctccagttcgtgctaaccatcatccagacatcttgcggggtgatttggccgtgcaccttcccgctcggatggctgtatttccagattggctatatgatttcactcatcgcgctgttcactaatttttacattcagacgtataataagaaaggtgcgtcccgccgcaaagatcatctcaaggaccatcagaacggttccatggccgctgtaaacgggcacaccaactccttctcccctttggagaataacgttaagcctcggaaactccggaaggactag

SEQ ID NO: 115698 - DNA, 267 bp, synthetic construct
  misc_feature 1..267: note = Description of Artificial Sequence: Synthetic coding sequence
  source 1..267: mol_type = other DNA
atggaacactttgacgcctcactgtccacttatttcaaggcactgctgggaccgagaggaatcagcagtagtgtgttaaggatgggacctcctcttcacaccgttgtcgggtggcttcagcagctccaggcagcccatagcgaggaggaagaaaaaatgttccacctgtgtggctttaagcataaagaagtggtgtcccagagctcgcttccagccgtgatcccacagaactccctggcaactatcgcatctcacgcacctgcttag

SEQ ID NO: 115699 - DNA, 870 bp, synthetic construct
  misc_feature 1..870: note = Description of Artificial Sequence: Synthetic coding sequence
  source 1..870: mol_type = other DNA
atggagcattttgatgcctctctcagcacctactttaaagcgctgctaggacccagggataccagggtgaaggggtggtttctgctcgataattatataccaacatttatatgctccgttatataccttctgatcgtgtggctgggaccgaagtacatgagaaataaacagccattttcgtgtaggggcatattagtggtctacaaattttgtgagcttgtgaccggcgtgtgggaggggaaatataattttttttgccaagggactcgcaccgctggggaaagcgatatgaaaatcattagagtactgtggtggtactatttctcgaaattgatagaatttatggacacgttcttcttcattttgcggaaaaataaccatcagatcactgtcttgcacgtataccaccatgcctctatgctgaatatctggtggttcgtcatgaattgggttccttgcggccattcctacttcggagccaccctgaacagcttcatccatgttctcatgtactcatattatggactcagcagcgtaccatcaatgcgtccctatctttggtggaagaaatatatcacccaaggacagctcttacagttcgtgctgactatcatacagacaagctgcggcgttatctggccctgtacctttcctctcgggtggctgtattttcagattggatacatgataagtttgattgcgctctttaccaacttctacatccaaacctacaacaaaaagggcgcgtcacgccgaaaggaccaccttaaggatcatcagaacgggtccatggctgctgtgaatggccacactaactccttttcacctctggagaataacgtgaaacccagaaagctgcgcaaagattag

SEQ ID NO: 115700 - DNA, 981 bp, synthetic construct
  misc_feature 1..981: note = Description of Artificial Sequence: Synthetic coding sequence
  source 1..981: mol_type = other DNA
atggagcactttgacgccagtctttcgacttattttaaggccctgctcggtccgagggacactagagttaagggttggttcctgctggataattacatacccacctttatctgcagcgtgatttatcttctcatagtctggctgggccctaagtatatgagaaataaacagccctttagctgtcgcggaatactggtggtgtacaatctgggacttacacttttgagcctctatatgttctgcgagtccaagcgtgagcagccaaggcggagtgcctgtgcctcgcgtacagatcctagcacacagcaacaacttccagaaaatagactggtgacgggggtctgggagggaaaatataacttcttttgtcagggtacaagaacagcaggtgagagcgatatgaaaattattcgggtcctctggtggtactacttttccaagctgatcgaattcatggacacatttttcttcatcttgcgcaagaacaaccatcagatcacagtgctccatgtgtaccaccatgcttccatgctgaacatctggtggtttgtcatgaactgggtgccatgcggtcattcctattttggcgcaacactaaattccttcatccacgtgctgatgtactcatactacggcttgagtagcgtgcccagtatgcgtccctatctttggtggaagaagtatatcacgcaaggccagctgctgcagtttgtgttaacaataattcagacatcttgtggcgttatttggccctgtacatttcctctgggctggctttactttcagataggctatatgatctcactgatagccctgtttaccaacttttatatacagacttataacaaaaaaggggctagccgcaggaaggatcatctcaaagatcaccagaacggctcaatggctgctgtgaatggccatacaaacagcttctctcccctagagaacaatgtgaagccccggaagcttcgtaaagactag

SEQ ID NO: 115701 - DNA, 900 bp, synthetic construct
  misc_feature 1..900: note = Description of Artificial Sequence: Synthetic coding sequence
  source 1..900: mol_type = other DNA
atggagcacttcgacgcaagcctatctacatatttcaaagcgctgctcggaccaagagacacccgcgttaaggggtggtttctgctcgataactacatcccgactttcatttgttccgtcatatacctcttaattgtctggctgggcccaaagtatatgagaaataagcaacccttctcatgccggggaatcctggtcgtgtataacctcggtctcaccctcctttccctttatatgttttgcgaattggtgacaggtgtatgggaaggtaagtataactttttctgtcagggtactcgaactgccggagagagtgacatgaagatcattcgtgtgttatggtggtattacttctccaaattaatagagttcatggatacatttttcttcatattacggaaaaataatcatcagatcacggtgcttcacgtttatcatcacgcctccatgttgaacatatggtggttcgtgatgaactgggtgccatgcggccacagctatttcggtgcaacacttaacagttttattcatgttctcatgtattcctactatggactcagcagtgtcccctcaatgcgcccgtacctttggtggaagaaatacatcacacaggggcagctcctccagtttgttcttaccattattcagacatcatgtggtgtgatatggccttgtacgttccccttgggctggctgtactttcagatcggatatatgatttctttgattgccctattcacaaatttctatatccaaacatataacaaaaagggggcctccaggaggaaggaccaccttaaagatcaccaaaatggatcaatggcagcggtgaatgggcatacaaacagcttcagtccactggagaacaacgtgaaacctcgaaagctgcggaaagactag

SEQ ID NO: 115702 - DNA, 798 bp, synthetic construct
  misc_feature 1..798: note = Description of Artificial Sequence: Synthetic coding sequence
  source 1..798: mol_type = other DNA
atgaatatgagtgtcctgacccttcaagaatacgaattcgaaaaacagtttaacgaaaatgaggcgatccagtggatgcaggaaaattggaaaaagagcttcctgtttagtgccctctacgccgctttcatattcggcgggcggcacctgatgaacaaaagagccaagtttgagctgaggaagcctctggtcctgtggtctctgacacttgccgttttttccatcttcggtgcactaagaaccggagcctatatggtatatatcctcatgaccaagggccttaaacagtctgtgtgtgatcaagggttttataatgggcccgttagcaaattctgggcatacgcatttgtgctttcgaaggctcctgaattgggagacaccatcttcattatccttaggaaacaaaagcttattttccttcactggtatcatcacatcaccgtactgctctactcctggtacagttacaaagacatggtcgcagggggggggtggttcatgaccatgaactacggcgtccacgcagtcatgtactcatattatgcactgagagcagctggctttcgggtgtctagaaagtttgccatgttcattacactgagccagattacccagatgctgatgggttgtgtagtaaactaccttgtcttctgttggatgcaacatgatcagtgccactctcacttccagaatatcttctggtcatctctgatgtacctgtcctacctggtgttattttgccacttcttttttgaggcatatattggcaagatgagaaagaccacaaaggccgagtag

SEQ ID NO: 115703 - DNA, 798 bp, synthetic construct
  misc_feature 1..798: note = Description of Artificial Sequence: Synthetic coding sequence
  source 1..798: mol_type = other DNA
atgaatatgtccgtgctgacgctacaggagtatgagttcgagaagcagtttaacgagaacgaggccatccagtggatgcaggagaattggaaaaaaagttttctgttcagcgcactgtacgccgctttcatatttgggggtcggcatctgatgaataaaagggctaagttcgagctcagaaaacctctggtcttgtggtctctaaccctagccgtgttttctatcttcggggcccttcgtacaggggcctatatggtctacatacttatgacaaagggtcttaaacagagcgtgtgcgaccagggcttctacaacgggcccgtgagtaaattttgggcttatgcatttgttctgtcaaaggctcctgagttaggtgatacaatcttcattatcttgcgcaaacagaaactcatttttctgcactggtaccatcacattactgttctgctgtatagttggtacagttataaggacatggttgccggcggcggctggttcatgacgatgaactacggcgtccacgcagtcatgtacagttactatgccttgcgcgcagcaggctttagggtctctagaaagtttgccatgttcatcaccttgtcccagattacacaaatgctgatgggatgtgtagtgaactatctggtgttttgctggatgcagcacgaccagtgtcactcccattttcagaatatcttctggagttctctgatgtacctcagttatctggtgctgttctgccatttcttcttcgaggcatatattggtaaaatgaggaagacaaccaaagccgaatag

SEQ ID NO: 115704 - DNA, 327 bp, synthetic construct
  misc_feature 1..327: note = Description of Artificial Sequence: Synthetic coding sequence
  source 1..327: mol_type = other DNA
atgaacatgagtgtactaactctgcaggaatacgagttcgagaagcagtttaatgagaacgaagccatccagtggatgcaggagaactggaaaaagtctttcctgttttctgccttgtacgccgctttcatcttcgggggcaggcacttgatgaataagcgggccaagttcgagttacggaaaccacttgttctttggtctctcaccctggctgtgttcagtattttcggagctcttcggacgggagcgtacatggtgtacattctgatgacaaaaggtcttaagcagtctgtttgcgatcaggggttttacaacggccccgtatag

SEQ ID NO: 115705 - DNA, 414 bp, synthetic construct
  misc_feature 1..414: note = Description of Artificial Sequence: Synthetic coding sequence
  source 1..414: mol_type = other DNA
atgaacatgtccgttttgaccttacaggagtacgagttcgagaagcagttcaacgaaaacgaagcgatccagtggatgcaagagaactggaaaaaatccttcctgttcagtgcattatacgctgcttttatctttggaggtcgtcacctcatgaacaagagggcaaaatttgaactgagaaagcccctagtgctgtggtcgctcacactggccgtgttctctatttttggagccctacgaaccggcgcatatatggtgtatattctgatgaccaaaggtctgaagcagagcgtgtgtgatcagggcttctacaacgggcctgtgagcaagttttgggcttatgctttcgttctgagtaaagcccctgaattaggagacactatattcatcatccttcggaaacagaaactgtag

SEQ ID NO: 115706 - DNA, 846 bp, synthetic construct
  misc_feature 1..846: note = Description of Artificial Sequence: Synthetic coding sequence
  source 1..846: mol_type = other DNA
atggctttctcggacctaacttctcggaccgtgcacctgtacgacaattggatcaaggatgccgatccccgagtggaggattggctactaatgagcagccctctgccacaaactatcctgctcggcttttacgtgtactttgttacaagtctcgggccaaagctgatggagaaccgtaagcctttcgaactgaagaaagctatgattacatacaacttcttcattgttctgttctccgtatatatgtgttatgaatttgtgatgagtggatggggcatcggctactcattcaggtgcgatatcgtggactactctcgcagccccacagccttgcgcatggccagaacatgctggctttactacttttcaaagttcatcgaactgctggatacgatcttctttgtgctccggaaaaaaaacagccaggtgacatttctgcatgtgttccatcacacaattatgccctggacgtggtggttcggggttaagtttgccgcggggggactcggtacctttcacgcgttactgaatacagcagtgcatgtcgtcatgtatagctactacggactgagcgccctaggccccgcgtaccagaagtacctctggtggaaaaagtacttaacatctttgcagctggttcagtttgtgatcgtggctattcacattagccaatttttcttcatggaggactgcaagtatcaattcccagtttttgcttgtattataatgtcttacagctttatgttcctcctgctgttccttcacttctggtatagggcttatacgaaaggtcagcgtcttcctaaaacagtcaaaaatggcacttgtaagaacaaggacaactag

SEQ ID NO: 115707 - DNA, 846 bp, synthetic construct
  misc_feature 1..846: note = Description of Artificial Sequence: Synthetic coding sequence
  source 1..846: mol_type = other DNA
atggccttcagcgatctgactagcagaactgtccacctgtatgacaattggattaaggacgccgatccccgtgttgaggactggctgctgatgagctcccctctgcctcagaccattctcttaggattctacgtgtattttgtcacatctctgggtccaaagcttatggaaaaccgaaagcctttcgagctcaaaaaagctatgattacctacaatttttttattgtcctgttctcagtgtacatgtgctacgagtttgtcatgagcggatggggaatcggatatagtttcaggtgtgatattgtcgactatagccggagtcccacagcactccgcatggctcggacctgttggctttactatttctcaaaattcatcgaactgctcgatactattttctttgtgcttcgcaaaaagaattcacaagtgacattcctccacgtgtttcaccatacaatcatgccttggacgtggtggtttggcgtcaagttcgctgctggtggcctcggaaccttccacgccttgctcaataccgccgtacacgtggtgatgtacagctattacggacttagcgcactgggacctgcataccagaaatatctgtggtggaaaaagtatttgacaagcctccagttggtacagttcgtcattgtggccatccatatctcccagttctttttcatggaagattgtaagtaccagtttccagtattcgcctgcatcatcatgtcctattcgttcatgtttcttttactgttcctgcatttttggtatcgggcgtataccaaaggacagcgcctgcctaagacagtgaaaaatggcacatgtaaaaacaaggacaactag

SEQ ID NO: 115708 - DNA, 498 bp, synthetic construct
  misc_feature 1..498: note = Description of Artificial Sequence: Synthetic coding sequence
  source 1..498: mol_type = other DNA
atggcgttttcagatctgacgtcacggactgtgcacctgtacgataactggattaaggatgcagacccccgcgtggaagattggcttttgatgagctcacctttgccacagacgattcttctgggattctatgtgtatttcgtcacatccctcggaccaaaacttatggagaatcgaaaaccgtttgaactcaagaaagccatgattacctacaacttcttcatcgtgctcttcagcgtgtatatgtgctacgagttcgtaatgagcggctgggggattgggtacagcttccgctgcgatatagtggattactccaggtcacccaccgcgcttcgtatggcacggacctgctggctctactatttttccaaattcatcgagctgctcgacactatcttcttcgtcctacgcaaaaaaaattcacaggtgacgttcttgcacgtgttccaccacacgattatgccctggacttggtggtttggggtgaaattcgcttag

SEQ ID NO: 115709 - DNA, 846 bp, synthetic construct
  misc_feature 1..846: note = Description of Artificial Sequence: Synthetic coding sequence
  source 1..846: mol_type = other DNA
atggcgttttccgacctgacaagccgcactgttcacctgtacgataactggatcaaggatgccgatccgcgggtagaagactggctcctgatgtcttccccactgccacagactattctcctaggcttctacgtgtactttgtgaccagcctcggccccaagttgatggaaaaccgtaaaccgttcgagctgaagaaggccatgatcacatacaatttcttcattgtccttttctcagtctatatgtgttatgaatttgttatgtcagggtggggaatcgggtactcctttcgttgcgacatcgttgactactcaagaagccccactgctctgaggatggccagaacatgctggctgtactacttttctaaatttatcgagctgttggacacaattttcttcgttttgcggaagaaaaactctcaggttaccttcctgcacgtctttcatcacacaatcatgccgtggacatggtggtttggtgtgaagttcgctgccggtggacttggtactttccacgccctcctgaacacggcagtgcatgtggtcatgtattcttactacggcctttccgccctcgggccagcctaccaaaagtacttgtggtggaagaagtacctcacaagcttacagctagtgcaatttgtgatcgtggcaattcatatctcgcagttctttttcatggaggactgtaaatatcagtttcccgtgtttgcctgcatcattatgtcatactcttttatgtttctcctgctgttcctacacttctggtaccgggcctatacaaaagggcagcgtctgccaaagacggtgaaaaacggtacctgcaaaaacaaggataactag

SEQ ID NO: 115710 - DNA, 498 bp, synthetic construct
  misc_feature 1..498: note = Description of Artificial Sequence: Synthetic coding sequence
  source 1..498: mol_type = other DNA
atggcgttcagcgacttgacctcaaggacagtgcatctgtacgacaattggataaaggatgcggatcctcgagtggaggactggctgctgatgtcttcccccctgccccagacaatactcctgggtttctatgtctacttcgtcaccagtctaggccccaagttaatggagaatcgcaaaccctttgagctcaagaaggccatgattacgtacaatttcttcattgtgctcttctcagtctatatgtgctacgagtttgtgatgtcaggctggggcatcggatattcattcagatgtgacattgttgattacagtcggtctcccacagctctccgcatggctaggacatgctggctatattacttttccaagttcatagagctgctcgacaccattttttttgttcttaggaagaagaactcgcaagtcacattcctgcatgttttccaccacaccattatgccctggacttggtggttcggggtgaaattcgcttag

SEQ ID NO: 115711 - DNA, 921 bp, synthetic construct
  misc_feature 1..921: note = Description of Artificial Sequence: Synthetic coding sequence
  source 1..921: mol_type = other DNA
atggccgcggctgctgccgccgcggccgctgcaggagccgcaggtggtagagggtcaggaccaggccggcggcgacatcttgtcccaggtgctggaggagaggccggcgagggtgcccctggtggggccggagattatggcaacggcttagagtccgaggagttggaacctgaagagctgctgctggaacccgagccagagcccgaaccagaggaggaaccgccacgtccacgggcacctcccggagcacctggacccggacctggtagcggcgcgcccggatcccaggaagaggaagaagaacccggactcgttgaaggcgacccgggagacggcgcgatcgaagatcccgagctcgaggcaatcaaagctcgagttagagaaatggaggaagaggctgagaagttaaaagagctccaaaatgaggtagagaagcaaatgaatatgagtcctccccctgggaatgctggtcccgtgatcatgagcattgaggaaaagatggaggccgacgcgcggagcatttacgtgggcaatgtcgactatggcgcaacagcagaggagttggaggctcattttcacgggtgtggatcagtcaatagagtcaccatactctgtgacaaattttccggccatccaaaagggttcgcttatattgaattctcagataaagagagcgtgaggaccagcctggcgttagacgagtccctgttccgaggccggcagatcaaagtcatcccaaagagaaccaaccggccaggaatttccacaacagatagaggcttcccacgagcacggtaccgcgcaaggacgacaaactataacagcagtcggagtcgtttctacagcggatttaatagcagaccacgaggacgggtgtacaggggtcgagcgagagccacatcatggtacagtccttactag

SEQ ID NO: 115712 - DNA, 1407 bp, synthetic construct
  misc_feature 1..1407: note = Description of Artificial Sequence: Synthetic coding sequence
  source 1..1407: mol_type = other DNA
atggcaattgctacgagtgtctatgtagtgccaccccccgcgaggccctgccccactagcggacctcctgctggcccctgccctcccagccctgatcttatatacaagataccacgggcctctggcacacaactcgccgctcctcgcgatgcactagaggtgtacgacgtgccccccaccgccctacgggttccatcttcaggaccgtatgactgccccgcttcatttagtcaccctctgacaagagtggcgccacaaccccccggcgaagacgatgctccttacgacgtccctctcacccctaagcctcccgccgagctcgagcctgacctggagtgggaagggggccgtgaaccgggaccacctatttatgcagccccatccaacctgaagagggcgagcgcactcctcaacctgtacgaagctccagaagaactgctcgcagacggagaaggaggaggcaccgacgaaggcatttacgatgtgcccctgttgggtccagaggcaccaccatccccggaacctccgggcgcactcgcatctcacgaccaggacacgctggcacaactgctagctaggtcacctccaccaccacatagacccaggttgcccagtgcagagagcctgagtcgcaggcccctgcccgcgctgccggtgcctgaggcccccagcccaagtcccgtgcctagcccagcccctggcaggaaaggaagcatccaagaccggccactaccgccccctcctcctcggctccccggttacggcgggcctaaagttgagggcgaccccgagggaagagaaatggaggatgaccctgctgggcatcacaatgaatatgaaggcatcccaatggcagaggagtacgactacgtacaccttaagggcatggacaaagcacaagggagtcgtcctcctgaccaggcctgcacaggggacccagaactgccagaaagagggatgccagcaccgcaggaagcactgagccctggtgagccattggtcgtaagcacaggggatctgcagctgctttatttctatgccggacagtgccagtcccattactcagcccttcaagctgctgtggccgccctcatgagctctacccaggccaaccagcctccacggctgttcgtgcctcattctaagagggtggttgtagccgcccacaggcttgtattcgtaggggatacactagggcgcttggctgcctccgcaccactacgtgctcaggtcagagccgcaggcaccgccctaggtcaagccttacgggcaacagtgctagcggtcaaaggagccgcgctgggatacccttcctccccggcgattcaggagatggtccagtgtgtgaccgaattggcgggccaggcgctacaatttactactttgctgacctccctagccccctag

SEQ ID NO: 115713 - DNA, 1179 bp, synthetic construct
  misc_feature 1..1179: note = Description of Artificial Sequence: Synthetic coding sequence
  source 1..1179: mol_type = other DNA
atggctatcgctacctctgtttatgttgtcccaccacccgcccgaccatgtcccacttcaggcccgcccgctggcccttgcccgccctcacccgatctaatttataagatcccaagggcatccggtacacagcttgctgcgcctcgcgacgcactggaagtttatgacgtgccgcccactgccttacgggtaccctccagtgggccctacgattgtcctgcttcgttctctcatcctctgacaagagtcgccccacagcctccaggtgaggacgatgccccacccagccctgagcctcctggcgcactcgcttcccatgatcaggacacactggctcagctgctggccagatcgccaccacctccccacaggccccggctgccctcagcggaatccctgagtaggaggcccctaccggctctgccagtgcccgaggcacctagccccagcccagtaccaagcccggctcctggccgaaaggggtccatccaagacagacccctcccacctccaccgccaagacttcccgggtacgggggtccgaaggttgagggggatcccgagggaagggaaatggaagatgacccagccggtcaccacaacgaatatgaaggaatcccaatggccgaggagtatgactacgtacacctgaagggaatggacaaggcgcagggatctcggccccctgatcaagcctgcacaggcgatcctgagcttcctgaacgtggcatgcctgctccacaggaggccctgagtcctggagaacctctggtggtatcaaccggtgacctgcagctactgtacttttacgcaggccagtgtcaaagtcactactccgcactgcaagcggccgtggcggccctcatgtcatcaacacaggccaatcagcctcctcgcctgttcgtccctcacagcaagcgcgtcgttgtggcggcccacagactggtgttcgtaggtgataccctgggaagactcgcagcttcagccccactgcgagctcaggtgagggcagccgggacggccctaggccaggccctgcgcgcgaccgtgctggctgtaaagggtgccgccttggggtacccctcaagcccagccatccaggagatggtacagtgcgtgacagaactagcggggcaggccctgcagtttacaaccctcctcacctccctggcaccttag

SEQ ID NO: 115714 - DNA, 1326 bp, synthetic construct
  misc_feature 1..1326: note = Description of Artificial Sequence: Synthetic coding sequence
  source 1..1326: mol_type = other DNA
atgagcgaacgggaggtcagtaccgctccagctggcactgatatgcccgctgccaagaagcagaagctgagtagtgacgaaaacagcaacccggacctaagcggcgacgagaatgatgacgccgtatccattgaatccgggaccaatactgaaaggcctgatactccaacgaacacccctaacgcaccaggcaggaagagctgggggaaagggaaatggaaatccaaaaaatgtaagtatagctttaagtgcgtgaactcactaaaggaagaccataatcagccactgttcggcgtccaatttaattggcattcaaaggaaggggatcccttagtgtttgcaaccgtgggcagcaatcgggtaacattgtacgaatgtcacagtcagggcgaaatccggttgctgcagagctacgtagatgctgacgccgatgagaatttttacacctgtgcttggacatacgattcaaacacttcacacccacttctcgctgttgcaggctccagggggattatccggataatcaacccaattaccatgcagtgcatcaagcactacgtcggccatggcaacgccattaatgaattaaagttccacccacgagatccaaacctgctgctgtctgtttcaaaggaccatgccctgagactgtggaacatacaaacggatacactcgtggccattttcgggggcgtggaaggacaccgcgacgaagtgctgagcgcagattacgatctacttggcgagaagatcatgtcctgtggaatggaccattcgctgaaactttggcggattaattccaaacgcatgatgaacgccatcaaagagtcctatgactacaatcccaacaagacgaaccggccctttatctcgcagaagatccattttcccgacttctccacgcgcgacatccacagaaattacgtggattgcgtgaggtggctcggggaccttatcctgtctaaaagttgcgaaaatgctatcgtctgctggaagcccgggaaaatggaagacgacattgataagattaagccttctgagtcaaacgtcactatactcggacgctttgactactcacagtgcgacatatggtacatgcgcttcagcatggacttctggcagaagatgttagccctcggtaaccaagtgggaaagctgtacgtgtgggaccttgaagttgaagatcctcacaaagctaagtgcactacgctgacacatcataagtgcggagctgcgattcgacaaacaagcttttcgagagactcttctattctgatcgcagtatgtgatgacgcatcaatttggagatgggacagactgaggtag

SEQ ID NO: 115715 - DNA, 1203 bp, synthetic construct
  misc_feature 1..1203: note = Description of Artificial Sequence: Synthetic coding sequence
  source 1..1203: mol_type = other DNA
atgagtgaacgggaagtcagcacagcccccgctggcaccgatatgccagcagctaagaaacaaaaactctcctcagatgaaaacagtaatccagatttatccggagacgaaaacgatgacgctgtgagcattgagagcggaacaaacacagagcgaccagatacccccaccaacacccccaatgcccctggaaggaaatcttggggaaaaggcaaatggaagtccaagaagtgcaagtacagctttaagtgtgtgaacagtttaaaggaggaccacaatcaacccctctttggcgtgcagtttaattggcacagcaaggagggagaccccttggtttttgccaccgtaggaagcaacagggtgacactttacgagtgtcatagccaaggtgagattcgactccttcaatcatacgtagacgcagacgctgatgagaacttctatacatgcgcgtggacatatgacagcaatactagccatcccctgctcgccgtggccgggagccgaggcattattcggattattaacccaatcacaatgcagtgcatcaagcactacgttggccatggtaatgcgatcaacgagctcaaattccatccacgagatccgaacttgctcctgtctgtatctaaggaccacgctctcaggctgtggaacatccagacagacacattggtggcaatcttcgggggagtcgaggggcacagagacgaggtcctgtcagccgattacgacttattgggcgagaaaatcatgagttgcggcatggatcacagcttgaaactttggcgaatcaatagcaagcgaatgatgaacgcaattaaagagagctacgactacaatccaaacaagaccaataggcccttcattagtcagaaaattcattttcccgacttcagtactcgagacatacatcgcaactatgttgactgcgtcagatggctgggggacctgattctcagcaagtcgtgtgaaaatgctatcgtgtgttggaagcccggaaaaatggaggatgatatcgacaaaatcaagcctagcgagagcaatgtcactatattaggcaggtttgactattcgcagtgcgacatttggtatatgaggttttctatggacttctggcaaaaaatgttggcacttggtaatcaggttgggaaactgtacgtgtgggacctcgaggtcgaagacccgcacaaggccaagtag

SEQ ID NO: 115716 - DNA, 1401 bp, synthetic construct
  misc_feature 1..1401: note = Description of Artificial Sequence: Synthetic coding sequence
  source 1..1401: mol_type = other DNA
atgagtgagcgggaggtgtccacagcccccgctggtactgatatgccagcagctaagaagcaaaagctcagttccgacgagaacagtaatccggacctgtcaggggatgagaacgatgacgctgtctcaattgagtctggcactaacacggagagaccagacacacctacgaacacccctaatgcgcccggacggaaatcgtgggggaaaggcaagtggaaatccaagaaatgtaagtatagttttaagtgcgtcaactccctcaaggaggatcacaatcaaccgctgtttggagtacaattcaactggcactctaaggagggagatccattggtatttgccactgttgggtcgaatagggtgacactctatgaatgccactcacagggcgagatcaggctgctccagagctatgtggatgccgacgccgacgagaacttctacacgtgcgcatggacctacgacagcaatacatcccacccactgctggcggtcgccggctcccgcggaattatcagaataatcaaccccattactatgcagtgtataaaacactacgtgggccacgggaatgctatcaacgagctgaaatttcaccctagggaccccaatttactgctttctgtcagtaaggatcacgcgctcaggctgtggaacatacagacagacacgttagtcgcgatttttggcggcgtcgagggtcaccgagacgaagtgctgagcgccgactacgacctgcttggggaaaaaattatgtcatgcgggatggaccactccttaaaactgtggcgcattaattccaagcggatgatgaacgccattaaagagtcgtacgattacaatcccaacaagactaaccgaccttttatcagtcaaaagatacatttccccgatttcagcactagggacattcatcggaattatgtagactgcgtgagatggctcggagatctcatactgagcaaaagtggtcgcgccatcctgcactcccaccaacagtgtatgagagatcctgtgtctccaaacctgaggcaacatctgtcgtgcgagaacgccatcgtctgctggaagccaggcaagatggaggacgatatagataagatcaaacccagcgagtccaatgtgacaatcctaggaaggtttgactactcgcagtgcgacatctggtatatgcggttcagtatggatttctggcagaagatgcttgcgctaggaaaccaagttggaaaactctatgtgtgggacctggaagttgaagacccacataaggcaaaatgcacaacactgactcatcacaagtgcggggctgccataagacagacatcgttctcccgcgattctagtatactgatcgctgtgtgcgacgatgccagcatctggagatgggaccggctacgctag

SEQ ID NO: 115717 - DNA, 471 bp, synthetic construct
  misc_feature 1..471: note = Description of Artificial Sequence: Synthetic coding sequence
  source 1..471: mol_type = other DNA
atgtcagagagggaagttagtacggcccctgccggcaccgacatgcctgccgccaagaagcaaaaacttagttccgacgaaaatagcaaccccgatctctccggcgatgagaacgacgacgctgtatcgatcgagtcagggaccaataccgaaagacctgatacgcctaccaatactccgaacgcacccggcaggaaatcatggggaaaaggcaaatggaagagcaagaaatgtaagtatagcttcaagtgcgtgaattccctgaaagaagatcataatcaacccctcttcggggttcagttcaattggcatagtaaagagggggatccactggtttttgccaccgtgggctccaatagggtgactctctacgaatgccacagccagggcgagataagacttctacagagctatgtagacgctgacgctgacgaaaatttctatacatgtgcctggaagtgctatcagtag

SEQ ID NO: 115718 - DNA, 660 bp, synthetic construct
  misc_feature 1..660: note = Description of Artificial Sequence: Synthetic coding sequence
  source 1..660: mol_type = other DNA
atggacaactatgctgatctatctgacacagagttgacaaccttgctgcggcgctataacattcctcacggaccagtggtagacttgaactctactaggggagacgccgatatgtacgacttgcctaagaaggaagacgcgctgctctaccagtccaagggttacaacgacgactattatgaagagtcatattttactacccggacttatggcgaacccgaaagcgcaggtcccagtagagccgttcgacagagcgtgacctcgtttccggacgctgacgcttttcaccatcaggtccatgacgatgacctgctgtcatcttcagaggaggaatgtaaggacagggagagacccatgtatggcagggactcagcttatcaaagtatcacccactatcgtccagttagtgcatctcgcagcagcctggacctgagttactaccccacaagttccagcacatcgtttatgagtagtagcagcagtagctcaagctggctgacgaggcgagctattaggcccgaaaatagagcgcctggggctggcttggggcaagatcgccaagtccctctctggggtcaactgctgctcttcctggtttttgtgattgtcctgttcttcatctaccactttatgcaggccgaagaaggcaaccctttttag

SEQ ID NO: 115719 - DNA, 765 bp, synthetic construct
  misc_feature 1..765: note = Description of Artificial Sequence: Synthetic coding sequence
  source 1..765: mol_type = other DNA
atggataattatgccgaccttagcgatactgaactgacgacgctgcttcgccgctataacattccacatgggccagtggtggggtctacccgaaggctttatgagaaaaagattttcgagtatgagacacaacgtcgacgtctctctccaccgtcatcctccgctgcctccagctactccttcagtgatctgaactctacccgaggcgatgccgatatgtatgacttgcctaaaaaagaggacgcacttttgtaccagagcaagggttacaacgatgattattatgaagaatcttatttcactacacgtacctatggggagcccgaatcggcggggccaagcagggccgtgcggcaatctgtgaccagctttcctgatgccgatgctttccaccatcaggtgcatgacgacgatcttctgtcttcaagtgaggaggagtgcaaagatagggagaggcccatgtacggacgggacagtgcatatcagagcattacgcactaccgacctgtatctgcttctaggtcctcgctcgacctgtcctactacccgacaagttcctccactagctttatgtcaagttcttcatcctcctccagctggctgactaggcgggctattagacctgagaatcgcgcccctggggccggtttgggccaggaccgacaggttccactttggggccagttgcttctttttctggtgttcgttatagtgctgttctttatctaccactttatgcaagccgaggaaggaaacccattctag

SEQ ID NO: 115720 - DNA, 441 bp, synthetic construct
  misc_feature 1..441: note = Description of Artificial Sequence: Synthetic coding sequence
  source 1..441: mol_type = other DNA
atgactacaaacgctggccctctacacccatattggcctcagcatctgcggctggacaatttcgtgcccaacgacaggcccacatggcatattctggcaggactgttttctgttaccggggtgctggtcgttacgacctggctgctcagtggccgcgctgccgttgtcccgctgggcacctggcggaggctctccctttgctggttcgccgtgtgcggctttatccacctcgtgatcgagggatggttcgtgctgtactacgaggacctgttgggcgatcaggcttttctgtcacagctttggaaggaatacgccaaaggtgactctcggtacatcctgggcgataatttcaccgtgtgtatggaaacaatcactgcatgtctttggggtcccctgtcattatgggtcgttattgccttcctgcgacagcatccgctgtag

SEQ ID NO: 115721 - DNA, 483 bp, synthetic construct
  misc_feature 1..483: note = Description of Artificial Sequence: Synthetic coding sequence
  source 1..483: mol_type = other DNA
atgacaactaatgccggcccacttcatccatattggcctcaacacctccgcttggataacttcgtgcccaacgatcgccccacttggcatatcctggcaggtctattttccgtcactggcgtgctggttgtgacaacatggttgttgagcggcagagcggctgtcgttcccctggggacatggagaaggctgtccttatgttggttcgccgtctgtggcttcatccatctcgtgatcgagggatggttcgtgctttactacgaggatctgttaggcgaccaggccttcctctctcaactgtggaaagagtacgccaagggtgactctaggtacattttgggcgacaactttactgtctgcatggaaaccatcactgcatgcctttggggccctctgtcactatgggtggttatcgcttttttgcggcagcatccactccggttcattctgcagttggtagtctctgtcggacagatatactag

SEQ ID NO: 115722 - DNA, 693 bp, synthetic construct
  misc_feature 1..693: note = Description of Artificial Sequence: Synthetic coding sequence
  source 1..693: mol_type = other DNA
atgactaccaacgcaggcccactgcatccctattggccacagcatctgcgactggacaacttcgtgcccaacgacaggcccacttggcacattctggccggccttttctccgttaccggcgttctggtggttaccacctggctgctttccggtcgggccgctgttgtccccttaggaacctggcggaggctgtcattgtgttggtttgccgtctgcgggttcatacacttggttattgaaggctggtttgtgctttactacgaggatctccttggggatcaagcgtttctgagccagctgtggaaagagtatgctaagggggactcaagatacatcctgggagacaattttaccgtgtgtatggagacaataacagcctgtctgtggggccctctttcactctgggtagtgatcgccttcctgcgtcagcacccccttaggtttatcctccagctggtcgtctctgttgggcagatctacggggacgttctctattttctgaccgagcacagggacggctttcagcacggtgagctcggacatccgctatatttttggttctatttcgtctttatgaacgccctgtggctcgtgctgcccggcgttctcgttctggatgctgtaaaacatctaactcacgctcagtccactctcgacgcgaaggcaactaaagccaagagtaaaaagaactag

SEQ ID NO: 115723 - DNA, 873 bp, synthetic construct
  misc_feature 1..873: note = Description of Artificial Sequence: Synthetic coding sequence
  source 1..873: mol_type = other DNA
atgtgtctcgccggttgcactcccagaaaagcggccgcgccaggaaggggggccctgcccagggctcgactcccccgaactgcaccggcagctgcgactatgtttcagcctgcagccaagcgcggctttaccattgagtcacttgtcgccaaagatggagggactggcggcggcaccggtggtggaggcgccgggtcccacctgctggctgcagcagcctccgaagagcctttacgcccaacggcgttaaactacccacacccgtctgctgcggaggcagcttttgtcagtggcttccccgctgcagcagccgctggagccgggagatcactttatggcgggcccgaactggtctttccggaggccatgaatcatccggcattaaccgtgcatcccgcacaccaattaggcgcctctcctctccagcccccccactccttcttcggcgcccagcatagggatccactgcacttctacccctgggtgttaaggaataggttcttcggtcaccggttccaggcaagcgatgtgccccaggacggtctgctgctgcacggaccctttgctcggaaacccaagcgaatcagaacagccttttccccaagccagttactccggctcgaacgggcgttcgagaaaaaccactatgtggtcggcgcagagagaaagcagctcgccgggtccctgtcgctaagcgagacgcaggttaaagtgtggttccagaatcgtcgtactaagtataagcggcagaaactcgaagaggaaggtcccgaatctgagcagaagaaaaagggcagccaccacataaatagatggcgcatcgcaaccaaacaggcaaatggagaggacatcgacgtgacctcaaacgattag

SEQ ID NO: 115724 - DNA, 759 bp, synthetic construct
  misc_feature 1..759: note = Description of Artificial Sequence: Synthetic coding sequence
  source 1..759: mol_type = other DNA
atgttccagccggccccaaaacgatgtttcaccattgagtctttggtcgctaaggatagtcccctcccagcctccagatccgaggatccaatccgccccgccgctttatcctacgccaattcatcccccatcaacccgtttcttaacggtttccatagcgcagccgccgctgcagctggcaggggtgtttactctaatccggacctggtgtttgcagaggccgtatcccatccccctaatccagctgtaccagtgcatccggtgcccccaccccacgccctggctgcccaccccttaccctcctcccactccccacacccattattcgcaagtcagcaacgcgacccatctacattctatccttggctaattcaccgctacagatacctggggcatcgtttccaaggaaacgatacaagtcctgaaagcttcttgcttcataacgcgttggcccgaaaacctaaacgtatacgcacagccttctctcccagccagctcctgcggctcgaacacgccttcgaaaaaaatcactatgtggtgggagccgaaagaaagcaactcgctcacagcctttctctgaccgagacccaggtcaaagtctggttccagaaccgaaggacaaagtttaagaggcagaaattggaggaggagggctcagatagccagcagaagaagaagggcacgcatcatattaatagatggaggatcgcaaccaaacaggctagcccggaggagatagatgtgacttctgatgactag

SEQ ID NO: 115725 - DNA, 510 bp, synthetic construct
  misc_feature 1..510: note = Description of Artificial Sequence: Synthetic coding sequence
  source 1..510: mol_type = other DNA
atgttccagcccgctccaaaacgttgcttcaccattgagtctctggttgcaaaagacagtcccctgcctgcttccaggtcggaggatcctatccggccagcagctctgtcgtacgccaactcatcacctatcaatcccttcctgaacggttttcactctgccgctgctgccgccgcggggcggggagtttattctaaccccgatcttgtgtttgctgaggccgttagtcacccccccaatccggccgttccagtgcatccagttcctcctccacacgccttggccgctcatcccctaccgtcaagccactctccccaccctctgtttgcttcccagcagcgagaccccagcacattttacccctggctgatccatcggtataggtacctcgggcacaggtttcaagggaaatcaatggtaagcgagcccaagaataaagtgcagaaggctgaggctggcggcaggagacttaggttcgctaccaaggagaagcgcgatgccccgtactag

SEQ ID NO: 115726 - DNA, 957 bp, synthetic construct
  misc_feature 1..957: note = Description of Artificial Sequence: Synthetic coding sequence
  source 1..957: mol_type = other DNA
atggcaatcaagtcaatcgcatctaggctgagaggttccagacggttcctttctggatttgtagctggcgccgtcgtgggagcagcaggggccggccttgccgctctgcaattcttcagaagccagggcgctgaaggagccctaaccgggaagcaacccgacggtgatgccgatcgaaaacattgcaaatttaagcccgacccgaacataccacccacctttagtgcttttaacgaggactacgtaggctccggatggagtcggggacacatggcgcccgccggcaacaataagttttcatccaaggccatggctgagacattctacttgagtaatattgttccacaggacttcgacaataatagtggttattggaatcgaatcgagatgtactgtcgggagctgaccgagagatttgaagatgtctgggtggtgtccggaccactcaccctcccccagacgagaggagacggcaagaagatagtgtcgtaccaagttattggagaagataatgttgctgtccccagtcacctgtacaaggtgatcctggcaagacgatcctcagtctcaacagaaccccttgctctgggggcttttgtggtccccaatgaggctattggtttccagccccagctaactgagtttcaggtgtcactgcaggatctcgagaaactgtcaggccttgtgttcttcccacatttagatcgaacaagcgacatccgtaatatttgctccgtcgacacttgtaaactcctggactttcaagaattcaccctctatctttccacccggaagattgaaggggccagatctgtccttcgactagagaagatcatggagaacctgaaaaatgccgagatcgagcctgatgactatttcatgagtcgatacgagaagaagcttgaggaactcaaggccaaagagcagtccggcacgcagattcggaagcccagctag

SEQ ID NO: 115727 - DNA, 1107 bp, synthetic construct
  misc_feature 1..1107: note = Description of Artificial Sequence: Synthetic coding sequence
  source 1..1107: mol_type = other DNA
atggccattaaaagcattgcctcaaggttaaggggcagccgccgatttttatcaggcttcgtcgcaggcgcggtagtgggcgctgccggggccggacttgctgctttgcaattcttccgctcccaaggggccgagggcgctctgactgggaaacaaccagatggttcggcagagaaagcagtgttagagcagttcgggttcccgttgacaggcactgaagcccgctgttacactaaccatgcactctcctatgatcaggctaagcgggtaccgcgatgggtgcttgagcacatttccaaatcaaagatcatgggagatgctgatagaaaacactgcaagttcaagcctgacccaaacatcccccccacattttccgcgttcaacgaggattacgtgggctccggctggtcccgtggacacatggcgcctgccggcaacaacaaattttcaagcaaagctatggcagaaaccttctacctgagtaatatcgtgccccaagatttcgataataactcgggatattggaataggatcgaaatgtactgcagggagctaacagaacggtttgaggatgtgtgggtagttagcggacctttaaccctgcctcaaaccagaggagacgggaagaagatagtatcttaccaagtgatcggcgaggataatgtggccgtcccctctcatctgtataaggttatcctagctagaaggtcttccgtgagcactgagcccctcgctctcggggctttcgtcgttcccaacgaggccatcggcttccaacctcagttgaccgaatttcaagtgtcgttacaggacctagaaaagttaagcggtctggtgttctttcctcacctcgaccggaccagcgatatccgcaacatttgcagcgtggacacctgcaaactactggacttccaggagtttaccctttacctcagcaccagaaaaatcgagggggctcggagcgtcctccggttagagaaaatcatggagaatctgaagaacgcagagattgagcccgacgattattttatgtcccggtatgagaagaagcttgaagaactcaaagccaaggaacaatccggtacccagatacgtaaacctagctag

SEQ ID NO: 115728 - DNA, 450 bp, synthetic construct
  misc_feature 1..450: note = Description of Artificial Sequence: Synthetic coding sequence
  source 1..450: mol_type = other DNA
atggcacctgcgggcaataacaaattctccagcaaggccatggccgagacattttacctatcaaacatagtgccacaggattttgacaacaacagcggctattggaatagaatcgaaatgtattgccgggagctcaccgagagatttgaagatgtgtgggttgttagtggacctctgacgctgccacagacccggggcgacggaaaaaagattgtgagttaccaggtgatcggggaggataatgttgcagtcccctctcatctgtacaaagaccacgctgggtgctgcgttgaaagccctttgggaacacgaacaagcgaagaagctactgccagaattcaggaaagggatgacggcggctctgaccaaaggtccggactagtggagctaggaatctatttcgagggaagagcaaatcggattagcggcagaataggctgtcgagtgtag

SEQ ID NO: 115729 - DNA, 819 bp, synthetic construct
  misc_feature 1..819: note = Description of Artificial Sequence: Synthetic coding sequence
  source 1..819: mol_type = other DNA
atgggttactttttaaaattgtatgcttatgtcaattcacattccctgtttgtgtgggtgtgcgacagatcttacaagcggagctttcgacccatgatactgaataaaataaaggaactgagtaggaatcagttttctaccatgagtcatctcaggaaagacagccagccttcatctcccggagacgatgccatggatcgctcaggactccctgatttgcagggacgctttgagctcagtggcaagaaccgacagtatccactcgacgcgctggagccccagcctagcattggggatatcaaagacattaagaaagccgccaaatccatgctggatcccgcacataagagtcactttcaccccgtgacaccctccctggtgtttctttgcttcatctttgacgggctccaccaggcacttctctccgtgggggtcagtaagaggtccaacaccgtggtcggcaatgaaaatgaggaacgcggaacaccatatgcctcgcgatttaaggatatgccgaacttcatagcgcttgaaaagagcagtgtcctgcgccactgctgtgatttactgatcgggattgcggccggctctagtgataaaatctgcacgtcgagtttgcaggtgcagagaagatttaaggcaatgatggcctccatcggccggttaagccatggcgaatccgccgacttgctgattagctgtaatgccgaatcagccattggttggatttcgtctcggccctgggttggggaattgatgttcacgctgttgttcggcgactttgaatcacccctgcataaacttagaaaatccagctag

SEQ ID NO: 115730 - DNA, 894 bp, synthetic construct
  misc_feature 1..894: note = Description of Artificial Sequence: Synthetic coding sequence
  source 1..894: mol_type = other DNA
atgcgcgccctgagagccgggctgacattggccagcggagcaggcttgggcgcagtggtcgagggctggcgaagacgtcgagaggacgcacgagcagcccctggattgttgggccggctgcctgtgttacccgtggcggccgctgcagagctccccccggtaccaggtggacctcgtggccccggcgagctggcaaagtacggcctgccaggcctggcacaacttaagtctagggagtcctatgttctctgctacgaccctcgcactagaggcgccctctgggtggttgaacagctgcgacccgaaaggctccgcggagatggtgaccgcagggagtgcgacttcagagaggatgactccgtgcacgcctaccatagggccaccaatgcggattatagaggatccggattcgataggggacatctggccgccgcggctaaccacagatggtctcagaaagctatggacgacaccttctacctttccaatgtagccccccaagtcccccacctgaatcagaacgcttggaacaacctcgaaaagtattcacggagcctgacacgttcttaccagaacgtgtatgtctgtacaggcccgctcttcctgcctcggaccgaagcagatgggaagtcatatgtcaagtatcaggtgatcggcaaaaaccatgtggcggtgcccacccattttttcaaagtccttatccttgaagccgcgggtggacagatagagctaagaacttatgtcatgccgaatgcccccgtggatgaggccatccccctggaaagatttctggtccctattgagagcattgagcgagcttcagggcttttgttcgtgcccaatatccttgcacgcgccggcagtctgaaggccattaccgcaggatcgaaatag

SEQ ID NO: 115731 - DNA, 2847 bp, synthetic construct
  misc_feature 1..2847: note = Description of Artificial Sequence: Synthetic coding sequence
  source 1..2847: mol_type = other DNA
atggtgtttctgcctctaaaatggagcttggcgactatgagctttctcctgtctagtctcctggcgcttctaacagttagcacgccaagttggtgccagtcgacagaggcgagtcccaaaagatccgatgggactccttttccatggaacaagattaggctcccggaatacgtgatccccgttcactacgaccttttgattcacgccaatctgactaccctgaccttttggggaaccacaaaagtcgagatcacagctagtcaaccgacaagcaccattatcctccatagccaccacctccagataagccgagccaccctgcggaagggcgccggcgagagattgtccgaggagcctctccaggtgctggaacaccctagacaagagcagatcgccctgttggcaccagagcctctgcttgtcgggctgccctacacagtcgttatccactatgcaggcaacttaagcgagacctttcacggattttacaaatccacgtatcggacaaaggaaggagaactgagaatcctagcctctacacaatttgaaccaactgctgctcgtatggcttttccatgtttcgatgagcccgctttcaaggcctcgtttagcatcaagatcagacgcgaaccgagacacctggcaattagtaatatgcctcttgtaaagtccgtaaccgtcgcggaaggcctgatcgaggaccacttcgatgtgacagttaaaatgtccacatacctggttgcattcataatctcagatttcgagtccgtgtcaaaaatcactaagtctggggtgaaagtcagcgtctacgccgtgccagacaagattaaccaagctgattacgcactggacgccgccgtcactcttttggagttttacgaggactatttctctatcccatacccgctgcctaaacaggatctggccgctatccctgatttccaaagcggagcaatggagaactggggactcacaacatacagagaatccgcactgctgttcgatgccgagaagtcttctgcctccagtaagttgggtattacgatgacagtcgcgcatgagctggcgcatcagtggttcggaaacctggtgactatggaatggtggaacgatctgtggctgaatgagggcttcgccaaatttatggagtttgtgtctgtgagcgtcacccacccggaactcaaggtgggtgattactttttcgggaaatgttttgatgcaatggaggtggacgcactgaactcttcccatcccgtgtcaaccccggtcgagaacccagctcagatccgagagatgttcgatgatgtatcttacgataaaggtgcttgtatcctcaacatgcttagagagtacttgagcgctgacgcatttaagagtggaattgttcagtatctgcaaaaacacagctataagaacacaaagaatgaagatttgtgggactccatggcctctatctgtccgacggacggtgtgaagggaatggacggattttgttcccggtcccagcactcaagctccagttctcactggcaccaagagggtgtggatgtaaaaacaatgatgaatacctggacactgcagaagggttttcctctgatcacaataacagtacgggggaggaatgtccacatgaaacaggagcattacatgaaagggtctgacggcgcccccgatacgggttatctttggcacgttcctctcaccttcatcacgagcaagagtgacatggtgcatcggtttctgctcaagaccaaaactgacgtccttatactgcctgaagaggtggagtggatcaagtttaacgtaggaatgaacggatactacattgttcattatgaggatgacggatgggactccctaacaggtctcttgaaagggacgcataccgccgtctcatccaatgatcgagcctccctcataaacaacgcatttcagctcgtgtctatcggaaagctgtccattgaaaaggcactggatctctctctgtacctgaagcatgagactgagataatgccagtgtttcagggcctgaacgagcttatcccaatgtataagctgatggagaagcgagacatgaacgaagttgagacccagtttaaagctttcttgatcaggctccttagggacttgattgacaaacagacgtggactgacgagggttccgtcagtgaacgcatgctgaggagccaactgctcttactggcttgcgtgcacaactatcaaccctgcgtccagcgcgcagagggctattttcggaaatggaaggagtccaatggaaacctatctctcccagtggacgtcaccctcgctgtgtttgctgttggggcccaatcaactgaaggctgggatttcctttactcaaagtaccagttttccctgagttcaaccgagaagtcccagattgagtttgcgctgtgccgaacccaaaataaagaaaaacttcaatggctacttgatgagtcgtttaagggggacaaaatcaagacccaagaatttccacagatattaacactgatagggaggaaccccgttggatacccgcttgcatggcaattcctcagaaagaattggaataaactcgtccagaagtttgaactcggcagttcatcgattgcccatatggtgatggggaccaccaatcagttctccacccggacccgcctggaggaggtgaaaggctttttctcttctttaaaggaaaacggctcacagctacggtgcgttcaacagacaatcgagacgatcgaagagaatataggatggatggacaaaaatttcgacaaaatccgtgtgtggttgcagagtgagaagttggaacacgacccagaggcggacgccaccggttag

SEQ ID NO: 115732 - DNA, 2826 bp, synthetic construct
  misc_feature 1..2826: note = Description of Artificial Sequence: Synthetic coding sequence
  source 1..2826: mol_type = other DNA
atggtttttttgcccctgaaatggtcactcgccacaatgtctttcctgttgtcctcacttcttgcactcttaaccgtttcaacacccagctggtgccagagcaccgaagcctccccaaagcgcagtgatgggactccgttcccctggaacaaaatcaggttacccgagtatgttattccggttcactacgatcttctgattcatgccaacctcacgaccctgacattctggggaactacaaaggtcgaaatcactgcttcccaaccaacttcaacaatcatcctgcatagccatcacctacagatatccagggccacattgcggaagggtgctggagagcggctttcagaagaaccattgcaggtgctggagcatccccgccaggaacagatcgccttactcgccccagagcccctgctggttgggttaccctataccgtggtcatccactatgctggcaacctgtcagaaactttccacggcttttataagtctacctaccgcacaaaggaaggcgagttgagaatcctggccagcacgcaattcgagcccactgcggcaagaatggctttcccttgtttcgacgagcccgcctttaaagcttcattctctatcaagataaggcgggaaccccggcacctagcaatatcaaatatgccactggtcaagtccgttacagtggcagaaggattgattgaggatcatttcgacgtcacagtgaagatgagcacatatctcgttgctttcattatctccgatttcgaatcagtcagcaagatcaccaagtctggcgtgaaggtatcagtatacgctgtgccagataaaatcaaccaggcagattatgccttagacgccgctgtcaccctcctagaattctatgaagactattttagcatcccgtatcccctgcctaaacaagatcttgctgctattcccgacttccaatcaggggccatggagaattgggggctgacaacttaccgggaatccgcactgctctttgacgcagaaaagagctctgccagcagcaaactcggcataactatgacagtcgctcatgaactagcgcatcagtggttcggaaacctggtcaccatggagtggtggaatgacctatggcttaatgagggctttgcaaaattcatggaattcgtgtccgtctccgtgacacatcctgagttgaaagtgggcgattattttttcgggaagtgctttgatgccatggaagttgacgctcttaactccagtcaccctgtatccactcccgtggaaaatcctgctcagatacgggaaatgtttgacgatgtttcctacgataaaggtgcttgtatattaaacatgctgcgtgagtacctctccgccgatgcattcaaaagcggtattgtacaatatttacagaagcactcgtacaaaaacactaagaacgaggatctgtgggatagtatggccagtatatgtcctacagatggtgtcaagggcatggatggattttgctcaagatctcagcatagcagctctagctctcattggcaccaggagggcgtggatgttaaaacaatgatgaacacatggaccctacagaagggattcccactgatcactattaccgtgcgcgggagaaacgttcatatgaaacaagagcattacatgaaaggaagtgacggagctccggacactggctacctgtggcacgtgcctctgacctttatcaccagcaagtccgacatggtccaccggtttttgctgaaaaccaaaaccgacgtcctaattctccccgaggaagtagagtggataaaatttaatgtcggaatgaacggatattatatcgttcattacgaggatgacggatgggatagcctcactggcctgctcaaggggacacatacggctgtgagctcaaacgacagggcctcacttattaataacgcttttcaattggtgagtatcggaaagctctccattgagaaagccctggatttgagcctgtacttgaaacatgaaaccgagataatgccggtatttcaaggcctgaatgagttaatcccgatgtataagctcatggagaaaagggatatgaacgaggtcgagacccaatttaaggcattcctgatccgtctgttaagggatctgatcgacaagcaaacttggacagacgaaggatccgtcagcgagaggatgctgaggagccagctgttactgctggcctgcgtgcataactaccagccatgcgtgcagagggctgaaggatacttcagaaagtggaaggaatctaatggaaacctgtctctccctgtagacgttacattggcagtgttcgccgttggcgcgcagagcaccgagggttgggatttcctgtacagcaagtatcagttttcactgtccagtaccgagaagtctcagatcgaatttgcattatgcagaacacagaacaaagagaagctgcagtggctgctcgacgaaagcttcaaaggagataagattaagacacaggagttcccacaaattttgactctgattggaaggaaccctgtcggttatcccctcgcgtggcagtttctgaggaagaattggaacaagcttgtccagaaattcgagctggggtcatctagtatcgcacatatggtcatgggtaccactaaccagtttagtacacgtaccagactggaagaagtgaagggcttcttctctagtctgaaagagaacgggagccaacttcggtgtgtgcagcagactattgagacaatcgaggaaaatatagggtggatggataaaaatttcgacaagatcagggtgtggctgcaatctgagaagttagagaggatgtag

SEQ ID NO: 115733 - DNA, 2826 bp, synthetic construct
  misc_feature 1..2826: note = Description of Artificial Sequence: Synthetic coding sequence
  source 1..2826: mol_type = other DNA
atggtgttcttgcccctgaaatggagtctggctacaatgtcatttcttttgagtagtttgctggctctgctgaccgtcagtacaccttcttggtgtcagagtacggaggcttcccctaaacgctccgatggaactccctttccctggaataagatcaggctgcctgagtacgtaattccagttcattatgatctcctcattcacgcaaatttgactaccttgacattttggggcaccaccaaagttgaaataaccgcatcacagcctacgtctacaatcatcttacacagccaccatctccaaatatcgcgagcaaccctgagaaagggcgcaggagaaagactgtcggaagagcctttacaggtgctggagcacccccgacaagaacagattgccctgctcgccccggaacctttgctggtgggtctgccctataccgtggtcattcattatgcaggcaatctgtccgaaaccttccacggcttttacaagtctacgtatagaactaaagagggcgaactaaggattttggcaagtactcaatttgaacctacggcagcccggatggcatttccttgctttgacgagcccgcgtttaaagcaagttttagtatcaaaatccgaagagaaccacgacacttagctatctctaatatgcccctggtaaaaagcgtgactgtagctgaaggactgattgaagatcatttcgatgttactgtgaaaatgtctacatatctggtggcctttataataagcgactttgaatcagtgagcaaaatcacaaagtcgggcgtaaaagtgtccgtttacgccgtgcctgataagataaatcaggccgattacgccctcgacgccgctgtgaccctgttggagttttatgaggactatttttcgatcccatatccactccccaaacaagatctggctgcaattcccgatttccagagcggcgctatggagaactgggggttaactacttatcgcgagtccgccctgctcttcgacgcagagaaatccagcgctagttcaaagctgggtatcacaatgacagtcgctcatgaactggcccatcaatggtttgggaatctcgtgaccatggaatggtggaacgacttgtggctcaacgagggtttcgctaaatttatggagttcgttagcgtttctgtaacccaccccgagctgaaagtgggagactacttttttgggaagtgtttcgacgcgatggaagtcgacgctctgaacagctcccatcctgtgagcactcccgtagaaaaccctgcacaaatcagggagatgttcgatgacgtgtcttatgacaaaggtgcctgcatcttaaacatgcttcgagagtatctctcagctgacgctttcaagagtggtattgtgcaataccttcagaagcattcctacaagaataccaagaatgaggatttgtgggatagtatggctagcatttgtccaaccgatggagtgaaaggtatggacgggttttgttctagatcccagcacagcagctcttcctctcattggcaccaggaaggggtagatgtgaagacgatgatgaatacttggaccctgcaaaaagggttccctttgatcacaatcaccgttagaggcaggaacgtgcatatgaaacaggagcattatatgaagggaagcgatggcgcccctgataccgggtacctgtggcatgtacctctgacgtttataacgtcgaagtccgacatggtccacagattccttctgaagacaaagaccgacgtgctgatcctgcctgaggaagtcgagtggataaagttcaatgtggggatgaacggctattatattgtgcattacgaggacgatggctgggactctcttactggcctgcttaagggtacgcataccgccgtgtcgagcaacgaccgtgcctccctgattaataatgcatttcaattggtgtcgatagggaagttaagcatcgagaaggctctggatctgtccctataccttaagcacgagacggagattatgccagtgtttcagggcctgaatgagttaatccctatgtataagttgatggaaaaaagggacatgaatgaggtggaaacgcagtttaaggctttcctgattagactcctacgcgacttgattgacaaacagacctggacagatgaagggagcgtgtccgagcggatgcttaggtcgcaactattacttctggcttgtgtacacaattatcagccgtgtgtacagcgtgctgaaggttacttccggaaatggaaagaatctaacgggaacttatccctgccagtcgatgttaccctggctgtctttgcagtaggggcccaatccaccgagggttgggatttcttgtatagcaaatatcagtttagtctgtcgtccacagaaaaatcacagatcgaatttgccctctgtaggacacagaacaaagagaagttgcagtggctgctggatgagtcgtttaagggagataagattaagacccaggagttcccacagatattgactctgatcgggagaaatcctgtgggctatccactcgcttggcagttcctacggaaaaactggaacaagctggttcagaagtttgagcttggtagcagcagcatagctcacatggtaatgggaactactaatcagttcagcacccgtacccgcctggaggaagtcaaggggttctttagttctctgaaggagaatggaagtcagctccgttgtgtgcaacagacaatagaaaccatcgaggaaaacattggatggatggataagaattttgataaaattcgcgtctggctccaatcagagaagctcgagcggatgtag

SEQ ID NO: 115734 - DNA, 390 bp, synthetic construct
  misc_feature 1..390: note = Description of Artificial Sequence: Synthetic coding sequence
  source 1..390: mol_type = other DNA
atggtgttcctacccctgaagtggtccttagctaccatgtcctttctgttatctagcctgctcgccctgttgacggtgagtactcccagttggtgccaaagcaccgaagcctcacccaaacgtagtgacggcactcctttcccttggaacaaaatcaggctccccgaatatgtgatacccgtccattacgacctgctcatccatgctaatcttaccactctgacattttggggtactacgaaggtggagataacagcatcccagcccacatccactattattctgcacagtcatcatctgcagatctccagagcgacattacggaaaggcgccggcgaacggctgtccgaagaacctttgcaggtcttggaacatccccgacaagaatag

SEQ ID NO: 115735 - DNA, 2748 bp, synthetic construct
  misc_feature 1..2748: note = Description of Artificial Sequence: Synthetic coding sequence
  source 1..2748: mol_type = other DNA
atgtttcacagctcagccatggttaattcacaccgaaagcccatgttcaacattcaccgagggttttactgtctgactgccattttaccacagatctgcatttgctctcagttttctgttccttctagctatcatttcactgaagacccaggagcatttcccgtcgcaacaaacggagaacggtttccttggcaggaactacgcctcccctccgtcgtcatcccactgcactacgacctgtttgtccatcccaatctcacaagtttagatttcgttgcctcagaaaaaatcgaggttctggtttcaaacgctacccaattcatcattttgcactcgaaggacctggagatcactaatgccacacttcaaagcgaagaggactcaaggtatatgaaaccaggaaaggaattaaaggtgctttcataccctgctcatgaacagattgcactactggttcctgaaaaactgacaccacatctgaagtactatgtggccatggattttcaagcaaagctaggcgatggcttcgaaggattttacaagtccacatatcgcaccctggggggagaaacccggatcttggccgtgactgacttcgagccgacgcaggccaggatggcctttccttgcttcgacgagcccctgttcaaggcgaactttagtattaagatcaggcgcgaaagtagacatattgctctgtcaaacatgcctaaggtctccatttacgccagtccagataagcggaaccaaacgcattacgccctgcaggcttcactcaaactgttggacttctatgaaaagtactttgacatctactatcctctatcaaaactcgatctcatcgcgattccagatttcgcacctggtgccatggaaaattgggggctcatcacatatcgggagacatcactgctctttgatccaaagaccagctccgcctccgataaattatgggtgactcgcgtcattgctcatgaactggctcaccaatggttcggtaacctcgtgaccatggagtggtggaatgacatctggcttaaggagggctttgcaaagtacatggagttgattgctgtgaacgcgacctatccggagctccagtttgatgattattttcttaacgtatgtttcgaggtgatcaccaaagatagcctgaacagctcccgaccgatttctaaacccgccgagactccgacacagatccaagagatgttcgatgaggtctcttataataaaggagcttgtatcttgaacatgcttaaggactttctgggagaagagaaatttcagaaaggcatcatccaatatcttaaaaaatttagctatagaaacgccaagaatgacgatctgtggagttcgctcagcaactcttgccttgagagcgactttacgtctggtggcgtctgccactccgaccctaaaatgacatcaaacatgctggccttcctcggtgagaatgcagaagttaaagagatgatgacaacttggactctgcagaaggggattcccctgctcgtggtgaaacaggacggatgtagcctgagattgcaacaggagcggttcctgcagggagtgtttcaggaagatcccgagtggcgtgcactgcaggagaggtacttgtggcacattccacttacatattctacaagcagtagtaatgtaatccatcggcacatcctcaagtctaagacagataccctagatctccctgagaaaacatcatgggtcaagttcaacgtggactccaatggttactatatcgtacactacgaaggccacggttgggatcaactgatcacgcagctgaatcagaatcatactctgcttcggccaaaagatagggtgggcctgatccacgacgtgtttcagctggtcggcgccggtcgcttaaccttggacaaggcgctggatatgacatactacttacaacacgagacctcatcgcctgcgctcctcgaaggcttgagctatctcgaaagcttttatcacatgatggataggcggaatatctccgatatctctgagaacttaaagagatatttgcttcagtacttcaaacctgtgattgatcgccaatcatggagcgacaaggggagcgtatgggaccgtatgctgagaagcgctctcctgaaacttgcatgtgacctcaaccatgcgccttgcatacagaaagcggccgaactctttagtcagtggatggaatcaagcgggaaactgaatatccccaccgatgtgctcaagattgtgtattctgtcggagcacaaactacagcaggatggaattatttgctagaacagtacgagctgtcgatgagtagcgctgaacagaataaaatcttgtacgccctgtcaacatcaaagcatcaggagaaactcttgaagctgattgagctcgggatggaggggaaggtaatcaagacacagaacctggccgcgctgctgcatgctattgcacgtagacccaaaggacagcagctagcctgggacttcgtgagggagaattggactcaccttttgaaaaagtttgatcttggctcctacgatatacgcatgatcatctctggaactacagcccacttctcctctaaggataaactgcaagaggtgaaacttttttttgaatcgctggaggcccagggcagccacctggatatattccagacggtcctggaaacaatcacgaaaaacatcaagtggctggagaagaacttgccaaccctacgaacatggcttatggtaaacacctag

SEQ ID NO: 115736 - DNA, 2883 bp, synthetic construct
  misc_feature 1..2883: note = Description of Artificial Sequence: Synthetic coding sequence
  source 1..2883: mol_type = other DNA
atgttccacagcagcgcaatggtgaacagtcatcgcaaaccaatgtttaacatacatcgggggttttactgcctcacagctatcctcccgcagatttgcatatgctcgcagttctcagtgccatcttcttaccacttcacagaggatccaggtgctttccctgtggcaaccaatggcgaacggttcccctggcaggaattacgcctgccctcagttgtgatacccctgcactacgacctgttcgtacaccccaaccttacctccttggacttcgtggcctcagagaaaatagaagtgttggtgagcaacgccactcagtttatcattctgcacagtaaggacctggagataactaacgccacgctccagagcgaggaagatagcaggtacatgaagcccggcaaagagttaaaagtgttgagctatcccgcccatgaacagatagccctgcttgtgcccgagaagttaacacctcacctgaagtactacgtggcgatggattttcaggcgaagctgggcgatgggtttgaggggttctataaaagcacctatcgcactctgggcggggaaactagaatattggcagtaacggacttcgagccaacccaggctcgaatggcctttccgtgttttgacgagccactgtttaaggcaaacttcagtataaagatccgccgggagtcacgccatatcgccctttctaatatgcctaaagttaagacaattgaactggagggcggattgcttgaagaccactttgagaccacggttaaaatgagcacttatcttgtggcatacattgtctgtgacttccattccttatccggttttacatcctcaggcgtgaaagtgtccatctacgcgtctcctgacaagcggaaccagacgcactacgcacttcaggcgtccctgaaactcctggatttctatgagaaatacttcgatatttattatcccttgagcaaattagatcttatcgctatccctgatttcgctccgggcgctatggaaaattggggtcttatcacctatcgcgagacatccctgctgttcgaccctaagacatcatcagcatccgataaactctgggtaacccgcgtaatcgcacatgaattggcccatcagtggtttggcaacctcgtcaccatggaatggtggaatgatatatggctgaaagagggattcgctaagtacatggaactgattgccgtcaatgctacttaccccgagctacagttcgacgattactttctgaatgtatgctttgaagtgattacaaaagattctctgaactctagccgtccaattagcaaacccgcagaaacacccacacagatccaggaaatgttcgacgaggttagctacaataagggagcctgcattctgaatatgctaaaggacttcttaggggaagaaaagttccagaaaggcattatccagtacctgaagaagtttagttacagaaacgctaaaaatgatgatttgtggtccagtctgagtaattcctgcttagagtccgatttcacttctggcggagtatgccatagtgaccccaaaatgaccagtaatatgctagcttttcttggggagaacgccgaggtcaaagaaatgatgactacctggacactccaaaagggaattccactgctggtcgtgaagcaggacggatgtagtctccgcctccagcaggaaagattcctacagggggtattccaagaggatcccgagtggcgggctctgcaagagcggtatctgtggcatataccactgacctatagtacatcatcgagcaatgtgattcaccgacatatcctcaaatctaaaactgatacgctggatctgccagagaaaacatcctgggtgaagtttaacgtggattccaacggttactatatcgttcattacgaaggccatggctgggatcagctgattacccagctcaatcaaaaccacacactgctccggcctaaagaccgcgttggccttatccacgatgttttccagctggtaggcgccgggagactgactcttgacaaagctttggacatgacgtactatctccagcatgaaactagcagccccgcactgttggaagggctgtcgtatctggaatccttctatcacatgatggatcgccggaacatttccgacatttccgaaaaccttaaacggtacctgttacagtacttcaaacctgttattgatcgtcagtcctggtccgacaagggctccgtctgggatagaatgctgagatctgccctcttaaagctggcatgtgacctgaatcacgcaccatgcatccagaaagctgcagagttgttttcgcagtggatggagagcagtggcaaactcaacatccccacagacgtacttaaaattgtgtacagcgttggcgcgcaaacgactgccggctggaactacctgctggagcaatacgagttgagcatgtcctccgctgagcagaataaaatcctttacgccctatctaccagtaaacaccaggagaaattattaaagcttatagaacttggaatggagggaaaagtaatcaaaacgcaaaacctggctgccctactgcatgctattgcccggcgtcccaagggacagcagcttgcctgggactttgtccgcgagaactggacacaccttcttaaaaaattcgatctggggagctacgatattagaatgatcatcagtggcacaacggctcatttctctagcaaggacaaactacaggaggtcaaattgttttttgagagtcttgaggcccagggatcccacctcgatatatttcagacagtactggagacaattacgaagaacatcaaatggctggagaaaaatctccctacattacgcacctggctcatggtgaacacttag

SEQ ID NO: 115737 - DNA, 1053 bp, synthetic construct
  misc_feature 1..1053: note = Description of Artificial Sequence: Synthetic coding sequence
  source 1..1053: mol_type = other DNA
atgttccattcatcagctatggtcaatagtcatcgcaagcctatgttcaatatccatcgaggtttctattgcctgactgccattctaccccagatttgtatctgctcacagttttcagtcccatcatcttatcacttcacagaggatccaggggcctttccagtcgcgaccaacggtgagaggttcccatggcaggaattgagactcccttccgtggtaatccccctgcattacgacttgtttgtgcatccgaatctcacttcgctggactttgtcgcctccgaaaaaattgaagttctcgtcagcaacgctactcagtttatcatactgcattccaaagacctggagatcactaacgcgaccttgcagtcagaagaggacagccgatatatgaaacccggcaaggagctgaaggtgctctcatacccagcacatgaacagatcgctcttttggtaccggagaaactgaccccccacttgaagtactacgtggccatggattttcaggcaaagttgggggatggctttgagggtttctacaaaagcacctacaggacattgggcggggagactcgcatcctggccgtgacggactttgaacctacgcaagcaagaatggccttcccctgtttcgatgagccacttttcaaagccaacttctccatcaagattcgccgtgagagcaggcacattgccttgtctaacatgcctaaggtcaagaccatcgaattggagggcgggctgcttgaagaccacttcgagacgacagtaaaaatgagtacctatttggttgcatatatcgtgtgcgacttccatagcctaagcggtttcacgtcttctggggtaaaggtgtccatctacgcctccccggacaagaggaatcagacacactatgctctgcaagcttctttgaaactactggacttctacgagaagtatttcgacatttattatcctctcagtaaattgggaatgttcaagttccatataatcgtatttatttttgcccacaagacttgcttcgacttatttcccttaagtctcagtatgtag

SEQ ID NO: 115738 - DNA, 2085 bp, synthetic construct
  misc_feature 1..2085: note = Description of Artificial Sequence: Synthetic coding sequence
  source 1..2085: mol_type = other DNA
atgtttcactccagcgccatggtgaattcgcatcgcaagcccatgtttaatatccacaggggtttctattgtctgaccgccattctcccacaaatttgcatctgttcccagttctcagtcccctcctcctaccatttcaccgaggatcccggtgcttttcctgtcgcgaccaatggcgagagattcccctggcaggaattaagattgcccagtgtggtaatccctctccactacgacctgttcgttcacccaaatctgacatctctcgactttgtcgcttccgagaaaatcgaggtgctagtgagcaatgcaacgcagttcattatcctccacagcaaggacctggaaattacaaacgcaacccttcagtccgaggaagatagcaggtatatgaaacctggaaaggagctcaaagtgctttcttatcctgcacatgaacaaatcgccctcctggtccccgagaaactcactccacacctgaaatactacgtggcgatggattttcaagccaagctcggagatggctttgagggattctataaatccacgtatcgcactttgggaggcgagacccggatcctggccgttacggattttgaacctactcaggctcggatggctttcccatgtttcgatgaaccactttttaaggctaattttagcataaagattcggagggaaagcaggcatattgccctttcaaatatgcccaaggtgaaaactatcgagctggagggcggtctactggaggaccattttgagaccacagttaagatgagtacttatctggtcgcatatatcgtttgcgacttccatagcctgagcggattcacgagtagcggcgtgaaggtcagcatatatgcttccccggataagagaaatcaaacccattatgcactgcaggcctccctgaagctactcgatttttatgagaagtacttcgatatttactatcccctttctaagctggatctgatagctatccctgacttcgctccaggggccatggagaactgggggctgatcacatatcgggagacttcgctgctgttcgaccctaaaacaagttccgccagcgacaaactgtgggtcaccagagtcatcgcccatgaactcgcacaccagtggttcggtaacctcgtgacgatggagtggtggaatgatatatggttaaaggaagggttcgctaaatacatggaacttatagccgtcaatgctacataccctgagctgcagttcgacgactacttccttaatgtgtgcttcgaagtaatcacaaaggatagtctcaattcgtcccgacctatcagcaagcccgccgagacccctacacagatccaggagatgttcgacgaagtgtcgtataacaagggtgcgtgtattctgaatatgcttaaagacttcttgggcgaagaaaagtttcaaaaggggattatacagtacctaaaaaaattcagctatagaaatgcaaaaaatgatgatctttggtctagcttgagtaacagttgtctggagtctgacttcacctccgggggtgtgtgccattcggatccgaagatgacgtctaatatgctggctttcttgggagaaaatgccgaggtgaaagaaatgatgaccacctggacactccagaaaggcatcccacttctggtggtgaagcaagacggctgcagtctccggctccagcaagagaggttcctgcaaggagtgtttcaggaagatcctgagtggagggcactgcaggaacgctacttatggcatatcccactaacatattctacttctagttcgaacgttattcacagacacattctcaagtccaagactgacacattggacctgcctgagaagaccagttgggttaaattcaatgtggattctaatggttactacattgtccattatgaggggcacggatgggatcaattaatcacacagctgaaccagaaccacacacttctgcgcccaaaagatagggtaggcctgattcatgatgtgttccaactggtgggagcaggtcgactcacattagataaagcattggatatgacttactatctgcagcatgaaacctcctccccctag

SEQ ID NO: 115739 - DNA, 1452 bp, synthetic construct
  misc_feature 1..1452: note = Description of Artificial Sequence: Synthetic coding sequence
  source 1..1452: mol_type = other DNA
atggaagaggggggcggaggggtgagaagcctagtccctggggggcctgtactcctggtcttgtgtggcctcctcgaagcaagtggcggtggaagggccctgccccagctgtcagacgacatcccttttcgggtgaattggccaggaacggaattcagcctgcctaccacgggggtgctgtataaggaagacaattatgttatcatgaccaccgcacataaagaaaaatataagtgtattttgcccttggtgacttcaggggatgaagaggaggagaaagattacaaaggcccaaacccacgggagctcctggaacccctgtttaagcagagctcgtgctcttaccgaattgaatcttactggacatacgaggtatgccacggaaagcacatacggcagtatcacgaggagaaggagaccggacagaagattaatattcacgagtactacctcggcaacatgttggcgaagaatctcctgtttgaaaaggagagagaggctgaggaaaaggagaaatcaaatgagatcccgacaaaaaatatcgaggggcagatgacgccctattatcccgtaggcatgggaaatggaacaccctgcagtctgaagcagaataggccacgctccagcacagttatgtatatttgtcaccctgaaagcaagcatgagatactatccgtggcagaggtcaccacatgtgagtatgaggtcgttatcctgacacctctgctttgctctcaccccaaataccgcttcagggcaagcccagtaaacgatattttctgccaatcacttccaggttctccctttaaacccttgacactcagacagctagaacaacaggaggagattttgagggtccctttcagaaggaacaaagaggaggatctccagagtacaaaggaggaaaggttccctgcaatccacaagtccattgcgatcgggtctcagccggttctaactgtcggtaccacacacatctccaaactgaccgatgatcagctcatcaaggaattcctgtccggttcatactgctttcgggggggggtcggatggtggaagtacgaattctgttacggcaaacacgttcatcagtatcatgaggataaagacagtgggaagacatcggtggtggtggggacctggaaccaagaggagcacatcgaatgggctaagaagaacacggctagagcctaccacctccaagatgacggaacacagaccgtgcggatggtgagccacttctatggcaacggcgatatctgtgacattactgataagcctaggcaagttaccgtgaagctcaagtgtaaggagtccgattcaccgcacgccgtgaccgtttacatgctcgaaccccactcttgccagtatattctgggcgtcgaaagccctgttatttgcaagatactggataccgccgatgagaacggtctgctctctctgccaaattag

SEQ ID NO: 115740 - DNA, 1290 bp, synthetic construct
  misc_feature 1..1290: note = Description of Artificial Sequence: Synthetic coding sequence
  source 1..1290: mol_type = other DNA
atggaagaaggcggggggggggttcgctcactggttccgggcggaccagtactgctggtcttgtgcggcctattggaggccagcggtggcggtagagccctccctcagttatctgatgatatcccttttagggtgaattggcctgggacagagtttagtttacccactactggggttttatataaagaagacaattacgtcatcatgaccacagcccacaaggagaagtataaatgtatactacccctggtgacctcaggcgacgaggaggaggagaaggattacaaaggccctaacccccgcgaactgctggaacccttattcaagcagtcatcctgtagctatagaattgagtcctactggacttacgaagtgtgtcacggcaaacatataagacagtaccacgaagagaaggaaactggccaaaagattaatatccacgagtactatcttggaaatatgctggccaaaaacttgctatttgagaaagaaagggaggctgaggaaaaggaaaaatccaacgagatcccaaccaaaaacatcgaaggtcagatgactccatattatcccgtgggaatggggaatggtacaccgtgttcactcaaacaaaatcgacctcgatccagcacagtgatgtatatttgccaccccgagtcgaagcatgagattttaagcgtagcggaagtcaccacatgcgagtatgaggttgttatcctaaccccactactgtgctcccacccaaagtatcgatttagggccagcccggtgaatgacatcttctgtcagtctctgcctggatctccatttaagccattgactcttcgccagctcgagcagcaggaggaaatcctgagagtaccgtttagaaggaataaggagggcgtaggctggtggaagtacgaattctgctacggcaagcatgtccaccagtatcacgaggacaaagacagtggaaaaactagcgtggtggtgggcacatggaaccaggaagaacatattgagtgggccaaaaagaacacagctcgtgcttaccatcttcaagacgacgggacgcagactgttcgcatggtctctcacttctacggcaatggtgatatctgcgatatcaccgacaagccacgccaggtgacggtaaagctgaaatgtaaagagagtgattctccgcacgccgtgaccgtttacatgttggaaccacacagctgtcagtatattctcggagtggaaagccccgtgatttgtaaaatcctggacacagccgacgagaatggcctccttagtctgcccaattag

SEQ ID NO: 115741 - DNA, 1374 bp, synthetic construct
  misc_feature 1..1374: note = Description of Artificial Sequence: Synthetic coding sequence
  source 1..1374: mol_type = other DNA
atggaggaagggggtggcggagtgaggtctctggtccctggtggcccagtgctactggttctctgcggacttttggaggctagtggcggtgggagagccctaccgcagctgagcgacgacatccctttcagggtgaactggccaggcaccgagttttcgctacctacaaccggggtgctctataaggaggataactacgtgatcatgaccaccgctcataaggaaaagtataaatgtatcttgcctctggttacatctggagatgaggaggaggagaaggattacaagggacctaatccacgcgagcttctcgagccattattcaagcagtcatcctgctcttatagaatagagtcctactggacctatgaggtgtgccacgggaagcatatccgacaataccatgaggaaaaggagactggtcagaaaattaacatccatgagtactacctgggcaatatgttggctaagaacctcctgtttgaaaaagagcgcgaagcggaagagaaagaaaaatccaacgagattcccactaagaatatcgaaggccaaatgaccccctactatcctgtcggaatggggaatgggaccccatgttccctcaaacagaatcgacctcgaagctccaccgtgatgtatatttgtcaccctgagagcaagcatgaaattctgtcagtggccgaagtcaccacatgcgagtacgaagttgtgatcctaacccctctgttatgtagccacccaaagtatcgattcagagcctcaccggtcaacgacatcttctgtcagtctctgcctggctcacctttcaaaccattgaccctgagacagctggagcaacaggaagaaatcctccgagttccttttcggagaaataaggaggaggacctccagagtacaaaggaggaaagattccccgccatccacaagtccatcgcaattggctctcagccagtgctgaccgttggcaccacacacatatcgaagcttactgacgaccaactcattaaagagttcctgtccgggtcttattgtttcagagggggagtggggtggtggaaatacgaattctgctatggtaagcacgtgcaccagtaccatgaagacaaggattctggaaagacttcagtggtagtggggacttggaaccaggaggagcacattgagtgggctaagaaaaatacggcgagggcctaccatctgcaggacgacggtacccagactgtccggtgtaaagagtcggactctcctcacgccgtcacagtgtacatgctggagcctcacagctgtcagtacatccttggagtggagagtccggtgatttgcaagatattggacactgcggatgagaacgggctcctgagcctaccgaactag

SEQ ID NO: 115742 - DNA, 2715 bp, synthetic construct
  misc_feature 1..2715: note = Description of Artificial Sequence: Synthetic coding sequence
  source 1..2715: mol_type = other DNA
atggagtggggttccgagtccgccgcagtaaggcgccatcgcgtgggagtagaacgcagggaaggcgctgcggcagccccaccaccggaacgcgaggcgcgcgcccaggaacccctggtagacggttgctccggcggagggcgaactaggaaaagatctcctggaggaagtgggggcgccagtagaggcgctggcaccggattaagtgaagtgagggccgctctcgggttggctctgtatctaattgcccttcgaaccttggttcagctgagcctgcagcagcttgtgttgagaggcgccgctggccaccgaggggaattcgacgcattacaggctcgcgactatctggagcatatcaccagcatcggcccccgtaccaccggcagtcccgagaacgagattctgacagtacattacctgctggagcagattaaacttatcgaagttcagtctaattccctccataagatcagtgtcgatgtccagcgtcccaccgggtccttttcgatagattttctgggtggattcactagttactatgataacattacgaacgtcgtggtgaagctggagccacgagacggcgcccagcacgctgtcctggctaattgccactttgactctgtggccaattcgcctggcgcatctgacgatgccgtatcttgctccgttatgctcgaggtcttgagggtcctatccacctccagcgaagcattacaccacgccgtcatattccttttcaacggcgccgaagagaacgtgctgcaggcgtctcatggatttatcacccagcatccctgggcgtctctaataagggcttttatcaatttggaggcagccggtgtcggaggaaaggaattagtgtttcagactggtcctgagaatccctggttagttcaggcatatgtgtccgccgcgaagcacccttttgctagcgtggtggcacaggaggtattccagtccgggattataccttctgatactgatttcaggatctaccgagacttcgggaatattccaggaattgacttagcatttattgagaatggttacatatatcatacaaaatatgacaccgctgatcgcatcttgactgatagcatacagagggcgggtgacaatattctagccgtactgaaacacttggcaacttctgacatgcttgcagccgcttccaaatacaggcatggcaacatggtgttctttgatgttctgggtctgttcgtaatcgcctacccctcccgtatagggtctatcataaactatatggtggtaatgggcgtggttctatacctggggaaaaagtttctgcagcccaagcacaagactggtaattataagaaagacttcctatgcggcctcggaattacgctgatttcatggtttactagcctcgtgactgtactgattatagctgtcttcattagcctaattggtcaatctctgtcttggtacaatcatttctacgtgtctgtgtgtctctacggcaccgctactgtggctaaaatcattctcattcatacactggccaagcggttttattatatgaatgctagcgcccagtatctgggagaggtttttttcgacatatctctctttgtccattgctgctttctcgtgacattaacataccaagggttgtgctccgccttcatctctgctgtctgggtggcatttccacttctaacaaaactctgcgttcacaaggactttaagcagcacggggcccaaggtaaattcatcgcattttacctcttggggatgttcatcccctacttgtatgctctttacctgatatgggctgtctttgaaatgttcacacccatcctcggaaggagcggcagcgaaattcctcccgatgtggttcttgcatcaatacttgctggatgcactatgatcctctcatcatacttcatcaacttcatttatctggccaagagtacaaagaagacaatgcttactctgacactcgtttgtgctattacatttctcttggtgtgcagcggcactttcttcccgtactcctccaatccagcgaacccaaaaccaaagcgggtgttccttcaacacatgacccggaccttccatgacctagagggaaatgccgtgaaaagagattctggcatttggatcaacgggtttgactacacaggtatctcccatattactccgcacattccagaaattaatgactcgatacgggcccattgtgaagagaacgcccccttgtgtgggttcccctggtacttgcccgtgcatttcctgatccgcaaaaattggtacctgccagcccccgaggtttccccccgcaatcctcctcacttcaggctcatatcgaaagagcagaccccgtgggacagtattaagcttacctttgaagccactggcccatctcacatgtctttttacgtgcgcgcccataaaggaagcaccttaagccagtggagcctcggcaacggaacccccgtgaccagtaagggaggggactattttgtattctacagccatggcttacaagcgtctgcctggcaattttggatcgaggtgcaggtaagcgaggaacaccctgaggggatggtgaccgtcgcaattgccgcacactacctgtctggcgaggacaagagatccccccagctggacgcattgaaagagaaattccccgattggacgtttccttccgcatgggtttgtacgtacgacttatttgtgttctag

SEQ ID NO: 115743 - DNA, 1056 bp, synthetic construct
  misc_feature 1..1056: note = Description of Artificial Sequence: Synthetic coding sequence
  source 1..1056: mol_type = other DNA
atgctggaagtgctgcgggtgctgagtactagcagcgaagcccttcatcatgcagtaatatttctctttaacggcgccgaggagaacgtcttacaagcatcccacggctttattacacagcacccgtgggctagtttaattagagccttcatcaatctggaggccgcaggggttggcgggaaggagctggtctttcagacaggcccggaaaatccatggctcgtgcaggcttacgtatccgccgccaaacacccttttgcatctgtcgtggcccaagaagtgttccaatctggtatcatcccctctgatacagacttcaggatatatcgggacttcggaaatatccccggtatcgacctggcgtttatcgagaatggctatatctatcacaccaaatacgacacggcggatcggattctaaccgacagcatccaacgagccggtgataacatcctggccgttttaaagcacttagcgaccagcgatatgcttgctgccgcctctaagtatagacatgggaacatggtgtttttcgacgtcctaggcctttttgtgatcgcctaccctagtcggatcggaagcatcatcaattacatggtcgtcatgggcgtggtcctgtacctgggcaagaagttcttgcagccgaaacacaagaccggcaattataagaaggatttcctgtgcggactgggcattaccctgatttcttggtttacatccctggtaaccgtgctaattattgccgtgtttatcagtctgatcggccaatccctgtcctggtataaccacttctacgtgtcagtgtgtttgtacggaacagcaacggtggctaaaattatccttattcatacgctcgccaagcgattttattatatgaatgcatcagcccagtatcttggcgaggtgttttttgacataagcctgtttgttcactgctgcttcctggtgacacttacctaccaaggcctttgttcggcctttatatccgccgtctgggttgcttttccgcttctgaccaagctatgtgttcacaaagacttcaaacaacacgactag

SEQ ID NO: 115744 - DNA, 2715 bp, synthetic construct
  misc_feature 1..2715: note = Description of Artificial Sequence: Synthetic coding sequence
  source 1..2715: mol_type = other DNA
atggagtgggggtctgaatccgccgccgttcggagacacagagtcggcgtagagaggagagagggcgctgcggccgcgcctcctccagagcgcgaggccagggctcaggagccactggtcgacggatgttctggcggcgggcgaacgaggaagcgatctcctggcggctcaggaggtgccagtcgcggcgcagggacaggcctgagtgaggtcagagccgctttagggcttgccctgtatttgattgctctgcgaactttagtgcagttgtctctgcagcaattagtcctgcggggagcggccggccacagaggagagtttgatgcactccaggcgcgggactacttagagcatatcactagcatcgggccgcggactacaggctcacctgagaacgaaattctaacagtgcattatctgctggagcagatcaagcttattgaggttcagagtaattctttacataaaattagcgtcgacgtgcagcgccccacgggtagcttctctatagatttcctgggcggcttcacatcctattacgataacataaccaacgtagtcgtgaagctcgagccccgagatggcgcccagcatgccgtgctggccaattgccatttcgatagtgtcgccaacagcccaggcgcttctgacgatgccgtgtcctgcagcgttatgcttgaggtgctgagggtattaagtacgtccagtgaggctctgcatcatgcagtcatcttcctgttcaatggcgccgaggaaaatgtcttacaggcgtcccatggcttcatcacccagcacccctgggcaagtttgatacgggccttcatcaacctcgaagccgccggcgtcggaggtaaggaattggtttttcagactggacccgaaaatccatggctggttcaggcatatgttagtgccgcaaaacatccgtttgcctctgtggtggcacaggaggtgttccagagcggcatcattccatcggataccgattttcggatctatagagactttggtaacatcccaggcattgacctcgcttttatcgaaaatggatacatctaccatacaaagtacgacacagcggacaggatcttaacggatagcatccaacgggctggggataacatcctggccgtgcttaaacacctggcgacaagcgatatgctggcggctgcgagcaagtaccggcacggtaacatggtattttttgatgtactcggactattcgtgatagcctaccccagtagaattggcagcattattaactatatggtggtgatgggcgtcgtactttacctggggaaaaagtttctgcagccaaaacataaaacagggaattataaaaaagattttctctgcggcctgggtattacccttatctcttggttcaccagcctcgttacagtcctcatcattgccgtgtttatctcactgataggacagtccctttcatggtacaatcatttctatgtttccgtgtgcctctacggcaccgccacagttgccaaaataattctgatccacaccctcgcgaaacggttttattacatgaatgctagtgcccagtatcttggcgaagtcttctttgatatcagcctcttcgtgcattgttgtttcctcgtgaccttgacgtaccaagggttatgctccgccttcattagcgcagtctgggtggctttccccttactgaccaaactctgcgtgcacaaggacttcaagcagcacggggcccagggaaaatttattgcattttatctcttgggaatgtttataccttatttgtatgctctatatctcatatgggccgtgtttgagatgttcacacccatcctgggcagatctggcagcgaaatcccgccggacgtcgtcctagcttctatcctggctggatgcactatgattttgtcttcctactttatcaacttcatttacctcgccaagtctacgaaaaaaactatgttaaccctgaccctggtctgcgccatcactttcctcctcgtctgttccgggacattctttccatattcctctaaccccgcaaacccaaaacctaagcgcgtgttcctacagcacatgactcggacctttcacgacctcgagggaaatgccgtcaagagggattcaggtatatggataaacgggtttgattacactgggatttcccatatcacgccacacattcctgagattaacgattcaattcgtgcccactgtgaggaaaacgccccactgtgtggattcccctggtaccttccagttcattttctcatcaggaagaactggtacttacctgcccccgaagtttcaccaaggaacccccctcacttccgcctgatctccaaagagcaaacaccatgggactccatcaaacttacattcgaagcaactgggccatcacacatgagcttttacgtaagagcacataagggctcgacgctgtcccagtggagcctaggcaatggaacacccgtgacttccaagggaggggactattttgttttttattcccatggccttcaggcatcggcttggcagttctggattgaagtgcaggtgtcggaggaacatccggaaggcatggtcacagttgcaatcgctgcacactacctgtccggcgaggacaaaaggtctccacagctcgacgccctgaaggaaaaattccccgactggacctttccatccgcatgggtatgtacatacgacctcttcgttttttag

SEQ ID NO: 115745 - DNA, 1260 bp, synthetic construct
  misc_feature 1..1260: note = Description of Artificial Sequence: Synthetic coding sequence
  source 1..1260: mol_type = other DNA
atggttgtcatgggtgtcgtcctgtacctgggaaagaaatttctccagcccaagcataaaaccggcaactacaagaaggactttctctgtggtctagggattactttgatcagctggtttacctctttggtgaccgtgctgataatagccgtgttcatatccctgattgggcaatctctaagttggtacaatcacttctatgttagtgtttgtttatatggcacagcaactgtcgcaaagatcattctaatccatactctggcaaagcgattttattacatgaacgcttccgcacagtacctaggtgaggttttcttcgatatctcccttttcgtacattgttgctttttagtcacacttacataccagggcctttgttctgcttttatctccgcagtatgggtcgcgtttccactcctcactaaactttgcgtgcataaggattttaaacaacacggcgcccaggggaagttcattgcattctacctgctggggatgttcattccctacctctacgccctgtatttaatttgggctgtctttgaaatgtttactcctattctcggacggtcggggagcgaaattcctcccgacgtggtcttggcctccatcctggccggctgcaccatgatactatccagttacttcatcaactttatctacttggcaaagagtactaagaagactatgctgacactcacattggtgtgtgctattacctttctgctagtctgcagcggtacgttctttccgtattccagcaaccccgctaaccccaagcctaagcgcgttttcttgcagcacatgactaggacattccacgacctcgaagggaacgcggtaaagcgagactcaggaatctggattaacgggtttgactacacaggaatcagtcacattacaccccacataccggagattaatgactccattcgcgcacactgcgaagaaaacgcacccctatgcggctttccctggtacctgcccgttcattttttgatccggaaaaattggtatctccctgcacctgaagtttcaccccgcaatcctccacatttccgtcttatcagtaaggagcagactccatgggattccataaaactgaccttcgaggcgaccgcatgcttgcccattctccagatcctcgacctgcccgctagcacgattatgactaagccatacgtgctgctatgttcctcccctcagcgggtgaacacgtttagtgtagtctcatggcagtggcaccccagccataaatag

SEQ ID NO: 115746 - DNA, 786 bp, synthetic construct
  misc_feature 1..786: note = Description of Artificial Sequence: Synthetic coding sequence
  source 1..786: mol_type = other DNA
atggcagcagccgtgcccagagctgcttttttatcccctttgttacctctcctattgggatttctactgttgtctgcgccacatgggggaagtggactacatacgaaaggagccttgccacttgatacagtaaccttctacaaggtcattcctaagagcaagtttgtcctggtcaagtttgatacacagtatccttatggcgagaaacaggatgaatttaagagattggccgagaactctgcctctagcgatgatttgcttgtagcagaagtgggcatctccgattacggtgacaaacttaacatggagttatctgaaaagtacaagcttgacaaggagtcataccccgtcttctacctcttcagggatggtgatttcgagaatccggtgccatataccggggcggtaaaagttggagccatccaacgttggctgaaaggccagggagtgtatcttggaatgccaggctgtctgccagtctacgatgctctcgccggtgaatttattcgcgcgtccggcgtggaagcccggcaggccttgctcaagcagggtcaggacaatctgagttctgtcaaagaaacccagaaaaagtgggcagagcaatatctgaagataatggggaaaattctcgatcaaggcgaagatttcccagctagcgagatgacacggattgcaagactaatcgaaaagaacaaaatgagcgacggaaaaaaagaggagttgcagaaatccctgaatattctgaccgcctttcaaaagaagggcgccgaaaaagaagaactctag

SEQ ID NO: 115747 - DNA, 162 bp, synthetic construct
  misc_feature 1..162: note = Description of Artificial Sequence: Synthetic coding sequence
  source 1..162: mol_type = other DNA
atggcagccgccgtgccaagggccgcctttcttagtccactgttgcctcttctactggggttcctcctgttgtccgctccgcatgggggcagcggtctccacaccaaaggagccctacctctggataccgtgaccttttataaaattatggttacctcctag

SEQ ID NO: 115748 - DNA, 2925 bp, synthetic construct
  misc_feature 1..2925: note = Description of Artificial Sequence: Synthetic coding sequence
  source 1..2925: mol_type = other DNA
atgcgtagagctggaataggcgaagacagccggctgggactgcaagcccagcctggggctgaaccatctccagggcgtgcaggtacagaaaggtccctgggaggaacacaggggcccggtcagccctgttcctgccctggggccatggcctctgcagtgaggggatctagaccgtggccacgactcgggttacagctgcagtttgcagccctcctgctcggtaccttatctccgcaagttcacacactgcgacccgaaaacctgctcctggtgtctaccttagacggctccctgcatgcgctctccaagcagacgggcgacttgaaatggacactcagagatgatccagtgattgaaggcccaatgtatgttacagagatggccttcttaagcgatccagctgacggctctctttacatcctggggacccagaagcaacaggggcttatgaagcttccgtttaccatcccggaactggtgcatgcatcaccatgtcgtagctccgacggtgtgttctacaccggtaggaaacaggatgcatggttcgttgtggaccctgagtcaggggagactcagatgacactgacaacagaaggccccagtaccccgaggctatacattggcaggacccaatataccgtcacaatgcacgatcccagagcccccgcgctgcgctggaataccacatacagaaggtactccgcaccacctatggatgggtcgcctggcaagtacatgagccacttggcgagttgtggtatgggactactgcttaccgtagacccggggagcgggacagttctgtggacccaggaccttggtgtccctgtgatgggggtgtacacctggcaccaagacggtcttagacagctccctcaccttacacttgcacgcgacaccctgcacttcctagcactcagatggggccatatccgccttcccgcttctggacctcgagacacagccacactgttttccactttggacacccagctccttatgacgctctacgtcggtaaggacgaaaccgggttctacgtgtccaaagccctggtgcataccggggtcgcccttgtaccccgagggctgacgctcgctccagccgatgggccaactactgatgaggtgactcttcaagtctccggcgagagggaagggtctcctagcacagcagtgcggtaccccagtggtagcgtagcccttccctctcaatggctccttattggacaccacgagctgccccccgttctgcacacaacgatgctacgagtccaccccactttggggagcggcaccgccgagacccggcctcctgagaatacccaggcgcctgctttttttctggagctcttgtctctgtctcgtgaaaaactgtgggacagcgagctccacccggaagaaaagactccagacagctatctgggcttgggacctcaggatttactcgctgctagcctgactgctgtacttctgggcggctggatcctattcgtcatgagacagcagcagcctcaggtagtcgagaagcagcaggagacaccactggcacccgctgactttgcccatattagtcaggatgctcagagtttacatagcggtgcctcccggcggtcacaaaaaagactgcagtctccctcaaagcaggcacaacctctcgatgatcctgaggccgagcaattgaccgtggttgggaagattagtttcaaccctaaagacgtgctgggacgtggagctggaggcaccttcgtttttcgcggacagtttgagggccgcgctgtcgctgtcaaacggcttcttagagaatgttttggcctggttcggagggaggtgcagctgctgcaggagagcgatagacatcctaatgtgctgcggtatttttgcaccgagcgaggaccccaattccactatattgccttggagctctgccgcgcctcactgcaagagtacgtggagaatcctgatcttgaccgtggtgggctggagccagaagtggtcctgcaacagctaatgtctggtcttgcccacctgcactctctgcacatcgtgcaccgggacttgaagcctgggaacattctgattacgggaccagactcccagggcctgggaagggtagtcctgagtgatttcggcttgtgcaagaagctgccggcgggccggtgcagtttctctctacattctggcattccaggaaccgaagggtggatggccccggaactattgcaactgttaccccctgactcacctacctccgcagtagatatcttctcagctgggtgcgtgttttattatgtgctgtcgggaggatcccatccatttggagatagtctataccggcaggcgaatatattgacgggcgccccatgcctcgcccatctggaggaggaggtgcacgataaggtggtcgcaagagacctggtcggtgcgatgctttcccctctgcctcagccacgtccttcggctcctcaggtgctcgcgcacccattcttctggagccgggccaagcaactgcagtttttccaggacgtatctgactggctggaaaaagaaagcgagcaagaaccactggtgagggccttagaggccggaggttgtgctgtagttcgagataattggcacgagcatatatcaatgcctcttcaaacagatctaaggaagtttcggtcgtacaaaggtacaagcgtcagggatcttctccgtgccgttcgtaataagaagcaccactacagagaattacctgtcgaagtgcgccaggccctgggtcaggtccccgatggctttgtccagtacttcacaaatcggtttccccggctgctcctgcacacgcaccgagccatgagaagttgtgcttccgaatccctgttcctgccttattatcctcctgactcagaagcccgccgaccatgtccgggcgcaacaggccgttag

SEQ ID NO: 115749 - DNA, 2625 bp, synthetic construct
  misc_feature 1..2625: note = Description of Artificial Sequence: Synthetic coding sequence
  source 1..2625: mol_type = other DNA
atggcctccgccgtgcgggggtcacgaccttggcccagactaggcctgcagttgcagttcgccgctctcctgctgggcactctcagccctcaggtgcacacgctccggcccgagaacctgctcttagtctccactcttgatggcagcctacatgccctgtctaagcagaccggtgatttgaagtggaccctgagagatgacccagtcattgagggacccatgtacgtgactgagatggcatttctcagtgatccggcggacggctcactttatatccttggtacccaaaagcagcagggactgatgaagcttcctttcacaatccccgaattggttcacgccagcccttgccgctcatccgatggagtattctataccggacgaaagcaggacgcttggtttgtggtagacccagaaagtggagagacacagatgactctgaccaccgaggggccctctactccaagactgtacatcggccgcacgcagtatacagtgacaatgcatgatcccagagccccagctctgcggtggaatacgacataccgccgttacagtgctccccctatggacggatctccgggaaaatatatgtcccatctggcttcttgtggaatgggtctactgttaacagtggatcccgggtccgggaccgtgctttggactcaggacctaggggtgcctgttatgggcgtctatacttggcatcaagatggcttgcgccagcttccccacctgacactggcacgtgatacactgcacttcctggctctgcggtgggggcatatccgcttgccagcttcaggaccgagggatactgcaactctgtttagtacactggacacccagcttcttatgactctctatgtgggcaaggacgagacagggttctacgtgtctaaggccctcgtccacacaggggttgctctcgtacccagaggcttgacattggccccagccgacggccctacaaccgacgaggtgaccctgcaagttagtggagagagagaggggtctccaagcacagctgtgaggtatccctcgggcagcgtcgccttgccctcccagtggctgctcatcggacaccatgaacttccccccgttctacatacaactatgctacgcgttcacccaaccctgggatccggcacagcagagacacgccctccggaaaacacacaggccccggcctttttcctcgagcagcagccgcaggtcgtggaaaaacagcaggaaacacccttggccccagccgattttgcacatattagccaggatgcccaatctctccactccggggcctctcggcggtcacagaagaggttgcagagtcccagtaaacaagcccagcccctggacgatcctgaagccgagcagctgaccgtggtggggaagatcagctttaatcctaaggacgtgctcgggcgcggcgccggggggacatttgtttttagaggtcagttcgagggccgagcagttgcggtgaagcggttactgcgtgagtgctttggcttggtgcgacgagaagtgcaactgcttcaagagagcgacagacaccccaacgttcttcgctatttttgcactgagagaggcccccagtttcattatattgccctggaactctgtcgggcctccctgcaagagtatgttgaaaatccagaccttgaccgcggcggacttgagcccgaagttgtgcttcagcaacttatgtcaggtctagctcacctccactctctgcatatcgtgcatcgggacctgaagcctggaaacattttgataacaggccctgacagccagggcctgggtcgagttgtcctcagcgatttcggcctgtgcaaaaagctccctgcgggaaggtgttcattctcactgcatagcggaatccctgggacagaagggtggatggctccagagctgttgcagctcctaccaccagactctcctaccagcgcggtcgatattttctctgccggatgcgtgttttactatgtactctctggcggtagccacccgttcggggacagtctctaccggcaggctaacattcttacaggagctccatgcctggcacatcttgaggaagaagtgcatgacaaagtggtggccagagacctggtcggcgccatgctctccccattaccacagccgcggccttctgcgccgcaggtgctggctcatccatttttctggtctagagcaaaacaactgcagttttttcaagatgtgtctgactggctggagaaagaaagcgaacaggagccgttagtgagagcccttgaggcgggaggctgtgctgttgtccgggacaattggcacgagcacatctccatgcctttgcagacagatttgcgcaagttcagatcatataaaggcacaagcgtcagagatcttctgagggccgtgcgcaacaagaaacaccactatcgggagcttcctgtggaggtgagacaggccttaggacaagtaccggatggcttcgtccaatatttcactaatcggtttcctagacttctgctgcacacccatcgtgcaatgcgctcttgcgctagtgagtcactgtttcttccgtactaccctcccgacagtgaagcacgaagaccctgtcctggggccactgggagatag

SEQ ID NO: 115750 - DNA, 354 bp, synthetic construct
  misc_feature 1..354: note = Description of Artificial Sequence: Synthetic coding sequence
  source 1..354: mol_type = other DNA
atgtctcaaaaacaggaagaagagaatcctgctgaggagacgggagaagaaaagcaggacactcaggagaaggagggtattctgcccgagagggccgaagaagcgaagctgaaggccaagtatccctcacttggtcagaaacctggcggcagtgactttctcatgaaaagactgcaaaaaggccaaaaatatttcgatagcggcgattacaatatggcaaaggctaagatgaaaaataaacagctgccctccgccggaccggacaagaatctggtaactggtgaccacattcctacccctcaggacctgccccagaggaaatcgtctctggtcacatcaaagttggcaggctag

SEQ ID NO: 115751 - DNA, 414 bp, synthetic construct
  misc_feature 1..414: note = Description of Artificial Sequence: Synthetic coding sequence
  source 1..414: mol_type = other DNA
atgtcccagaaacaggaggaggagaaccctgccgaggagactggggaagaaaagcaggacactcaggagaaagaaggaattctccccgagagagctgaagaggccaagctaaaagcgaaatatccttcattgggacagaaacccggtggctcagattttctcatgaagcgattgcagaagggtgactataagtctctgcattggtccgtacttttatgcgctgacgagatgcagaagtacttcgattcaggtgactacaacatggccaaggccaaaatgaagaacaagcaactgccgagcgcaggacccgataagaatttagtcacaggcgatcacatacccaccccccaggacctgcctcagaggaaatcctctttggtcactagcaagcttgctggcggccaggtggaatag

SEQ ID NO: 115752 - DNA, 423 bp, synthetic construct
  misc_feature 1..423: note = Description of Artificial Sequence: Synthetic coding sequence
  source 1..423: mol_type = other DNA
atgtcacagaaacaagaagaagaaaatcctgccgaggaaaccggggaggagaagcaagatacgcaggagaaggagggcattttacccgaacgggctgaggaagccaaattgaaggccaagtatccaagtctcggacagaaacccggtggtagtgatttccttatgaaacgactacaaaaaggcgtatggggcattgtcagttaccccctcagccttgagctgaaagaagtgctgagaatgaaatcagtggaacagaaatattttgactctggggattataatatggctaaggctaaaatgaagaataagcagctaccgtctgctggcccagataaaaacctcgtcacaggtgatcacatcccaacccctcaggacttgcctcaaagaaagtccagcctagttacttccaagctcgctggctag

SEQ ID NO: 115753 - DNA, 354 bp, synthetic construct
  misc_feature 1..354: note = Description of Artificial Sequence: Synthetic coding sequence
  source 1..354: mol_type = other DNA
atggcaggtggcttagggtgtgatgtgtgctactggttcgtcgaagacacccaagaaaaggagggtatcctgcccgagagggccgaagaggccaaactgaaggccaagtacccatccctgggtcagaagcctggaggctctgactttttaatgaaacgcctgcaaaaaggccagaaatatttcgattccggtgattataacatggccaaggcgaagatgaaaaataagcagttgccttcagcgggaccagacaagaacttggtcacaggagatcacattccaacccctcaagacctgccccagcgcaagtcatccttggtcacttctaaacttgctggcggtcaggtagaatag

SEQ ID NO: 115754 - DNA, 402 bp, synthetic construct
  misc_feature 1..402: note = Description of Artificial Sequence: Synthetic coding sequence
  source 1..402: mol_type = other DNA
atggcgggcggactcggatgcgatgtgtgttactggttcgtagaggatacccaggaaaaggaaggcattctgcccgaaagggccgaggaggcaaaactgaaggctaaatacccttccctggggcagaaacccggcggaagcgactttctgatgaagcgtcttcagaagggagactacaagagtctccactggagcgtgctgttgtgtgcagacgaaatgcagaagtatttcgatagtggtgactataacatggccaaggccaaaatgaagaataaacaactgccaagcgcaggacccgataaaaatctggtgacgggtgatcacatacctactcctcaggacctgccccagcgaaaatccagcttggtgacctccaagcttgctggcgggcaggtcgagtag

SEQ ID NO: 115755 - DNA, 318 bp, synthetic construct
  misc_feature 1..318: note = Description of Artificial Sequence: Synthetic coding sequence
  source 1..318: mol_type = other DNA
atgagtcagaagcaggaggaggagaatccagccgaggaaactggggaagagaagcaagatactcaggaaaaagagggcatcctcccagagagagctgaagaagccaaactaaaggccaagtacccgtcactcggccagaagccaggcggcagcgacttcctgatgaaaaggttacagaaaggtgtatggggcattgtgtcttatccgttgtccctcgagctgaaggaagtgttgagaatgaagtcagttgaggtcttgctcgaccccttcctggaagtgttactgctcaataggtcacgtggcgagttcgagatctag

SEQ ID NO: 115756 - DNA, 435 bp, synthetic construct
  misc_feature 1..435: note = Description of Artificial Sequence: Synthetic coding sequence
  source 1..435: mol_type = other DNA
atgtctcagaagcaggaagaggagaaccctgctgaggaaacaggagaagagaaacaggatactcaggagaaagaaggtatcttgcccgaacgggccgaggaggccaaactgaaggctaagtaccctagccttggccagaagcccggtggctctgactttctaatgaagaggctgcagaaaggcgtgtggggcatcgtatcatatcctctgagtcttgagctgaaagaggtactgcggatgaagtccgtggaacaaaagtacttcgacagcggcgactacaatatggcaaaggccaagatgaaaaataagcagctgccgtctgccggccccgacaaaaatctagtgacaggcgaccatatcccaacccctcaggaccttccgcaaaggaagagcagcttagtcacatccaaactggccggaggccaggtggaatag

SEQ ID NO: 115757 - DNA, 366 bp, synthetic construct
  misc_feature 1..366: note = Description of Artificial Sequence: Synthetic coding sequence
  source 1..366: mol_type = other DNA
atgtcccagaaacaggaggaagagaaccccgccgaggaaaccggggaggaaaagcaagacacccaggagaaggaggggatcctgccagagagagctgaagaagcgaagctaaaggctaagtaccccagccttgggcaaaaaccaggaggaagcgactttctgatgaagagactgcaaaagggacagaagtactttgattctggcgactacaatatggcaaaggcaaagatgaagaataagcaacttccaagcgccgggcctgacaagaatctggtcacgggcgatcacatacctacgccacaagacctgccccagaggaagtcatcactggttacctcaaagctggcaggcgggcaagtggagtag

SEQ ID NO: 115758 - DNA, 402 bp, synthetic construct
  misc_feature 1..402: note = Description of Artificial Sequence: Synthetic coding sequence
  source 1..402: mol_type = other DNA
atgagtcagaagcaggaggaggagaatcccgccgaggaaacaggcgaagaaaagcaggatacacaggaaaaggagggaatcttgccagagagggctgaggaagccaagttgaaagcaaaatacccatccctgggacagaaacccggaggatctgatttcctcatgaaacggctacagaagggtgactacaagtccttacattggagcgttctgctctgcgccgacgagatgcagaagtatttcgactccggcgactacaacatggcaaaagccaagatgaaaaacaagcaactaccgtctgcagggcctgataaaaacctggtcacaggcgatcacatccctactccgcaggacctcccccagcgaaaatcctctctggtgacatctaagcttgcagggtag

SEQ ID NO: 115759 - DNA, 318 bp, synthetic construct
  misc_feature 1..318: note = Description of Artificial Sequence: Synthetic coding sequence
  source 1..318: mol_type = other DNA
atgtcacagaagcaggaagaagaaaatccggcggaggaaactggcgaagaaaaacaagacacccaggaaaaagaaggaatcctccccgaacgtgccgaagaggcgaagctgaaggccaaatatccaagccttgggcaaaaaccagggggctctgactttctgatgaaacgcctacagaaaggcgtctggggcattgtgagctatcccctgagcctggaactcaaggaggtgctaaggatgaaatccgtggaggttctgttggatcctttccttgaggtgcttctgcttaatcggtccagaggggaatttgaaatctag

SEQ ID NO: 115760 - DNA, 342 bp, synthetic construct
  misc_feature 1..342: note = Description of Artificial Sequence: Synthetic coding sequence
  source 1..342: mol_type = other DNA
atggctggaggcctggggtgtgacgtctgctactggttcgtcgaggacacgcaagagaaagaaggaatcctgcccgagcgggccgaagaagccaaactgaaagctaaatatccaagcctgggccagaaacctgggggaagcgattttctgatgaaacgactccaaaagggccagaagtattttgactctggcgactacaatatggccaaggctaagatgaagaataagcagctgcccagtgccggccccgataaaaacctcgtgactggggaccatattcctacccctcaagatctcccacagcgcaagagttccctcgttacttctaaattggctgggtag

SEQ ID NO: 115761 - DNA, 1173 bp, synthetic construct
  misc_feature 1..1173: note = Description of Artificial Sequence: Synthetic coding sequence
  source 1..1173: mol_type = other DNA
atgatcagcttgcctggcccattggtgaccaatcttctgagattcctgttcctggggctctccgccttggccccaccaagccgggcacaactccagctgcacctcccagccaaccggcttcaggccgtggaaggaggggaggtcgtgctgccggcatggtacaccctacacggcgaggtttcatcttcgcagccatgggaggttcccttcgtgatgtggttttttaaacagaaggagaaggaagatcaggtcttgagttacataaatggagtgaccacctctaagccgggcgtttcccttgtctactctatgcccagcagaaatctctccctcaggctggagggtctacaggagaaggacagcgggccctattcctgctcagtaaacgtccaagacaaacagggaaagagcagaggacactccattaaaaccttggagctcaacgtgttggttcctccagcgccaccctcctgcaggcttcagggggtccctcatgtaggagctaatgtcacactctcttgtcagagccccagaagcaaacccgctgtccagtatcagtgggaccgacagcttccatcattccagacttttttcgcacctgcacttgacgtgataaggggttccctttctctaactaacttatcgagctctatggcaggggtgtatgtctgtaaagcacataacgaggtcgggactgctcagtgtaacgtcactctcgaggtgtccacaggcccgggtgccgccgtcgtggccggcgccgttgtgggcactctggttggactcggactgctggctggactcgtccttctgtaccaccgcaggggtaaagctctggaagaacccgccaatgatattaaagaggatgccattgccccaagaacgctcccatggccaaagagttccgatacaatctctaaaaatggtaccctctcttctgttacctcagcccgcgcgctacgtcccccacacggtccacccaggcccggggcgctcacgcctactcccagcctgagtagtcaagcactgccgagcccgcgcttacctaccacagacggggctcatccccagcccatcagtccaattccaggaggtgttagttccagcggactgagccgaatgggagctgtacctgttatggtcccggctcagagtcaggcaggatctttggtgtag

SEQ ID NO: 115762 - DNA, 426 bp, synthetic construct
  misc_feature 1..426: note = Description of Artificial Sequence: Synthetic coding sequence
  source 1..426: mol_type = other DNA
atgatttcccttcccggaccgctcgtgactaacctcctacgcttcctgttcctggggttgtctgcccttgacgtcataagaggctcgctctcactcactaacttgagctcatcgatggccggcgtgtacgtgtgcaaggcccacaatgaagtgggcacagctcagtgcaatgtaacccttgaagtgtctacggggccaggggcggccgtcgtggccggagccgtcgttggcactctggtgggtctcggtttgctggccggcctggtcttgttgtaccacagaagaggcaaggcattagaagaacctgcaaacgatattaaggtgcgctcccccctgggcctatcattcagcgcccccaagatggagtggctgtggaaatggcgagatgcgcatttttaccgagattcgtatctgtccaaatggtag

SEQ ID NO: 115763 - DNA, 2613 bp, synthetic construct
  misc_feature 1..2613: note = Description of Artificial Sequence: Synthetic coding sequence
  source 1..2613: mol_type = other DNA
atgactgccgacaaggagaaaaagagatcttcttccgaacgccgtaaggaaaaaagtcgtgacgccgcgcggtgtagacgaagtaaggaaaccgaggtgttttatgagttagctcacgagctgcctttgccccactccgtcagctcgcatctggacaaagcttcaatcatgcgacttgccatatcctttttacgcactcacaaactgctgtcatccgtatgctcagagaatgaatcagaggccgaagcagaccaacagatggacaacctgtatttaaaggctcttgaagggtttatcgcagtcgtgacccaggacggtgacatgatattcctctcagagaatatcagcaaattcatgggacttacccaagtggagctgacaggccatagcatttttgactttacccacccttgtgaccacgaggagatccgggaaaatctcagcctgaaaaatgggagtgggttcggtaagaagagcaaagatatgtctaccgagcgagatttttttatgcggatgaagtgtactgtcacaaatagggggaggaccgtcaacctgaaatctgcaacatggaaagtgttgcactgcactggccaggtgaaggtctataacaactgtcctccccacaattcgctctgcggttataaggagcctcttttgagctgcctgatcataatgtgcgagcccatacaacatccaagtcatatggacatcccactagactcgaaaacattcctgagcaggcacagtatggacatgaaatttacatactgtgacgaccgcattacagaactgattggataccacccggaggaactgcttggacgctcggcttacgagttttatcacgccctggactccgaaaacatgaccaaaagtcaccagaatctgtgcactaaaggacaggtggttagcggacagtacagaatgctggctaagcatggaggatacgtgtggctagaaacacagggcactgtgatttataatcctcgtaatctccagcctcagtgtataatgtgcgtgaactacgttctctcagagatagagaaaaacgacgtggtattcagtatggatcagactgagtcattatttaaaccccacctgatggctatgaattctatttttgactctagcgggaaaggggctgtgagcgagaagtccaacttcctctttacaaagctcaaggaggaaccagaggagcttgcacagctcgctccgacaccaggggatgccattatttctcttgattttggaaaccagaatttcgaggagagttccgcatacggcaaggctattcttcccccatctcagccttgggcgactgagttgcgcagccactccacacagagcgaggccggttccttgcctgccttcaccgtgccacaggcagcggcccccggaagtactacaccaagcgcgacttcttccagttcatcttgcagcactccaaactctccagaggactattacacctcgctcgataacgatctgaagatagaggtaattgagaaactgtttgccatggataccgaggccaaggaccagtgctcaacccagacagacttcaacgagctggatctggagaccctggccccatacatccctatggatggagaggattttcagcttagccctatctgcccagaagaaagactacttgctgaaaacccccagtccacaccgcagcactgctttagcgccatgaccaacatttttcagccccttgccccagtggcaccacatagccccttcctgctggacaaatttcagcagcagctggaaagtaaaaaaactgagccagagcaccgacctatgtccagtattttttttgacgctggatctaaagcttctcttcccccttgctgtggacaggcatcaactccgctcagctcgatgggtggtcgaagcaatacacaatggcccccagatccccccctacatttcgggcctaccaagtgggccgtgggcgaccaacgcaccgagttcctgggcgcagccccactgggtccacccgtgtcccctccccacgtgtctaccttcaagacgaggtccgctaagggctttggcgcccgaggcccagatgttctgtcacctgcaatggtcgcgctcagcaacaaacttaagttgaaacgacaacttgagtatgaggagcaggcctttcaggatctgtcagggggcgatcctcctggtgggtccacaagccacctgatgtggaagagaatgaagaaccttcgcggcggatcgtgcccactgatgcccgataaaccgttaagcgccaacgtcccaaatgacaaattcacccagaaccctatgagaggactgggccacccactgcggcacctgcccctgccacagccgccatccgccatctcccctggggaaaactctaaatcgaggttcccgccccagtgctatgcgactcagtatcaggactactccctaagctctgcccacaaagttagtggaatggcttctcgcctgttgggccctagcttcgaatcatatctcctgcccgagctgactcgttacgactgtgaagtgaacgtacctgtactgggaagcagtactctcttgcaaggcggggaccttctgcgagccctggaccaagccacctag

SEQ ID NO: 115764 - DNA, 780 bp, synthetic construct
  misc_feature 1..780: note = Description of Artificial Sequence: Synthetic coding sequence
  source 1..780: mol_type = other DNA
atgaccgctgacaaggagaagaaaaggagctcttctgaaaggaggaaagagaaaagtcgggacgcagctcgttgcagaaggagcaaggaaacggaagtcttttacgaactcgcgcacgagctgcccctaccccactcggtgtccagccatctcgacaaggcgtcgataatgcgattggccatttctttcctcaggacccacaaactgctgagctcggtgtgcagcgagaatgagagcgaggccgaagctgaccagcaaatggataatctctacctgaaagccctggagggcttcattgctgtggtgactcaggacggcgacatgatctttctgtccgaaaacatttctaaatttatgggcctaacccaggtggaattaacgggccattccatcttcgattttactcatccttgtgatcacgaggaaattagagagaatctcagcctgaagaacggatctgggtttggtaaaaagagcaaagacatgagcaccgaaagggatttcttcatgagaatgaagtgtacagtgaccaaccgaggcaggacagtgaacctcaaatctgccacttggaaggttttgcactgcaccggacaggttaaggtctataataactgccccccccataactctctgtgtgggtacaaagaacccctgctgtcctgccttatcattatgtgcgaacctatccagcatccttcacacatggacattcctctggatagtaagacgttcttgtctcggcatagcatggatatgaaattcacttattgtgatgactag

SEQ ID NO: 115765 - DNA, 537 bp, synthetic construct
  misc_feature 1..537: note = Description of Artificial Sequence: Synthetic coding sequence
  source 1..537: mol_type = other DNA
atggtgtccgtacccactacatggtgtagtgttgcgttagccctgctcgtcgctcttcacgagggcaagggtcaggcagccgcaaccctcgaacagccagcgtcatctagccatgctcaaggcacacatttacggttgcgccggtgtagctgcagtagttggctggataaggaatgtgtgtatttctgtcacctggacatcatctgggtgaacaccccagagcagacagctccctacgggctgggaaatcctccacggcgcaggcgccggtcgttacctcggcgatgtcagtgctcttcagctagggatcccgcctgtgccacattttgcctgagaagaccgtggacagaagctggtgctgtgcctagccgcaaatccccagcggatgtgttccagacaggtaagaccggagcgacaacaggcgagctcctccagcgcctcagagacatcagcacggtgaagtctctgttcgccaagagacagcaggaagcgatgagggaaccccgcagcacccactccagatggaggaaacgctag

SEQ ID NO: 115766 - DNA, 660 bp, synthetic construct
  misc_feature 1..660: note = Description of Artificial Sequence: Synthetic coding sequence
  source 1..660: mol_type = other DNA
atggagcccgggctgtggctgctctttggcctgactgtgacctccgctgctggctttgtgccatgttcccagagtggagatgcgggtaggagaggagtctcacaggccccaaccgccgctcgttccgagggcgattgtgaggagacagtggccggtcccggagaggagacagtggctggtcctggcgagggcacagtcgcccccactgccctgcaaggaccttcacctgggtcgccagggcaagagcaggcagccgagggcgctcccgagcaccacagatcccgccggtgtacatgtttcacctacaaggataaggagtgcgtgtactactgccacctggatataatctggataaacacccccgagcagacagtcccttatggactcagcaattaccgagggagtttccgcggtaaaagatccgccggtccactgcccggcaatcttcaattatcccatcgcccacatctccgatgtgcctgtgtcggaagatacgataaggcttgtctgcacttctgcacccaaacactggatgtttcttccaatagtaggacagccgagaagactgataaagaggaggaaggcaaggtgagaggagccaaccgagggctctgtcagaggcgcttaaagtctaggacaaataaagcctcccggctgtag

SEQ ID NO: 115767 - DNA, 717 bp, synthetic construct
  misc_feature 1..717: note = Description of Artificial Sequence: Synthetic coding sequence
  source 1..717: mol_type = other DNA
atggagcctggtctgtggcttctctttggcctcacggttacctctgcggctggtttcgtaccctgttcccagtcgggggacgccggaaggagaggcgtgagccaggcgcccactgcagccaggagcgagggcgactgcgaggagacagtcgcagggcccggtgaggaaactgtcgccggccccggggagggcaccgtcgctcccacagctctgcagggaccgagtccaggaagccctgggcaggagcaggcggctgagggagcacccgagcatcaccgaagcagacggtgtacgtgtttcacgtacaaggataaggagtgcgtttactattgccacctggacatcatatggattaatacccccgagcagacggtgccttatggcctgtccaactatagaggctcttttaggggaaagcgtagcgcaggtccgctgccgggaaatttacagctcagtcaccgcccgcacctgagatgcgcttgtgtcggacgttatgacaaggcgtgcctccatttttgcactcagacccttgatgtttcctccaattcacgaacagctgaaaaaaccgataaagaggaggagggcaaggtggaggtcaaggatcaacaatcaaagcaggctctcgatttacatcatccaaagctgatgcccgggtccggtctggccctcgctccatcaacttgtccacgctgcttattccaagagggcgcaccatag

SEQ ID NO: 115768 - DNA, 579 bp, synthetic construct
  misc_feature 1..579: note = Description of Artificial Sequence: Synthetic coding sequence
  source 1..579: mol_type = other DNA
atggagccaggactttggctgctgttcggactgacagtgacatcggcggctggcttcgtgccttgtagccagtcaggagacgccgggaggagaggggtgagccaggcaccaaccgccgcccgaagcgagggagactgcgaggagacagtagctggcccgggggaagaaacagtggccggccccggcgaggggaccgtcgcccctaccgctttgcagggcccctcccctggctcgccaggtcaggagcaggctgccgagggcgctccggagcatcatcggagtcgtcgatgcacatgcttcacttacaaagataaggagtgcgtgtactactgccacttggatattatctggatcaacacccctgagcagacggtgccctatggtctgtccaattaccggggatctttccgaggtaagagaagcgccggtccacttccaggcaacctgcagttatcccacagaccccatctgcggtgtgcttgtgtaggccggtatgataaagcttgcttacatttttgtactcaaactctggatgtgagccggcttaaaagccggactaacaaagcctctaggctatag

SEQ ID NO: 115769 - DNA, 717 bp, synthetic construct
  misc_feature 1..717: note = Description of Artificial Sequence: Synthetic coding sequence
  source 1..717: mol_type = other DNA
atggagcccgggctgtggctgctattcggcctgacggttacttcggctgccgggttcgtgccctgctctcagtctggagatgcaggccggcgcggcgttagccaggccccgactgctgccagatctgagggggactgcgaggaaacagttgcagggccaggggaggaaaccgtggcgggtccaggcgaaggaacggtggccccaactgccctccagggcccatctcccggatcgccaggacaggagcaagccgccgagggcgctcccgagcaccacaggtctcggcggtgcacatgttttacctataaagacaaggaatgtgtttattattgccaccttgacatcatctggattaacactccagagcagacagtaccatacggtttatccaattaccgcgggtcatttcgcggtaagcggtcagccggtcccctgcctggtaaccttcagctatctcaccggccccatctccgatgcgcctgcgtggggaggtatgacaaggcttgtctacatttttgcacccagacgctggatgtctctagcaatagtcggactgccgagaagactgacaaagaggaggagggaaaggttgaggttaaagatcaacagagcaagcaagctttggacctccaccatccaaagctgatgccgggctctggccttgcccttgccccttccacgtgtccccggtgcttattccaggagggcgcgccatag

SEQ ID NO: 115770 - DNA, 675 bp, synthetic construct
  misc_feature 1..675: note = Description of Artificial Sequence: Synthetic coding sequence
  source 1..675: mol_type = other DNA
atggaacccggcttgtggctgctttttgggctaactgtgaccagcgcagctggattcgtgccgtgttcccagtccggggacgccggacggcgcggagtgagccaggcaccgaccgctgctcgaagcgaaggggattgcgaggagacagtggccgggccgggtgaggagacggtggctggccctggagaaggcaccgtggcccctaccgccctgcaggggcccagccccgggtctcccggacaggagcaggcagctgaaggtgccccagaacatcaccgatctcgtaggtgcacgtgcttcacctataaggataaagagtgtgtgtactattgccatttagacataatttggatcaacaccccagaacagacagttccatatggcctcagcaattaccgtggaagcttcagagggaagaggtcagccggtccccttccaggcaacttacagttaagccataggccacatctcaggtgtgcgtgcgtgggcagatatgataaggcctgtctgcacttttgcacgcagactctggatgtgtctaggcaggtggaagtgaaggaccaacagtcgaagcaagcactggatctacaccatcctaagctgatgcccggttcaggcctggccctggcaccctccacctgcccaaggtgtctgtttcaggaaggggccccctag

SEQ ID NO: 115771 - DNA, 2304 bp, synthetic construct
  misc_feature 1..2304: note = Description of Artificial Sequence: Synthetic coding sequence
  source 1..2304: mol_type = other DNA
atggaagcactccgagaaagtgtgctgcacctggctctgcaaatgagcacttacaagagagcgacacttgatgaagaagacctcgttgattctttgagtgaaggagacgcttaccctaacgggctccaggttaatttccatagtccccgcagtggtcaacgctgctgggcagcacggacacaggtggagaaacgtctagtggtgctggttgtactccttgccgccggcctcgtcgcttgtctggctgcgctcggcattcagtatcagacacgctcacccagtgtgtgcttgagcgaggcctgcgtctctgtgacttcttcaatcctctcctctatggacccaacagtggatccgtgtcacgacttcttctcatatgcctgcggagggtggattaaggccaatcccgtcccagatggacacagccggtggggaaccttttcgaatctgtgggaacataatcaggccattatcaaacacctgctcgaaaatagcaccgcgtctgttagcgaagctgaacgaaaggcgcaggtctattaccgcgcttgcatgaatgagacaaggattgaagagctccgggccaagcccctaatggagctcatcgaacgcttgggaggatggaacataactggcccatgggccaaagacaactttcaggacactctccaagtggttacagcacattaccgcacaagcccttttttcagcgtgtatgtcagcgccgatagcaagaactctaactctaacgtcatccaggtggaccagtccggcctggggctccccagcagggattactacctgaataaaacggaaaatgagaaggttctgacaggctacctaaactatatggtccagctcggaaaactcctgggaggcggggacgaggaggccatcagaccacagatgcagcagattctagactttgagaccgctctcgccaacatcacaatccctcaggagaagcgccgtgacgaggagctgatttaccacaaagttacggccgctgagctgcagacactggcacccgccatcaactggctgccgtttctcaacactatcttctaccctgtggagattaatgagagtgagccgatcgtagtgtacgataaggaatacctggagcagatctccacacttatcaacaccacggatcgttgcctcctcaataattatatgatatggaatcttgtgaggaaaacctcaagcttcctggaccagcgcttccaggatgctgatgaaaagttcatggaggtgatgtatggcactaagaagacctgcctcccccgctggaaattctgcgtcagtgacaccgagaataatctaggcttcgccttgggccccatgttcgtgaaggctacttttgccgaagatagcaagagtatagcaaccgaaatcattctggaaatcaagaaagcgtttgaagaaagtctgtctacactcaaatggatggacgaagagacccgtaaaagcgcaaaagagaaagccgatgccatctacaacatgatcggttatcccaattttatcatggatccaaaagaactggataaagtgttcaatgattatacagccgtgcccgacttatattttgaaaatgcaatgcgcttctttaatttctcctggcgggttacagccgatcagctgagaaaagctcccaaccgggaccaatggtccatgactccacccatggtcaacgcttactactcaccgactaagaacgaaatcgtttttcccgcaggaatcttacaagccccattctacacccggagttcacccaaggctcttaactttggaggcatcggcgtcgtggtgggccacgaacttacacacgctttcgacgaccaaggacgcgagtacgacaaggacgggaacctgcggccctggtggaagaacagtagtgtggaagcatttaagcggcaaactgagtgcatggtggaacagtactcaaattatagcgtgaacggtgagccggtgaacgggagacataccctgggtgaaaacattgctgacaacgggggcctcaaggcagcatatcgcgcgtaccagaattgggtgaagaagaacggggcagaacacagtctacccactctgggactcactaataatcagctgtttttcctgggcttcgcccaggtttggtgttctgttcggacaccagaaagtagtcacgagggcctgattaccgacccgcactccccatcacggttccgagtgattggatctctcagcaattctaaggaattttccgagcatttccggtgtccccccggctcccccatgaacccaccccataagtgcgaggtatggtag

SEQ ID NO: 115772 - DNA, 2277 bp, synthetic construct
  misc_feature 1..2277: note = Description of Artificial Sequence: Synthetic coding sequence
  source 1..2277: mol_type = other DNA
atgcctctgcagggcctgggtctgcagcgcaatcctttcctccaagggaagagaggacccggcctaactagctcacctcctcttctgccgccatccttacaggtgaacttccattcacctaggagtgggcagagatgctgggcagccaggactcaggtggagaaaaggctagtcgtgctcgtggtgttactcgccgccgggttggttgcatgtctcgcagccctagggatacagtatcagacccggtccccatctgtttgcctctctgaggcctgcgtgtcagtaacatctagcatcctaagttccatggacccaaccgtggatccctgtcacgactttttttcatacgcatgcgggggctggattaaggcgaaccccgtgcctgatgggcactcaagatgggggacattttctaatctgtgggagcataaccaggccattataaagcatctccttgagaacagcacagcgagtgtttcagaggcagaaagaaaagctcaagtctactatcgagcttgcatgaatgagacccgcattgaggagctcagggccaaaccccttatggaactaatcgagcgtcttggcggatggaacatcaccggcccctgggctaaggataacttccaggacacgctgcaggtagtgactgcccactatcgcacctctcccttctttagcgtgtacgtaagcgccgacagcaagaactcaaacagcaacgttatccaagtagatcagagtggcctcggcctgccatctcgcgattactacctcaacaagactgaaaacgaaaaggtcctaactggctatttaaattacatggtccagctgggcaagttgttgggcggaggcgatgaagaagcaatcaggcctcagatgcagcagattctcgactttgagaccgcccttgccaatattactataccacaggagaaacgacgagacgaggagcttatctatcacaaggtaaccgcggctgaattacaaacactcgcaccagctattaattggttaccttttctaaacacaatcttttacccagtggaaatcaacgaatccgaaccgatagtagtgtacgataaggaatatctggaacagattagtacgctgatcaatactaccgaccgatgtttactaaataactatatgatttggaacctcgttaggaagaccagctcatttctggaccagcgatttcaggatgctgatgaaaaattcatggaggttatgtatggcactaagaaaacctgcctcccccggtggaagttttgcgtgagcgatacagagaataatttgggcttcgccctgggcccaatgttcgttaaagccaccttcgcagaggatagcaaatcgatagccactgagattattctcgagattaaaaaagcatttgaagaaagtctatctacactgaagtggatggatgaggaaactcgtaagagcgccaaagagaaggcagatgccatttataatatgattggttaccccaatttcattatggaccccaaggaactggacaaagtgttcaacgactacaccgccgtgccagacctatattttgagaatgccatgcgcttcttcaacttttcctggcgcgtcaccgctgaccagttaagaaaagcacccaatcgagatcagtggtctatgactcctccaatggtgaatgcttattactctcctactaaaaacgaaatcgtattccctgctgggatactccaggcacctttttataccaggtcaagtccaaaggcactcaactttggcggaataggcgttgtggtgggacatgaattaacacatgccttcgacgaccagggtcgcgagtacgataaggacgggaatctcagaccatggtggaaaaattcgtcagttgaagccttcaaacgccagaccgagtgcatggtggaacagtattctaactattccgttaacggcgagcctgtgaatgggcgccacacactgggagagaatattgctgacaatggaggccttaaagcggcctatagggcatatcagaactgggtcaagaaaaacggggctgaacactcgctgcccaccctgggattgaccaacaaccagctgtttttcctagggtttgcccaggtatggtgttcagtgaggactcctgagagcagccacgaaggcttgataaccgatccccattccccttcgaggttccgtgtgataggatctctatcaaattccaaagagttttcagagcatttcaggtgccctcctgggagcccaatgaatcctccccacaagtgtgaggtgtggtag

SEQ ID NO: 115773 - DNA, 2313 bp, synthetic construct
  misc_feature 1..2313: note = Description of Artificial Sequence: Synthetic coding sequence
  source 1..2313: mol_type = other DNA
atgcgaggcgtgtggcctcctccagtgtccgccttgctcagtgctctgggaatgtcgacctataagcgggccactctggacgaggaggacctggtggattcgctgtctgaaggtgacgcttaccctaacggtctgcaggtgaatttccacagtccaaggagtggccagcggtgttgggctgcaagaacacaggtcgagaagcggttagtggtgttggtggtgctgcttgccgctggcctcgttgcttgcctagccgcgctgggcatacaataccagaccaggagccccagcgtgtgtctgtccgaagcgtgcgtctccgtgacgtctagcatcttatcctccatggatccaaccgtagacccatgccacgacttcttcagttatgcctgtggaggttggatcaaagcgaatcccgtacccgacggccactcacgctggggcaccttttctaacctatgggaacacaaccaggctataatcaagcacctgctagaaaactccacagccagtgtttcagaggcagagcggaaggctcaggtttactaccgggcctgcatgaacgagactcggatcgaagaacttcgagccaaacccctgatggagctgatagagagattggggggctggaacatcacgggcccctgggcaaaggataactttcaagataccctccaggttgtaaccgcacactatcggactagccccttcttcagtgtttacgtgtctgctgacagtaagaattcgaacagtaacgtgattcaggtcgaccagagcggtctcggactccccagccgcgattattatctcaacaaaactgaaaacgagaaggttctgaccggatatctcaactacatggtgcagctgggaaagctgttgggtggaggggacgaggaggctatacgtccccagatgcagcagatattagattttgagacagcactcgccaacatcacaattcctcaagagaaaaggagagatgaggagttaatctaccataaagtgacggcagcggagctccagacactggcacccgcaatcaactggctccctttcctaaacactatcttttaccccgtcgagatcaacgagtcagagcccatcgttgtatacgacaaagagtatctggaacaaatcagtaccctcataaatacaactgatcggtgcctgctgaacaattatatgatttggaatctggtgcgaaaaacatccagcttcctggatcagcggtttcaagacgcagacgaaaaatttatggaggtgatgtatgggactaagaagacttgcttgcctcgttggaagttttgcgtgtcagatactgagaacaatcttggatttgccctggggcctatgtttgtcaaggccacgtttgctgaagattccaagtccatcgctacagagatcattctggagatcaaaaaagcctttgaggaaagtctctccacgctgaagtggatggacgaggagaccagaaaatctgctaaggagaaagccgatgccatctataatatgattgggtacccaaacttcattatggatcccaaagaactagacaaggtattcaatgattacacagccgttcctgacttgtattttgaaaatgcgatgagattttttaactttagttggcgagtgactgcagaccaactgcgcaaggctccgaacagagaccagtggtcaatgaccccccccatggtgaacgcatactactcgccgactaagaacgaaatcgtttttcctgccggaatcctgcaggctcctttttacacaagatcctcccccaaagccctgaattttggcggcattggcgtggttgtaggtcacgaactgacgcacgcattcgatgaccaggggcgcgagtacgataaggacggcaacttaagaccttggtggaaaaacagctctgtcgaggccttcaaacgacagacagagtgcatggtcgagcagtattccaactactccgtcaacggggaaccagtcaatggcagacacacacttggagagaacatcgcagataacggtggtctaaaggctgcatatcgcgcttatcagaactgggtcaaaaagaatggtgctgagcactctctgcccaccctgggactgacaaacaatcagctattcttcctgggttttgcgcaggtgtggtgtagcgtgaggacccccgaatcatcgcacgagggactgatcacagatccgcatagtccctctagattccgcgttataggttcgctctccaatagtaaggagttttcggagcacttccggtgtccgcccggttcacccatgaatcccccccacaagtgcgaagtgtggtag

SEQ ID NO: 115774 - DNA, 2265 bp, synthetic construct
  misc_feature 1..2265: note = Description of Artificial Sequence: Synthetic coding sequence
  source 1..2265: mol_type = other DNA
atgatgtcaacctacaaacgagcgaccttggacgaggaagatcttgtagactccctgagcgagggagacgcctaccccaacggactccaggtgaacttccactctcctaggtccggacagaggtgctgggccgcgcgcactcaagtggagaagcggctggtggtcctggtagtgctgctcgctgctgggctggttgcatgcttagcggccttgggcattcagtaccagacccgtagcccctcggtgtgtctgtccgaggcatgcgtgtcagttacctcatccattctgagctctatggatccaaccgtagacccatgccatgatttcttctcttatgcctgtggtggctggatcaaggccaatccggtgcccgacggacactctcgctgggggacatttagcaatctatgggaacacaaccaggccattataaaacatctgctcgaaaactctaccgcgtctgtgtctgaagccgaacgcaaggcccaggtgtactaccgggcctgcatgaatgaaactcgtattgaagaactcagggcaaagcccctaatggagctgatcgaacggcttgggggctggaatatcaccggaccatgggccaaggataatttccaggacacactgcaagtggtaactgctcattaccggacttcgccatttttctccgtctatgtgtccgccgacagtaagaatagtaatagcaacgttatccaggtggaccagtcgggtctgggactgccatcgagggattactatctgaacaaaactgaaaacgaaaaggtccttacagggtacttaaactatatggtccagctgggaaaactcctggggggtggtgatgaagaagctattaggccccagatgcaacagatcttagattttgaaaccgctctggccaatattaccattcctcaagagaagagaagagacgaggaacttatctaccacaaggtgacagccgcagaactgcagactctggcaccggcgataaactggctcccctttttgaacacaatattctacccggtggagatcaacgagagtgaacccattgtggtttacgataaggagtatttagagcagatttcaaccctgattaacactacagaccgatgcttgctgaacaactatatgatctggaatctcgtgcgcaaaacctccagcttcctggaccagcgttttcaggacgctgatgagaagttcatggaggtcatgtacggtacaaaaaagacatgcctgccacggtggaaattttgtgtgtccgacaccgagaataacctcggcttcgctctggggccgatgttcgtgaaagccacttttgctgaggacagtaagtctatcgcgactgaaattatactggagatcaagaaggcgttcgaggaatcgctctccacgcttaagtggatggatgaggaaactcgcaagagcgctaaagaaaaagccgacgctatctataatatgataggctatcccaactttattatggaccccaaagagttggataaagtctttaacgactacacagctgtccctgacctgtatttcgagaacgccatgcggttttttaacttctcatggcgcgtaacagccgatcaattaagaaaggctcccaatcgagatcagtggagtatgactcccccaatggtgaacgcctactactctccaacaaagaacgaaattgtcttcccagcagggatcctacaagctccattctacacccgatcttcacctaaggcactgaatttcggcggcattggggtggtggtcggacatgaacttactcatgcttttgatgaccaaggtagggagtacgacaaggatggcaatctaagaccgtggtggaagaactcctccgtcgaagcttttaagaggcagactgagtgcatggttgagcagtacagtaactactctgtgaacggagaaccagtgaatggccgccacacccttggcgaaaatattgccgacaatggtggtcttaaagcggcctatagagcctatcagaattgggttaagaagaacggggctgaacacagtctccctaccctcggactgactaacaaccagctgtttttccttgggtttgctcaggtatggtgcagcgtgaggacccctgaatctagccacgagggattgatcacggaccctcatagcccaagccggttccgggtgataggctccctgtctaatagcaaggaattctctgagcatttccgatgtccaccagggagccctatgaaccctcctcacaagtgtgaagtctggtag

SEQ ID NO: 115775 - DNA, 2217 bp, synthetic construct
  misc_feature 1..2217: note = Description of Artificial Sequence: Synthetic coding sequence
  source 1..2217: mol_type = other DNA
atgaggggagtgtggccccctcccgtcagcgctctcctgagcgccctgggcatgtccacctacaagagggcgaccctggacgaggaagacttagtggacagtctgagcgaaggcgacgcctaccctaacggtcttcaggttaatttccacagtccacggagtggtcagaggtgctgggcagccagaacccaggtggagaaacgattagtggtcctggtagtgctactggccgccggcttggtggcttgcctggcggccttaggaatacaataccagacgcgatcacctagcgtgtgcctgtccgaagcttgcgtttccgtcacatctagtatcctgagcagcatggaccccacagtagatccatgtcacgactttttctcctacgcctgcggaggatggatcaaggccaatccagtccccgacgggcactcacggtgggggactttctctaatctctgggaacataaccaggctatcatcaaacatctgctggaaaactctacagcatcagtctccgaggccgagagaaaggcacaggtctattaccgcgcctgtatgaacgaaaccaggatcgaggagctgagggctaaacctctgatggaattaattgagcggctcggggggtggaacatcaccggaccatgggctaaagataactttcaggataccctccaggtcgtgacagcccactatcgaaccagcccgtttttctctgtttacgtgtctgcagattcaaaaaattccaattctaacgttattcaggttgatcaaagtggcttggggctgcctagcagggactactacttgaacaagacagagaatgagaaagtactaaccgggtacctcaactacatggtgcaactagggaaattgctgggaggtggagacgaggaggctattaggcctcagatgcagcagatcttggacttcgaaacagcacttgctaatattacgattccacaggagaagcggcgcgacgaagagctgatttatcataaggtgacagccgctgagctgcagacccttgctccagcaatcaattggctaccttttttgaatacaatcttttatccagtggagataaatgaaagcgagcccatcgtggtgtacgacaaggagtatctggagcagatctctactctgatcaacaccactgatcggtgtctgctgaataactatatgatctggaacttggtgcggaagacctcatcatttctcgatcagaggtttcaggacgccgacgaaaagttcatggaagtgatgtacgggaccaagaagacttgtttacctcggtggaaattttgtgtcagcgatacagaaaataatctgggcttcgctctagggcctatgttcgtaaaagctacattcgctgaagatagcaaatcaatcgccaccgagatcatcctggaaatcaaaaaggcttttgaagagtccctaagtactctgaagtggatggacgaggaaacccggaagagtgccaaagagaaagctgatgcaatctataacatgatcgggtatcccaattttatcatggaccctaaagagttggacaaggtatttaatgattatactgcggtgcccgatttgtacttcgaaaacgccatgcggttttttaatttctcttggagagtgacagcggaccaactgcggaaggccccgaatcgggatcagtggtccatgaccccacctatggtgaacgcctactattcacccacaaagaacgaaattgtgttcccagctgggattctgcaagctcccttctatacacggtcttctcctaaggcactcaattttgggggtattggcgtggtggtagggcacgaactgacacacgcatttgacgatcagggcagggaatatgataaggacggaaacttgcggccttggtggaagaattcgtctgtagaggcctttaagcgccagactgaatgtatggtcgagcagtattccaattattcagtaaacggcgaaccagtgaacggaaggcatacactcggtgagaacatagctgacaatgggggattgaaagccgcctaccgagtgtggtgcagcgttcgcacccccgagtcgagtcatgaggggctcatcacagacccacattctcctagccggtttcgggttattgggtcacttagtaattctaaagagttctcagaacacttcagatgtccacctggttcccccatgaacccaccccacaagtgtgaagtttggtag

SEQ ID NO: 115776 - DNA, 2328 bp, synthetic construct
  misc_feature 1..2328: note = Description of Artificial Sequence: Synthetic coding sequence
  source 1..2328: mol_type = other DNA
atggaacccccgtattctctgaccgctcactacgacgaattccaagaggtgaagtacgtatcaagatgcggggccgggggagcccgcggcgcctcccttccgcctggtttcccgctgggggccgcccggtcagccactggagctcgttccggtcttcctcggtggaaccggagagaggtgtgcctcctgagtggattggtctttgccgccggattatgcgcaattctggcggccatgctggccttaaagtatctaggacccgtcgctgccggtgggggcgcatgccccgagggttgtcccgaaaggaaagcgttcgcgcgtgctgcacgattcctggctgctaatctggacgcatctatagatccgtgtcaagatttctactcctttgcatgcgggggctggctgaggaggcacgccattcccgatgacaaactcacatacggtaccatcgctgcgattggggaacagaatgaagaacggcttaggaggttgctcgcccgaccaggaggcggcccgggtggtgccgcacaacgcaaagtccgcgccttttttcgtagctgtctggacatgagagagatagagcgcctcgggcccagaccaatgctggaggtcatcgaggactgcgggggctgggaccttggcggcgctgaagaacggcccggcgtagctgcgcgatgggatctgaatagactgctgtacaaggcacagggcgtgtactctgcagccgccctattcagcctaaccgtctcactggacgacaggaattcctcccgctacgtaattagaattgatcaggacggtctaacactccctgaaaggacgttatatctcgcacaggacgaggactccgagaagatcttggccgcctaccgcgtgttcatggagagggtcctgagcctgcttggagccgatgccgtggaacagaaagctcaggagatcctgcaagtggagcagcaactcgcaaacattactgtcagtgagcacgacgatctccgcagagacgttagttccatgtacaataaggtgacactgggccaactgcaaaaaatcacgccgcatctgaggtggaaatggctactggatcagatctttcaagaagacttcagtgaggaagaggaagtggttctgctggcaacagactatatgcagcaagtgagtcagctgattcgttctacccctcaccgagtccttcacaactacctagtctggcgggtggtagtagtgctgtcagaacatcttagtcctccatttcgggaggccttacacgaacttgcacaagaaatggagggcagcgacaagccgcaggaactcgcccgcgtttgcctggggcaggccaaccgacattttggaatggcgctgggtgccttgtttgtgcatgagcatttctcagcagcttccaaagcgaaggtccagcagcttgtcgaagacattaagtatatcctgggtcagagactggaagaacttgactggatggatgcagaaacaagggccgccgcgcgtgccaaactgcagtacatgatggtgatggtgggctaccccgattttttacttaaacctgacgccgtcgataaggagtacgaattcgaggtgcatgagaaaacatatttcaaaaatatcctgaactctattcgattttccattcaactgtccgtgaaaaagattcgacaagaggtggataagtccacgtggctcctgcctccccaagcactgaacgcctactatctccctaacaaaaatcaaatggtgttccccgcaggcattttgcaaccaacattgtatgaccctgactttccgcaatctctgaattatggtgggatcgggacgataatcggccacgaactcacccacggctacgacgactggggaggccaatacgaccggtccgggaatctgctgcactggtggactgaagccagctactcacggtttctacgcaaggctgagtgtatcgtgagactgtacgacaatttcacagtttataatcagagagtcaatgggaaacacacactcggagagaatatcgcagacatgggcggccttaaattagcctatcacgcttaccagaagtgggtccgggaacacggccctgagcatcctcttccccgactgaaatacacccatgatcagttgttcttcatagcattcgcgcaaaattggtgcattaagaggcgctcgcaaagcatttatcttcaagtgctgacggacaaacacgctccagagcattaccgcgttctgggatcagtgtcccagttcgaagagtttggacgagcctttcactgccctaaagatagccctatgaaccccgctcacaagtgttctgtctggtag

SEQ ID NO: 115777 - DNA, 2322 bp, synthetic construct
  misc_feature 1..2322: note = Description of Artificial Sequence: Synthetic coding sequence
  source 1..2322: mol_type = other DNA
atggaacccccttattcactcaccgcccactacgacgagttccaggaagtcaagtacgtgtcgcgctgcggggccggcggggctcggggagcaagtctccctccggggttccccctcggcgccgccagatccgcaaccggtgctaggtctgggctgccgagatggaaccgccgtgaggtgtgtctcctgtccggactcgttttcgcagcagggctttgcgcgatcctggccgctatgctcgccctgaaatatcttggcccagttgccgcggggggtggggcatgccccgagggatgtcctgaaagaaaagccttcgcacgcgcagcgcggtttctcgccgcaaatctggacgccagcattgatccgtgccaagacttttactcttttgcctgcgggggttggctgcggcggcacgcaatccctgacgataagctcacctacggcaccattgcagccatcggtgagcagaacgaagagcggctcaggagattactagcccgcccgggaggagggccgggaggtgccgcccagaggaaggtgcgagcattcttcagatcttgtttagacatgagggaaatagagcgacttggacctagaccgatgctggaagtgattgaagattgtggcgggtgggacttagggggcgctgaggaacggccgggagtagccgcccggtgggatcttaaccgactcctgtacaaggcccagggggtgtattcggccgccgccctcttcagccttactgtctccctggacgatcgaaattcctcccgatatgtgattcgtatcgatcaggacggcctcactctaccagaacgcacactgtatttggcacaggatgaagattcagaaaagatcctcgccgcctatcgggtgttcatggagcgggtcctgtccttgctgggggccgacgctgtagagcagaaggcacaagaaattttacaagtggagcagcagctggctaacataacagtgtctgagcacgatgacctgcgccgggatgtttcaagtatgtataacaaagtgacactcgggcagctccaaaaaataacgccccacttacgctggaagtggctgctggatcaaatttttcaggaggatttttctgaggaggaagaggtcgtattactcgctacagattacatgcagcaggtttcccaactcattaggtccactcctcatcgggttctgcacaactacctcgtgtggcgggtcgttgtggttttatcggaacacctttcaccacctttccgtgaagccctgcacgagctagcgcaggaaatggaggggagcgacaagccccaggaactggcccgggtgtgccttgggcaggccaatcgccactttggcatggctctgggtgcacttttcgtacacgaacacttctccgcagccagcaaggcaaaagtccagcagctggtcgaggacatcaaatacattctgggccagcggctggaagagttggactggatggacgctgaaactagggcggccgccagggcaaagctgcagtacatgatggttatggtcggctaccctgacttcctgctcaagcctgatgccgtcgataaagagtacgagttcgaagtgcacgaaaagacctatttcaaaaacatcttaaacagcatacggtttagcattcagctttcagtgaagaagatcagacaggaggtggacaagtggcttctgccaccacaggctctgaatgcgtattacctccccaacaaaaatcagatggtgtttccggcgggtatccttcagcctacactctacgatcctgacttccctcagagcttgaattacgggggaattggaacgattatagggcatgagttgacacacggttacgacgactggggcgggcagtacgatcgcagcgggaatttactacactggtggacagaggcgtcttactctcgcttccttaggaaagccgagtgtatcgtccggttgtatgacaactttactgtgtataaccagagagttaatggcaagcacaccttgggcgaaaacattgccgatatgggcggtctcaagcttgcttaccacgcttatcagaagtgggttcgcgaacatggaccggaacatcccctccctcggctcaagtacactcatgaccaactgttcttcatagcatttgcacagaactggtgcataaaaaggcgatcccagtctatatatcttcaggtactcactgacaagcacgcccccgaacattatcgtgttttgggtagcgtcagccaatttgaagaatttgggagagcgttccattgccccaaagattcgccaatgaatcccgcacataaatgttcagtttggtag

SEQ ID NO: 115778 - DNA, 1284 bp, synthetic construct
  misc_feature 1..1284: note = Description of Artificial Sequence: Synthetic coding sequence
  source 1..1284: mol_type = other DNA
atggagaccctctgtttgcgagcatctttttggcttgccttggtagggtgtgttatctccgacaaccccgagaggtattccacaaacctttcgaaccatgtcgatgattttacgacgttccggggcacggaactaagctttctggttacaactcatcagcctactaatcttgtcttaccatccaatggatcaatgcataactattgccctcagcaaaccaaaattacttccgcttttaagtacatcaataccgtgatatcatgtacaatctttattgtcggtatggtgggaaatgcaaccctgctgagaatcatatatcagaataaatgcatgcggaatggccctaacgccctgattgcctccctggcccttggcgacctgatctacgtcgttattgaccttccaattaatgtcttcaaactcctagctggccgctggcctttcgaccacaatgacttcggcgtgttcctctgcaagctttttcccttcctgcaaaaatcaagcgtgggcattactgtcctgaacttatgtgccctcagtgtggaccgataccgggcggtggcgtcctggagtagggtacagggtattgggattcccttagtcactgcaattgagattgtcagcatttggatactgtcctttatcctggctatccctgaggccattggcttcgtgatggtgccctttgaatatcgcggcgagcagcacaagacatgcatgctcaatgccacctcaaaatttatggagttctaccaggatgtcaaagattggtggctttttggcttctacttttgcatgcccctcgtctgtacggcaatcttctacactctgatgacatgtgagatgctgaacaggagaaacggatctttgaggatcgctttgtctgaacacctgaaacagcgtagggaagtagccaagacagttttctgcctggttgtaattttcgccttgtgctggtttcccctccacctcagcagaattctgaagaaaactgtgtacaatgagatggacaagaacaggtgtgagctgctgtcctttcttttactgatggattatatcggtataaatctagcaaccatgaactcctgcatcaatcccatcgctctgtacttcgtgagcaagaaattcaagaattgcttccaaagctgcctgtgctgctgctgttatcagagcaagtctctgatgaccagcgtgcctatgaatggcacttcaatccagtggaagaatcacgaccagaataatcataacacagacagatcctcacacaaagattctatgaactag

SEQ ID NO: 115779 - DNA, 486 bp, synthetic construct
  misc_feature 1..486: note = Description of Artificial Sequence: Synthetic coding sequence
  source 1..486: mol_type = other DNA
atggaaacactatgtctacgagcatctttttggttggccctcgtaggctgcgtgatctcagataaccccgaacgctactcaacaaacctatcaaaccacgtcgacgacttcacaacctttagaggaaccgagctcagcttcctggttactacccaccagcccacgaatctcgtgctaccttccaacggcagtatgcataattattgtccccaacagaccaagatcacttctgcgtttaaatatatcaacaccgtgatttcctgcacaatcttcattgtgggtatggtggggaacgctaccctcctccggatcatctaccagaataagtgtatgcggaatgggcccaatgccctgattgcatctctggctctaggtgacctcatatatgtagtcatagatctgcccataaatgtgtttaaagtgcagtcaagttgtcttctggagtcgtgctcaggcaactgggactctttcggaaactgtcattag

SEQ ID NO: 115780 - DNA, 957 bp, synthetic construct
  misc_feature 1..957: note = Description of Artificial Sequence: Synthetic coding sequence
  source 1..957: mol_type = other DNA
atggagacactgtgcctgagggccagcttctggctcgccctggtgggttgcgtgatttccgacaatcctgagagatatagcacaaacctctccaatcatgtggatgattttactaccttcagaggaactgagctgagctttctagtgactacgcatcagcctaccaaccttgtcttgccgtctaatgggtctatgcacaactactgcccacagcaaacaaagattacgtctgcattcaaatatatcaataccgttatttcatgcaccatatttatcgtaggtatggtgggcaatgccactttactccgtattatctaccagaacaagtgtatgaggaacgggcccaacgccctgatagcttccctcgccctgggtgatttaatctacgtggtgatagatctgcccatcaacgtatttaagttctatcaggatgtgaaggattggtggctgtttggcttttatttctgtatgcccttggtgtgtactgctatattctataccctgatgacgtgcgaaatgttgaacaggagaaatggatcccttaggattgccttatccgaacatctgaagcagaggcgagaggttgccaagacagtgttttgcctggtggtcatctttgcactctgctggttcccgctgcatttgtccagaatcctgaaaaagactgtttataatgagatggacaagaatcggtgcgaactgttatcattcctgttgctgatggattatataggaattaacttagctacaatgaactcttgcattaacccaatcgcgctctattttgtcagcaagaaattcaagaattgtttccagtcctgtctctgctgctgctgctaccagtcaaaaagcctcatgacaagcgttccgatgaatggaacttcaatccagtggaaaaatcacgatcaaaacaaccacaataccgataggtcgtctcacaaggatagcatgaactag

SEQ ID NO: 115781 - DNA, 564 bp, synthetic construct
  misc_feature 1..564: note = Description of Artificial Sequence: Synthetic coding sequence
  source 1..564: mol_type = other DNA
atggaaaccttgtgtttgcgagcctccttctggttggccctggtggggtgcgtgatctccgacaaccccgagagatactccaccaatttaagcaaccatgtggatgactttaccactttccgcggtacagagctcagcttcctcgtcaccactcaccagccaactaacctggtgctgccttccaatggctctatgcataattattgcccacagcaaacaaaaataacaagcgctttcaagtacatcaatactgtcatctcttgcactatttttattgttggcatggtgggcaacgcaacattgctccggattatctatcagaacaagtgcatgagaaatgggcccaacgccctcatcgccagcctcgccctgggcgatttgatctacgttgtgatagacctcccaattaacgtattcaagttattggccggaagatggcctttcgatcataacgacttcggtgtgttcctgtgcaaactattcccttttttacagaagtcaagcgtgggtattaccgttttgaacctttgtgctctgtcagtggaccgtaagactgagatgtag

SEQ ID NO: 115782 - DNA, 957 bp, synthetic construct
  misc_feature 1..957: note = Description of Artificial Sequence: Synthetic coding sequence
  source 1..957: mol_type = other DNA
atggaaacgctgtgtctgcgcgcgagcttctggctggccctcgttggttgcgtcatttcagacaacccagagagatactctactaatttgagcaaccacgtggacgactttaccacttttcgcggaactgagctgtcctttctggtcacgacacaccagccaactaacctggtgctaccttcaaatgggagtatgcacaattactgtccccagcagactaagatcacctccgcattcaaatatataaacaccgtaatcagctgtactatcttcattgtggggatggttggaaacgccaccctgctaagaattatctatcagaacaaatgtatgcggaacgggccaaatgctctgattgcttctctcgctctcggagatcttatatatgttgttatagacctcccgatcaatgtttttaagttttaccaggacgtcaaggactggtggcttttcggattttacttttgcatgccattagtttgtactgctattttctacaccctgatgacctgcgaaatgctgaatagaagaaacggtagcctccggattgccctctcggagcacttgaagcagcgccgggaagtcgcaaaaacagtcttttgtttggttgtcattttcgccctatgttggttcccactgcacctgagccgcatcttgaagaagaccgtgtacaacgagatggacaagaaccgatgcgaactcctgtcattcctgctcctcatggattacatcgggataaacctggcgacgatgaacagctgcatcaatcctattgccctctacttcgtctccaagaagttcaagaattgctttcagagctgtttgtgctgctgttgttatcagtctaaaagtctcatgacatcagtgccgatgaatgggacatctatccagtggaagaaccacgaccaaaataaccataataccgacaggtccagccataaagacagtatgaattag

SEQ ID NO: 115783 - DNA, 1179 bp, synthetic construct
  misc_feature 1..1179: note = Description of Artificial Sequence: Synthetic coding sequence
  source 1..1179: mol_type = other DNA
atggaggaacagcagccagagcctaaaagccaacgcgatagcgctcttggagccgccgctgctgctacccctgggggattatcgctttcactgtcccctggcgctagcggttccagtggaagtggctcagacggcgactcagtacccgtatccccccaacctgcacccccgtcacctccggccgcgccatgtttgccacctctggcccatcatccacaccttcctccacatccaccccccccccctccccagcatttggcagcccctgcccatcagcctcagccagccgcgcagcttcatcgtactactaacttttttatcgataatatcctgcggccagacttcggatgcaaaaaggagcaacctcccccacagctgcttgtggccgcagccgcgagagggggtgccggcggcggcggcagagtcgagcgggaccggggtcagaccgctgcaggccgagatcccgttcaccccctgggaacaagggccccgggagcagcaagccttctgtgcgccccagatgctaactgcggcccaccagacggctcacaacccgccgcagcaggagccggagcgagcaaggccgggaacccagccgcagctgccgcagcagccgcagccgctgttgctgcagcggctgcagccgccgccgcaaagccctctgacaccggaggagggggttcaggaggaggagccggctctcccggcgcgcagggtacgaagtacccagaacacgggaaccccgccatactgctgatgggctccgccaatggaggtcccgtggtgaaaactgattcacagcaacctcttgtctggcccgcctgggtgtattgtacccgctacagcgataggccgtcaagcgggcctcggactcggaagttaaaaaagaaaaaaaacgagaaggaagataaacgccctcggacagcctttactgcagagcaactccagagactgaaggccgagttccaggctaatcgatacatcacagaacaacgcaggcagacccttgcacaagagcttagcctcaacgagagtcagattaaaatttggtttcagaacaagcgggccaaaattaagaaggctaccggaataaaaaacggtctagcccttcatctgatggcccagggactgtataaccactcaaccacaacggtgcaagataaagatgaatcagaatag

SEQ ID NO: 115784 - DNA, 1002 bp, synthetic construct
  misc_feature 1..1002: note = Description of Artificial Sequence: Synthetic coding sequence
  source 1..1002: mol_type = other DNA
atggaagagaacgatccaaaaccaggagaagccgcagcagctgtagagggtcagcgtcagcccgagtccagccctggcggaggctcaggaggaggaggaggttcctcacccggcgaggcggacacaggacgaaggagagccctgatgcttcctgcagtgttgcaggcacccgggaaccaccagcatccccaccggataactaacttctttattgataatattttacggcccgagtttggtagaaggaaagacgccgggacttgctgcgcgggagctggtggagggcgtggcggtggggccggtggagagggaggcgcaagcggggcggagggtggaggtggcgctggcgggtcggagcagctcctaggctccggctctcgggagccacggcagaacccaccctgcgcccctggcgctggagggcctctgcccgccgccggatccgactccccaggagatggcgaaggaggtagtaaaacactgtctctacacgggggcgccaagaaaggtggagaccctggtggcccactggacgggtctctaaaggcaagaggcctagggggcggtgatctgagcgtgtccagcgactctgactcatcacaagctggggccaatctgggcgctcaacctatgctctggccagcctgggtctattgcacacggtattcggatcgcccatcctccgggccgaggtctcggaagcctaagaagaagaaccctaacaaggaggacaaaagaccacgtacggccttcactgcggaacagcttcagcggctaaaggctgagtttcagacgaaccggtacctaaccgagcagagaagacagagcctggctcaagaactctctttgaatgaaagccagatcaagatctggtttcagaataagagagccaaaattaaaaaggcaacgggcaacaaaaatactctggcagtgcacctcatggctcaggggttgtataaccattccactacagccaaagagggcaagtctgactctgaatag

SEQ ID NO: 115785 - DNA, 2184 bp, synthetic construct
  misc_feature 1..2184: note = Description of Artificial Sequence: Synthetic coding sequence
  source 1..2184: mol_type = other DNA
atgcccccacccgcagacattgttaaagtggccatcgaatggccaggcgcgtaccctaaactcatggagatcgaccaaaagaagcctctttctgccatcattaaggaagtctgcgacggctggtccctcgcaaaccatgaatacttcgcactgcagcacgccgatagctccaacttttacatcacggagaagaatagaaacgagattaaaaatgggacgatactgcgcttaacgacttcaccagctcagaacgcccagcagctccacgaacggatccagagctcctccatggacgcaaagcttgaggctctgaaagaccttgcttcactttcaagggacgttactttcgcacaggaattcataaacttggacgggatctctctgcttacccagatggtggagtccgggaccgagcgctatcaaaagctgcagaaaatcatgaaaccatgctttggggatatgttgtcttttacactgacagcctttgttgaactgatggatcacggtatagtgtcctgggacaccttcagcgtggcgtttataaagaagattgcatcgtttgtgaacaagtccgccattgatatttcaatcctgcagcggtcactggctatactggagtctatggtactgaatagccacgatctatatcaaaaagtggcccaggagattaccatcggtcagctaataccacacctgcaagggagcgaccaggaaattcagacttataccattgctgtgattaacgctttgttcttgaaggcccctgacgagcggaggcaggaaatggctaacatcttggcccagaagcaactgaggtcaataattctgacccacgtaattagggcgcagagagcgataaataatgaaatggcacaccagctttatgtactccaggttctaacatttaacctattagaggatcgaatgatgacaaagatggacccgcaggaccaggctcagagggacatcatctttgaattacggcggatcgccttcgatgctgagtcagagcctaataattcatctggatcaatggagaaaaggaaatctatgtacacacgtgactataaaaaactggggtttatcaaccacgtgaatcctgcaatggacttcactcagacgcctccagggatgttagccctggacaatatgctgtactttgcaaaacaccatcaggacgcctatatcagaatcgtgctcgaaaatagttcccgggaggataaacacgagtgcccgttcggtcgatcatctattgaattgaccaaaatgctgtgtgaaatactgaaagtgggcgaactgccttctgagacatgtaatgatttccaccccatgttctttacgcatgacaggtcgtttgaagagtttttttgtatttgcatccagttactaaataagacctggaaagaaatgagggccacctccgaggactttaataaggttatgcaggtcgtgaaggagcaggtgatgcgtgcgttgactacaaaaccatcctcattggaccagttcaaaagcaagctgcagaaccttagctacactgaaatcttgaaaatcaggcagagtgaaaggatgaatcaggaggactttcagtcgaggccgatcttggaactcaaggagaaaattcagcctgaaatcctggagttgatcaagcaacagagactcaatagacttgtcgagggcacatgtttccgaaagctgaacgctaggcggcgacaggataaattttggtactgtagactgtcccccaatcacaaggtgctgcactatggagatttggaggaatctccacagggagaagtcccccatgatagcctgcaggacaagctgcccgtcgccgacatcaaggctgtggtgacagggaaagactgcccccatatgaaagaaaaaggtgctctaaagcaaaataaggaggtcctggagctcgccttcagcatcctgtatgatagcaactgccagctcaactttatcgcaccagacaagcacgaatactgtatttggacagacgggttgaacgcgctgcttggcaaagacatgatgtctgatttaaccagaaacgacctggacacactgctctccatggagataaagctgcggctgctcgatttggagaatatccagattccagacgctcctcccccaattccgaaagagccatccaactatgacttcgtgtacgattgcaattag

SEQ ID NO: 115786 - DNA, 1290 bp, synthetic construct
  misc_feature 1..1290: note = Description of Artificial Sequence: Synthetic coding sequence
  source 1..1290: mol_type = other DNA
atgagtgagcaccagaaagaacagacattagatactccctctctgcgcaccgtcacgctcaccgttcgggtgcatgggtttattctagaggtgagcaaaacaaagaatccccccatcccagataccttttggccacctaggtgggatcaccgtccgagcccaggaggagagacgaatgcctattgccagatgaatcacgtgaatccagcgatggatttcacccaaacccctcctgggatgttagccctcgacaacatgctgtacttcgcaaaacaccatcaggatgcttacattaggatcgttcttgagaacagtagccgcgaggacaagcatgagtgccccttcggacgctctagcattgaactgaccaaaatgctgtgcgaaattctgaaggtgggcgagctgccatcagaaacatgtaatgatttccatccgatgttctttacacatgataggagtttcgaagagtttttttgcatttgcatccagttgctgaataagacatggaaagagatgcgcgctaccagcgaagattttaataaggtgatgcaggtagtgaaggagcaggtcatgcgggccctgactaccaagccctcttccctcgatcagttcaaaagtaagctacaaaatttgagctatactgaaattctcaagataaggcagtccgagaggatgaatcaggaagactttcagtcccgccctatactcgaactgaaagaaaaaatccagccagaaatactggaactgattaagcagcaaaggctcaatcggctggttgagggaacctgcttcagaaaattaaacgcccgcaggcgacaggataaattttggtattgcaggctatcccctaaccataaggttctgcattatggtgacctggaggagtcaccccagggggaagtgccacatgactccctgcaggacaagcttcctgtggccgacatcaaagccgttgtaacagggaaggattgtccgcacatgaaggaaaagggggctttaaagcagaacaaggaggttttggaactggcttttagcattctttacgattccaactgccagctgaactttatcgccccagataaacacgagtactgtatttggaccgatggtttgaacgccctcctgggaaaggacatgatgtcggacttgacacgaaatgacctggacactctccttagtatggaaattaaattgcgtctactggacctcgaaaatatccagatccccgatgccccgcccccaatcccaaaggagccgtctaactatgactttgtatatgattgtaattag

SEQ ID NO: 115787 - DNA, 1896 bp, synthetic construct
  misc_feature 1..1896: note = Description of Artificial Sequence: Synthetic coding sequence
  source 1..1896: mol_type = other DNA
atggacgccaagctcgaagctctcaaagatctggctagtctgtctagggacgtcactttcgctcaggagttcataaacctggacggaatatcccttcttacacaaatggttgaatcgggcaccgagcgataccagaagcttcaaaaaattatgaagccttgcttcggcgatatgctgagcttcaccttgaccgcatttgtggagctgatggaccacggtattgtaagctgggataccttcagtgtggcgtttatcaagaagatcgctagcttcgtcaataagagcgccattgatataagtattctccagaggagcctggccattctggagtctatggtattgaactctcatgatctgtatcagaaagtcgcccaggaaatcacgataggacaacttattccacacttgcagggatctgatcaggaaattcagacatacaccatagccgtcatcaatgccctgttcctgaaggcaccggatgagcggaggcaagagatggcaaacattctagcacagaagcaattacggtctatcattctcacgcacgtgattcgtgctcagagggctatcaataatgagatggcccaccagttgtacgtactgcaagtgctgacattcaaccttctggaagaccgaatgatgactaaaatggaccctcaggatcaggctcagcgcgacatcatctttgagctccgaagaatcgctttcgacgccgaatcagagcctaataattcctcagggagtatggagaaacggaagtcaatgtatactcgtgactacaagaaactcggcttcattaatcatgtcaaccccgcaatggatttcacacagaccccccccgggatgcttgctttagacaacatgctatactttgcaaaacatcaccaggatgcatacattaggatcgtgctggagaatagttccagagaagacaagcacgaatgtccgttcggtcgaagcagtatcgagttaacgaaaatgttgtgtgaaatcctgaaagttggcgagctgccatccgagacatgtaatgacttccatcccatgttcttcacgcacgataggtcgttcgaagagtttttctgcatctgcattcagttgctgaacaagacttggaaagaaatgcgggccacatccgaggattttaataaagttatgcaggtggtgaaggaacaggtgatgcgcgctctcacaactaaaccctcttctttagaccagttcaagtcgaaactgcagaacctgtcctacactgagatcctgaaaatccgccagagtgagagaatgaaccaggaggatttccaaagtcggccgatactggaactgaaggagaagatccaacctgagatcctggaacttatcaaacagcagaggctgaatcgacttgtggagggaacgtgctttcgaaaactcaatgcccggcgccggcaggacaagttctggtattgtcgcttgtccccaaatcacaaggtgctgcattatggcgacctggaggagtccccccagggagaagttcctcacgactctttgcaggataagctgcctgtggcagacatcaaggctgtggtcaccggaaaggactgcccccatatgaaggagaagggggccctgaagcagaacaaagaggtgctggaactggccttctctattctgtacgattcaaattgtcaactgaacttcattgctcccgataaacacgagtactgtatctggaccgatggcttaaatgccctgctcggtaaggacatgatgtctgatttgacgcgtaatgacctagacacactgttgagtatggagataaagttgaggctcctcgacttggaaaatatccagattccggatgccccccctcccatcccgaaagagccaagtaactacgattttgtctatgattgtaactag

SEQ ID NO: 115788 - DNA, 744 bp, synthetic construct
  misc_feature 1..744: note = Description of Artificial Sequence: Synthetic coding sequence
  source 1..744: mol_type = other DNA
atgcaggttgtaaaagagcaagtgatgcgggctctcaccactaagccctccagtttggatcaatttaagtcaaagctgcagaacctctcatacacagaaatactgaaaattaggcagagcgagagaatgaatcaggaggacttccagagccggccaatcctggagttaaaagagaagatccagcccgagatcctggaacttatcaagcagcagcgcctgaaccgcttagtggagggcacttgtttccggaagctgaatgcacgccggcggcaggacaaattctggtactgtcggcttagtcctaatcacaaggttcttcattacggagacctcgaggaaagcccgcagggcgaagtgccccacgattccttacaggacaagctgcctgtggccgacatcaaggcagtcgtgacaggaaaggattgtccacacatgaaagagaaaggagccctgaagcagaacaaagaggtgctggagttagcgttttctatcttatatgacagtaactgtcagctaaattttattgcgcccgacaagcatgaatattgtatctggaccgatgggctcaacgccctgctgggaaaagatatgatgtccgacctcacgaggaacgacctggatactctgttatcaatggaaataaaattgagacttctggatctggagaacattcagattcccgacgctccaccccccatccccaaagagccaagcaattacgactttgtgtacgattgtaactag

SEQ ID NO: 115789 - DNA, 744 bp, synthetic construct
  misc_feature 1..744: note = Description of Artificial Sequence: Synthetic coding sequence
  source 1..744: mol_type = other DNA
atgcaggtggttaaagaacaggtgatgcgtgctctcactaccaagccatctagtctggaccagtttaaaagtaagctgcagaacctgagctacactgagatcctgaagatcagacagtccgagagaatgaatcaggaggatttccagtcacgacctattttggagctcaaggaaaagattcagcctgaaattctcgagctgatcaaacagcagaggctgaacagactggtggagggaacatgtttcagaaagctcaacgcaaggaggagacaggacaagttttggtactgtagattgagtcctaatcacaaagtgttacactatggtgaccttgaggagagcccccagggagaggtgccacatgacagcttgcaggacaagctgccggtggcagatattaaggcagttgtcacaggaaaagactgcccgcatatgaaggaaaagggcgccctgaaacagaacaaagaggtgctggagctggcctttagcatcctctacgactctaattgccaactgaactttattgccccagacaagcatgaatactgtatatggactgacggtcttaacgctctgctcggcaaagatatgatgtcagacttgacacggaatgacttggacactctgctttccatggagataaagttaagactgctggacttggaaaacatccaaatcccagacgctcctccgcccatcccaaaagagccttctaattacgacttcgtgtatgactgtaattag

SEQ ID NO: 115790 - DNA, 2184 bp, synthetic construct
  misc_feature 1..2184: note = Description of Artificial Sequence: Synthetic coding sequence
  source 1..2184: mol_type = other DNA
atgccaccgcctgctgatatagtgaaagtggccattgaatggcccggcgcctacccaaaattaatggaaatcgatcagaaaaagcctctctcagcaattataaaagaggtgtgtgacggttggagccttgcgaatcacgaatactttgcacttcagcacgctgacagttctaacttctacatcacagagaagaatcgaaacgaaataaagaatggcaccattcttcggctgacgacgtcccccgcgcagaatgcgcagcagctccacgagcggattcagagcagcagtatggacgcaaagctagaggcgctcaaagacctcgcctcattgagccgtgacgtgaccttcgcgcaagagttcattaatctggacggcataagcctcctgacacaaatggtggagtcaggcaccgagcggtaccaaaagctgcagaaaattatgaaaccatgcttcggtgatatgctgtcattcacacttacggcattcgtggaactaatggaccatggaattgtatcttgggacactttctcagtcgccttcattaaaaagattgccagctttgtcaacaaatctgctatcgatatctctatcctgcagcggagcttggccatccttgagtcaatggtgctcaactctcatgatctgtaccagaaagtggcgcaggaaatcacaattgggcagctcattccacatctccaaggaagtgaccaggaaattcagacatacacaatcgcagttattaatgccctctttcttaaagcacctgatgaaaggagacaggagatggcaaatatcctggctcagaagcaactgaggagcataattctgacccatgtaataagagcccaacgtgcaatcaacaacgagatggcccaccagctgtatgtcttgcaggtgctgactttcaacttactcgaggatcgcatgatgacaaaaatggacccccaggaccaagcacaacgggatatcatttttgagctccgtcgaatcgctttcgacgcggagtccgaacctaataacagttccggaagcatggagaagcgcaagagcatgtatacccgagactataaaaagctagggttcattaatcatgtgaatcctgctatggatttcacacagacccccccgggcatgctggctctggacaatatgctttactttgccaaacaccaccaggatgcgtacattagaatcgttctggaaaactcttcgcgggaggataagcacgagtgtcccttcgggagatcctccatcgagctgactaaaatgttgtgtgaaattctaaaagtgggggagctaccaagcgaaacgtgtaacgactttcacccgatgttttttacacacgaccggtctttcgaggagttcttctgcatatgcattcaactgctgaacaaaacttggaaagagatgcgcgctacctccgaggacttcaacaaagttatgcaggtggtgaaggagcaagtgatgcgcgctctgactacaaagccaagctccttagatcagtttaaatccaagctccagaatctctcgtatacggagatcctcaaaataagacagtctgagagaatgaaccaggaagacttccagtccagacctattttggagctcaaggagaagatacagcctgaaatcctggaacttattaagcagcagaggttgaatcggctggtggaggggacctgtttccggaaattgaatgcgcgccgcagacaggacaaattttggtattgtaggttgagccccaatcataaagtgcttcattacggtgacctcgaagaaagtccacaaggtgaggttccgcacgatagtctgcaggataaattgccggtagcggatatcaaagccgtggttaccggaaaagactgtccccacatgaaagagaagggagcactcaagcagaataaggaagtgcttgaattggccttttctatattatacgactccaattgccagctgaacttcatagccccggataagcacgaatactgcatttggactgacggccttaacgctttacttggtaaggatatgatgtctgacctgacccggaatgacctcgatacactgctgtccatggagatcaagctgaggctgttagatctcgagaacattcagatacccgatgcgcctccccctataccaaaggagcccagtaactatgacttcgtgtacgactgcaactag

SEQ ID NO: 115791 - DNA, 180 bp, synthetic construct
  misc_feature 1..180: note = Description of Artificial Sequence: Synthetic coding sequence
  source 1..180: mol_type = other DNA
atgcctccacccgcggatattgtcaaagtggccattgagtggcctggtgcataccccaaactgatggagatcgatcagaaaaaaccactgagcgccataattaaggaagtgtgcgacggatggagcctggcaaaccatgaatactttgctttacagcacgccgactcaagcaatttctag

SEQ ID NO: 115792 - DNA, 2184 bp, synthetic construct
  misc_feature 1..2184: note = Description of Artificial Sequence: Synthetic coding sequence
  source 1..2184: mol_type = other DNA
atgcccccaccagccgacatcgtgaaagtggccatcgagtggccgggggcttatcccaagcttatggagatagatcaaaaaaagcccttgtctgccatcattaaagaagtgtgtgacggctggtctctggccaaccatgaatattttgccttgcagcatgccgatagcagcaacttttacatcactgagaagaatcgaaatgaaatcaaaaatgggactatccttcggctcaccaccagtccagctcagaacgcacagcagctgcacgagaggatacagtcctcaagtatggatgccaagctcgaagcactgaaagacctagcctcattaagcagagatgtcaccttcgcccaggagtttatcaacctggatggcatatccctgttgacccaaatggtagagagtggcacagaacggtaccagaaactccagaagattatgaaaccctgcttcggtgacatgctcagctttacactcacagcctttgtcgagctgatggaccatggcatcgtgtcatgggacacttttagcgtcgcttttattaaaaagatcgcatcctttgtgaataagtctgcaatcgatatcagcattcttcagaggtcactggccatcctcgagtcaatggtgctgaactcccatgatctttaccagaaggtggcccaggagattacaatcggacagctgattcctcacttacaaggctctgatcaagagatacaaacctacacaattgcagtcataaacgccctcttcttaaaagctcctgacgagcgacggcaggaaatggccaatattctggctcagaaacagctgcgctcaataattctgacgcacgttattagggcgcagcgggctattaacaacgaaatggcccaccaactatatgtgcttcaggttttaaccttcaacctcctagaagataggatgatgaccaaaatggacccacaggaccaggcacagagggatataatattcgagcttaggcgcatcgcctttgacgccgagagcgagccgaacaacagcagcggctccatggagaagcgtaaatctatgtatacgcgagactataaaaagttaggcttcataaatcatgttaatcccgccatggattttactcaaaccccccctggcatgttagccctggataacatgctctacttcgccaagcaccaccaggacgcctatataaggattgttctggagaattcaagtcgtgaggataaacatgagtgcccttttggcagatcctcaatcgaactaacgaagatgctgtgtgagattttgaaggtcggcgaactgccatcggagacctgcaacgacttccacccgatgtttttcacacatgatcgctctttcgaagaattcttctgcatttgtattcagttactgaataaaacttggaaggagatgcgagccacgagcgaagattttaacaaagtgatgcaggttgttaaggagcaggtgatgagagccctgaccaccaagccatccagtctcgatcaattcaagtcaaagctgcaaaatttatcatacacagaaatcttgaaaatcagacaaagtgagcgtatgaaccaggaggatttccagtcacgtcccatactagaactgaaagagaagatccagcccgagatccttgagctgattaagcagcagagactgaacaggctggtggagggcacgtgttttaggaagctgaacgctcgccgccgtcaggacaagttctggtactgtaggctaagccctaaccacaaggttttgcattatggggatctagaggaatcaccacagggcgaggttccccacgatagtctccaggataagttaccagtcgctgacattaaggctgttgtgaccggcaaggactgccctcacatgaaggagaagggcgccctgaaacagaataaggaggttttagagctcgctttcagcatactgtacgactcgaattgccagctgaatttcattgctcccgataagcacgagtattgcatttggaccgatggactgaatgcacttctcggcaaggacatgatgtcagacttaacccggaatgacctagatacgcttttaagcatggaaatcaaattaaggcttttagacctggaaaacatccagataccggacgctcctcccccgattccaaaagaaccaagtaactatgattttgtctatgattgcaattag

SEQ ID NO: 115793 - DNA, 246 bp, synthetic construct
  misc_feature 1..246: note = Description of Artificial Sequence: Synthetic coding sequence
  source 1..246: mol_type = other DNA
atgcctccaccagctgacattgtcaaggtcgccattgaatggcccggtgcttacccaaaactgatggagatagatcagaaaaaacctctgtctgctataattaaggaagtttgtgacggatggagcctggccaatcacgaatacttcgctctccagcatgcagattcctccaatttctatataacagaaaaaaacaggaacgagatcaaaaacggaactattctgaggctgaccacttcaccatag

SEQ ID NO: 115794 - DNA, 450 bp, synthetic construct
  misc_feature 1..450: note = Description of Artificial Sequence: Synthetic coding sequence
  source 1..450: mol_type = other DNA
atgcccccacctgcagacattgtaaaagtggctatcgagtggccaggagcttaccccaaattgatggaaattgatcagaagaagcccttatccgccattatcaaggaggtgtgtgatggatggtccctcgctaaccatgagtacttcgccctgcagcatgccgatagtagtaacttttacataactgagaaaaacaggaacgagatcaagaacggaacaatcttacggcttacaacttcacccgctcagaacgcgcagcagctgcacgaacggattcagtcctcttccatggacgccaaattggaggctttgaaagacctggcctccctgagccgggatgttaccttcgcacaggaatttatcaacttggacgggatctcactactcacgcaaatggtggagtcaggaaccgaaaggtaccaaaagctgcagaagataatgaaaccttag

SEQ ID NO: 115795 - DNA, 2163 bp, synthetic construct
  misc_feature 1..2163: note = Description of Artificial Sequence: Synthetic coding sequence
  source 1..2163: mol_type = other DNA
atgccccccccatccgacatagttaaagtcgcaatcgaatggcccggggcgaatgctcagcttttagaaatagaccagaaacgtcccctggccagcatcatcaaagaggtgtgtgacggctggtctttacctaacccagagtactacacgcttagatacgccgacggcccccagttgtatattactgagcaaacccgctccgatattaagaatggaaccatcctgcagctggccataagtccgtctagggccgccaggcagctgatggagcgcacgcagagctcaaacatggaaactcgcctggacgccatgaaggagttagctaaactgtccgctgacgtcacctttgctacagaattcattaatatggatgggattatcgtgctcaccagacttgtggagtcagggaccaagctcctctctcattactcagagatgctggcatttaccttgaccgcattcttagagttaatggaccacggtattgtatcctgggacatggtgtcaatcacttttataaagcagatcgcgggctacgtgagccagccaatggttgatgtctcaatcctgcagaggtccctggccatcctcgagagcatggtgctaaattcccagtcattgtatcagaagatcgccgaggagataacggtgggacagctgatttcacacctgcaggtgtccaaccaggagattcagacttacgcgatcgcactgatcaatgccttgttcttgaaagcacctgaggacaagcggcaggatatggctaacgccttcgcccaaaaacaccttaggagtatcatactcaatcacgttatccgaggcaatcgtccaatcaaaacggagatggcacaccagctctacgtacttcaagtactgacctttaatctcctagaagagcggatgatgaccaagatggacccaaacgaccaggcccagcgcgacatcattttcgaactaaggaggatcgccttcgacgctgagtccgacccatctaacgcaccagggtccgggaccgaaaagcgcaaggccatgtatactaaggactataaaatgcttggatttacaaaccacatcaatcccgccatggattttacacagactccgccaggaatgctggcactggacaacatgctgtacctggcaaaagtgcaccaggacacttatatccgaattgtgcttgaaaactctagccgggaggataaacacgagtgtccctttggacgcagcgctattgagcttacaaagatgctgtgtgagatcctccaggtgggagagctacctaacgaaggtagaaatgactatcacccaatgttctttacccacgacagagcctttgaggagctgttcggcatttgtattcagttgctgaataagacctggaaggagatgcgcgccacggccgaggattttaacaaggtgatgcaggtcgtgcgagagcaaatcacaagggccctgccttcgaagccaaattccttggaccaattcaaatccaagcttaggtctctgtcgtactctgagatactgcgcctgcgtcagagtgagcgcatgtcccaggacgacttccagtcacctcctatcgtcgaactgagggagaaaattcagccagagatcctagaactgattaaacaacagcgtctcaatcgcttatgcgagggatcttccttccggaaaattggcaatcgaagacggcaggagcggttttggtactgtcgattagcgctgaaccataaggtcctgcactacggagatctggacgacaatccgcagggagaggtcacatttgaatctttgcaggagaagatacccgtggcagacatcaaagctatagtgaccggcaaagactgtcctcacatgaaggaaaaatcagccctcaagcaaaataaggaggtcttggagttagcattctccatcttatacgaccctgacgagacccttaacttcatagccccaaataagtatgagtactgtatttggatagacggcctgagcgctctgttgggtaaagacatgagttctgagctaacaaagtcggacttagacaccctgcttagcatggaaatgaagctccgcctcctcgacttggagaatattcaaatcccagaggccccgccgcccattcctaaggagccctcctcatatgatttcgtatatcattatgggtag

SEQ ID NO: 115796 - DNA, 2157 bp, synthetic construct
  misc_feature 1..2157: note = Description of Artificial Sequence: Synthetic coding sequence
  source 1..2157: mol_type = other DNA
atgccccccccgtctgatattgtcaaagtggccatagagtggcccggtgcaaacgcacagttgctcgagatagatcagaagcggcctctggcttctatcataaaggaagtgtgcgacggctggagcttgcccaatcctgaatattacaccttaaggtacgcagatggaccacagttgtacataactgaacagactcgcagcgacattaaaaacggaacaatcctccagttagctatcagcccatctagggccgcccgacagctgatggagcgcacacagagcagtaacatggagacgcggttagatgctatgaaagaactcgctaaattgagtgccgacgtgactttcgccacggagtttattaatatggacggcattatcgtgctgactaggctcgtggagtccggaactaagttgctgtcccacgagatgctagcgttcaccttgaccgcatttctggagctgatggatcatggcatcgttagttgggacatggtgtctataaccttcattaagcaaattgcgggatacgtgtctcaacccatggtggacgtctccattctgcagcgtagtcttgcaatactggaaagtatggtcctgaattcccaaagcctctaccagaaaatcgcggaggaaataacagttgggcaactgataagccacttacaagtttccaatcaagagattcagacatacgctattgcactcatcaatgccttattcttgaaggctcctgaggacaagaggcaggatatggctaatgcattcgcgcagaagcacttgcgatcgatcattctcaaccatgtgatccgcggcaaccgtcctattaaaacggagatggcacaccagctgtatgtgttacaggtcctgacgtttaacctcctcgaggaaaggatgatgaccaagatggaccccaacgaccaagcccaacgcgacattatctttgagctccgccgaatcgcttttgatgcagagtccgatcccagcaacgcgcccggtagtggtacggagaagaggaaagccatgtatactaaggattacaagatgcttggttttaccaatcacattaatcccgcaatggactttacccagaccccccctggaatgcttgccctagacaacatgctttacctggcgaaagtgcaccaagacacctacataaggatagttctcgaaaacagcagcagggaagacaagcacgagtgcccttttgggcgctccgcaatcgaactgactaagatgctttgcgagattttgcaagtgggagagctacctaacgagggccggaatgactaccacccaatgtttttcacgcacgatcgcgcgttcgaagaactctttggaatttgtatccagttgcttaacaagacgtggaaagagatgagggccaccgccgaagatttcaacaaagtcatgcaggtggtgcgcgagcagatcacacgggcactcccaagtaagccgaactcactggatcagttcaagtccaaactcaggagcttgtcctattccgagattctcaggctgcgacagtctgagagaatgtcccaggatgattttcaaagtccgcccattgtagagttgagagaaaagattcagccagagatactggagctgattaagcaacagcgattaaatcggctttgcgagggctctagcttccgcaagattggaaatagacggcgccaagagcggttctggtactgcagacttgccctgaatcacaaggttctccactacggcgacctggacgacaatccacagggagaggtcacgttcgaatctctgcaggaaaagattcctgtggctgacataaaagctatagtgacagggaaagactgcccacacatgaaggagaaatccgcattgaaacaaaataaggaggttctggagctggctttctccatcttatacgatcctgatgagacgttgaacttcattgcgccaaataaatacgagtactgcatctggatagacggtctatctgccctgctgggaaaagatatgagcagcgagctgacaaagtcagatctcgacacactgttgtccatggaaatgaaactgaggctcctggatctggaaaacattcaaattcctgaagctccccctcctatccctaaagagccttcctcttatgatttcgtgtaccactacgggtag

SEQ ID NO: 115797 - DNA, 1899 bp, synthetic construct
  misc_feature 1..1899: note = Description of Artificial Sequence: Synthetic coding sequence
  source 1..1899: mol_type = other DNA
atggagcgcacccaatcctctaatatggagactcgccttgatgcaatgaaggaactggcaaagctcagcgccgacgttaccttcgccacggagttcataaatatggacggcatcattgtgttaactcggctagtggaaagcgggaccaagctcctgagtcactattccgaaatgctggcatttacgctcacagccttcctcgaactaatggaccacggaattgtttcctgggatatggtgagcattactttcatcaagcagattgctggatacgtgagtcagcccatggtggacgtttctatcctacagcgctccctggccatattggaaagcatggttctcaacagccagagtttataccagaaaatagctgaagaaatcaccgttgggcagctgatctcacacctccaggtgtccaaccaggagattcagacttatgccattgcactcatcaatgctttgtttctcaaagcccccgaggataaaagacaggacatggccaatgcttttgcgcagaaacatttgcggtctattatattgaaccacgttattagggggaaccgcccaattaagaccgaaatggcccaccagttgtatgtgcttcaagttctgactttcaacctgctagaagagcgtatgatgacaaagatggacccaaacgatcaggcccaaagggatattattttcgaactgcgtcgtatcgcctttgatgccgagtctgacccttctaacgctccaggaagcggaactgaaaagaggaaagccatgtacaccaaggattataagatgctgggattcaccaaccacatcaaccccgccatggacttcactcagaccccaccaggcatgctggctttggataacatgctgtatctagcaaaggttcatcaggacacctatatccgaatagtgttagagaattcatctagggaggataaacatgagtgcccctttggacgttccgctatcgagttgacgaagatgctttgcgagatactacaggtgggggaattgcccaacgagggacggaatgactaccatccgatgtttttcactcacgaccgcgcctttgaggagctgttcgggatatgcattcagcttctaaataaaacgtggaaagagatgagggccaccgctgaagatttcaataaggtcatgcaggtggtccgggagcagatcacaagggctctgccaagtaagccaaacagcctggaccagttcaaatcaaagctgcgttctctgtcctattccgagatcctgagactccgccagtctgagaggatgtcacaggacgattttcagagccctccgatcgtcgaactgagggaaaaaatccaacccgagattttagagttgatcaaacagcagcggcttaatcgtctgtgtgaggggtcgtccttcagaaaaataggcaaccgccgtcggcaggaaaggttttggtattgcaggctggcattaaaccacaaggtgctccactacggagatctcgacgataacccacagggcgaggttacttttgagtctctgcaggaaaagatccccgtggccgacattaaagccattgtaaccggaaaggattgtcctcacatgaaggagaagtccgcactcaagcagaacaaagaggtcctcgagctggcattttcaattctttacgaccccgatgagactctgaattttatagctccaaacaagtacgagtattgtatctggattgacggattatcagcgctgctcggaaaagacatgtcctccgaactgacgaaatccgatctcgatacactcctctctatggagatgaaacttcgactgttggacctggagaacattcaaattccagaagcgccacccccaataccaaaggagcccagtagctatgacttcgtctatcactacggctag

SEQ ID NO: 115798 - DNA, 2163 bp, synthetic construct
  misc_feature 1..2163: note = Description of Artificial Sequence: Synthetic coding sequence
  source 1..2163: mol_type = other DNA
atgccccctcccagtgatattgtcaaggttgccattgagtggccgggtgctaacgctcagttactggagattgatcagaagaggcctctcgcctccatcattaaagaagtttgtgacgggtggagtctcccgaatcctgaatattacacgctgcggtacgccgatggacctcagctgtacatcacagagcaaacccgcagtgacataaaaaacgggactatccttcagttggccattagtccatccagagccgcgaggcagctgatggaaaggactcagagttctaatatggaaaccaggctcgacgccatgaaggagctcgccaaactttctgccgacgttaccttcgcgacagagtttattaacatggatggcattattgtgcttacaagacttgtagagtccggcactaagcttctgagccactattctgagatgcttgcattcactttgaccgctttccttgagcttatggatcacggaattgtttcctgggatatggtgagcatcacattcatcaagcagatcgctggctatgtctctcagcccatggtggatgtgtctatcctgcagagatccctggccatactggagtccatggtgctgaattcccaatctctgtaccagaagattgctgaagagattaccgtgggccaacttatctctcatctccaagtgtccaatcaggaaatccagacttatgcgatcgccctgataaatgcgctgttcctgaaggcaccggaagataaacgtcaggacatggctaacgctttcgctcagaaacacttgcgttcaattatcctgaaccatgtcatacgaggcaatagaccgataaagacagagatggcccaccagctctacgtactgcaggtcctcacctttaacctgctggaggagagaatgatgaccaaaatggatccaaatgaccaagcccaacgggacattatttttgaactacggcggatcgcattcgacgctgaatccgatccatcaaatgcacctggttcgggtaccgaaaagcgcaaagctatgtatacgaaggattacaagatgctagggttcactaatcacatcaacccagccatggactttacccagaccccacctggaatgctagcactcgataatatgctatacctggctaaggttcaccaggacacgtacatacgaatcgtgctggagaatagctcgcgcgaggacaagcacgaatgccccttcggccgctcggctatagagctcacaaaaatgctgtgcgagatcctgcaggtcggggagctgccgaacgaaggccgcaatgactatcatcccatgttttttactcatgaccgcgcatttgaggagctgtttggaatctgcatccagttgctgaacaagacctggaaggagatgcgcgctaccgccgaggatttcaataaggtgatgcaggtggtcagagagcaaatcaccagggctctccccagtaaaccaaactcgttggaccagtttaagagtaagctgcggtcactgtcttattccgaaatcctgagacttagacagtccgaacgcatgtcacaggacgatttccaaagccctcccatcgtcgagctacgggaaaaaattcagcctgagatcctcgaactcattaagcagcaaagactcaatcgcttgtgtgaggggtcttcctttagaaaaattggaaatcggagaagacaggagcgcttttggtattgcagactggctcttaatcacaaggtcctgcattacggcgacttggatgataaccctcaaggtgaagttacattcgagagcctccaggaaaaaatcccagtcgctgacatcaaagcaatagtgaccgggaaagactgtcctcatatgaaggaaaagagcgctttaaagcaaaacaaagaagtgctcgaactcgcgttcagcattttatatgacccagacgagacactcaatttcatcgcgccaaataagtatgagtactgcatctggatcgatggccttagtgccctcctcgggaaggatatgtcctctgagcttacaaagtctgacctggacaccttgttatccatggagatgaagctccgccttttggatcttgaaaatatccagatccctgaagctcctccacccattccgaaggaacctagcagttatgacttcgtttatcattacggctag

SEQ ID NO: 115799 - DNA, 804 bp, synthetic construct
  misc_feature 1..804: note = Description of Artificial Sequence: Synthetic coding sequence
  source 1..804: mol_type = other DNA
gaagaaataactgtggggcagctgatctctcatcttcaggtgtcaaaccaagagatccagacctacgccatcgctcttattaacgcactgtttttgaaggctcccgaggacaagagacaagatatggcaaatgcctttgctcaaaagcatctccggagtatcatcctcaaccatgtgatcagggggaataggccaattaagaccgagatggctcaccaactctacgtgctgcaagtcctgacatttaatctgctggaagagcgaatgatgacaaagatggatcctaacgaccaggcacagcgggatatcatctttgagttacggcgtattgctttcgacgccgaatcggatccatccaatgccccaggaagcggcaccgagaaaaggaaggccatgtacacgaaggactacaaaatgctgggtttcactaaccatatcaacccggcaatggacttcacgcagacccctcccggcatgctggcacttgacaacatgttatatctcgccaaggtgcaccaagacacttacattagaattgtactggaaaatagtagccgcgaggacaagcacgagtgccctttcgggcgttctgcgatcgaattaaccaagatgctctgcgagatcctgcaggtcggcgaattgcccaatgagggacgcaacgactatcatcctatgttttttacccatgatcgggctttcgaggagctattcggaatttgtattcagctgctgaataaaacatggaaggagatgagagcaaccgccgaagattttaacaaagtctcggtttccggactgctttag

SEQ ID NO: 115800 - DNA, 2199 bp, synthetic construct
  misc_feature 1..2199: note = Description of Artificial Sequence: Synthetic coding sequence
  source 1..2199: mol_type = other DNA
atgccacccccaagtgatattgtgaaagtcgctatcgaatggcccggagccaacgcgcagctcctcgagatcgaccagaagaggcccctcgctagcatcataaaagaggtctgtgatggctggtcgctccctaatcccgaatattatacacttagatatgccgacgggccacaactttacatcacggagcagaccagatcagacattaaaaatgggactattctccagctggctataagcccctcaagggctgcaaggcaactcatggagagaacacagagttcaaatatggaaacccgtttggatgcaatgaaagagctggccaagttatccgccgatgtcacctttgccactgagttcatcaacatggatggaattatcgtgctaactcgcctggtggaatccggtacgaaactgctgagtcactattccgaaatgttagcgtttactctgacagctttcttggaattgatggatcacggcattgtgtcgtgggacatggtttccattacttttattaaacagatcgcgggatacgtgtcccagcctatggttgacgtgtccatcttacaaaggtcccttgccatcctagagagcatggttcttaactcacagtccctgtaccagaagatcgctgaggaaattaccgtgggacagctgatttcccatctgcaggtgtccaaccaggaaatacagacatatgccatcgctctcattaatgccctgttcctgaaagcgccggaggacaagcgtcaagataaacacttgaacccattggacctgccggtgacggacatggccaacgcctttgcccagaagcatctcaggtccatcatcctcaaccacgtcattaggggcaacagaccaattaagaccgagatggcacatcaactatatgtcctgcaggtgctcaccttcaatttgctggaagagcggatgatgactaagatggaccccaatgaccaggctcagagggatatcatcttcgaattgcgaaggattgcattcgacgctgaaagcgatccctccaatgctcccggctctggtaccgaaaaacgcaaagctatgtacaccaaggactataaaatgctgggattcactaatcatatcaatccagccatggatttcacgcagacccctccaggtatgctggctcttgacaatatgctgtacctggctaaggttcatcaagacacctacattaggattgtcctcgaaaactcatctcgggaggacaaacacgaatgtcccttcggccggtccgccatcgaactaaccaaaatgttatgcgagattctgcaggtgggcgaactgcctaacgagggccgcaacgattaccaccctatgtttttcacccatgaccgggcattcgaggagctcttcggcatctgtatccagcttttaaataagacctggaaagagatgagagccacggccgaggatttcaataaagtcatgcaggtggttcgcgagcagatcaccagggcgctgccctccaagcccaactctctggatcagtttaaatctaaactccgctctctaagctactctgagatcctccggttaaggcagtcagaacggatgtcccaggacgatttccagtccccgcctattgtggaactgcgcgagaagattcagcccgagattcttgagctgattaagcagcagcggctgaaccgtctgtgcgaggggagttcctttagaaaaatcggaaaccgccggcgtcaggagaggttttggtactgtcgtcttgcccttaatcacaaggttctgcactatggggatttggacgacaatccacagggagaagtcaccttcgagtccctccaggaaaagattcccgtggccgacatcaaggcaatagtcacaggcaaggactgtcctcacatgaaagagaaatccgcccttaagcagaataaagaggtactcgagctagccttctccatcctttacgacccagatgagacattaaattttattgccccaaacaagtatgaatactgcatctggattgacggcctctccgcactgctgggcaaggatatgtcttctgagctcacaaaatcagatctcgatacgttgttaagtatggagatgaaactgagattactggatctcgagaatattcagatccccgaggcccctcccccaattcccaaagaaccatcctcctacgacttcgtttatcactacggttag

SEQ ID NO: 115801 - DNA, 1614 bp, synthetic construct
  misc_feature 1..1614: note = Description of Artificial Sequence: Synthetic coding sequence
  source 1..1614: mol_type = other DNA
atggtagatgtgtccatcctccaacgaagtctcgccattttggagtctatggttctcaattcccagtctctgtaccagaagattgcagaagagatcaccgtgggtcagcttataagtcacttgcaagtgagtaaccaggagatccaaacctacgcaattgccctaatcaatgctctattcctgaaggctcctgaagataagcggcaggacatggctaatgccttcgcacagaaacatctgcgttcaatcatcctgaatcacgtcatccgcggcaacagaccaatcaagaccgaaatggcccaccagctttacgtcctgcaggtcctgacttttaatctgctggaggagcgtatgatgacaaaaatggaccccaacgaccaagctcagcgagacattatttttgagctccgtagaattgcttttgatgccgagagtgatccgtccaacgcccccgggagtggcactgaaaagcggaaggctatgtacacaaaggattacaagatgctagggttcacaaaccatatcaaccccgctatggattttacccagacgcctcccgggatgctggctctagacaatatgctgtatttggctaaggtgcaccaggacacctatatacgaatcgtgctggaaaattcatcccgggaagataaacatgaatgtcctttcggccggagtgccatcgagctgaccaagatgctgtgcgagattctacaggtgggcgagctaccaaatgagggaaggaatgattaccatcccatgttttttacacacgaccgggcatttgaggaactatttgggatatgtatccagctacttaacaaaacttggaaagaaatgcgcgcgacagccgaggatttcaataaggttatgcaggtcgtgcgagagcagataactagagctcttccatcgaagccgaatagcctagaccagttcaaatccaagctgagatctctttcatatagtgagattctgcgactcagacagtccgagagaatgagccaggatgatttccagtccccccctatcgtggagctgcgggaaaagatccagcccgagattctggaacttattaaacagcaaaggcttaatcgcctctgcgaagggagcagctttaggaaaatcggtaaccgccgtcgacaagaaaggttctggtactgtcggctggccttaaatcacaaggtactacactatggcgaccttgacgacaatccacagggagaagtgactttcgaatcattacaagagaaaattcccgtcgctgatattaaagctatagtgactggaaaggactgcccgcacatgaaggaaaaaagcgccttaaagcaaaacaaggaagttctcgagctggccttttcaatcctgtatgacccagacgaaacactgaacttcatagctcctaataagtatgaatactgtatatggattgatgggctgtccgccctcctgggcaaggacatgagctcagagttaaccaaatctgatttagatactttactcagcatggaaatgaaactgcgtctgttagatttggagaatattcagattcctgaagccccccctcccatccccaaagagcctagcagttatgatttcgtgtaccactacggatag

SEQ ID NO: 115802 - DNA, 1017 bp, synthetic construct
  misc_feature 1..1017: note = Description of Artificial Sequence: Synthetic coding sequence
  source 1..1017: mol_type = other DNA
atgccacccccctccgacatcgtcaaagtggctatcgagtggcccggggcgaacgcccagctcttagagatcgatcaaaaacgtcctcttgctagtatcatcaaagaagtgtgcgatggttggagcctgccaaaccccgagtattataccttgcgctacgctgatggcccgcaactatacatcaccgagcagacacgctccgatataaagaacggaaccattctccagctggccatctctccaagcagggcggcacgccaattgatggaaaggactcagtcctccaacatggagacccggctagacgctatgaaggaactggcaaagctctccgccgacgtgacatttgccacagagttcattaatatggatgggatcatagtcttaacacgtctggtggaaagtggtaccaagcttctttcacactattccgaaatgctggccttcacgctcaccgctttcctggaactaatggatcatgggatcgtgagctgggatatggtaagtattacattcatcaagcagatagccgggtatgtctcccaacctatggtggatgtgagcattctgcagcggtctctagccatcctggagtcgatggtgctcaactctcagagcttgtaccagaaaattgctgaagaaattacagtaggacagctgatctcacacctccaagtgagtaaccaggaaatccagacttacgccatcgccctgatcaatgcactgttcctgaaagcccccgaggataagagacaagacatggctaacgcttttgctcagaagcacctgagaagcattatcttgaatcatgtgattcgtggcaaccggccaattaagactgagatggctcatcagctgtatgtgctacaggttctgacctttaatctcttggaggaacgcatgatgaccaaaatggatcctaacgaccaggcccagcgggatatcatttttgagctcaggagaatcgcatttgacgccgaatcggatccctccaatgcccctggtagcggcacctag

SEQ ID NO: 115803 - DNA, 852 bp, synthetic construct
  misc_feature 1..852: note = Description of Artificial Sequence: Synthetic coding sequence
  source 1..852: mol_type = other DNA
taccaccccatgttttttacacatgaccgggccttcgaggagctgttcggaatatgcatacagctcctgaacaaaacgtggaaggagatgagagctaccgcggaagacttcaacaaagtgatgcaagttgtgagagaacagatcacacgggcactgccatctaagcctaacagcctagaccagtttaagagtaagctgagaagcctgtcttacagcgagatcctgagactgaggcagtctgagcggatgtcccaggatgatttccaatctccgcctatcgtggagctgagggagaagatccagcccgagattctggagttgatcaagcagcagagacttaatagactctgtgagggtagttcattcaggaaaatcgggaaccggcgcagacaggaaagattctggtattgtaggttagccctgaaccacaaagtactccactacggtgatctggacgataaccctcagggtgaggtgactttcgagagcctgcaagagaagaatattaaagcaatcgtgactggaaaagattgcccccacatgaaagaaaaatcagccttgaagcagaacaaggaggtgctggaattagcgttcagcattctttatgatcctgacgaaaccctgaactttattgcacctaacaagtatgaatattgcatttggattgatggtttgagcgccctgctgggcaaagacatgtcatccgaattgacaaagtcagatctggacactctgctgtcgatggagatgaaactaagattactggacctagagaatattcagatcccggaggcgcctccccctatccccaaggagcctagttcatacgatttcgtgtatcattacggctag

SEQ ID NO: 115804 - DNA, 1359 bp, synthetic construct
  misc_feature 1..1359: note = Description of Artificial Sequence: Synthetic coding sequence
  source 1..1359: mol_type = other DNA
atgcacgtgattagggggaaccgaccgattaagactgagatggcccaccagctgtatgtactgcaagtgcttaccttcaatttgttggaggaacgcatgatgaccaagatggacccaaatgaccaggcacagcgggatataatttttgagctccgcaggattgcgttcgacgccgagagcgaccctagcaacgcccccggaagcggaactgagaaacgaaaagccatgtacacgaaagactataaaatgctgggctttaccaatcacatcaatcccgccatggatttcacccagacgcctccaggcatgttggctttggataatatgttgtacctggccaaggtgcatcaggacacatatataaggatcgtgctagaaaattcgagccgagaggacaagcacgaatgtccctttggacgctccgccatcgaattaaccaagatgttatgtgaaatactacaggtcggagaactgccgaacgagggacgcaatgactaccatccaatgttctttacacacgaccgagcttttgaggagctctttgggatctgtatccaacttctaaacaagacctggaaagagatgagagctacagcggaagatttcaataaggtgatgcaggtggtgagggagcagataacgagggccctgcctagcaagccaaatagcttggatcagtttaaatcaaagttgcgctcactcagctattccgaaattcttcgccttcgacaaagcgagcgcatgtctcaggacgatttccaaagcccacccatagtggagcttagggagaagatacagcctgaaatacttgaactgataaagcagcagcggctgaacagactttgtgaggggagctcttttcgcaaaattggcaaccgccgaagacaggaacgcttttggtattgtagactggccctgaatcacaaagtactgcactatggcgaccttgatgataatccccagggcgaagtgacctttgagtccctgcaggagaagatacccgtggccgacatcaaggccatcgtgaccgggaaggactgtccacacatgaaagagaaatccgcactgaaacagaataaggaggtcctcgaactcgctttctcaatcctttacgatcccgatgagaccctgaacttcattgctcccaataagtacgagtattgtatctggatcgacggcctgtcagcactgctgggaaaggatatgtcctctgaattgaccaagagtgatttggacacactgctgtccatggagatgaaactgaggctccttgacttggagaacatccagattcctgaggcccccccccccatccccaaggaaccttcttcttatgactttgtttatcattacggttag

SEQ ID NO: 115805 - DNA, 2322 bp, synthetic construct
  misc_feature 1..2322: note = Description of Artificial Sequence: Synthetic coding sequence
  source 1..2322: mol_type = other DNA
atggcacggtcatctagcctcggacgggagtgcggcacaccaagatctggactgggcaagggagggccacccaggccacaaggaccacaggcaaggtgtacacttgggcgtcggtgtactgtgtctggcaagtgcaggcgacccagaccctcttggaccatggcgccccctagaaacgtggtcaagatcgctataaagatgagagacgcaattcctcagcttattcagctggaccaagccaagccgttagccgccgttttgaaggaggtgtgtgacgcatggagcctaactcactcagagcgatacgccttgcagttcgcagatggtcaccgccggtatataactgagaacaaccgcgccgagatcaaaaatggaagcatactgtgtctttcaacagctcccgatctggaggctgagcagcttttaggggggctgcagagcaactctcctgaaggcaggagggaggctttgcggcgcctcgttccccttgcttcagatatgatctttgctcgcgaggtgatatcacgtaacgggcttcagattctgggcaccattatcgaagacggcgacgatctaggagaagtcctcgccctgagcctccgcgctttcagcgaactcatggaacacggagtagtgtcatgggagacactcagtattccattcgtgaggaaggtcgtctgttacgtcaatatgaacttgatggatgctagcgtccctccgcttgccttagggctgctagagtcagtgacactgagttcccccgccctgggccaattagtgaagagtgaagtccctttggatcggttactcgttcatctgcaagtcatgaaccagcaactccagacgaaggccatggctcttctgacggcactccttcagggtgccagtccagttgaacggaagcacatgctcgattacctctggcaaagaaatctacggcagtttatatacaagaatattatccactcagccgcgcctatgggagacgagatggcccatcatctttatgtattgcaggctctgatgctcggcctgcttgaaccaagaatgcgaacgccgttggacccttactcccaggaacagagggagcagctgcaggttctgaggcaggccgccttcgaggtcgagggcgagagctcaggcgctggcctctcagccgatcgccgcaggtctctctgcgctcgcgagtttcgaaaactggggttttcaaatagtaaccccgctcaggatctggaacgagtacctcccggattgctggcactggataacatgctctatttcagtcggaacgccccttctgcctattcacggttcgtcttggagaattcaagccgagaggataagcacgagtgtccttttgcccggggtagtatccaactgaccgttcttctgtgtgagttattgagagttggtgaaccatgcagtgaaacggcccaggactttagcccaatgttttttggacaggatcagtcctttcatgaacttttctgcgtcggtattcagctgctgaacaagacgtggaaagagatgcgagctactcaggaagattttgataaagtgatgcaggtcgtgcgagaacagttggctcggactctggctcttaagccgacgtcactcgagctgtttcgtacgaaggtgaatgcattgacatatggcgaagtgctgagactccgacaaaccgagcgcttgcatcaagaagggacattggcccccccgatcctggagctgcgggaaaaattgaaacccgagctgatgggcctgatcaggcaacagcgcctgctgcgtctctgtgaaggcacgctcttcagaaagatcagctcacgccgacgccaggacaagttgtggttttgttgtctgtcgcccaaccacaaactgctccagtatggagacatggaagagggcgcatctccccccactctggagtcactgcccgagcagctccctgtggccgatatgagagccctgctaaccggaaaggactgccctcacgtcagagagaagggaagcggcaagcagaacaaggacttgtatgaactggcctttagtatttcctacgatagaggggaagaagaggcttatctgaattttattgcccccagtaagcgcgagttttacctttggaccgatggattgtcggccctactaggtagccccatgggttctgagcagacgaggcttgatctggagcagctgcttacaatggaaaccaagctcagattactcgagctggagaatgtccctattcccgagcgtccgcctccagtacccccacctcctactaattttaatttttgctacgactgcagtatcgccgagccttag

SEQ ID NO: 115806 - DNA, 2511 bp, synthetic construct
  misc_feature 1..2511: note = Description of Artificial Sequence: Synthetic coding sequence
  source 1..2511: mol_type = other DNA
atgagtaaactttctttccgagcgcgggcgctcgacgcctcaaaacccttaccggtctttcggtgtgaggatctgcccgacttgcatgaatatgcatccattaacagagctgtgcctcagatgcctaccggcatggagaaggaggaggagtctgaacaccatttgcaacgcgctatctctgcacaacaagtgtatggcgagaaacgggataacatggtgataccagtccctgaagccgagagcaacattgcttactacgagagcatctaccccggggagtttaagatgcctaagcagttgattcacatccagccattctccctggacgcagagcagcctgattatgaccttgattcagaagatgaggtgttcgtaaacaagcttaagaagaagatggatatctgcccactgcagttcgaggagatgatcgatcggctcgagaaaggctcaggacagcaacctgtctctctgcaggaggccaagcttctccttaaagaagacgacgagcttataagagaagtttacgagtattggattaaaaagaggaaaaattgtagaggaccaagccttataccctccgtgaagcaggaaaaacgagacggatcctctacaaacgatccctatgtcgctttcagaagaaggactgagaaaatgcagacacgtaagaataggaaaaatgatgaagcctcatacgagaaaatgcttaagctgaggagagatctgtctcgtgctgtgacaatcctggagatgatcaagagaagggagaagtccaaaagagaactgctccacttgacgttggaaatcatggagaagaggtataacctcggagactataacggggagatcatgagtgaagtcatggcccagcggcagcccatgaagcccacctatgccatccctattatccctatcaccaatagtagtcagtttaagcaccaggaggcgatggatgtcaaggagttcaaggtgaataagcaggacaaggctgatctgattcggcccaagcggaaatacgagaaaaaacccaaggtcctaccaagcagtgctgcagccactcctcaacagacttctcctgcagcgttgcctgtgttcaatgcgaaagatctaaaccagtacgatttcccctcctcagacgaagaacccctgagccaggtcctttccgggagctcggaggccgaggaagacaacgatcccgatggccccttcgcattcaggaggaaggcgggctgccaatactatgcccctcacctcgaccagacaggcaactggccctggacatcgcctaaggacgggggactgggggatgtgaggtatagatactgcttgaccacactgactgttccgcagagatgtataggctttgccagacgacgggtgggacgtgggggcagagtcctgcttgatagagcccattcagactacgactccgtctttcaccacctggaccttgaaatgctgtcaagtccccaacattcgcctgtcaaccagtttgcaaacacaagcgagaccaatacatctgacaaatccttctctaaagacctctcgcagatactagtcaacatcaaatcttgtaggtggcgccattttagaccccgaactcccagtctccacgattccgataatgatgagttatcgtgccgaaaactctatagatccatcaataggactgggaccgctcaacccggcactcaaacctgcagcacctccacccagtcaaaatcttctagcggctctgcacactttgctttcaccgcagagcagtaccagcagcaccagcagcagcttgccctgatgcagaagcagcagttggcccagattcagcagcagcaagccaacagcaactcatcaactaacacaagccaaaacttagcctctaaccagcagaagtctggattccggctgaacatccagggcctcgaaaggaccctacaggggtttgtctcaaagacactcgatagcgccagcgcgcagtttgctgcttccgcattggtgacgtcagagcaactgatgggtttcaagatgaaggatgacgtcgtgcttggcatcggcgtcaacggcgtactacctgcaagtggcgtgtacaaaggcctgcacctgtctagcactacacccacagccttggttcatacctctccctctaccgccgggagcgccctgctccaaccttctaatattacacagacaagctccagtcactccgccttaagccatcaggttaccgcagccaactctgccactactcaagttctcataggaaataatatacgcctaaccgttcccagctccgtggccaccgtgaacagtatagcacccatcaatgctaggcacatcccccggaccctgtcagccgttcctagttccgccctcaaactggctgccgcagcaaactgccaagtgtccaaggtcccgtccagctcatccgtggacagtgtccctcgtgagaatcacgaatccgaaaaacctgctttaaacaatatcgcggacaacaccgttgccatggaggttacatag

SEQ ID NO: 115807 - DNA, 2442 bp, synthetic construct
  misc_feature 1..2442: note = Description of Artificial Sequence: Synthetic coding sequence
  source 1..2442: mol_type = other DNA
atgtccaaactgtcttttagagcaagggccctcgacgcctccaaacccctgccggtgtttagatgtgaggaccttcccgacctgcatgagtacgcatctatcaatagagcagtcccacagatgcccaccggcatggagaaggaagaggagagtgagcatcatttgcaaagagcaatctcggcccagcaagtgtatggcgagaagagggataatatggttattcccgtgccggaggctgaaagtaacatagcctactatgaaagcatctatcctggagaatttaaaatgcccaaacagctcatacatattcaaccattctccctggatgccgaacaacccgactacgacctggacagcgaggatgaagttttcgttaacaaactgaagaaaaagatggatatttgtcctctccagtttgaagaaatgatcgaccgcctggagaaggggtctggccaacagcccgtgagccttcaagaggccaagctattgctgaaagaagatgacgagctcattagagaggtgtacgagtactggataaagaagcgaaagaattgtagggggccaagcctaataccgagcgtgaagcaggaaaagagagatggctcaagtactaatgatccttatgtcgctttccgtcgcaggactgagaagatgcagacacgcaagaatcggaaaaatgacgaggcttcatacgagaagatgttgaaattgaggcgtgacctttcacgtgctgttacaatcctggagatgatcaaaagacgtgagaagagcaagagggaactgctgcacctcacgttagagatcatggagaaacgctataacctcggagattataatggagaaattatgagcgaagtgatggcccaacgccagccaatgaagccgacatatgctatccctatcatccccatcacaaactcttctcagttcaagcaccaggaggccatggacgtgaaggaattcaaggtcaacaaacaggacaaggccgacctcattcgccccaaacgtaagtacgaaaaaaaacccaaggtgctccccagctcagcggccgccacaccccagcaaacttcgccagcggcactgcctgtattcaatgccaaagacctgaatcagtacgacttcccttcctccgacgaagaaccactgtcccaggtgctttctggaagcagcgaagctgaggaagataacgatccagatggacctttcgcattcagaaggaaagccggctgccaatactacgccccgcaccttgatcaaacggggaattggccctggacgtcaccgaaggacggaggactaggcgatgtgcggtacagatactgcttgaccacattaacggtgcctcagcgctgcatcgggttcgcaagacgccgtgtgggccgaggcggccgggtgctgcttgatcgggcccacagcgactatgactctgtgtttcaccacttggatctggaaatgctgtcttctccccagcattcaccagttaaccagttcgccaacacatcggaaactaacacatcagataagtcattcagcaaggatttaagccagatcctggtgaatatcaaaagttgccgatggcggcacttccgcccaagaaccccctctttacacgattcagataatgacgagctgagctgtagaaagctctatcggtctattaaccgcacaggtacagcccaaccaggcactcaaacctgcagcacttccactcagtccaaaagctcctccgggtcggctcattttgccttcactgccgagcagtaccagcagcaccagcagcagcttgccctcatgcagaagcagcagctagctcagattcagcagcagcaagctaactccaattccagcacaaacacctctcagggcttcgtcagtaagaccctcgacagtgccagtgcacagttcgcagccagtgcattagtgaccagcgagcagctgatggggtttaagatgaaggacgatgtcgtcctaggtatcggcgtcaatggcgtcctgcccgccagcggcgtgtacaaggggctccacctcagttcaactacacctactgcactggtgcacacttcgccctcaactgcagggagcgctctgctgcagccatcgaacattactcagacatctagttcccacagcgctctgagccatcaagtgacggccgccaatagtgcaactacgcaggtactgattgggaacaacatccgtctcaccgttccctcaagtgtggcaaccgtgaatagcattgcaccaattaacgctcgccacatccctagaaccctgtcggcggtgccaagtagcgccttaaagcttgctgctgccgctaactgtcaagtcagcaaagttccctcttcttcatcagtcgatagcgttcctagagaaaatcacgaaagcgaaaagccggctctgaacaacattgcagacaacactgtggccatggaggtgacttag

SEQ ID NO: 115808 - DNA, 2292 bp, synthetic construct
  misc_feature 1..2292: note = Description of Artificial Sequence: Synthetic coding sequence
  source 1..2292: mol_type = other DNA
atggagcatcatctacagcgcgctatcagcgcacaacaggtatatggagagaagagggataacatggttatccccgtcccagaagcagaaagcaatattgcttactacgagtctatatatcccggcgagttcaagatgcccaagcaactcattcatatccaacccttttcactggacgctgaacagccagactatgacctggacagcgaggatgaagtattcgttaacaagcttaaaaaaaaaatggacatctgtcctctgcagttcgaggagatgattgatagactggagaaaggctcaggccagcagccggtgagcctccaggaggctaaactcctgttaaaagaagatgacgaactgatacgagaagtttacgagtattggatcaagaagagaaagaactgccgcggccctagtctcatcccctccgtgaaacaagaaaagcgcgatggttcctcgactaatgatccgtacgtggcgtttaggcgcagaactgaaaagatgcagacccggaagaacagaaaaaacgacgaagcatcctatgagaagatgctgaagctgcgtcgcgatcttagcagggcagtcacgattttagaaatgattaaacgtcgggaaaagtctaagagagaactcctgcacctgaccctggagattatggaaaagcgctataatctaggtgactacaacggagaaatcatgtctgaggtcatggctcaaaggcagccaatgaaacccacttacgcaattcctattattcctattactaattcaagtcagttcaagcaccaggaagccatggatgtaaaggaattcaaggttaataagcaagataaagcggatttaatccgaccgaaacgaaaatacgaaaagaagccaaaggttctgccctcctccgcagccgctactcctcagcagaccagtccagctgcactgcccgtcttcaacgctaaagatctgaaccagtacgactttccatcttccgacgaggaacctcttagccaggtgctgagcggctccagtgaagccgaagaggataacgatcctgacgggccgtttgcttttaggcgaaaagccgggtgccagtactatgctcctcacctcgatcaaaccggaaactggccgtggacctcacccaaggatggcggcctgggtgacgttcggtatcgctactgcctcacaaccctcacagtaccccaacgctgtattgggtttgctaggcgtcgcgtcggacggggtggtcgtgttctactggacagagcccattctgattatgacagcgtgtttcatcacttagatctcgagatgctgtcttcccctcagcacagccctgtgaatcaatttgccaatacatcagagacgaatacaagtgacaaatccttctccaaagatctctcccagattcttgtgaacatcaagagctgccgctggagacactttagacctcgcacaccctcgctgcatgatagtgataacgatgagttgagctgccggaagctctacagatctattaataggactggcaccgcgcagccgggcactcagacatgttccaccagtacgcagagcaaatcttcaagcggatcagcccattttgcctttaccgccgagcaataccaacagcaccagcagcaacttgctttaatgcagaaacagcagcttgcccagatccagcagcaacaggctaacagtaattcatccacaaacacaagccagggttttgtcagcaagacgctcgattccgccagtgcccagttcgccgcatctgccctggtgacgagcgaacagctgatgggattcaaaatgaaggatgatgtggtgctcgggattggcgtgaacggagtgctccctgcgtcgggcgtgtacaagggactgcatttatctagcaccactcccacagcacttgtgcatacttctccctcaaccgcaggatccgccctgttacagccttccaatatcacacagacctcctcttcacactcagccctaagtcatcaggtgacagccgccaattcggctactacacaagtattgattgggaacaacatacggctgactgtcccctccagtgtcgccaccgtgaactccattgctcccattaatgcaaggcacattccaaggaccctgtctgcagtgccaagctccgcactgaaactggcagctgccgccaattgtcaagtttccaaagtcccgagcagcagcagtgtcgatagcgtgccacgagaaaaccacgagtcggaaaaaccggctttaaataacatcgcagataacaccgtggctatggaggttacctag

SEQ ID NO: 115809 - DNA, 2424 bp, synthetic construct
  misc_feature 1..2424: note = Description of Artificial Sequence: Synthetic coding sequence
  source 1..2424: mol_type = other DNA
atgagcaagctgtcctttagggctagggccctggacgctgcgaaacctttgcctatttaccgaggcaaggatatgcctgatctcaacgattgtgtctcaatcaaccgagctgtgccacagatgcccacaggcatggagaaggaggaagaatctgagcaccacctgcagcgggccatctccgcacagcaggtgttcagagaaaagaaagagagtatggtgatccccgtgcccgaagccgaaagtaacgtcaattactacaaccgtctttacaagggagagtttaagcagcctaagcaattcattcacattcaaccatttaacctagataacgaacagcccgattacgacatggactccgaggacgagaccttgctgaaccgcctgaaccgaaagatggagattaagccattgcagttcgaaatcatgatcgaccggttagaaaaggctagttccaatcagttggtgacgctgcaggaggcgaaactgcttctgaatgaggatgattatctcatcaaggcagtgtatgactactgggtgagaaaacgcaaaaattgcaggggcccatccctcatccctcagatcaagcaggaaaaaagagacgggtctacaaataatgacccttatgtggcgtttagaaggcggacagagaagatgcagaccagaaagaaccggaaaaacgacgaagcttcttacgagaagatgctgaaattacggcgggagttctcccgtgccattactattctggaaatgattaagcggcgcgagaagactaaaagggagctcctccacctgactttagaggtcgtggagaaaaggtaccatttgggggactacggcggggaaatcctaaacgaagtgaagatatcaagaagcgagaaggaattgtacgccactcccgctaccttgcacaatggcaaccatcacaaagttcaggagtgcaagacaaaacatccgcaccatttatctctcaaagaagaagcatctgatgtggttaggcagaagaaaaaatacccgaagaagcctaaggctgaagctctcatcacatctcagcagccgacccctgagacacttcctgttattaataaatcggacatcaagcaatacgattttcattctagcgacgaagatgaattcccacaggtcctgtcaccggtcagtgaacccgaggaggaaaacgatccggatgggccctgcgccttcagaaggcgggccggctgccaatattatgcaccaaggctagaccaagctaatcactcttgtgaaaactccgaactggcagacttggacaaacttcggtatagacattgtctgactacactgaccgttccgagacgttgtatcgggttcgcgcgacggcgtattggcagaggcggacgcgtaataatggataggatatctactgagcacgatccagtcctgaaacaaatagatcccgagatgctcaattcgttttccagtagttcgcaaacaattgacttttccagcaatttttccaggaccaacgcttcttccaagcactgcgaaaatcgactcagcttgagtgagattctttccaacatccggtcttgtcgacttcagtgttttcaaccgagactgctgaatttgcaggattctgattccgaggaatgcaccagcaggaagccgggccagacggtgaataataaacgcgtctcggccgcctccgttgccctcctgaacacatccaagaacggcatcagcgtaacagggggaataaccgaagagcaattccagactcaccaacagcagttagtacagatgcagaggcagcagctggcccaactacaacagaaacagcagtctcaacactccagtcagcagacccaccccaaagcccaggggagttccacatcagattgcatgagcaaaaccctcgactctgcctcagcacattttgcagcctcggccgtggtcagtgctcccgttccttcacggtctgaagtagccaaagagcagaataccggtcataataatattaatggtgttgtgcagcccagtggtacctcaaagactctgtatagtaccaatatggccttgtctagcagcccgggcatatctgccgtccaactcgtgcggaccgtcgggcacactacaacgaatcacctgattccagctctgtgtacctcctctccacaaaccctaccaatgaacaattcatgcctcacaaatgctgtccatctcaacaacgtaagcgtggtcagccctgtcaacgtccatattaatacaaggacatctgcaccctctcctaccgcactaaaactggccacagtggcggcgagcatggaccgcgtccccaaggtgacaccttctagcgccatcagcagcatcgctcgagagaatcacgaacccgagcgactggggttgaacggtattgccgaaactaccgtagcgatggaagtgacttag

SEQ ID NO: 115810 - DNA, 315 bp, synthetic construct
  misc_feature 1..315: note = Description of Artificial Sequence: Synthetic coding sequence
  source 1..315: mol_type = other DNA
atgtcccacaccatcttgctggtgcagcccacgaagcgtcccgagggtagaacatacgccgactatgagtctgtgaacgagtgcatggaaggcgtgtgcaagatgtacgaagagcatttaaagaggatgaacccgaacagcccctctattacttacgatatcagccaattattcgattttatcgacgacctggccgaccttagctgtttggtgtatcgcgctgatacacaaacctatcagccgtataataaggattggataaaagaaaagatctacgtgctgttgcggaggcaggctcagcaagccggtaagtag

SEQ ID NO: 115811 - DNA, 2253 bp, synthetic construct
  misc_feature 1..2253: note = Description of Artificial Sequence: Synthetic coding sequence
  source 1..2253: mol_type = other DNA
tatagcaagatggagataccaaacccgccaacaagcaaatgtatcacttattggaagagaaaggtaaagtcggaatatatgaggctgcgccaattgaaacgtttacaggcaaacatgggtgctaaagctctttacgtagcaaatttcgcaaaggtgcaggagaaaactcagatcctaaacgaggaatggaagaaattgcgtgttcagcccgttcagtctatgaagcccgtgagcggtcacccctttctgaagaagtgtaccatcgagtctatatttcccggatttgcatctcagcacatgttgatgcgctcgttaaacaccgtcgctcttgtccctatcatgtatagctggtctccactgcaacagaacttcatggtggaagacgagacagtgctatgtaatataccttacatgggggacgaagttaaggaagaggacgaaaccttcatagaagaactaatcaacaactatgatgggaaggtgcacggggaagaggagatgattcctggctccgtcctcatttcggacgctgtattcctcgagcttgtcgatgctttgaaccaatactctgacgaagaggaggagggacataatgatacaagcgacggtaaacaggacgactcaaaggaagatttgcctgtgacacgcaagagaaagaggcacgctattgaagggaacaagaaatctagtaaaaaacaattcccaaacgatatgatcttctcagccattgcctctatgttcccggagaacggggttcccgacgatatgaaagaaagatatagggagctcaccgagatgtccgaccctaacgcacttccgccccagtgcacccccaacattgatgggccaaatgcaaagtcagttcagcgcgagcaatccttgcactcttttcatacactgttttgcaggcgatgctttaagtacgattgctttctgcaccccttccacgctaccccaaacgtgtacaagagaaagaataaggagatcaaaattgagcccgaaccctgcggcaccgattgctttctgttactcgaaggggcaaaagagtacgctatgcttcataaccctagatctaaatgtagcggacggagacgccgaaggcaccacatcgtgtccgcgtcctgttccaatgccagtgcaagcgcagttgccgagaccaaggaaggcgattccgatcgtgacacaggaaatgattgggccagcagtagcagtgaagccaacagccgctgccagacccctacaaaacagaaagcatcacccgcacccccccagctgtgtgtcgtggaggccccttcagaacccgtagaatggacaggggctgaagaaagcctgtttagggtgtttcatggaacttatttcaacaatttctgttccatcgctcggctgcttgggacaaaaacctgtaaacaggtcttccagttcgccgtaaaggaaagcttaattttgaaattgccgacagacgaattgatgaacccaagccagaaaaaaaagcgcaagcaccgcctgtgggcggctcattgtcgcaagattcaactgaaaaaggataactcctccacacaggtgtataactaccaaccatgtgaccaccccgatagaccatgtgacagtacatgtccctgtattatgactcaaaatttctgtgagaagttctgccaatgcaatcctgactgccagaaccgcttccccgggtgtaggtgcaagacccagtgcaacacaaagcagtgcccttgctacttagctgttcgcgagtgcgacccagacctatgtctaacttgtggtgcctctgagcattgggactgtaaggtggtctcctgcaaaaattgtagtatccagaggggcctgaaaaaacatttgctgcttgccccctccgacgtggccggttgggggacattcataaaagagtcagtccagaaaaacgaattcatctccgaatattgcggcgaattaatcagtcaggatgaggcggaccgccgaggaaaggtgtacgacaaatatatgagttccttcctctttaacttgaacaacgattttgtcgtcgacgctactcggaaaggtaataaaatacggtttgcaaaccactctgtcaatcctaattgctacgcgaaagtcgtgatggtaaacggcgatcataggattgggatcttcgcaaaacgcgctattcaggcgggggaggagctgttctttgactatcgctacagccaggccgatgccctcaagtatgtgggcatcgaacgagaaacagacgtcctctag

SEQ ID NO: 115812 - DNA, 2124 bp, synthetic construct
  misc_feature 1..2124: note = Description of Artificial Sequence: Synthetic coding sequence
  source 1..2124: mol_type = other DNA
atggagatccccaaccctccaaccagtaaatgtattacttattggaagagaaaggtgaagagtgagtacatgaggctccgccagttaaagagactgcaggcgaacatgggcgccaaagcactgtatgttgcaaactttgctaaggtacaggagaagacccagattctgaatgaagagtggaaaaaacttagggtgcagcccgtacaatcaatgaaaccggttagcggtcatccttttctgaagaaggttgaagacgagacagtgttatgcaacattccttatatgggcgatgaggtgaaggaggaagacgagacttttatcgaagaattgatcaataattacgacgggaaagtgcacggtgaggaagagatgatccccggcagcgttctgatcagcgacgccgtgtttctagagcttgttgacgccctgaatcagtatagcgatgaagaggaggaagggcacaatgacaccagcgacgggaaacaggacgacagtaaggaagacctgccggtcacacgtaagaggaaacgccacgcaattgagggcaataaaaaaagctcaaaaaaacagttcccaaatgacatgattttttcagctatagctagcatgttcccagagaatggcgtcccggacgatatgaaggagagataccgcgaattgacggagatgagcgacccaaatgcgcttcccccacaatgtaccccaaacatcgatggaccaaacgcaaaaagcgttcaacgagagcagagcctgcattcattccacacactcttttgtagaagatgctttaagtatgattgctttctgcacccattccacgcgacccctaacgtctataagcgaaaaaataaggaaattaaaatagagcccgaaccatgcgggacagactgcttcctgttgctcgagggggcgaaagaatacgctatgcttcacaacccacggtcaaagtgtagtggtaggcgaaggcgtaggcaccatattgtgtctgccagttgcagcaacgcctccgcctcagccgtggcggagactaaggaaggggattctgaccgcgacaccgggaacgattgggcatcctctagctccgaagctaattctagatgccaaactcccaccaaacaaaaggcaagtcccgcgccaccccagctgtgcgtggtggaggcgccatccgagccagtcgaatggacaggcgccgaggaatccttattcagggtctttcacggcacgtacttcaacaatttttgctccatcgctcgcctcttaggtacaaagacatgtaaacaggtcttccagttcgcagtcaaagagtcactcatactcaaactccccaccgatgaactgatgaacccttcacagaaaaagaagcgcaaacatcgtctatgggcagcccactgccgcaaaatacaattaaaaaaagataattcatcgacccaggtatacaattaccagccttgcgatcaccccgaccggccttgcgattcaacttgcccctgtatcatgacccagaatttctgcgagaagttttgtcaatgcaaccctgactgtcagaaccgatttccggggtgcagatgcaagactcagtgcaacacaaagcagtgtccatgttacctggccgtacgtgaatgcgatcccgacctgtgtttgacttgcggagcttccgagcactgggactgtaaggttgtaagttgcaagaattgctctatccaaagaggactgaagaaacatctcctgttggcacctagcgatgtggctggctggggtacttttatcaaagaaagtgtgcagaaaaacgagttcatctccgagtactgcggggaactaatcagccaagatgaagccgaccgcagaggcaaggtgtacgacaaatatatgtctagctttcttttcaacttgaacaatgatttcgtggtagatgcgaccagaaagggtaacaagatcaggttcgccaatcacagcgtgaatccaaattgctacgccaaagtggttatggtgaacggtgaccatcgcattggaatattcgcaaagagagccattcaagcgggtgaggagctcttctttgactatcgctacagccaagccgacgccctgaagtacgtgggcatagagcgcgaaaccgacgtgctttag

SEQ ID NO: 115813 - DNA, 2244 bp, synthetic construct
  misc_feature 1..2244: note = Description of Artificial Sequence: Synthetic coding sequence
  source 1..2244: mol_type = other DNA
atggagatacctaatcctcccacaagtaaatgcatcacatattggaagaggaaggtgaagtctgagtacatgcgcctgagacagctgaaacgtctccaggcgaacatgggcgctaaagctctgtatgtcgccaacttcgcaaaagtacaggagaaaactcaaatactgaacgaagagtggaaaaaactgagagttcagccagtacagagtatgaagccagtttcaggacatcctttcctgaagaaatgtaccatcgagtctattttccctggctttgcttcacagcatatgttaatgcgatcccttaacaccgtcgctctagttccaatcatgtactcctggagccccctccaacagaacttcatggtcgaggatgaaacagttctctgcaacataccttatatgggagatgaggtcaaggaggaagacgaaacctttatcgaagagctgataaataactatgacggaaaggtccatggcgaggaagagatgatccctggatcagtgctgatttctgacgccgtgtttctggagcttgtagatgcccttaaccaatactcagacgaagaagaggagggacacaatgatactagtgacggaaagcaggatgactccaaagaagacctgccagtgacccgaaagagaaagaggcacgctattgaggggaacaagaagtccagcaagaagcagtttcccaatgatatgatattttctgccatagcatccatgttccctgagaatggggtccctgacgatatgaaagaacgctacagagaactgacagagatgagcgaccctaacgccctgccacctcagtgtaccccaaatatagacggaccgaacgcgaaaagcgtgcagagggaacaatccctgcactcctttcatacccttttctgccgtcgctgctttaagtacgactgcttcctgcatccgttccatgctacacctaacgtatacaagcgaaagaataaggagatcaagatcgagcctgaaccctgtggcaccgactgttttctgctgctggaaggcgcaaaggagtacgctatgctccataatccgaggagtaagtgtagtggaagacgcaggagacggcaccacattgtgagcgcctcctgttcaaacgcctcagcctccgcagttgctgagacgaaggagggggattcggatcgggacacagggaacgactgggcatctagctcatccgaggctaattcgaggtgccagactcctactaagcaaaaagcgagtcccgctccaccccagctgtgcgttgtggaggccccatcggagcctgttgaatggaccggcgccgaagaaagcctgttcagggtattccatggcacctacttcaataacttttgctctattgcacggctgttggggacaaagacatgcaaacaggtcttccagtttgctgtgaaggaatcccttatcctgaaactgcccacagacgaattgatgaacccctctcagaaaaagaaacgaaaacatcggctgtgggcagcccattgtagaaagattcagctcaaaaaggataacagctccacacaggtttacaattaccagccatgcgaccacccagatcggccttgcgattctacctgtccttgcatcatgacccagaatttctgtgagaaattttgccagtgtaaccccgattgccagaaccgatttccaggatgtagatgtaaaacacaatgtaacactaaacagtgtccttgctatttggccgtccgagaatgcgatccggatctctgccttacatgtggcgctagtgaacactgggactgtaaggtggtgagttgtaagaattgctcaatccagaggggtctgaagaaacacttactcctcgcccccagcgatgtcgccggatggggaacatttataaaagaatcggtccagaaaaatgagttcatctcagaatattgcggcgagctgatctcacaggacgaggccgaccgccggggcaaggtgtatgacaaatacatgtcaagttttctttttaacctgaataacgatttcgtggttgatgcaacacggaaaggcaacaagattcggtttgctaatcactcagtcaaccctaactgttatgccaaggtggtgatggtgaatggtgaccaccggatcgggattttcgcaaaacgggcgatccaagcaggggaggagttatttttcgactaccggtattcccaagcggacgccctgaaatacgtcggaatcgagcgcgaaacagatgtgctgtag

SEQ ID NO: 115814 - DNA, 1827 bp, synthetic construct
  misc_feature 1..1827: note = Description of Artificial Sequence: Synthetic coding sequence
  source 1..1827: mol_type = other DNA
atggaggaagcaagctgccctacatgtagcgtaaacgaggcttgcgagtggacgccttttagccagaaggagatgatcccgggatccgtcctaatttccgatgccgtgttcttagagctggtggacgctcttaatcaatactctgacgaagaggaagagggccacaacgatacctccgatggaaaacaagacgactccaaggaggacttgcctgtgaccagaaaaaggaagaggcacgccatcgaaggcaacaagaagtcctcgaagaagcaatttccaaacgacatgatcttctccgctattgcttccatgtttccagagaatggggttcccgatgatatgaaggaaaggtaccgcgaactgaccgaaatgtcagatcccaacgcgctgcctccccaatgtacacctaatatagatggacctaatgcaaaatcagtccagcgggagcagagcctgcattcctttcatacacttttctgccggcgctgctttaagtacgactgtttccttcacccttttcatgcgacccctaatgtttacaaaaggaaaaacaaagagatcaaaatcgaaccggaaccgtgtggaaccgactgttttctgcttttggaaggtgccaaagaatacgctatgctgcacaaccctaggtccaagtgctccgggcgtcgacgccgacgtcatcacatcgtgtccgcttcctgttccaacgctagtgcatccgccgtagcagaaacaaaagagggcgactctgatcgagataccggtaatgattgggcatcctcctcatctgaggcaaactcccgatgtcaaacccctaccaagcaaaaggctagcccggctccgccccaactgtgtgtcgtagaggcaccatccgagccggtggaatggaccggtgcagaggaatctctttttcgggtgtttcacggcacatattttaacaacttctgttcgatcgctcgtctgctggggactaaaacttgtaagcaagtgtttcagttcgctgtcaaggagtctctcatcctcaaactgcctacagatgaactgatgaatccaagccaaaagaagaaacgaaaacaccgactgtgggccgcacactgcaggaaaattcagctgaagaaggacaattcatcaacccaggtgtataattatcaaccctgtgaccacccggatcggccttgtgatagcacttgcccatgcattatgacccaaaatttctgtgaaaaattctgtcagtgcaatcctgactgccagaacagatttccaggatgcagatgtaagacacaatgtaatactaagcagtgcccatgttatctggccgtgagagaatgtgaccccgacctgtgcctcacttgcggggcaagcgagcattgggattgcaaagtggtgagctgcaaaaattgtagtatccagcggggactcaaaaaacacctgctgctggcgccaagtgacgtggccggttggggtacatttattaaggagtccgtgcagaagaatgagttcatctccgaatattgcggcgaacttatcagccaggatgaagcggacagaagaggcaaagtgtatgataagtatatgtcatcctttctgttcaacctgaacaacgattttgtcgtggacgctactagaaagggcaataagatcaggttcgccaatcattccgtgaaccccaattgttacgcaaaggtcgttatggtcaatggcgaccatcggattggcattttcgccaaacgggccatacaagcgggcgaggaactgttctttgattacaggtacagccaggctgacgcactgaagtacgtgggtatcgagagggagacagatgtgctttag

SEQ ID NO: 115815 - DNA, 2256 bp, synthetic construct
  misc_feature 1..2256: note = Description of Artificial Sequence: Synthetic coding sequence
  source 1..2256: mol_type = other DNA
atgggacaaaccggtaagaagagcgagaaaggccctgtgtgctggcggaagcgtgtgaagtcagaatacatgaggcttagacagctcaagcgattcaggcgtgccgacgaagtgaagtcaatgttctcctcaaaccgacagaagatcctggagaggacagaaatcctgaatcaggagtggaagcagcgtcgaatccagcctgtgcatatcctgaccagcgtcagttcactgcgtggcacaagagagtgttcagttacctctgatcttgatttccccacacaggtgatcccactcaagaccttaaacgccgtcgcgagcgtgccaatcatgtactcctggtctcccctgcagcagaatttcatggttgaagacgaaacagtgctgcataacatcccttacatgggggacgaggtgctggaccaggatggaacctttattgaggagttaatcaagaactatgacggaaaagtccatggggacagagaatgtggatttattaatgacgaaatcttcgtggagctcgttaacgcactgggccagtataacgatgacgatgatgatgacgacggagacgatcccgaggagagagaggaaaagcagaaggatctagaggatcacagggatgacaaagagagtcgtccccctcgaaagttccccagtgacaagattttcgaggcaatctcatctatgttccctgacaagggtacagccgaagaactcaaagaaaaatataaagaattaactgaacagcagctgcctggtgcccttcctcccgaatgtaccccgaatattgacgggccgaatgcgaaatcagtacaacgtgaacagagcctgcactcctttcacaccttgttctgtagaagatgcttcaagtacgactgctttctacaccggaaatgcaattatagcttccacgccacgccgaatacctacaaacgcaaaaacaccgagaccgctctggacaacaagccatgcggcccacagtgttaccagcatctggagggcgccaaagaatttgctgccgccctgacagcggagagaatcaaaactccccccaagaggcctggcggaagacggagaggaaggctgcccaataacagctctcgaccaagcactcctaccattaatgtgctggaatccaaggacacagacagcgacagagaagccgggaccgaaaccgggggggagaataatgacaaggaggaggaagagaagaaggatgagacttccagcagttcggaggcaaattcaagatgtcagacaccaataaagatgaaacctaacattgaaccacccgagaacgtggagtggagcggcgccgaagccagcatgtttagggtgctgatcggtacatattatgataatttttgtgcgatcgccaggctgattggtacaaagacctgcagacaggtgtatgaatttagggtaaaggagtcaagcattatcgctccagcacccgcagaggatgtcgataccccaccaaggaagaagaaaagaaagcatcggctctgggctgcacattgtcggaaaattcagctgaagaaagatggaagctccaaccacgtctacaattaccaaccctgcgaccacccccgccagccttgtgactcttcttgtccatgcgtgatcgcgcagaatttctgcgaaaagttttgtcagtgttcatctgaatgccagaatcgctttcctgggtgcaggtgcaaagcacaatgtaataccaaacaatgcccttgttatctagcagtgcgcgaatgtgaccccgacttgtgtcttacatgcggcgctgccgaccattgggacagcaaaaatgtttcttgtaagaactgctctatccagagagggtctaagaaacatctgctcctggccccaagtgacgtggcaggatggggaatttttatcaaagacccagtccaaaaaaacgagttcatcagcgaatactgtggggaaattatctcccaggatgaggccgaccgccgaggcaaggtttacgacaagtatatgtgcagctttctttttaatttgaataatgacttcgtcgtcgacgctacgcggaagggcaataaaattagattcgccaaccacagcgtcaatcctaactgctatgcgaaggtaatgatggtaaacggcgaccatagaattggaatatttgcgaagagagcgattcaaacgggcgaggagttgtttttcgactacagatacagccaggcggacgccctcaagtatgtcggcatcgagcgtgagatggaaatcccttag

SEQ ID NO: 115816 - DNA, 2124 bp, synthetic construct
  misc_feature 1..2124: note = Description of Artificial Sequence: Synthetic coding sequence
  source 1..2124: mol_type = other DNA
atgggccagactggcaaaaaatctgagaaggggcctgtgtgttggaggaaacgtgtgaagagcgagtatatgcgcctgagacagctgaagaggtttagacgagcagacgaagtaaagtccatgttttcttccaatcgacagaaaatcttagaacgtactgaaatattaaatcaggaatggaaacagaggaggattcagcctgtccacatccttactagtgtgagctctctgaggggcactagggaggttgaagacgaaacagtcctacataatattccctatatgggcgacgaggtactcgaccaagacggcacgttcatcgaggaactaatcaaaaattatgacggcaaagttcatggcgatcgggagtgcggcttcatcaacgatgaaatctttgtagaacttgttaacgctctgggtcaatataacgacgatgacgacgacgacgacggcgacgacccagaggagcgcgaagagaagcaaaaggatctcgaagatcatcgggacgataaggaaagcagacctccgagaaagtttcccagtgacaaaatttttgaagccattagcagcatgtttccggataaggggacagccgaggagctgaaggagaagtataaggaactgactgagcagcagcttcccggagccctcccccctgaatgcacccctaacatagatggcccgaatgccaaaagcgtccagcgcgaacaatcccttcactcctttcatactttgttctgtcggagatgcttcaaatatgactgctttcttcaccccttccatgccactcccaatacttacaagaggaagaatacagaaactgccctagacaacaaaccctgtgggccacaatgttatcagcatttagagggggccaaggagttcgctgcagctctgacagccgagaggataaaaactccccctaagaggcctggcggccgccgcagaggacgcctgcctaacaactctagccgacctagtactccaacaatcaatgttctggaatctaaggacaccgacagtgacagggaggcaggtactgagacaggtggtgaaaacaacgacaaagaggaggaggaaaaaaaggatgagacatccagcagctctgaagctaattctcggtgccagacccctataaaaatgaaacccaacatcgagccgccagagaatgtggagtggtctggggctgaggcctcaatgttccgtgtgttgatcggcacgtactatgacaatttctgtgctatagctaggcttatagggaccaagacgtgtcgccaggtgtacgagttccgggtaaaggagagcagcattatcgcacccgcccccgccgaggacgtggacacaccaccccgtaagaaaaagcggaagcatcgcctgtgggcggctcactgcagaaagatacagttgaaaaaggacgggtctagcaaccatgtgtataattaccagccctgtgatcatcccaggcagccctgcgattcttcctgcccgtgtgtgatcgcgcagaacttctgcgaaaaattctgtcagtgcagctccgagtgtcagaatagattcccagggtgtcgatgcaaggcccagtgtaatactaagcaatgcccatgttacctggctgtgagggaatgcgacccagatctttgtctgacatgtggtgcggccgatcattgggacagcaagaatgtttcatgtaaaaactgtagtatccaacgggggagcaagaagcaccttcttttagctcccagcgacgtggctggttggggaatttttatcaaggacccagtccagaaaaatgagtttatttcagaatactgtggcgagatcatcagccaggacgaagctgacagaaggggcaaggtgtacgacaaatatatgtgtagcttcttgttcaacttgaacaacgatttcgtggtagacgctacaaggaaggggaacaaaatccggtttgccaaccattccgtcaaccccaattgctacgccaaggttatgatggtgaatggggatcatcggatcggcatttttgccaaacgggctatacagactggcgaggagctcttctttgactaccgctactcccaggctgacgccctgaagtatgtaggcatagagagggagatggagattccctag

SEQ ID NO: 115817 - DNA, 2241 bp, synthetic construct
  misc_feature 1..2241: note = Description of Artificial Sequence: Synthetic coding sequence
  source 1..2241: mol_type = other DNA
atgggtcagaccggcaaaaaatccgagaagggtcctgtttgttggagaaagcgggtgaagtccgagtacatgaggctcagacagctcaagcgtttcaggcgcgccgacgaggtgaagtcaatgttttcgagcaataggcagaagattctcgagaggactgagatcctgaaccaggaatggaagcaaagaagaatccaacccgtccacattctgacatcggtttcaagcctaagaggaacccgggaatgttctgttacgagtgatctggatttccccactcaggtgatccccctcaaaacccttaacgccgtggcctcagtgcctataatgtattcatggtcacctctacagcagaatttcatggttgaggacgaaacggttctgcacaacatcccttacatgggagacgaagttttggaccaggatgggactttcattgaggaactgattaaaaattatgatgggaaagtgcatggtgatcgggagtgcgggttcatcaatgacgagattttcgttgaactggtgaatgccctgggtcagtacaatgacgatgacgatgacgacgacggcgacgatccagaagaacgggaggaaaaacagaaggatctggaggaccaccgagacgacaaggagtctagacctccacgcaaattcccatctgataaaattttcgaggcaatttctagcatgttcccggataagggcacagcagaagagctgaaggaaaagtacaaggaactgactgagcagcagttgcccggggcgctgccccccgaatgtacgccaaatatcgacggaccaaatgccaaatctgtgcaacgggagcaatctctgcactcattccacaccctgttttgtcgacgctgctttaagtacgactgctttctgcaccctttccacgccactcctaatacatacaagcgcaaaaataccgagaccgcactggacaacaaaccctgcggaccccagtgttaccagcacctcgagggagcaaaagaatttgcagctgccctaacagccgagcgaataaagacacctcctaaaagacccggcggtcgcagaaggggacgcctccctaacaactctagccgcccttcaactcccacaataaacgtgctggaatccaaggatactgattcagatcgcgaagccggaactgagaccggcggggagaacaatgataaggaggaggaggaaaaaaaagacgagaccagcagtagttccgaagctaactcaagatgtcagacccccatcaaaatgaaacccaacatcgagccgcccgagaatgtagagtggagtggtgccgaggcttccatgtttagggtgctgattggcacgtactacgacaatttttgcgccattgccagacttattgggaccaaaacgtgtcggcaggtgtatgaattccgggtgaaggagtctagcatcatcgctcccgcgccggcagaggatgttgacacccccccgaggaagaaaaagcggaagcaccggctgtgggccgcgcattgtaggaagatccaactcaagaaagatgggagttctaatcacgtgtataactaccagccgtgcgatcatccccgccagccttgcgatagttcttgtccatgtgtgattgcacaaaacttttgtgaaaagttttgccagtgcagctctgagtgtcagaatagatttcctggatgtcgatgcaaggctcagtgcaacacaaaacagtgcccatgttacctcgccgtcagagaatgcgatccagatctttgtctgacctgcggagcggccgaccattgggattcgaagaatgtatcatgtaagaactgctcaatccaaagaggaagtaaaaagcacctgcttttggccccaagtgatgtggccggatgggggatctttattaaggacccagtgcagaagaacgagttcatcagtgagtattgtggggaaataatatcacaggacgaggcagatcgacgcggaaaggtctacgacaaatacatgtgttcctttcttttcaatcttaacaacgacttcgtggtggacgctaccaggaaaggtaataaaatcagatttgcgaaccatagcgtcaatccgaactgttacgctaaagtaatgatggtcaatggtgaccacaggattggtatatttgcgaaacgagccattcagactggagaagagttgttcttcgattatcgctatagtcaggccgatgctcttaagtatgtggggatagagcgagagatggaaatcccatag

SEQ ID NO: 115818 - DNA, 678 bp, synthetic construct
  misc_feature 1..678: note = Description of Artificial Sequence: Synthetic coding sequence
  source 1..678: mol_type = other DNA
atgtatagttggtcacctttgcaacaaaacttcatggtagaagatgaaaccgtgctccataatatcccttatatgggcgatgaggtcttggaccaggatggcacattcatcgaagagttgattaaaaactatgatggcaaagtgcacggtgaccgcgaatgtggcttcatcaacgacgaaatatttgtggagctggtcaacgccctgggtcagtataacgatgatgatgatgacgatgatggggatgacccagaagaacgggaggagaaacagaaagatctcgaggaccatcgcgacgataaagaaagccggccgcccagaaagtttcctagcgataaaatattcgaagccatttcctccatgtttcctgataagggcaccgccgaggagctcaaggagaagtacaaagaattgaccgagcagcaactccccggggctctcccacctgagtgcactcctaacattgatggaccaaacgctaaatccgtccagcgggaacagtctctgcactcttttcacaccctcttttgccgcaggtgctttaagtatgattgttttttgcaccccttccatgctacaccgaacacatataagcggaaaaacacggaaaccgcacttgacaataagccctgcggacctcagtgctaccagcatttgccccttctgccccggaactag

SEQ ID NO: 115819 - DNA, 2088 bp, synthetic construct
  misc_feature 1..2088: note = Description of Artificial Sequence: Synthetic coding sequence
  source 1..2088: mol_type = other DNA
atgggccaaacaggcaaaaagtccgagaaggggccagtgtgttggaggaaacgagtgaaatctgagtacatgcgcttaagacagctgaagaggtttcgtcgggcagacgaagtaaaaagcatgttttccagcaataggcaaaagatcttggagcgcacggagatcctcaaccaggagtggaaacaacgacggatccagcccgtgcacatcctgaccagctgctctgtaactagtgacctggatttcccaacccaagtgattcctttaaagacacttaacgccgtggccagtgtgcctatcatgtactcctggagcccactccaacagaacttcatggtggaggatgagacagttctacataacataccatacatgggggacgaggtcctggaccaggacggtaccttcattgaggagctgatcaagaactacgatggtaaggtccacggggaccgggagtgtggtttcattaacgacgaaatattcgtggagttggtgaatgcgctggggcagtataacgacgacgatgacgacgacgatggagatgatcctgaagaacgtgaagaaaaacagaaagacttggaggaccacagagacgacaaggagagccgcccacccaggaagttcccttccgacaaaatctttgaagccatatcctcaatgtttcccgacaaggggactgcagaggagctgaaggaaaaatacaaggagttgaccgagcagcagctgcctggcgcactgccacccgaatgcacacctaacattgacgggcctaatgcaaaaagcgttcagcgcgagcagtcccttcacagctttcacacgctcttctgtcgtcggtgttttaagtatgactgcttcctgcacccattccatgcaacaccaaacacgtataaaaggaagaacactgagacagctctggataataagccatgtggacctcagtgttatcagcatttagagggggcgaaagaattcgctgcagccctgaccgctgagcgaatcaagactccccctaagcggcccggtggtagacggcgtgggcgtctgccgaataatagctcccgtccatccactcctacaatcaacgttctagaatcaaaggacacggactcagaccgggaggccggcaccgagactggaggcgaaaacaatgacaaagaggaagaggaaaaaaaagatgagacctccagtagcagtgaagcaaactcacgatgccagacccccattaagatgaaaccgaacattgaacccccggagaatgtggagtggagcggggcagaggcgagcatgtttcgggtgcttatcgggacttactacgacaacttctgcgctattgcgcggctgattggcacaaagacatgccggcaggtgtacgagttcagggttaaggagtcaagtattattgcgcctgccccagcagaagatgtggacactccccccagaaagaaaaagagaaagcataggctgtgggccgcccattgtaggaagattcagttaaagaagggacagaaccggttcccagggtgtcggtgtaaggcccaatgcaataccaagcaatgcccttgttatctggccgtgcgcgaatgcgatccagatctgtgcctgacctgtggagcagccgatcattgggactctaagaacgtcagctgcaagaactgtagcatacagcgaggtagtaagaagcacctgctactggctccgtcggacgtcgcaggttgggggattttcatcaaagatcctgtgcaaaagaatgaatttataagcgaatattgcggtgagatcatctcacaggacgaggccgaccggcgggggaaggtgtacgacaagtacatgtgctcgttccttttcaacttgaacaatgacttcgtcgttgatgctactaggaaaggaaacaaaattagatttgccaatcactcggtgaatcccaactgctacgccaaggtgatgatggtgaacggagatcatcgtatcggcatctttgcaaaaagggccattcagaccggtgaagagcttttcttcgactacaggtatagccaggccgatgcgctcaagtacgtgggtattgaaagggagatggagatcccctag

SEQ ID NO: 115820 - DNA, 2088 bp, synthetic construct
  misc_feature 1..2088: note = Description of Artificial Sequence: Synthetic coding sequence
  source 1..2088: mol_type = other DNA
atgggtcaaacaggcaagaagtccgagaaaggccccgtgtgctggaggaaaagggtgaagtcggagtatatgagactgagacagttaaaacggtttcgcagggccgatgaggtaaagagcatgttcagtagcaacagacagaagattctcgaaaggaccgaaatacttaatcaggagtggaagcagaggagaatccagccagtacacattttgacaagctgttcagtgacgtctgaccttgattttccaactcaggtcattcccctgaaaaccctgaatgctgtggcttccgtaccaatcatgtacagctggtcccctctacagcagaattttatggtggaggacgagaccgtcttgcacaacataccatatatgggggacgaagtgcttgatcaggatgggaccttcattgaggagctgatcaagaattatgatggaaaagtgcacggtgaccgggagtgcgggttcattaatgacgagattttcgttgagttggtgaatgccctgggacagtataatgacgatgacgatgacgacgacggggatgaccctgaggagcgggaagaaaaacagaaggacctagaagaccatagggacgacaaggagtccaggcctccacgtaagttcccttccgataagatctttgaggctatctctagtatgttcccagataagggaactgccgaggaactcaaggaaaagtacaaggagctgacagagcagcagctcccgggagcgcttccacctgagtgtaccccaaacattgatggccctaacgcaaaatccgttcagagagaacagtcactgcattcattccacaccctcttctgtagaagatgctttaaatatgattgcttccttcatccctttcacgccacacctaatacctataaacgaaaaaacaccgagacggcactggataacaagccgtgtgggcctcagtgttaccagcacctcgagggggctaaagaattcgcagccgcactaactgctgaacggatcaaaactccccctaagcgccctggcgggcggcggagaggacgattgcccaataacagctcccgccctagtaccccaaccattaatgtgctagagagtaaagacactgattcggaccgagaggcaggcacagagaccgggggcgaaaataacgataaggaggaggaagagaagaaggacgagactagctcctccagcgaagcgaattcacgatgccagacacctatcaagatgaagcccaacatcgagccccctgagaacgtggagtggagcggcgcggaagccagcatgttccgtgtcttgatcgggacctattacgataatttttgtgccatcgctcgtctcattggcaccaaaacttgtcgccaggtgtacgagttcagagttaaggaaagtagtataatcgcccctgctcctgctgaggacgtggacacacccccgcgaaaaaagaagaggaagcacagattgtgggcggcacactgcaggaagatccaattaaagaaggggcagaacagattccctgggtgcagatgtaaagcccagtgcaacacaaagcaatgcccctgttatctagctgtcagagagtgtgatcccgacctgtgccttacctgcggcgccgccgaccactgggattcaaagaacgttagttgcaaaaactgttccattcagcgagggtccaagaaacatctcttgttggctccatctgacgtggccgggtggggaatatttataaaagaccccgtccaaaagaacgagttcattagcgaatattgtggagaaatcatttctcaggacgaggccgacaggagggggaaggtatatgataaatatatgtgttccttcttattcaatttgaataacgatttcgtcgttgacgccacacggaagggtaacaagatacgatttgcaaatcactcggtgaatcctaactgctacgctaaggtaatgatggtgaacggcgaccaccgaattggtatcttcgcaaaaagagcgatccagaccggtgaggaactgttttttgactatcggtacagtcaggccgacgccctcaagtatgtcggcatcgaaagagagatggagatcccttag

SEQ ID NO: 115821 - DNA, 2214 bp, synthetic construct
  misc_feature 1..2214: note = Description of Artificial Sequence: Synthetic coding sequence
  source 1..2214: mol_type = other DNA
atggggcagaccggaaagaagagcgaaaagggcccggtgtgttggagaaagagagtcaaatcagagtacatgaggctacggcaattgaagcggttccgaagagcagacgaggttaagagcatgttttcctcgaatcgacagaagatcctcgagcggacagagatcttgaatcaagaatggaagcagagaaggattcagcctgttcatatcttgacgtcatgtagtgttacgagtgatctggacttccccactcaagtcattccattgaagacacttaatgcagtggccagcgtcccgataatgtacagttggtcacccttgcagcagaactttatggtggaggacgagacagtactgcacaatatcccctatatgggcgacgaagtgttagatcaggacggcacattcattgaggaattgatcaagaattacgacggaaaagtgcatggggatcgcgagtgcgggttcataaacgacgaaattttcgtggaactagtaaatgctctcggacaatataatgacgatgacgatgacgacgatggagatgacccagaagaaagagaagagaagcaaaaagacctcgaggaccatagggacgacaaggagtctcgccctcccagaaaatttccgtctgataaaatattcgaggcaatctcctcaatgtttcccgacaaaggtactgctgaggaactaaaggagaaatataaagagctgaccgaacagcagctccctggggcactcccacccgaatgtaccccgaacattgatggcccaaacgcgaagtcagtccagcgagaacagagccttcattcattccacaccctcttctgtaggagatgttttaaatacgattgtttcttgcacccctttcatgccacacctaacacatacaagcgtaaaaacactgagacagccctggataataaaccttgtggaccacaatgttaccaacatttagagggagccaaggaattcgctgcggcgctgacagcggaacgcatcaagactcctcctaagcgtcccggagggaggcggagaggtcgcctcccaaacaattcctctcgtccttccacccccactataaacgtgttagagtccaaggacacagatagcgacagggaagcaggaacagagacaggaggggagaacaacgataaggaggaggaagagaaaaaggatgaaaccagctcctcgagcgaggccaattcaaggtgccagacacctataaagatgaaacctaacatagagcctcccgagaacgtggaatggtcaggagcagaggctagtatgtttagagtcctaattggaacttactacgataatttctgcgcaattgcccgcttgattggcaccaagacttgtcgccaggtgtacgaattccgggtcaaggaaagctcaatcatcgcacctgctcctgccgaagatgtggacacccctccgagaaagaaaaaaagaaagcaccggctgtgggcggctcactgccggaagatccagctgaaaaaggatggcagctctaatcacgtgtataactaccagccatgcgaccaccctcggcagccatgtgattcctcttgcccttgtgttattgcccaaaacttttgcgaaaagttttgtcagtgctcatccgaatgtcagaaccgattccctgggtgccggtgcaaggcacaatgcaacactaaacaatgcccatgttacctggctgtgagggaatgcgatcctgacctttgcctgacatgcggtgcggccgatcactgggattctaaaaatgtgagttgtaagaattgcagtattcagcgcggctccaagaagcacctgttactcgccccaagcgacgtagcagggtggggtattttcatcaaagaccccgtgcagaagaacgagtttatcagcgaatactgtggagaaatcatctctcaagatgaagccgatcggagaggaaaagtttacgataagtacatgtgctcatttctcttcaacctgaacaatgatttcgttgtggatgccacaaggaaagggaataagattcggttcgcgaatcactctgtgaatcctaactgttatgcaaaggttatgatggttaatggcgaccatcgtattggcatctttgccaagcgcgcgattcaaaccggcgaggagctctttttcgactatcgctattcccaagcagacgcacttaagtacgtcggcatcgagcgtgaaatggagattccttag

SEQ ID NO: 115822 - DNA, 939 bp, synthetic construct
  misc_feature 1..939: note = Description of Artificial Sequence: Synthetic coding sequence
  source 1..939: mol_type = other DNA
atggcagcactgtacgcctgcactaagtgccaccaaaggttcccttttgaagccctctcccaaggacagcaactgtgtaaggaatgccggatcgcccacccagttgtgaagtgcacatattgtaggaccgaataccagcaggagcgactggagtgtaacgggaccatcagcgcccattgtaatctccacctgcccggaagctccgacagccctgctagctcaagcagggtagcgggtatcacaggaatcaaaaccaacaccatttgcaaaaaatgcgcccagaacgtgcaactttatggcacacccaaaccgtgccagtactgcaacattatcgcagcctttatcggcaacaagtgccagcggtgtaccaattctgagaaaaagtatggtccaccgtatagctgtgagcaatgcaaacagcaatgcgccttcgatcgaaaggatgaccggaaaaaagtcgacggaaaactcttgtgctggctctgcactctgtcatacaaaagagtgttgcagaaaactaaggaacaacgaaagcacttgtcctcaagcagcagagccggccaccaggaaaaagaacaatacagtcgccttagcggagggggacactacaactctttctcccccgacctagcccttgacagccctggtactgaccactttgttataatcgcacagctgaaagaggaggtcgcaaccctaaagaagatgctgcatcaaaaagatcagatgatcctggaaaaagagaaaaaaataaccgagctcaaagccgattttcagtatcaggagagccagatgagagcaaaaatgaaccagatggaaaagacacacaaggaggttactgaacagctccaagcaaagaacagggaacttctaaagcaggcggccgcacttagcaaaagtaagaaatcagaaaaaagcggtgctattacgtcaccatag

SEQ ID NO: 115823 - DNA, 861 bp, synthetic construct
  misc_feature 1..861: note = Description of Artificial Sequence: Synthetic coding sequence
  source 1..861: mol_type = other DNA
atggcagaggacggcgaagaagctgaatttcacttcgctgccctgtatatttcagggcagtggcctcgcctacgagccgacacagacttgcagcggcttggttcaagtgccatggccccatcgcggaagttcttcgtgggtggcaattggaagatgaacggacggaaacagtccctgggagaacttattggaaccctgaacgccgcgaaggttccagccgacactgaagtggtctgtgcacctcctactgcttacattgacttcgccaggcagaagttagacccaaagatcgccgtggccgcacagaactgctacaaggtgacaaacggagctttcactggtgaaatatcccctggcatgatcaaagactgcggagcaacctgggttgtgcttggacactcagagcggcgacacgttttcggtgaatccgatgaacttattggtcagaaggtggcacacgctctggctgaaggcctgggagtcattgcatgtattggcgagaagctggacgagagggaggccgggatcaccgaaaaggtggtcttcgaacagactaaggtcatagccgataacgtgaaggactggagcaaggtggtcctagcgtatgagccggtctgggccatcggaacgggtaagaccgccacgccccagcaggcccaagaagtgcacgagaagctgagaggctggctaaagtccaacgtcagcgatgcagtggctcagagcacaagaattatctacggtggcagtgtgacaggcgcaacttgtaaggagctggcgagtcagcctgacgtggacggcttcctggtggggggagcaagcctgaaacccgagtttgtggacataatcaacgccaaacaatag

SEQ ID NO: 115824 - DNA, 1305 bp, synthetic construct
  misc_feature 1..1305: note = Description of Artificial Sequence: Synthetic coding sequence
  source 1..1305: mol_type = other DNA
atgagcatcgaaaagatatgggctcgcgagatacttgacagccggggtaaccctaccgtggaggtggacttatacaccgcaaaagggctgttccgggctgccgtgccatcaggggcatcaaccggcatctacgaggcgctggagcttagggatggcgacaaacagcggtacctggggaaaggagtgctgaaggccgtcgaccacatcaacagcaccatagcccctgctctgataagtagtgggctgtcagtcgtggagcaggagaagttggacaacctaatgttggaattggacgggaccgaaaacaaatctaagttcggcgctaacgctatccttggcgtcagcctggccgtgtgcaaggccggagctgcagagcgtgaactgcctctgtaccgtcacatcgcccagttggctggtaactctgacctgatcctgcccgtgccagcgtttaatgtgatcaatggagggagtcacgctggaaacaagctggcaatgcaagaatttatgattctgcctgtgggcgctgagagtttcagagatgctatgaggctaggagccgaagtgtaccacaccttaaagggggtgattaaagacaaatacggcaaagatgctaccaatgtcggcgatgaaggcggtttcgccccgaatattctggagaacagcgaggcattggaactcgtgaaggaagctatagacaaagcaggttatactgagaaaatagtgattggcatggatgtggccgctagtgagttttaccgggatggtaagtatgatctcgactttaaaagtcctaccgatcccagtaggtacattacgggggaccagctaggggcactttaccaagatttcgtgcgggactatcccgtcgtctccatcgaggatccattcgaccaggatgattgggcggcttggtctaagttcacagcaaatgtcggcatccaaattgtgggggatgatcttaccgtcacaaatccaaagagaattgagagagcggtggaagaaaaggcctgcaattgcctgctgctgaaggtcaatcaaatcgggtctgtcacggaggcaatccaggcttgcaaattagcacaggagaatggttggggagttatggtgtcgcaccgcagcggcgagactgaagatacctttatcgcagacctggtggtgggcctatgcactggacagataaagactggcgcaccttgcagatccgagcgcttggccaagtacaatcagttgatgcggatcgaggaagagttgggagacgaagctagattcgccgggcacaactttagaaacccaagtgtgctttag

SEQ ID NO: 115825 - DNA, 1176 bp, synthetic construct
  misc_feature 1..1176: note = Description of Artificial Sequence: Synthetic coding sequence
  source 1..1176: mol_type = other DNA
atgtccattgaaaaaatttgggcacgcgagatcttagatagtcgcggcaaccctaccgtggaggttgatttgtacacagctaagggtttattcagggcagctgtgccttccggcgcctccacagggatctatgaagcactggagctgagggacggagacaagcagcgctacctcggaaaagcaaagttcggtgcaaatgccattttgggggtatccctggcagtgtgtaaggctggagccgctgaaagggagcttccactgtataggcacatagcccagctagccggtaactcagatctcatattgcctgtgccagcctttaacgtgataaacggggggtcccacgctggaaataaactcgctatgcaggaattcatgatccttccagtgggtgcagagagtttccgggatgctatgaggcttggcgccgaagtatatcataccttgaagggtgtgatcaaggacaaatacgggaaggacgctactaacgtgggagatgaaggcgggttcgctcctaatatcctggaaaacagtgaggcactggagctcgttaaggaagccatcgataaagctggatacactgaaaagatcgtcattggaatggatgtagcagcctctgagttctacagggacggtaagtatgatttagatttcaaaagtcctactgaccctagtcggtatatcacgggtgatcagctcggagctctttaccaggattttgtccgcgactaccccgtggtgtcgatcgaggatcccttcgatcaggatgactgggccgcctggtccaagtttacagcaaatgtgggaatacagatcgttggcgacgacctgaccgtgactaatccaaagcgcatcgaacgtgcggtagaggaaaaagcttgcaattgcctgctgctaaaggttaatcagatcggctcagtgactgaggcaatccaggcctgcaagcttgcccaagagaatgggtggggagtcatggtaagccaccgatccggggagactgaggataccttcatagctgacctcgtcgtagggctatgcaccgggcaaattaaaactggcgccccatgtcgcagtgagagattggcaaagtataaccaactaatgagaatcgaggaggaattgggcgatgaggctcgctttgccggacacaatttccggaatccttcggtgctgtag

SEQ ID NO: 115826 - DNA, 1305 bp, synthetic construct
  misc_feature 1..1305: note = Description of Artificial Sequence: Synthetic coding sequence
  source 1..1305: mol_type = other DNA
atgtcgatcgaaaaaatctgggctagggagatactggattctcggggcaacccgacggtggaggtggatttgtatactgccaaagggctgttccgagccgccgtaccatctggggcatcaacgggtatttatgaggccttggagctgagagacggggataagcagagatatctgggaaagggtgtcctcaaggccgttgatcacatcaactcaaccatcgcccctgctctcatctcctccgggttgagcgtcgtggagcaagagaaactggataacttaatgctggagctggatgggaccgaaaataagtcaaagtttggagccaacgcaatccttggagtatctcttgccgtttgtaaagccggggcagcagaacgtgaacttccactgtatcgacatatcgcgcagctggctgggaacagcgatcttattctccccgtgcccgcatttaacgtaattaacggtggctcacacgcgggtaacaagctggccatgcaagagttcatgatccttcccgtcggtgctgagtcattcagggacgcaatgcgcctgggggctgaggtgtaccacacactcaagggcgtcatcaaggacaaatatgggaaggacgctaccaacgtaggagatgaaggtggcttcgcccccaacattcttgaaaactcggaagctttagagctcgtgaaggaggccatagacaaggctggctacaccgaaaagatcgttatcggtatggatgtggcagcaagcgagttttatcgagatggaaagtatgatctggacttcaaatctcccacagacccatctaggtatataaccggcgatcagctgggagccctgtaccaggatttcgtgcgcgactatcccgtggtatccatagaagaccctttcgatcaagatgattgggcagcctggtctaagtttacagcaaacgtgggaatccagattgttggtgatgacctaacagttaccaaccctaagcggatagagcgcgccgtcgaagaaaaggcttgtaattgcctcctcctcaaggtcaatcaaattggcagcgtaaccgaggccatacaagcttgtaagctcgcccaggagaatggctggggcgtgatggttagccataggtcgggcgagactgaagacacctttatcgccgatctggtagtgggcctgtgcaccggacagattaaaactggggctccctgtaggtcagaacgactcgctaagtataatcaactaatgagaatagaagaggagctcggcgacgaagcgcgatttgccggacataattttcgcaacccctcagtactttag

SEQ ID NO: 115827 - DNA, 1176 bp, synthetic construct
  misc_feature 1..1176: note = Description of Artificial Sequence: Synthetic coding sequence
  source 1..1176: mol_type = other DNA
atgagcatcgagaagatttgggcgcgggagattttggactccagagggaacccaaccgtcgaagtggatctctacaccgcaaaaggcctgttccgcgccgccgttccatccggggcatcaacgggcatatatgaggcactggagctgcgcgatggtgacaaacagcggtatctgggcaaggccaaattcggagccaatgctatcctaggggtgtccttggcagtctgcaaggccggagcagctgagcgagaactgcctctctacaggcatattgcccagctggcaggcaactccgacttgatccttcccgtccccgccttcaacgtgattaatggcggctcacacgccggaaacaaactcgctatgcaggaatttatgattctgcccgtgggcgccgaatcatttagggatgcgatgaggcttggcgccgaggtttatcatactctgaagggagtcattaaggataagtatggtaaggatgctacgaatgttggcgatgaaggcggctttgctcctaacattcttgagaatagcgaagccctcgagttagtgaaagaggccatcgataaagcaggctacacggaaaaaattgtgattggaatggatgtagctgcctcagagttttaccgggatggcaaatacgacttggacttcaaatcaccgacagatccaagccgatacataaccggtgatcagctcggggcactgtaccaggactttgtcagggattaccctgtcgtaagcatcgaggacccgttcgaccaggacgactgggcagcctggagtaaattcacggcaaatgtcggcattcaaattgtgggggatgacctgacagtgacaaatcccaaaaggattgagcgggccgtagaggagaaagcctgcaactgcctgctgctgaaggttaatcagatcggcagtgtgacagaggccattcaggcatgtaagctggcacaggaaaacggctggggtgtgatggtgagtcaccggtcaggggagactgaggacactttcatcgctgacttggttgtgggcctttgtacaggccagatcaaaaccggagctccatgccgcagtgaaagactcgcaaaatacaatcaacttatgcgtatagaggaagaactgggtgacgaggccaggtttgcaggacacaacttcagaaacccatcggtgctatag

SEQ ID NO: 115828 - DNA, 1176 bp, synthetic construct
  misc_feature 1..1176: note = Description of Artificial Sequence: Synthetic coding sequence
  source 1..1176: mol_type = other DNA
atggcaatgcaaaagatatttgctagggagattctggatagccgtgggaatccgactgttgaggtggaccttcatacagccaaggggcggtttcgcgctgctgtcccatcaggagcaagcaccgggatttatgaggcgctggaactgcgagacggtgacaaaggcagatatttgggcaaggcgaagtttggcgccaatgccattctgggagtgtcacttgcagtatgcaaggccggcgctgcagaaaaaggcgtacctctctacagacacatcgccgacctggccggcaatccagaccttatcctgcctgtcccagccttcaatgtgatcaacgggggatctcatgcaggcaacaaactggcgatgcaggagttcatgattttgccggtgggagctagttccttcaaggaagccatgagaattggcgctgaagtctatcaccacttgaagggcgtaatcaaggccaaatatggaaaggatgctacaaatgtaggagacgaagggggctttgcccccaacatcctggaaaacaatgaagcgttagagctgttgaaaacagccatacaagcagccgggtacccagacaaggtggtcattggaatggatgtcgctgcttccgaattctaccggaacggtaagtacgatttggacttcaagtctccagatgatccggcccgtcatattaccggtgagaagctcggagagctgtacaaatcatttatcaaaaattatccagtcgtcagcattgaagatccctttgatcaggatgactgggcaacctggacatcttttctgtctggcgtcaacattcagattgttggagacgacctcactgtcactaatccgaaacgcattgctcaagccgtcgaaaagaaggcttgcaactgcctactgctcaaggttaaccagatcggatccgtcactgagagtattcaggcatgcaaactggcccagtccaatggctggggggtgatggtcagtcatcgcagcggagagaccgaagacacgtttattgctgatctggtcgtcggtctgtgcactggccagattaagacgggggctccttgtcgatccgagaggctcgcgaaatacaatcaactaatgcgcattgaagaagctttgggtgataaagcgatttttgcaggtaggaaatttcggaaccctaaggccaagtag

SEQ ID NO: 115829 - DNA, 1305 bp, synthetic construct
  misc_feature 1..1305: note = Description of Artificial Sequence: Synthetic coding sequence
  source 1..1305: mol_type = other DNA
atggctatgcagaaaatttttgccagggagatcctggacagtagaggaaatcctacagtggaggtagacctgcatacagcgaagggacgctttcgggcagctgtcccaagtggtgcttctaccgggatctacgaagctctggaactgcgcgatggcgataaagggcggtacctaggaaaaggtgtcctcaaggcggtcgagaatattaacaatacactgggcccagcactgctccaaaaaaaactgtcagtggttgaccaggagaaagtagataagttcatgatcgagctggatggcaccgagaacaaatccaagttcggagccaatgccatactaggcgtatcccttgccgtatgcaaggccggcgcggccgagaagggagtgccgctgtacaggcacattgcggatctggcgggcaatcccgacttaatcctccctgtgccggcttttaatgtgattaacgggggatcacatgccgggaacaaactggccatgcaggagtttatgatcttgcccgtcggggccagctctttcaaggaggccatgaggatcggagcagaggtctaccatcatttaaaaggtgtcatcaaggcaaagtatgggaaagacgccacaaacgttggtgatgaaggaggcttcgctcccaacatcctagagaataatgaagcccttgagctattgaagactgccatccaagccgcggggtaccccgataaagtcgtgattggcatggacgtagccgcaagcgaattctaccgcaacggcaaatacgacttggattttaaaagcccggacgaccccgcccggcacattactggggagaaacttggcgaactgtacaaaagcttcattaaaaattacccggttgtcagcatcgaagaccccttcgaccaggacgattgggccacatggacgtcctttctctctggcgtcaatatacaaatcgtgggcgacgatctaaccgttaccaaccccaaacgtattgcacaggccgttgaaaagaaagcatgtaactgtcttctgctgaaggttaaccagattggctctgtaaccgaaagcatccaagcctgtaaactcgctcagagcaatggctggggtgttatggtatcccatagaagtggtgaaaccgaagacaccttcatcgccgacctggtcgttggattgtgtacaggccaaatcaagaccggtgcaccatgcaggtcagagcgactcgctaagtataatcagctcatgaggattgaggaggccttaggagacaaggccatctttgccggaaggaaattccggaaccctaaggccaagtag

SEQ ID NO: 115830 - DNA, 1305 bp, synthetic construct
  misc_feature 1..1305: note = Description of Artificial Sequence: Synthetic coding sequence
  source 1..1305: mol_type = other DNA
atggctatgcagaagatctttgccagagagattctggacagccgggggaatcccaccgttgaagttgatctgcacacggctaaaggcaggtttcgggctgccgttccgagcggggcctctactggcatttacgaagccctggaactgcgtgatggtgacaaaggcagatatctgggaaagggagtgttaaaggccgtcgaaaatatcaataacacgcttggccccgccttacttcagaagaagctgtccgtggtggatcaggagaaagtcgataagttcatgatcgagctggacggtaccgagaacaagtctaagtttggggcaaatgccatcctcggagtaagcttggccgtctgcaaagccggggcagccgagaaaggggtgcccttgtatcgccacatcgccgatttggcgggtaatcccgatctgattctccctgttcctgccttcaatgtaatcaatggtggttctcacgccggcaacaaactcgcgatgcaggaatttatgatcctcccggttggcgcctctagcttcaaggaagctatgcggattggagccgaggtttatcaccacctgaaaggggttattaaagctaagtatgggaaagatgccacaaatgtgggagatgagggtggctttgcacccaatatactagaaaacaatgaggctttagagctgctaaaaactgccattcaggcggccggctaccctgataaggtagttattgggatggatgtggccgcttccgagttctatagaaatgggaaatatgacctggacttcaaaagccccgacgatccagccagacacatcacaggcgagaaactcggggagctgtataaaagcttcattaaaaactatcctgtcgtcagtatcgaggatcctttcgatcaggacgactgggccacatggacttctttccttagcggcgtgaatattcagattgtgggggatgatctgactgtcaccaatcccaaacgcattgcccaggcggtggagaaaaaagcctgcaactgccttttgttgaaggtgaatcagattggcagtgtgactgagagcatccaggcttgcaagctggcacagagcaacggctggggtgtcatggtgtcgcaccgctcaggtgagacggaagacacttttattgccgatcttgttgtcggtctgtgcaccgggcaaatcaaaaccggcgctccgtgccgcagtgagagattagcaaaatataaccagctgatgaggatcgaagaggccctcggcgacaaggccatctttgcaggccggaagtttagaaatcccaaagccaagtag

SEQ ID NO: 115831 - DNA, 852 bp, synthetic construct
  misc_feature 1..852: note = Description of Artificial Sequence: Synthetic coding sequence
  source 1..852: mol_type = other DNA
atggccatgcagaagatttttgcccgcgaaatactggactctcgcggcaaccccactgtggaggtggatttgcatacggctaaagggaggtttagggccgcagtgccttctggggccagtaccggcatctatgaggctctcgagctgcgggacggcgataaaggtcgatacctcgggaagggtgttctgaaggctgtggaaaatatcaataacacattgggccctgcactgttgcagaaaaaactgtctgtcgtggaccaggagaaggtcgacaaattcatgatcgagctcgacggaactgaaaacaagagcaaattcggcgctaacgcaattcttggtgtttccttggccgtctgcaaagccggagcagccgaaaagggagtgccactgtacaggcatattgctgatctggcaggaaatcccgacctcatcctgccagtccctgcgtttaatgtcattaatggcggctcccatgctggaaataaacttgcaatgcaggaattcatgattctgcctgtgggggcatccagttttaaagaagctatgcggataggcgccgaagtgtaccatcatctcaaaggggtgatcaaggctaaatacggaaaagatgctacgaatgtaggtgatgaaggtggtttcgcaccaaatatactggaaaataacgaagctcttgagctcctgaagactgccatccaggccgcgggctacccagacaaggtggtgatcgggatggatgtcgccgcctctgagttttaccgcaatggcaaatacgatcttgactttaagtcccctgacgatcccgcgagacacatcacaggcgagaaacttggggagctttataaatccttttag

SEQ ID NO: 115832 - DNA, 465 bp, synthetic construct
  misc_feature 1..465: note = Description of Artificial Sequence: Synthetic coding sequence
  source 1..465: mol_type = other DNA
atggctatgcaaaagatcttcgcccgggagatccttgattcacgcggcaaccctaccgttgaggtggatctccacaccgcaaagggacggtttcgggccgcagtacccagcggcgcctctaccggaatctacgaggcgttggagctgagggacggagataagggtagatacctggggaaaggcgttctcaaagccgtggaaaacattaataacacgctgggtccagccctgctccagaagaagctttctgtggtggaccaggagaaagtcgacaaattcatgattgagctcgatgggaccgagaacaagtctaagttcggggctaatgccatactaggtgtgagtctggccgtctgtaaggccggcgcagcggaaaagggcgtgcccctctatcggcacattgccgatctcgcaggaaatcctgacctgattttacccgttcctgccttcaatgtcattaattag

SEQ ID NO: 115833 - DNA, 447 bp, synthetic construct
  misc_feature 1..447: note = Description of Artificial Sequence: Synthetic coding sequence
  source 1..447: mol_type = other DNA
atggccatgcagaaaatcttcgcaagagagatcttagactcacgcggaaacccaaccgttgaggtcgatctgcacactgctaaagggaggtttagggccgcagttcctagcggcgcttccacaggcatatacgaagccctcgagctcagagatggagataaggggcgatatttaggaaagggggtactcaaagcagttgagaacattaacaacaccctcggtccagcacttctccagaaaaagcttagcgtggtagatcaggagaaggtcgacaagtttatgatcgaactggacggcaccgaaaataaatctaaattcggcgcaaatgccatacttggtgtgtcgttggcagtgtgcaaagctggcgccgctgaaaaaggcgttccgctttatcgacacattgcagatctcgcgggcaatccagacctgattttgcctgtgccttag

SEQ ID NO: 115834 - DNA, 1332 bp, synthetic construct
  misc_feature 1..1332: note = Description of Artificial Sequence: Synthetic coding sequence
  source 1..1332: mol_type = other DNA
atggtgcgtggaagaatcagtagactctccgtccgcgacgtccgatttcccacttccctgggcggccatggtgctgacgctatgcatacagacccggactatagcgccgcctacgttgtaatagagactgatgcagaggacgggattaagggctgtgggattaccttcacacttggcaaggggaccgaggtggtagtgtgcgccgtgaatgctctggcccatcatgtactgaataaggacctgaaagatatagttggagactttcgaggcttttaccgacagctcacttcagacgggcaattacgctggataggcccagaaaagggagtggttcacttggcgactgccgccgtgttaaatgctgtgtgggacctgtgggctaaacaggaggggaagcccgtgtggaagttgctggtagacatggaccctcggatgttggtgtcctgtatcgatttccgatacatcacggatgtcctgacagaggaggatgccttggagatcctgcagaaaggccagatcggaaaaaaagaacgtgagaagcagatgctcgctcagggctacccagcttatacaacatcttgcgcctggcttggatattctgatgatacacttaaacagctttgcgctcaggcccttaaagatggctggactagatttaaagttaaagttggcgccgacctccaggacgatatgaggagatgtcagattatcagggatatgatcggacctgagaagaccttaatgatggacgcaaaccaacgatgggacgtgccggaggcagtagagtggatgagcaagcttgccaagttcaaaccgctatggatcgaagaacctaccagcccagacgacattctcggccacgccactatctcgaaggccctggttcccctgggaatcggtattgccacaggtgagcagtgtcacaatcgtgtgatcttcaaacaactccttcaagccaaggctctgcagttcctccagatcgacagttgtaggctggggtcagttaacgagaacctgtctgtgctgctgatggctaagaagttcgagatacctgtatgtccgcacgccggcggagtgggactgtgcgaactggtgcagcatttaattattttcgattacattagcgtttccgcgtctctggaaaaccgagtttgtgagtatgtggaccacctacatgagcattttaaataccccgtgatgattcagcgtgcctcctatatgccacccaaggaccctggctacagtacagaaatgaaggaagaatccgtcaagaagcaccaatatccagatggagaggtgtggaagaagctgcttcccgcacaggagaactag

SEQ ID NO: 115835 - DNA, 642 bp, synthetic construct
  misc_feature 1..642: note = Description of Artificial Sequence: Synthetic coding sequence
  source 1..642: mol_type = other DNA
atgcgccgttgtcagatcatcagggacatgattggccccgagaaaacactgatgatggacgctaatcaaaggtgggatgtgcccgaggctgtagagtggatgagcaaactcgcaaagtttaaacctctgtggatcgaggagcccacgtctcccgatgacattctcggccacgcgaccatttccaaagcgttggtgccgctagggattggcattgctaccggagagcagtgtcataatcgcgtcattttcaagcaactgctccaggctaaagctctccagtttctgcaaatcgattcgtgccgccttggttcggtcaatgaaaatttgagcgttctgttgatggccaagaaattcgagattccggtctgtccccatgctggaggagttggcctctgtgaattggtccagcacctgattatcttcgactacataagcgtgtctgcctctctggagaaccgtgtttgcgagtacgttgaccatcttcatgagcacttcaaatatcccgtaatgatccagagagcgagctacatgccccctaaggatcccgggtactccacagaaatgaaagaggagtctgtgaagaagcaccaataccccgatggtgaagtttggaagaaactgctgcccgcacaggagaactag

SEQ ID NO: 115836 - DNA, 1353 bp, synthetic construct
  misc_feature 1..1353: note = Description of Artificial Sequence: Synthetic coding sequence
  source 1..1353: mol_type = other DNA
atggtgagcgccgatgccatggtctccgccgatgccatggtttcagcagacgctatggttagtgctgatgctatggttagcgccgacgcaatggtctctgcggatgcaatggtgtccgcagatgctatggttagcgcagacgctatgcacacagaccctgactactccgccgcatacgtggttattgaaacggatgccgaggatggcattaagggttgtggcatcacttttacgctaggtaagggcactgaagtggtggtatgcgctgtgaacgctctggcccatcatgttctgaataaggacctgaaagatattgtgggggacttccgaggcttttataggcagcttacttccgacgggcagctgaggtggatcggtcccgagaaaggcgttgtccacctggcaactgctgccgtgctgaatgctgtatgggacctttgggcaaagcaggagggcaaaccagtgtggaaattactggtcgatatggacccaaggatgctggtgagctgcatcgattttagatacataactgacgtgctgaccgaggaggacgctctggaaattctgcaaaaaggccaaattggtaagaaagagcgggaaaagcagatgttagcccaagggtatccagcgtatacaacatcatgcgcctggttagggtattctgatgacacgttaaagcagctgtgtgcccaagctctgaaagatggatggacgcgttttaaagtgaaagtgggagctgacctccaagacgacatgcggcgatgtcagataattagagatatgatcgggcccgagaaaacactgatgatggacgccaatcaacgttgggacgtgccggaggccgtcgaatggatgtccaagttggcaaaatttaaaccgctatggattgaagagccaactagccccgacgatatcctcggacatgctaccatctcgaaatgtcacaatcgcgtgattttcaaacagctgttacaggccaaggctctccagtttctgcagatcgactcctgccgtttaggatccgtcaatgagaatctctcggtgctcctcatggcaaaaaaatttgagattcctgtatgcccacatgccggcggggtggggctgtgcgaactcgtgcagcacctgatcatcttcgactacatctccgtaagtgcctccttggaaaaccgtgtgtgtgagtacgtggatcatttgcatgagcacttcaagtatcccgtgatgattcagcgcgcgagctacatgcctccaaaagaccccggatattccaccgagatgaaggaggaaagtgtgaagaagcaccagtatcccgacggagaggtgtggaagaagcttcttcctgcacaggagaactag

SEQ ID NO: 115837 - DNA, 1086 bp, synthetic construct
  misc_feature 1..1086: note = Description of Artificial Sequence: Synthetic coding sequence
  source 1..1086: mol_type = other DNA
atgcagaagatggaatccagaggcgtggagctgccgagcctctgggagaaggccctcaagctgattggccctgaaaagggggtggttcacttggccaccgccgcagtgctgaatgcagtctgggatttgtgggccaagcaagagggaaagcctgtgtggaaattgctagttgacatggacccacggatgctggtatcctgtatcgacttccgttatattacagatgtcctcactgaagaagatgccctggagatcctgcaaaagggccagatcggcaagaaagaacgggaaaagcagatgttggctcagggataccctgcatataccacatcttgcgcatggctgggctattccgatgacacgcttaagcagctctgcgctcaggccctcaaagatggctggacacgcttcaaagttaaagtcggggccgatttacaggatgacatgcggaggtgtcagattattagggacatgataggacccgaaaaaacactgatgatggatgccaaccagcggtgggacgtgcccgaagccgttgagtggatgtcaaagctggcaaaattcaagcctctatggatcgaagaaccgacctcccccgatgatatcttggggcacgccaccattagcaaagcattggttcctctcgggattggcattgcgacaggcgaacagtgccataacagggtgatattcaagcagctgctgcaggcgaaagcgctccagttcctgcagattgacagttgtcgactgggaagtgtgaacgaaaacttatctgttcttctgatggcaaagaagttcgagattcccgtctgcccacatgccggtggcgtaggcttatgtgagttggttcaacatctgattatttttgactatatatctgtgtctgcaagccttgaaaatcgagtgtgcgaatacgtagatcacctccatgaacatttcaagtatccagttatgatccaacgcgcctcgtacatgcctcccaaagatcccggctactccacagagatgaaagaagagtcagtgaaaaaacaccagtatcccgatggcgaggtgtggaagaaactcttgccggcccaagagaattag

SEQ ID NO: 115838 - DNA, 429 bp, synthetic construct
  misc_feature 1..429: note = Description of Artificial Sequence: Synthetic coding sequence
  source 1..429: mol_type = other DNA
atggtaaggggaagaatcagccggttatcagtgagggatgtgcgcttcccaacctccctgggcggtcatggggccgacgcaatgcacacagatcccgattattccgctgcgtatgtggtcatagaaacagatgcagaagacggaatcaagggatgcggcataacttttactttaggtaagggtacagaagtggtggtttgtgccgttaatgcgctggctcaccacgtgctgaataaggatctcaaggacattgtcggcgattttcggggtttttataggcaactgacatcagacggccaactgagatggatcggacccgagaaaggggttgtacacctcgctaccgcagctgtcttgaacgctgtctgggacctgtgggccaagcaggaagggaaaccggtttggaagctgctcgtagacatgggctag

SEQ ID NO: 115839 - DNA, 1392 bp, synthetic construct
  misc_feature 1..1392: note = Description of Artificial Sequence: Synthetic coding sequence
  source 1..1392: mol_type = other DNA
atggcgacagtgacggctactacgaaggtgcctgaaattagagatgtgacccgaatcgagcggataggcgctcattcacacatccgagggcttggacttgacgacgcactggagccacgccaagccagccaggggatggtgggccagctcgctgcccgtcgggccgcgggggtggtactagaaatgatcagggaaggaaaaatcgcggggcgagccgtattgatcgccggccagcctgggaccggcaagacagctattgcgatgggaatggctcaggctttgggaccagataccccatttactgctatcgctggtagcgagatcttttccctggaaatgagtaagactgaggctcttacgcaagccttccgacgctcaattggggtccgaattaaggaggagactgaaattattgagggcgaagttgtcgagatccagattgacaggcctgcgacaggcaccgggagcaaggttggtaagttgaccttgaagactaccgaaatggaaacaatctatgacctgggcacaaaaatgattgaaagcctcacaaaagacaaggtgcaagctggcgatgtgattacaattgacaaagctacaggaaaaataagtaagctagggcggagttttactagagctagggattacgacgccatgggaagccagactaaattcgtgcagtgccctgatggagagcttcaaaagcgcaaggaggttgtccataccgtatcactgcacgagatagatgtgattaattcccgcactcagggttttcttgctctgtttagcggcgatactggtgaaataaaatccgaggtgagggaacaaattaacgccaaagtagcagaatggcgcgaagagggcaaggctgagattatccctggtgtactctttattgatgaggtgcatatgctggacattgagagttttagttttctgaaccgggccctcgagtcagatatggcccctgttctgattatggccactaaccgagggatcacaagaattcggggaacttcctatcagtcgcctcacggcatcccaattgatctgctcgacaggttgctcatcgtaagcaccacaccgtactctgagaaagacactaaacagatactgcggatcaggtgtgaagaagaggatgtcgagatgtccgaggacgcctacaccgtgctgacaaggatcgggctggagaccagcctccggtacgctatacagctaataaccgctgcctccctcgtgtgtagaaagcggaagggcactgaggtgcaggtagatgatataaagcgcgtgtactcattgttcctggacgaaagtcgatcaactcagtacatgaaggagtaccaggacgcattcctgtttaatgaattgaaaggtgagactatggacacatcatag

SEQ ID NO: 115840 - DNA, 855 bp, synthetic construct
  misc_feature 1..855: note = Description of Artificial Sequence: Synthetic coding sequence
  source 1..855: mol_type = other DNA
atggccaagagtctactgaagaccgcaagcctatctgggaggacaaaactgctccatcagaccggtctgtcactgtactccacttcccacggattctacgaggaggaggtcaaaaagactctgcagcaatttcccgggggcagcatcgacttgcagaaggaggataatggtattggaattcttactctcaacaatccctcccgtatgaacgccttttctggtgtgatgatgctgcagttgttagagaaggtcatagaattggagaattggacggaaggaaaggggctgattgtcagaggcgccaagaataccttcagtagcggaagtgatttaaacgccgtcaagtcactgggattacagcgacgacttcctttaatatctgtggctttggtccagggatgggccctgggaggtggagccgaatttacaaccgcttgcgattttcggctgatgacccctgagtcaaagatcagatttgtccacaaggaaatggggatcattccgtcttgggggggcacaacccgactggtggagatcataggatccaggcaggcactgaaagtgctatcaggagccctcaaactggacagtaagaatgcactgaacatcggcatggttgaagaggttctacagagctctgatgaaaccaaatctctggaggaggcccaggagtggttgaagcaatttatccaggggccccccgaagtgattcgcgcactgaagaaaagcgtgtgcagcggaagagaactgtatctcgaggaggccttgcaaaatgagcgggacctgttggggacagtgtggggcgggccggccaacttggaagctatcgctaagaagggcaaatttaataagtag

SEQ ID NO: 115841 - DNA, 438 bp, synthetic construct
  misc_feature 1..438: note = Description of Artificial Sequence: Synthetic coding sequence
  source 1..438: mol_type = other DNA
atggctaagtccctgctcaaaacagcatccttgtctggcaggacaaagttgctccatcagactggcctgtccttgtacagtacctcccacgggttttacgaagaagaggtcaaaaagaccctgcagcagtttccgggcggatcaatcgatttgcaaaaagaagataacggcatcggaatcttaacgctcaacaatccgagccgcatgaacgccttcagtggagtaatgatgttacagttgctagaaaaggtgattgagctcgagaattggactgagggcaaggggctgattgttaggggcgctaaaaacactttttcctctggaagcgatttaaacgccgtaaagtcactcggcactcctgagaccagcttcaacaaatgttgcgccggctcccgcttaggaattgggtggaggagtagaatttattattccatgtag

SEQ ID NO: 115842 - DNA, 441 bp, synthetic construct
  misc_feature 1..441: note = Description of Artificial Sequence: Synthetic coding sequence
  source 1..441: mol_type = other DNA
atggcaaagagcctcctcaaaaccgcgagcttgtccggccgcactaaacttttgcatcagactggcctgtctctatattccacgtcccacggtttttacgaggaagaagttaaaaaaactctccagcagtttcctggtggctccatagacctgcagaaagaagacaatggcattggaatccttacacttaacaatccttctaggatgaatgcgttttctggtgtgatgatgttacaactgttggagaaagtgattgaactcgaaaattggacagagggcaaggggcttatcgttaggggggccaagaacactttcagttccggatccgacctcaacgctgtcaaaagcctgggaacgcctgaggaaactagctttaacaaatgttgcgccgggagcaggcttggaatcggctggcggagcagaatctattattcaatgtag

SEQ ID NO: 115843 - DNA, 438 bp, synthetic construct
  misc_feature 1..438: note = Description of Artificial Sequence: Synthetic coding sequence
  source 1..438: mol_type = other DNA
atggccaaatccctgttaaagactgcttcactttcaggacggaccaaactcctacaccagactgggctttctctgtactccactagtcacgggttctacgaggaagaagttaagaagactttgcagcagttccccggaggctcaattgatcttcagaaagaggacaacggcataggcatcctgaccctgaacaacccctctcgaatgaatgcgttttcaggcgtcatgatgctgcaattattggaaaaagtgatcgaactggagaactggaccgagggtaagggactgatcgtgagaggagccaagaatacttttagcagcggttcagacctaaacgctgtgaaaagcctggggacccctgaaacatctttcaataagtgctgtgctggcagtcggttgggaatcgggtggaggagtcgcatctactatagcatgtag

SEQ ID NO: 115844 - DNA, 642 bp, synthetic construct
  misc_feature 1..642: note = Description of Artificial Sequence: Synthetic coding sequence
  source 1..642: mol_type = other DNA
atgaacgctttttctggcgtgatgatgcttcagctactggagaaggtgatcgagctcgaaaactggacagagggcaagggattaatcgttagaggcgcgaagaatacattttcctcaggatccgatctcaacgcagtgaaaagcctcggaacacctgaggaaagttgcagatggaataccgagttcctgtacactctccatccagtgtctcctttcattaacattctctacagttacgggtggaacggaaggatgcatgttcatgccaagcacctgaataagatctacgaagtcaagaagcaacggggcaaaatattgcttggtctgtcacggctgccgctcatcagtgttgctcttgtgcagggatgggccctgggagggggggctgaatttaccacagcatgcgactttaggctgatgactccagaaagcaaaataagatttgtccataaggagatgggaataatacctagttggggcggaacgacccggttggtggagattataggaagccgtcaggctttaaaagtattaagcggcgcccttaagctagattccaagaatgccttaaatatcggtatggtggaggaagtgctgcagtcttccgacgagaccaagagcttggaggaagcacaggaatag

SEQ ID NO: 115845 - DNA, 906 bp, synthetic construct
  misc_feature 1..906: note = Description of Artificial Sequence: Synthetic coding sequence
  source 1..906: mol_type = other DNA
atggccaagagccttctcaagaccgccagtttaagcgggcgtaccaaacttctccatcaaacagggctgtctctatactcgacctctcatgggttctacgaggaggaggtgaaaaagacgcttcagcagttccccggagggagcatcgacttgcaaaaggaggacaatggaatcgggattctgaccctcaacaacccctctcgaatgaacgccttttctggagtaatgatgctgcaacttctggaaaaggtaattgagctggagaactggaccgaaggaaaaggcctcatcgtgcggggggcgaagaacacattttcaagtgggagcgaccttaatgcagtcaagagtttaggtacaccagaggacggtatggcagtctgcatgtttatgcaaaacactctcacccggttcatgaggctcccactgataagtgtagctcttgtccaaggctgggccctcggaggcggggccgagttcactaccgcctgcgacttccggctgatgacgcctgagtcaaagattcgattcgtgcataaagaaatgggtattatcccctcatggggcggcacgactcgactggttgaaataatagggagccggcaggccctcaaagttctcagcggcgcactcaaactggattccaaaaacgccctgaacattggcatggtggaagaagtgctgcagtcttccgacgagactaagagtctagaagaagctcaggagtggctcaagcaattcatacaaggaccgcctgaagtaatcagagccttgaaaaagagcgtttgcagtgggcgtgagctttacttggaagaagcactgcaaaacgagagagacctacttggcaccgtgtggggaggcccggcgaatttagaggctatagcaaagaagggaaagttcaacaaatag

SEQ ID NO: 115846 - DNA, 681 bp, synthetic construct
  misc_feature 1..681: note = Description of Artificial Sequence: Synthetic coding sequence
  source 1..681: mol_type = other DNA
atgatgctccagctccttgagaaagttatagaactggagaattggaccgaaggcaagggcctgattgttcggggggcaaagaatacgtttagctctgggtctgatctgaatgctgtcaagtcacttgggacaccagaggacggaatggccgtgtgcatgttcatgcagaatacactgacccgtttcatgcgcctgccactgatcagcgtggcccttgtacagggctgggcccttggaggcggcgcagaatttaccaccgcctgcgatttcaggcttatgaccccggaatcaaagattcggttcgtgcataaggagatgggtataatcccatcatggggaggtactaccaggctcgttgagatcattggctctcggcaggccttaaaggtcctgtctggagcacttaaacttgactctaaaaatgccctcaatataggcatggttgaagaggtcctacagagcagcgacgaaactaagagcctggaggaggcccaggaatggctcaagcagttcatacagggaccccctgaggtgatacgggccctgaaaaagtccgtctgctcaggccgtgagctttatctagaggaggcacttcagaacgagcgggacctgctaggcactgtatggggcggcccagctaatctggaagcgattgcaaaaaaagggaaattcaataagtag

SEQ ID NO: 115847 - DNA, 906 bp, synthetic construct
  misc_feature 1..906: note = Description of Artificial Sequence: Synthetic coding sequence
  source 1..906: mol_type = other DNA
atggctaagagcttgctcaagaccgcgtccttgtcgggccgaaccaagctgcttcatcagaccggactgtccctctactcaacttctcatggtttctacgaggaggaggttaagaagactctccagcagtttcctggcggttctattgacctgcaaaaggaggacaatggcatcgggatcttaacgctcaacaacccaagccgtatgaatgcattctcaggtgtgatgatgcttcaactgctcgagaaggtaatcgaactcgagaattggaccgaaggcaaagggctaatagtgaggggagcaaagaacaccttttcatcggggtcagatctgaacgccgtgaagagtctgggcaccccagaagacggaatggcggtttgtatgtttatgcagaacacattgactcgctttatgagactgcctctaatttccgtggccctggtgcagggctgggcactgggcgggggggctgagttcacaacggcctgtgatttcagattaatgacccctgaatccaaaattcgctttgtccataaggagatgggaatcatcccatcctggggcgggaccactcgcctcgtcgaaatcattggcagtagacaggccctcaaggtgctgtcaggggccttaaagctcgattccaagaatgcccttaatatcggcatggttgaagaagtgcttcaaagttcggatgagaccaaaagcctcgaggaggcccaggaatggctgaagcaattcattcagggccccccagaagtaataagggcactgaaaaagtcagtttgcagcggccgcgagctgtacttagaagaggccttacagaatgaacgcgatctgttggggactgtttgggggggccctgccaacttagaagcgatcgccaagaaaggaaaatttaacaaatag

SEQ ID NO: 115848 - DNA, 906 bp, synthetic construct
  misc_feature 1..906: note = Description of Artificial Sequence: Synthetic coding sequence
  source 1..906: mol_type = other DNA
atggccaagagtttgctgaagactgcctctctatccggccggacgaaactattgcatcagacaggactttccctgtattctaccagtcatggcttctacgaggaagaagtgaaaaagacactgcagcagttccccggcggctctatcgatctacagaaagaagacaatggcatcggtatcctgactctgaacaatccttcaaggatgaacgcgttctccggggtgatgatgctgcagctgctggagaaggtgattgagcttgagaattggaccgagggcaagggtctgattgtacgcggcgcgaaaaacacattttccagtggttctgacctcaatgctgtaaaatcactcggaacaccagaagacggcatggctgtctgcatgtttatgcagaatacccttacgagattcatgagactgcccctgatctccgtggccctggtgcagggatgggcattaggcggcggagccgaatttaccactgcctgtgacttccggcttatgacacccgagagcaagatccgatttgtgcacaaagaaatgggaataattcccagctggggcggtaccactagattggtggaaatcattggatccagacaggcactgaaagtgctttccggggccctcaaattggactcaaagaatgccctcaatattggcatggtggaagaggttctgcaatcaagtgatgaaaccaagagccttgaggaggcccaggagtggttaaagcaatttattcagggcccccccgaggtgatcagggctctgaagaagagcgtttgtagcggccgcgaactttatctggaagaagccctgcagaatgaaagagacctcctgggtacagtgtggggcgggcccgccaatctcgaagctatagctaagaaaggaaaatttaacaaatag

SEQ ID NO: 115849 - DNA, 408 bp, synthetic construct
  misc_feature 1..408: note = Description of Artificial Sequence: Synthetic coding sequence
  source 1..408: mol_type = other DNA
atggccaagtctcttctgaagacagcatctctctcaggtcggactaagctcctgcatcagaccgggctgagcttatattcgaccagccacggattctacgaggaggaggtaaagaagactctccagcaattcccaggagggtcaattgatcttcaaaaagaggacaatggcattggcattctcacactgaataacccaagccggatgaacgcattttctggagttatgatgttgcagctgctggagaaggtgatagaacttgagaattggactgaaggaaaggggctgattgttcggggagctaaaaacactttttcctccggaagtgatcttaacgccgtcaagagtctcgggactccagaggacggcatggcagtttgcatgttcatgcagaataccctgacatag

SEQ ID NO: 115850 - DNA, 924 bp, synthetic construct
  misc_feature 1..924: note = Description of Artificial Sequence: Synthetic coding sequence
  source 1..924: mol_type = other DNA
atggccctgaaacaagaaatggccaaatccttgttaaagacagctagcctctccggcaggactaagctcctccatcagacaggcctgtccctgtactctaccagccacggtttctacgaggaggaagtgaagaaaacattacagcagttcccaggagggagcattgacctccagaaagaggataatgggatcgggattttaacactgaacaatcctagtaggatgaatgctttctcaggggtgatgatgctacagttattagagaaagtaattgaactggagaattggaccgaaggtaagggactgattgtgagaggcgcaaagaacacttttagttctgggagcgatctgaacgctgtcaagtcactgggaacccctgaagatggcatggctgtgtgcatgttcatgcaaaataccctcacaagatttatgaggttaccgctcatcagtgtcgcacttgtgcaggggtgggcactcggaggtggcgcagaattcactacagcgtgcgacttccgtttgatgaccccagagtcaaaaatacgttttgtgcacaaagagatggggataattccttcctggggtggcactacccggcttgtcgagattatagggtcacgccaagcccttaaagtactctctggcgctctgaaactggacagtaaaaacgccctgaatatagggatggtggaggaggtcttgcagtccagcgacgagaccaagagccttgaagaagcccaggagtggcttaaacagtttattcaaggaccacccgaggtgattcgggcgctgaaaaaaagcgtatgcagtgggcgagagctgtacttagaagaagcactccagaacgaaagagatttgctcggaacggtttggggcggacccgcgaaccttgaagcaatcgctaaaaaaggcaagttcaataagtag

SEQ ID NO: 115851 - DNA, 456 bp, synthetic construct
  misc_feature 1..456: note = Description of Artificial Sequence: Synthetic coding sequence
  source 1..456: mol_type = other DNA
atggccaagtcactcctcaaaaccgcttctctgtcaggaaggacgaaactgctccaccagactgggctgtccttgtactccacttctcatggattttacgaggaggaagttaaaaagactctacagcagttcccaggaggttcgattgaccttcaaaaggaagacaacggaatagggatcctgacactgaataatccgagccggatgaatgcattctctggcgttatgatgctccagctgctggaaaaggtcattgagcttgagaactggacagaggggaaggggctcatagtgagaggtgcaaagaatactttctcctctgggtcagatctcaatgctgtaaaaagtctgggaacccccgaagatgggatggcagtttgtatgtttatgcaaaatacactgacaagattcatgcggctgccactcatctccgtagccctggttcagggctggtag

SEQ ID NO: 115852 - DNA, 378 bp, synthetic construct
  misc_feature 1..378: note = Description of Artificial Sequence: Synthetic coding sequence
  source 1..378: mol_type = other DNA
atggcaaagtctctgctgaagacagctagccttagcgggcggaccaaactgttgcaccagacgggcttatcactgtattcaactagtcacggattttacgaggaggaagtgaagaagacgctgcagcagttccctggcggctccatcgacttgcagaaggaagataatggcattggcatcctgaccctgaacaaccccagtagaatgaatgcattctctggcgtgatgatgctccagctgctcgagaaggtgattgagctggaaaactggaccgagggaaaaggcctcatcgtgcggggcgctaagaacactttctcatccggcagcgacctaaacgcagtgaaatctctgggcacgcctgaggcgaacttcttatag

SEQ ID NO: 115853 - DNA, 213 bp, synthetic construct
  misc_feature 1..213: note = Description of Artificial Sequence: Synthetic coding sequence
  source 1..213: mol_type = other DNA
atgatgctccagttattggagaaggtaattgagctagaaaattggactgaggggaagggcctgatcgtccggggcgccaagaacacattctcaagcgggtccgacctaaacgccgttaaaagcctggggacccctgagacaagcttcaataagtgttgcgccggctcccggctggggattggttggaggagtcgcatttattattcaatgtag

SEQ ID NO: 115854 - DNA, 873 bp, synthetic construct
  misc_feature 1..873: note = Description of Artificial Sequence: Synthetic coding sequence
  source 1..873: mol_type = other DNA
atggctgccctgcgagtgttgctcagctgcgtccgagggccccttaggccaccagttcgttgtccagcatggcgcccgttcgccagtggcgctaatttcgagtatatcatcgctgaaaagaggggtaaaaacaatacagttggattgatccagcttaaccggcctaaagcccttaacgcgctgtgcgatgggctgatcgatgaacttaatcaggccctgaagacgttcgaagaagatcctgccgtgggggccatcgtgttgactggtggcgacaaggctttcgctgccggggctgacatcaaggagatgcaaaatttgtctttccaagattgctactcctccaagtttctgaaacattgggaccatctaactcaggtaaagaaacccgtcattgccgcagtcaacggttatgctttcgggggtggctgcgaactggccatgatgtgcgatatcatctacgctggcgaaaaggcacaattcgcccaaccagaaattcttatcgggaccatacctggggctggcggtactcagcgattgactcgcgctgtcggaaaatccttggcgatggagatggttctgaccggcgatcggatctctgcgcaagacgcaaagcaggctgggcttgtttccaaaatatgtcccgtggagacactggtagaagaggccatccagtgtgccgagaagattgcctcaaacagtaagattgttgtggcaatggccaaagaatctgttaacgctgcctttgaaatgactctgaccgaaggatctaaactggagaagaaactcttttatagcacgttcgctacggacgatagaaaagaaggaatgacagcgtttgtcgagaagagaaaagccaacttcaaagatcaatag

SEQ ID NO: 115855 - DNA, 2271 bp, synthetic construct
  misc_feature 1..2271: note = Description of Artificial Sequence: Synthetic coding sequence
  source 1..2271: mol_type = other DNA
atgtctttcgtggcaggtgttattcgaaggctggacgaaactgttgtgaaccggatcgccgcaggagaggtgatccagcgtcctgctaatgccattaaagagatgatcgaaaattgcctcgatgctaagtcgacatcgatccaagtcattgtgaaggaaggcggcctgaagctgattcagatacaggacaatggtacgggcatcaggaaggaagacctggatattgtctgcgagagatttacgacatccaaactgcaaagttttgaagatctcgccagcatttccacatatgggtttcggggtgaagccctggccagtatctctcatgtggcgcacgttaccattacaaccaagaccgcagatgggaagtgcgcctaccgggcctcgtattctgatggaaagctaaaggcaccaccaaaaccgtgtgcaggaaaccagggaacccaaatcacggtcgaagatctgttttataatatcgcaacgagaagaaaagccctgaagaacccttccgaagagtacgggaagatcctggaggttgtcggtaggtactctgtgcacaatgccggcatctccttttcagtgaaaaagcagggggaaaccgtcgcagacgtgcgcacattgccgaatgcatcaaccgtagataacatccgtagcatttttggcaacgccgtgagccgcgagctgattgagatcgggtgtgaggacaagacactggcctttaaaatgaacggctatatctcaaacgcaaattattccgtgaaaaagtgtattttccttctttttatcaatcaccgtctcgtcgaaagtacctcccttagaaaagctatcgaaacagtgtatgctgcctatttacccaagaacacccatcccttcctctacctgtccctggagatctccccacaaaacgttgatgtcaacgtccaccctacgaagcacgaagtccacttcctacatgaggaatcaatactggaacgagttcagcaacatatcgagtcgaagcttctcggatctaacagctcaaggatgtacttcacacagactctcctccccgggctggccggcccttccggtgagatggtgaaaagcacaacctccctaacttcaagtagcacttctggtagctctgataaagtctacgcccaccagatggtgagaaccgactcaagggagcagaaacttgacgcttttctgcagccacttagtaagcctctgagtagccagcctcaagcaatagtgaccgaagacaaaacggatatctcaagtggccgggcgcgacagcaggacgaggaaatgctggaacttcccgcacctgctgaggttgccgccaagaaccagagtctcgagggggacacgaccaaaggaaccagtgaaatgtccgagaagcgcggccccacctccagcaaccctagaaagcgccacagggaggatagcgatgtggagatggttgaagatgattcaaggaaagaaatgacagcggcctgcaccccgagacgcaggatcattaatctgacaagtgtcctcagcctgcaagaggagatcaatgagcagggacatgaggtgctgcgtgagatgctccacaaccattcttttgtcggctgcgttaatccccagtgggcactggcgcagcaccagaccaaactatatcttctcaatacaactaaattgagcgaggagcttttctaccaaatacttatctatgattttgcaaacttcggggtattacgtctcagtgagcccgcacccttgtttgatctggcaatgctggctctcgatagtccagaatccgggtggactgaggaggatggaccaaaggaggggttggcagagtatattgtggaattcctgaagaagaaggcagaaatgctagctgactacttcagtctagagatcgacgaagagggaaatttaattggcctccccctcttaattgacaattacgtccctcccctggaggggctccctattttcatcctgcgactcgccactgaggttaactgggacgaggagaaagaatgcttcgagtctctgagcaaagaatgtgctatgttttactctattcgcaaacagtacatctccgaggaatcaacactcagcgggcaacagtctgaggtgcctggttctatccccaacagctggaagtggactgtggaacacatcgtgtataaggcattgaggagtcacatcctcccaccaaagcacttcactgaagacggtaacattttgcagctcgccaacctgccagatctctataaagtctttgaacggtgttag

SEQ ID NO: 115856 - DNA, 1884 bp, synthetic construct
  misc_feature 1..1884: note = Description of Artificial Sequence: Synthetic coding sequence
  source 1..1884: mol_type = other DNA
atggctttcgggggtggattggaactggcgcttggttgccactaccgaatcgcacatgccgaagcccaggtcggcctgccggaggtgaccctcggtctcctgcccggcgctagagggactcagctgctcccccggctcacaggcgtccccgcggccctcgatctgatcacctctgggcgaagaattctggctgacgaggccctcaagttagggattcttgacaaggttgtcaatagcgacccagttgaggaggcaatccggtttgctcagcgggtttccgaccagccattggaaagccgccggttatgtaacaaacccatccaatctctgcctaacatggattctatcttctctgaagcactgttgaagatgcgcagacagcatcctggctgccttgcacaggaggcctgcgtgagagcagtacaagccgccgtccagtatccatacgaggtcggaatcaagaaagaggaggaactgtttttgtacctcctgcagtccggccaggcacgagcccttcagtacgcgttctttgcagaaaggaaagctaataagtggtcaacaccgtccggggcgtcatggaagaccgctagtgctcgacccgtgagttctgttggggtagttggcctgggcaccatgggaagagggatcgtgatatcatttgctagagccagaattcccgtcatcgctgtggactccgataaaaaccagctcgccacggccaacaagatgataacttcagttctggagaaagaagcatctaagatgcagcagtctggtcacccctggagcgggcccaagccccgattaacttctagtgtgaaggagttggggggagtcgatctagtaattgaggctgttttcgaggaaatgtctctgaagaagcaagtctttgccgagctgtctgccgtctgcaaaccagaggcatttctctgtacaaatactagtgctttagatgttgacgaaatcgcctctagcacagatcgaccccacttggtaatcgggacacactttttctcaccggcacacgtgatgaagctcttagaagttatccctagtcagtactcctcaccaaccaccatcgcaactgtgatgaatctctctaagaagattaagaagatcggtgttgtggttggtaactgtttcggctttgttggaaaccgaatgctgaacccatattacaatcaagcttactttctgctggaagagggctccaagcccgaggaggtggatcaggtgctcgaagaattcggttttaaaatgggtccattccgggtgagcgacctggcgggcctagatgtggggtggaagtcacggaagggtcaaggactgaccgggccaactctgctcccggggacccctgcccgcaaacggggtaatcggcgctattgcccaatccctgacgttctgtgcgaactaggcagattcggccagaaaactgggaagggctggtaccaatacgacaaacccctgggacgcattcacaagcctgacccctggctgtctaaattcttgtctcgctatcggaaaacccatcatatagagcctcggacaatatctcaagacgaaatcttggagagatgcctctacagcctgatcaatgaagcttttcgcatcctcggcgagggaattgcagctagtcccgaacatatcgatgttgtctatcttcatggctatgggtggccccggcacaagggtggcccaatgttctatgcaagcacggtggggctccctaccgtgctggagaagcttcaaaagtattaccgccaaaaccccgacatcccacaacttgagcctagcgattatctaaagaagcttgcttcacagggcaaccctccattgaaggagtggcagtctcttgctggctcaccttcatcaaaactgtag

SEQ ID NO: 115857 - DNA, 1464 bp, synthetic construct
  misc_feature 1..1464: note = Description of Artificial Sequence: Synthetic coding sequence
  source 1..1464: mol_type = other DNA
atggcagaatacacaagacttcataatgccttggctctgattcgccttcgcaaccccccggtgaacgctatcagtacgaccctgctaagggacatcaaagaggggctccagaaagcggtaatagaccacacaatcaaggccatcgtgatctgcggggccgaaggaaagttctctgctggggcagacatcaggggcttctccgcccccagaacatttggtctcacattgggccatgtggtcgatgagattcagcggaacgagaaacccgtcgtcgccgccattcaaggcatggcctttgggggggggctcgagctggcgttaggatgtcactacagaatcgctcatgcggaggcccaagttggactgccggaagtgacgttgggactgctgcccggcgcccggggcactcagctcctgcccagactgaccggggtgcctgctgccttagacctgatcacttcaggtcggcggatcctggctgatgaggccctcaaactcggaatcctcgacaaagtggtgaacagtgacccagttgaggaggcaattagatttgctcagcgtgtgtctgaccagccccttgagagcaggaggctgtgtaacaaacccatccagtccttgcccaatatggatagcatctttagcgaagcattgctgaagatgaggagacaacatcctggctgtctagcccaggaggcttgtgtaagggccgtgcaagccgcagttcagtatccctacgaggtcggaatcaagaaagaagaggaactcttcctgtacttactgcagagtggtcaggctcgagctctacagtatgccttctttgccgagcgtaaggcaaataagtggagcactccctcgggagccagctggaaaacagcctctgcgcgcccagtctcttcagtgggagtcgtggggctgggaacaatggggagaggcatcgtcatttcgttcgcacgcgcccgcattcctgtgattgccgtggacagcgacaaaaatcagttagctaccgcaaacaagatgatcaccagtgtcttggaaaaggaagcctcaaagatgcaacagtctggacacccttggagcgggccaaagccccgcctgactagcagcgtaaaagaattaggaggggtcgacctagtgattgaagccgtgtttgaagagatgtcacttaaaaagcaggtttttgccgagctcagtgccgtgtgtaaaccggaggccttcctgtgcacaaatacgtctgctttagatgtggatgagattgcctcgagtacagacagacctcacctggtgatcgggacccacttcttctcaccggctcacgtgatgaagctcctcgaagttattccatctcagtattcttcaccaaccaccatagcaaccgtcatgaatttatcgaagaagattaagaaaatcggtgtggtggtggggaactatagcgtttcaaaaaaaaagaaaaagaagaaaaagtag

SEQ ID NO: 115858 - DNA, 6102 bp, synthetic construct
  misc_feature 1..6102: note = Description of Artificial Sequence: Synthetic coding sequence
  source 1..6102: mol_type = other DNA
atgttcaagggcctgtctaagggatcacagggcaaaggctctccaaagggctccccagctaaaggcagccccaaaggcagccccagtcggcattcccgtgccgccacacaggagctggcgctgctgatttcaagaatgcaagccaacgccgatcaggtggaacgggacattctggagactcagaaacgtttacagcaggaccgtctgaattctgaacagtcacaggctctccagcaccagcaggaaacaggtcggtccctgaaagaggccgaagtccttctcaaagacctgtttctcgacgtcgataaggcacgtagactaaagcatccacaagccgaagagatagagaaggatataaaacagctacacgaacgggtcactcaggagtgtgcggaataccgcgccctttatgagaaaatggtgttgccacctgacgtcggacccagagtcgactgggctcgggtcctcgagcaaaagcagaaacaggtgtgcgcaggacagtacggccccggcatggccgagttagagcagcagatcgccgagcacaacatcctccagaaggagatcgatgcatatggacagcagttgcgatcattggtgggcccagatgccgccactatccggtcgcagtatcgggatctgcttaaggccgccagttggcgtggacagtctttgggcagcctgtatacacatcttcaggggtgtactcgacaactgtcagccctggcagagcagcagagacggattttacaacaggattggtccgacctgatggcagaccctgcgggggttagacgcgaatatgaacacttcaagcaacatgagttgctgtctcaagaacagagtgtgaaccaactggaggacgatggcgagagaatggtggaactgcgccatcccgccgttggcccaattcaggcccatcaggaagcattgaaaatggaatggcaaaacttcttgaatctttgcatttgccaggaaactcagctacagcacgtcgaagactaccgccggtttcaggaagaagctgacagcgtgtcacaaacactggccaaactcaactccaatctcgatgcaaaatacagtcccgctcccggcggtccccctggcgcgccaactgagttactgcaacaactcgaagctgaggagaagagactggccgtgaccgagagagcaacaggggaccttcagcgaaggtctagggatgttgccccgctgccacagcgccgtaatccaccacagcaaccacttcacgtagattctatttgcgattgggactccggcgaggtccagctgttacagggcgagagatacaaactagtagataatacagacccacacgcctgggtggtgcagggtccaggcggagagactaagagggcgcctgccgcctgtttctgtattccagctcccgatccagacgctgtggcaagagcgtccagactggcaagtgagcttcaggccctgaagcagaagctggctactgtgcaaagtaggctgaaggcgtccgccgtggaaagtctgcggccttcccagcaggccccgtctggcagtgatctggcaaaccctcaggcccagaaattgctgacccagatgactaggctcgacggtgacttaggccagatcgaaaggcaagtcctggcctgggcccgggctcctctgtctcggccgactcctttggaggatctggaagggagaatccactctcatgaaggaactgcccaaaggcttcagagcctcgggacagagaaggagaccgctcaaaaagagtgtgaagcttttttaagcaccaggcctgtgggaccagcagctctccagctgccagtggcactgaatagcgtgaaaaacaaattctcagacgtccaggttctttgctccctttatggtgagaaggctaaagctgccttggaccttgaaagacagatacaggatgccgatagagtgatcagaggcttcgaagcgaccttggtgcaggaggcacccattcccgccgagcctggcgccctacaggagcgcgtgagcgagctccagcggcaaaggcgcgagctgctcgaacagcagacttgcgtattgcgcctccacagagctcttaaggccagcgagcacgcctgtgccgccctgcaaaacaacttccaggagttttgtcaggatttaccccgccaacagcgccaagtgcgcgccctcaccgaccgctatcatgcagtgggtgaccagttagacctgcgagagaaggtggtccaagacgctgctctgacctaccagcagtttaaaaattgtaaggataatctctcttcatggctggagcacctgccccgctcccaggtgcggccatctgatggcccctctcagattgcttacaaattacaggcacagaaacgactgactcaagaaatccagagcagggaaagggaccgggccacagcttctcatttgtctcaggccctgcaggcagcactccaggattatgagctccaggccgacacctaccgttgttccctcgagcctactttggcggtatcagctccaaaacggcctagagtggcacctcttcaggaatctatccaagcccaagaaaaaaatctggctaaggcctacaccgaagtcgctgccgcccagcaacaactcctgcagcagctcgaattcgctagaaaaatgcttgaaaaaaaggagctctcagaggacatcaggcgcacacatgatgccaagcagggtagcgagagcccagcacaggcaggtagagagtcggaggcactgaaggcccagctcgaggaggagcggaaaagggtggccagagtccagcacgagctggaagcacagaggtcccaacttctccagctgaggacccaacgccccttggaacgtctcgaagaaaaggaggtggtcgaattttatagagatccccagcttgaaggctcgctctccagggtaaaggctcaagtggaggaagagggtaaaaggcgggccggcctgcaggctgacttagaagtggcagcacaaaaggtggtgcagctggaatctaagaggaaaaccatgcagcctcacttgctaactaaagaggtgacccaggtcgagagggaccccggtctggactctcaggctgcacagctgagaattcaaatacaacagttgcggggagaggatgctgtaatctcagcccggttggaggggctcaagaaagaactgcttgccctcgagaagagagaggtcgacgtcaaagagaaggtcgtcgtcaaggaggtagtcaaggtggaaaagaacctggagatggttaaggccgctcaggccctgcggctgcagatggaggaggatgccgctcgcaggaaacaggctgaggaggcagttgccaagctccaggcgcgaatcgaagatctagagcgcgccatttctagcgtggaacctaaggtcatcgttaaggaagtcaagaaggtggagcaagacccgggactcctgcaggagagctccagattgcgaagtctgttagaagaagaaagaacaaagaatgctactctagcccgtgagctgagtgacctccacagcaagtattccgttgttgagaagcagagacctaaggtccagttacaggaacgggtgcacgagatctttcaggtggatcctgaaaccgagcaagagattacgcggttgaaagccaagctacaggaaatggcagggaaacgctctggcgttgagaaagaggtagaaaagttactgcctgatctggaggttctgcgcgcacagaagcccactgtcgagtacaaggaagtcacgcaggaggtggtgcgccacgagagatcccctgaggtgctcagggaaatcgaccggcttaaagcccagctcaatgaactggtgaattcacacggccgaagccaggagcagcttatcaggttgcagggagagcgagatgagtggcgtcgcgagcgcgccaaggtagagacgaaaacagtgtcgaaagaagtcgtgcgccacgaaaaggatcccgtcttagaaaaagaggccgaacgccttcgacaggaagtgagggaagctgcccagaaacgtagggcagccgaagacgcagtctacgagcttcagagcaaaaggttgctgctcgaaaggagaaagcctgaagaaaaggtggttgtccaagaagtggtggttacacaaaaggatcctaagctgcgggaagaacactctaggctaagtggtagcctggacgaagaggtggggcgtaggcgccagctggagttggaggtccaacagctccgcgctggagtggaggaacaggaagggttactttcatttcaagaggacagaagcaagaaactggcggttgagagagaactaagacagctcaccctcagaatccaggaactcgagaagagaccccctacagtacaggaaaaaattataatggaagaagtggtcaaactggaaaaggaccccgatctcgaaaaatcaaccgaggctttgcggtgggatttagaccaagagaagacccaagtgactgaactaaacagagaatgtaaaaacctccaggtacaaatcgacgtcctccaaaaagccaaatcgcaggaaaaaaccatatataaggaagtgattcgggtccagaaagatcgagtcttagaggatgagcgtgcccgggtgtgggaaatgttgaaccgagaacgcactgcgcgccaagctcgggaggaggaggcacggaggttgcgcgaacgtatcgatagagctgaaacgctgggccggacctggtctagggaggagagcgagctacagcgggctcgggaccaagccgatcaggaatgcggcagactccagcaggaactccgggctttagaacgacagaagcagcagcaaaccctgcagttgcaagaggaaagtaaactgttatcccagaaaactgagtctgagaggcagaaagcggctcaaagagggcaagagctgtcaagacttgaggccgccatccttcgggaaaaggaccagatctacgagaaagagcgcacactgagagatcttcacgcaaaggtgtctcgggaggagctgtcacaggaaactcagacgcgggaaaccaacttaagcactaaaatcagtatattggaacctgagacaggcaaggatatgtccccctatgaagcctacaagagaggaattatcgataggggacaatatttacagctgcaggagctagagtgcgactgggaagaggtcactacatccggtccatgcggggaggaatctgtgctgctcgataggaaaagcggcaaacagtattccatcgaagccgccctcaggtgccggaggattagcaaggaggaatatcatctgtacaaagatggacacctaccaattagtgaattcgccttactggttgcaggcgaaacaaagccatcctcgtcactttctatcggaagcatcatttctaaaagccctctggcatccccagcccctcaatccacaagctttttcagcccttccttttcactgggacttggggatgattccttccctatcgccggcatttatgatacaacaaccgataataaatgctctattaagacagccgttgccaagaatatgctcgacccaattactggacagaaattactcgaggcccaggctgccaccggcggaatcgtggacctgctgtccagggaacgttattctgttcataaagctatggaacgcggccttatcgagaacacctccactcaacgtctactgaatgcgcaaaaggccttcactggcatagaggacccagtgactaaaaagcggctatccgtgggcgaggctgtacagaagggctggatgcccagagaatccgttctgccccatcttcaagtacagcacctgacaggcggtctaatcgatccaaaaaggacaggcaggatccctatacaacaagccttactgagcgggatgatctcagaagagcttgctcaactgctccaggacgagtcttcgtacgaaaaggacctaacagaccctatcagcaaagaaaggctgtcctataaagaggccatgggacgctgtcgcaaagatccccttagcggactgctgctgctccctgctgcacttgagggctacaggtgttatcgttccgcctcccctacagtccctagatcgctgaggtag

SEQ ID NO: 115859 - DNA, 2061 bp, synthetic construct
  misc_feature 1..2061: note = Description of Artificial Sequence: Synthetic coding sequence
  source 1..2061: mol_type = other DNA
atgcaattaggtgaacagctattagtgtcctctgtgaatctgcccggtgctcatttttacccactggaaagcgctcgcggagggagcggaggatcagcaggccatctgccctccgccgccccttccccccagaagctcgatctagataaggcttcaaaaaaatttagcggcagcctcagctgtgaagccgtgtctggcgagcctgcggccgcctctgctggcgcacctgccgctatgttgtccgatacggatgccggagatgcctttgccagcgccgcggcagttgcaaagccaggaccacccgacggccggaagggaagtccatgtggggaggaggaactcccctctgcagcggcagccgccgcggcagcagcggccgctgccgccgctactgcacggtatagcatggactcattatcatcagaacggtactacctgcaaagccctggcccacaaggcagtgagctcgctgctccttgtagcctgtttccgtaccaggccgccgccggggctccacacggccctgtgtatcccgctccgaacggagcacggtacccctatggaagtatgttgccccccggcggattccccgccgccgtatgcccccccggcagggcccagtttggccccggggccggcgctggcagcggcgccggtgggtcaagcggaggaggggggggacccggaacttaccagtacagtcagggagccccactgtacggaccgtacccgggcgctgctgcagccggctcctgcggggggcttggtggactgggagtccctgggtccggctttagggcacacgtctatttgtgcaacagaccactctggctaaagttccataggcatcagacggaaatgatcataaccaaacagggccggcggatgtttccttttctgagctttaacatcaacggcctgaatcctaccgcccattacaatgtctttgtggaggtggttcttgccgacccaaaccattggagattccagggtgggaaatgggtcacatgcggtaaagcggataacaacatgcagggtaataagatgtatgtgcaccccgaaagtcccaataccggttcccattggatgagacaggagattagtttcggcaaactgaagttaacaaacaacaaaggagcgaacaataacaacacccagatgattgtgttgcagtccttgcacaagtatcagcccaggctgcacatagtcgaggtgacagaggacggtgtagaagatctgaatgagcctagtaagacacaaacgttcacctttagcgagacacagttcatagctgtcactgcttaccagaacacagatataactcagctgaaaattgatcacaaccctttcgcaaagggattccgtgataactacgacagctcccaccagattgtgcccggcggccgctacggcgtgcagtcgttctttcctgagccctttgttaatacgctgccccaggcaaggtactacaatggcgagcggactgtaccccaaacaaacggactgctgtctccccaacaatcagaagaagtagcgaatcccccacagcgctggctggtgactcccgtacagcaacccgggaccaataagctagacatttcctcctacgagtcagagtacaccagctctactctgctgccatacgggatcaaaagcctgccccttcagacttcccatgcgttaggatattatccagatcccacattcccagccatggctggctggggtgggcgtggatcatatcaacggaagatggctgcgggtctgccttggaccagtcgcacctccccaacggtgttttcagaggaccaactgtcgaaggaaaaggtgaaagaggaaataggctcttcgtggattgagacacccccgagcattaagtcactcgatagcaacgatagcggtgtgtatacgtcagcctgtaaacgcagacgcctgagcccttctaatagttcaaacgaaaattcaccttcaatcaaatgtgaggacattaatgctgaggagtattcaaaggacacatcaaaaggcatggggggctactacgctttctacacgactccgtag

SEQ ID NO: 115860 - DNA, 2118 bp, synthetic construct
  misc_feature 1..2118: note = Description of Artificial Sequence: Synthetic coding sequence
  source 1..2118: mol_type = other DNA
atgcagttgggcgagcagctgctggtgtcttcagtgaatttgccaggggctcacttttacccactggagtctgctagaggaggatcaggaggctccgctggccatctgcccagcgcggctccctccccgcaaaaactcgacctcgataaagcctctaagaagttctcaggttctctgtcctgtgaagcagtctcaggcgagcccgccgctgcgtccgccggcgcccctgccgccatgctgtcggacacagatgccggagatgccttcgcaagtgccgccgcggtcgctaagcctgggcctcccgacggtaggaaaggaagtccttgtggcgaggaggaactgccttcagcggctgcagccgcagccgccgctgctgcggcagccgcagccactgcccgttattctatggacagcttgtcaagtgagcggtattacctgcaatcacctgggcctcagggatccgaactggctgccccctgtagtcttttcccatatcaggcagccgcaggtgcgcctcatggtcccgtatatcctgctcccaacggtgcacggtatccgtacggttcaatgctgcctccgggcgggttccctgccgccgtttgcccccccggacgagcccagttcgggccaggagctggcgccggctctggtgccggcggcagcagtggcggcggcggcgggccaggtacctaccagtacagccagggtgcccccctgtacggcccatatcctggagccgcagcggcaggctcatgcggggggttgggagggctcggcgttcctggtagcggtttccgcgcccatgtttacctgtgtaatcggcctctgtggcttaagttccaccggcaccagaccgagatgatcattactaagcagggtcgtcgcatgtttccattcctcagctttaatatcaatggtctcaaccctacagctcattataatgtgtttgtcgaagtcgttttagccgatccaaatcactggaggttccaggggggaaaatgggtgacctgtggaaaagccgataacaatatgcagggtaataagatgtacgtacaccctgaatcgcctaataccgggtcacactggatgcgccaggaaattagcttcggtaagctgaagctcacaaacaacaaaggagcaaacaataacaacacgcagatgatagtgctgcagtctctgcacaagtatcaacccagactgcacatcgtcgaagtcacagaagatggcgttgaggatctaaacgagccgagcaaaacacagacgttcaccttttcagaaacccaatttattgccgtgacagcttaccagaataccgacattactcagctgaagattgaccacaacccctttgccaagggatttagggacaattatgacagcatgtacactgccagcgaaaatgaccgcctgacaccttcacctacagacagcccacgatcccaccagatcgtccctggcggccgctacggtgttcaatcatttttcccggagcctttcgtcaacacactcccccaagccagatattataacggggaacggacagtcccacagaccaacgggttactgagcccccaacagtcggaggaagtggccaatcccccccagagatggttggtaacacctgtacaacagcctggcactaacaagctcgatattagctcctacgagtcagagtatacaagtagcacactgctgccctatggaatcaagtccctgccactgcaaacctcccatgcactgggatactaccctgacccgacttttcccgcaatggcagggtggggaggacgcggaagctatcagaggaaaatggccgctggtctcccctggacctcccgcacctccccaacagtgttctctgaggaccagctctctaaagaaaaggtaaaagaagaaatcggctcaagttggatcgagacgcctcctagtatcaagagcttggactcgaatgattctggagtgtacacctccgcatgtaagcgcaggcgtctgtcaccgtctaacagctccaatgagaattctccctcaatcaagtgcgaggatatcaacgccgaggagtactccaaagacacatcaaagggaatgggaggctactatgccttctatactacaccctag

SEQ ID NO: 115861 - DNA, 1713 bp, synthetic construct
  misc_feature 1..1713: note = Description of Artificial Sequence: Synthetic coding sequence
  source 1..1713: mol_type = other DNA
atggactccctgtcctccgagcgctactatctccagagccctggcccccagggctcagaacttgctgctccttgttcactctttccttatcaggctgcagctggggccccacacggccccgtttaccccgcacctaacggcgccaggtacccctacggcagcatgctccccccagggggcttccccgccgccgtctgcccccctggccgcgcacagtttggaccaggcgccggtgccggctcaggggcaggaggcagcagtgggggaggcggaggccccggcacatatcagtacagtcagggcgctcctttgtatggaccataccctggggccgcggcggcagggtcctgcggtggtttaggcgggctcggtgtgcccggtagtggattccgcgcgcacgtctacctgtgtaatagaccactgtggttaaaatttcaccggcaccagaccgagatgatcattactaagcaaggtcggagaatgttcccctttctgtcctttaatattaatggactgaaccccaccgcccattacaacgttttcgtcgaagtggtgctggcagatccaaatcactggcggttccagggcgggaagtgggtgacatgtggaaaagcagacaataacatgcaaggcaataaaatgtatgtgcatccagagtctccgaatacaggatcccactggatgcggcaggaaatttcctttggcaaattaaaactgacaaacaacaaaggtgcgaacaataacaatacacagatgatagtgttgcagtcactgcataaataccaaccacggctgcatattgtggaggtgactgaggacggcgtagaggaccttaacgaaccatccaaaacccagacctttacatttagtgagacccaatttattgccgtcactgcctatcagaataccgacattactcagttaaaaatagaccacaacccattcgcaaagggctttcgtgacaactacgacagcatgtataccgccagtgaaaacgaccgactgacaccatcaccgacagattcccctaggagccaccagatcgtgcctggcggccggtatggagtgcaaagcttcttcccagaacccttcgtgaacactctgccgcaagccagatattacaacggcgaaagaaccgtgccccagacaaatggcttactcagcccacagcagtccgaggaggtcgccaaccctccccaacgctggctggtcactccagtgcagcagccaggaaccaataaactggatattagtagttacgagtcagagtatacctcttcaactctgctcccctatgggatcaagtctctcccccttcaaaccagccatgcgttgggctactaccccgacccgactttccctgccatggcagggtgggggggtcggggctcatatcagcggaaaatggctgccgggctaccttggacctcacggacaagccccactgtgttttctgaagatcagctgagtaaagagaaagtgaaggaggagattgggtcgagctggattgaaacacctccgagcatcaagtctctggattcgaacgacagcggtgtctacacctcggcctgtaagaggcggcggttatcgccctccaattcctctaatgagaacagcccatctattaaatgtgaggatattaatgcagaagagtactccaaggacacatccaaggggatggggggctattacgcgttttacacaactccttag

SEQ ID NO: 115862 - DNA, 1233 bp, synthetic construct
  misc_feature 1..1233: note = Description of Artificial Sequence: Synthetic coding sequence
  source 1..1233: mol_type = other DNA
atgttccccttcctttcattcaacatcaatggtctgaatccgaccgcacattacaacgtgtttgtggaggtcgtactggccgatcctaaccattggaggttccaggggggtaaatgggtcacatgcggaaaggccgacaacaacatgcaagggaacaaaatgtatgtgcatcccgagagccctaacaccggcagtcactggatgaggcaggagataagttttggcaaacttaaactgactaataataagggcgccaataataacaacacccagatgattgtgctgcagtctttacataaatatcagccccggttacatatagtagaggtgaccgaagacggggtggaagacctgaacgaaccttctaaaacacagaccttcacgttttctgagactcaatttattgctgtcaccgcttatcaaaacacagacattacacagcttaaaatagaccataatcccttcgcaaagggcttccgggataattacgactcaatgtataccgcttccgaaaacgacaggctgacgccatcccccaccgacagtcctcgcagtcatcagatcgtgcctggtggaagatatggggtccagtcattctttccagagccctttgtgaacacactgccacaggcacgatattacaatggagaacgcacggtgccgcagacaaacggactcctcagcccccagcagtctgaggaggtggctaaccctcctcaaagatggctggtcacacctgtgcagcagccggggacgaataaacttgatatctccagctatgaatccgaatatacgtcttccaccctgctgccttatggcatcaagagcttgcctctgcagacttctcacgctcttgggtattaccccgacccaactttccccgctatggcagggtggggaggcagagggagttaccaaaggaagatggccgccgggttgccttggaccagtcgtacatcccccaccgtcttcagtgaggatcagttgagcaaagagaaggtgaaggaggagatcggtagttcttggattgagacacccccgtctatcaagagcctcgacagtaatgactctggggtgtataccagcgcttgcaaacgccgccgtctctccccctccaactcaagtaacgagaattccccctccattaagtgtgaagacattaatgccgaggagtactcaaaggatacaagtaaaggcatgggcggctattacgcattctatacaacaccgtag

SEQ ID NO: 115863 - DNA, 1269 bp, synthetic construct
  misc_feature 1..1269: note = Description of Artificial Sequence: Synthetic coding sequence
  source 1..1269: mol_type = other DNA
atgggtcaagctggctgtaaaggtctgtgcctgtccctattcgactacaaaactgagaaatacgtgatcgctaaaaataaaaaggtgggcctgctttatcgcctgttacaggctagcatactcgcctacctggtagtgtgggtttttttgataaaaaaaggctatcaggatgtcgacaccagccttcagtccgccgtgatcacaaaagtgaaaggagtcgccttcaccaatactagcgacttgggacaaagaatctgggatgtggcagactacgtcataccagctcagggggagaatgtgttcttcgtggtgacgaatctgatcgtgaccccaaatcagcggcagaacgtgtgcgctgaaaacgaaggcattccggacggcgcatgcagcaaagatagcgactgccacgccggagaagcagttacagctggcaacggggtaaaaaccgggcggtgtctgcggcgtgagaacttggccaggggtacgtgtgaaatcttcgcctggtgccctctggagacatccagtcgccccgaggaaccattcttaaaggaggctgaagactttactattttcatcaaaaatcatattcgcttccccaagtttaactttagcaaatccaatgtgatggacgtgaaggaccgttctttcctgaagagttgccattttggacctaagaaccattactgtcctatttttaggttgggctcagtgatcagatgggcggggtctgattttcaagacatagccctcgaagggggtgtcattggtatcaatatcgaatggaattgtgacctggataaggccgccagcgaatgtcacccacactactctttctcgcgcttggacaataaactctctaagagcgtgtcctccggttataatttcaggttcgcacgctattaccgggacgcagctggcgtggaattccgtacacttatgaaggcctatggaattagatttgatgtgatggtgaatggaaaaggagcattcttctgtgatttggtgttgatatatctcataaaaaaacgcgaattctatagagataagaagtatgaggaggtgcggggcttagaagacagcagccaagaggcagaagacgaagcctcaggattgggtctgtctgaacaactgacaagcggccctggactacttggtatgcccgaacagcaggaactccaagaacctcccgaggcgaagcgcggctcttcgtcacagaaaggcaacgggagtgtgtgcccacagttgttggagccacaccgctctacgtag

SEQ ID NO: 115864 - DNA, 564 bp, synthetic construct
  misc_feature 1..564: note = Description of Artificial Sequence: Synthetic coding sequence
  source 1..564: mol_type = other DNA
atgtctgagatggctgagctctcggagctttatgaggaatcttctgacctgcagatggacgtgatgcctggcgaaggagacctgcctcagatggaggtcggttccggaagccgcgaactttcactcaggccatctcgtagtggagctcagcaactcgaagaggagggaccaatggaggaggaggaggcccagcctatggctgcaccagaaggtaaaaggtccctcgcaaatggcccgaacgccggagaacagcctggccaggtggccggggccgatttcgagagcgaagacgaaggcgaggaatttgatgattgggaagatgactatgactatcctgaggaggaacagctgtccggtgcaggctaccgagttagcgcagctttggaggaggccgataaaatgtttctcaggaccagggagcctgctctcgatggggggtttcagatgcactacgagaagacacccttcgatcagttggcttttatcgaggaactcttcagtctgatggttgttaatagactgactgaagagctgggctgcgatgagatcattgacagggaatag

SEQ ID NO: 115865 - DNA, 711 bp, synthetic construct
  misc_feature 1..711: note = Description of Artificial Sequence: Synthetic coding sequence
  source 1..711: mol_type = other DNA
atgtccaagctcccagctgatagcagtgtgccgcagacaggtgcggcgaacggcgaccgagacgtgccccaggccgaagtaggacgggggagacgcgagcccgcacccgcgcagcccgaagaggccggcgagggagcaatggcagccgctagaggcggaccagtgcctgcagcgagggaggggcggatggcagccgcccgggctgcccccgcagccgccgcaagaggggcccccgtcgcggcagcagccctggcaagagctgcggctgctgggcgggagagcccagcagcagctgcagcgcgggaggcaagaatggccgaggtggcacgactgctcggggagcccgtggacgaagaggggcctgaaggccggcctcgcagcagacacgggaatggtgggctggccgcactgccttacctacgcctgcggcacccactttctgttctggggataaattatcagcagttcctccgccactacctcgagaactacccaatagcccctggccggatccaggaattggaggagcgccggcgccggttcgtggaagcttgtagagctcgggaagcagccttcgatgccgagtatcaacggaatccgcatcgcgtcgacctggacattctgacattcactatcgctctgacggcctcagaagtcatcaatccactgattgaagagctgggctgtgacaaattcatcaatagagagtag

SEQ ID NO: 115866 - DNA, 564 bp, synthetic construct
  misc_feature 1..564: note = Description of Artificial Sequence: Synthetic coding sequence
  source 1..564: mol_type = other DNA
atgtccaagctgcccgcagactccagcgtgcctcagacaggcgctgcaaatggggacagggacgtcccacaggctgaggtcgggcgaggccgcagggaaccagccccagcgcagcccgaggaagctggcgagagtcccgccgccgccgcagccagagaagccagaatggccgaggtcgcccggctgctgggagagccggtggacgaagaggggcccgaaggcagaccacggagtaggcacgggaacggcggcctcgccgccctgccctacctgcggctgcgccacccgctatctgtcctcggcattaattatcagcagttcttaagacactaccttgaaaactatcccattgcacccgggagaatccaagagcttgaggaaaggagaagacgctttgtggaggcttgtagagccagggaggcagcattcgatgctgagtatcagcgtaatccccaccgcgtggatctggatatattaaccttcacaatagctttgaccgcttcagaagtcatcaatccattgatcgaggaactaggctgtgacaagttcatcaaccgcgagtag

SEQ ID NO: 115867 - DNA, 1002 bp, synthetic construct
  misc_feature 1..1002: note = Description of Artificial Sequence: Synthetic coding sequence
  source 1..1002: mol_type = other DNA
atgaaaatggacgtctccgtcagagcggctggatgttctgacgatctcagcagcggagaggccgacgtggacccgaaactgctcgagctgaccgccgacgaggagaagtgtcggtccatccgaaggcagtatcgccagttaatgtactgcgtgagacagaatagggaggacattgtaagcagtgcgaacaattctctaacggaagccctggaggaagccaatgtcctgttcgacggagtctcaagaactcgggaggccgcccttgatgccagattcttggtcatggcatcggacctggggaaagagaaagccaaacaattaaactccgacatgaacttttttaaccagctcgctttttgcgactttctcttcctctttgttggtctcaattggatggagggagaccccgataagctgagtgattgtgacgactctatcgcactctccttctggaaggccattgaaaaagaagccacatcttggatggtcaaggctgagaccttccactttgtgttcggcagctttaagctggaaaggtccgcacccaaaccaagactggaacatcaaaaaaaggtacgcaaaatggaggagaacgggaacatgccaacgaagctccagaagcttgacttgtcatcatatccggaagcaactgagaagaatgtggagaggatcctgggacttctgcagacatattttcggaagtacccagatactccagttagctattttgagttcgtcattgatccaaacagcttttctagaaccgtcgagaatattttctatgtgtccttcatcgtccgggatggttttgcacgcatcagactcgatgaagaccggctgcccatcctggaacccatgaatgtgaaccagatgggggaagggaatgactcttcctgtcacggccgaaagcagggcgtcatctcgctgaccctccaggaatggaaaaacattgtggccgctttcgagatctcagaggccatgatcacctactccagttattag

SEQ ID NO: 115868 - DNA, 2931 bp, synthetic construct
  misc_feature 1..2931: note = Description of Artificial Sequence: Synthetic coding sequence
  source 1..2931: mol_type = other DNA
atggagagaaggtggccactgggtctgggattagtgcttctcctgtgtgcacctcttccgccaggagcgcgagctaaggaggtcacccttatggatacctctaaagcccagggagaactggggtggctcctggaccctcctaaggatgggtggtcggagcagcagcagatcctgaacggcacaccactgtacatgtaccaggactgtccaatgcagggccgcagggacactgatcactggctcaggagcaactggatctatagaggagaagaggctagtagagtgcatgtggaactgcagttcactgtgcgcgattgtaaatcttttcccgggggggctggtcccttaggttgtaaggaaacctttaatttgttgtacatggaaagtgaccaggatgtgggtatccagctgcggaggcccctgttccaaaaggttaccactgtggctgccgatcaaagcttcactattagggacctggtctctggctctgtgaaattaaatgtcgaaagatgcagcctgggccggctcacccgacggggcttgtaccttgcgtttcataatcccggcgcctgcgttgctctagtgtcagtgcgggtcttctatcagcggtgtccagagactctaaatggactcgcgcagtttcctgatactctcccaggacccgccgggctggtggaagtagctggtacatgtctgccccacgctagagctagtccaaggccctcaggcgcgccgcggatgcattgttctcccgacggcgaatggcttgtgccagtagggcgatgccactgcgagccgggatacgaggagggcgggtcaggcgaggcctgcgttgcatgcccatcgggatcttatagaatggatatggatactccgcattgtttaacctgtcctcagcagtctactgctgaatccgagggtgcaaccatatgcacctgcgagagcggccactatagagcacctggggagggaccccaggtggcctgtaccgggcctccttctgcccctcgcaacctctctttcagcgcatccggtacccagctctccctaaggtgggaacccccagccgataccggaggccgacaagatgtgagatactctgtacgatgctcccagtgccagggcacagcacaggatggcggcccatgtcagccatgcggtgtgggcgttcactttagccccggggccaggggactgactactcccgctgtgcacgtgaacggccttgaaccctacgccaactacaccttcaacgtcgaggcccagaacggcgtgagcggtttaggttccagcggacatgccagcaccagtgtcagtatctctatgggacacgccgagtcactcagtggactcagcctgcgccttgtcaaaaaagagcctaggcaattagaactgacatgggccggatctcggcctcggtcgccgggggctaatctcacttatgaactccacgtgctgaatcaggacgaggagaggtaccaaatggttctggaaccgagagtgttgttaacggaactccagcctgacacaacatatattgtgagagtaagaatgctgacgccactgggtcccggcccgttcagtccggatcacgaattccgcacttctccaccagtcagcagaggcttgaccggaggcgagatagtcgcagtcatattcggactgttgctgggtgcagctctccttctgggtatcctggtgtttcgatctcgcagggcccagcgacagcgtcagcagcgacaacgcgatcgggccacagacgtggatcgggaggacaagctgtggttaaagccctacgtggaccttcaggcatacgaagatccagcccagggtgctctagacttcactcgcgaacttgatcccgcgtggcttatggtggatacggtcatcggtgaaggagaattcggagaggtgtataggggcacgttaagacttcctagtcaagactgcaagaccgtcgctattaagaccctgaaagatacttcccccgggggccagtggtggaacttcctcagggaggcaacaatcatgggacagttttcacacccccatattctacatctggagggagttgttacaaagcgcaaaccaatcatgatcatcaccgaatttatggagaatggggccctggacgcttttttgcgagaaagagaggaccaactagtacccggacaactggttgcaatgttgcaaggtatcgcttctgggatgaattacctgagcaatcacaattacgtacatcgagatctggccgcaaggaacatcctcgtaaatcagaatctgtgctgcaaagtctctgattttggtctgacccgccttctcgatgacttcgacggcacgtacgaaacccagggcggcaagattccaatcagatggacggctcccgaagccattgcccacaggatctttacaacagcttccgatgtatggtcctttggaatcgtaatgtgggaggtactgtcctttggcgacaagccttatggcgagatgagcaaccaagaggtgatgaaaagtattgaggacgggtacaggttgccaccaccggtggactgcccagctcccctttatgaacttatgaaaaattgctgggcctatgatagagcccggagaccacactttcagaagctgcaggcccacctcgaacagcttctggccaacccgcattccctcagaacaatcgccaattttgatcccagaatgactctgaggctgccatctttgtctggatcagacggtataccatatcgtactgtctccgaatggctggagtcaattcggatgaaacgttacattttgcattttcactctgccggcctggatacaatggagtgcgtgcttgaacttaccgccgaggatttgacgcagatgggcatcacattgccagggcatcagaaaaggatcctgtgttcaattcaggggttcaaagattag

SEQ ID NO: 115869 - DNA, 888 bp, synthetic construct
  misc_feature 1..888: note = Description of Artificial Sequence: Synthetic coding sequence
  source 1..888: mol_type = other DNA
atggagacatgcgcaggaccacaccctctgagactctttttgtgccgaatgcaactctgtctggctctgttgcttggcccatggaggcccgggacagcagaggaagtcatcctgttggactccaaggccagccaggccgaactcggttggacagccttgcctagcaacgggtgggaggagatctccggagtcgatgaacacgatcggcctatccgaacatatcaggtgtgtaatgtgttggaacctaaccaggataactggcttcaaaccggctggattagccggggacgcggacagagaatatttgtggagcttcagttcacccttagggattgtagcagcatccctggcgccgccgggacatgcaaggaaaccttcaatgtttattacctggaaactgaggcggatcttggccgcggaagaccgcggcttgggggctccaggcctaggaaaatagacaccattgccgcagatgagtctttcacacaaggagatctcggcgaacgcaagatgaaactgaatactgaagtgagggagattggacccttgtccagaagggggttccacctggcgttccaggacgtgggagcttgcgtagcgctggtgtcagtgagggtgtattataaacagtgtcgagccaccgttcgcggtctcgccacattccccgccaccgcggccgaatctgccttttctacacttgtggaagtggctggcacttgcgtcgcacacagcgagggggagcccggcagccccccgaggatgcactgtggcgcagacggggaatggctggtccctgtagggcgctgcagctgtagcgccggcttccaggagagaggagatttctgcgagggcattcagttggccggcgggcggggggtgggagtgtag

SEQ ID NO: 115870 - DNA, 1632 bp, synthetic construct
  misc_feature 1..1632: note = Description of Artificial Sequence: Synthetic coding sequence
  source 1..1632: mol_type = other DNA
atggttaaaacaggtgctccgacggtgaccgtgaccaatcttaaaccagcaacaagatacgttttccaaatccgcgccgcatctccaggacccagctgggaagctcagagttttaacccaagcatcgaggtacagaccttgggcgaagctgccagcggctcacgggaccagtctccggcgattgtcgtgaccgtcgtgaccatcagcgcgctgctggtcttaggatcagtgatgagcgtcctggctatctggcgaagaccttgctcttacggtaagggcgggggggatgcccatgacgaggaagagttgtacttccacttcaaagtcccaacacgacgtaccttcctggacccccagagttgtggtgacctgctccaggctgtccatcttttcgccaaagaactggacgcgaagtcagttacacttgagcgatcacttggaggcggcaggttcggggaattatgctgtggatgtctccagttacccggacgtcaagagttactggtggcagtgcacatgttaagggactctgcttcggacagtcagcgcttgggttttcttgctgaagctctgactttaggtcagttcgaccacagtcacatagtgcgcctcgagggcgtagtcaccagaggatccacccttatgattgtcaccgagtacatgagccatggggctctggatggctttctgcgaaggcacgaagggcagctcgttgctggacaacttatgggtctgctacccgggttggccagtgctatgaaatacctatctgagatggggtacgtgcacaggggcttagctgcacgacacgtgctcgtgtctagtgacctggtctgtaagatttcaggattcggccgcggcccccgagacaggtctgaggcggtgtatacgaccatgtcaggccggtcccccgccctgtgggctgcacccgaaacgttacaattcggtcatttttcatctgcgagcgacgtctggagcttcggaattatcatgtgggaggtgatggcttttggggagcggccctattgggatatgtccggtcaagacgtgatcaaagcggtggaagatgggtttagactgcccccccctcgcaattgtccaaatctgttacacaggctgatgctagattgttggcaaaaggatcccggagagcgaccacgattcagccaaattcattcaatactgtctaagatggtccaggacccagaacctcctaaatgcgctttaacaacctgtccaaggccaccaactcctctagcagaccgggcattcagcacatttcccagctttggatcagtgggggcctggctcgaagctctggatctgtgcaggtacaaggattcatttgctgcggctggttacggcagtctggaggccgttgccgagatgaccgctcaggatctcgtgagcctgggtatatcacttgccgagcatagggaggccctgttgtccggcattagtgctcttcaagctagagtcttacagcttcagggacagggtgtgcaggataataagaacctctccgttatatggtgtcttttcgagtggcagcttcttgaccactgcatcgccggggtggaaggccttctgcccccaagctcgcgtacaggagtgagccggatctgcgtttag

SEQ ID NO: 115871 - DNA, 3027 bp, synthetic construct
  misc_feature 1..3027: note = Description of Artificial Sequence: Synthetic coding sequence
  source 1..3027: mol_type = other DNA
atggagacctgtgcagggccccacccattaaggctatttctgtgtagaatgcagctctgcctggccctactcctgggaccttggcggcccggaaccgcggaagaagtcattctgctggactcaaaggcaagtcaggccgagcttgggtggacagcgttgcccagcaacggctgggaggagattagtggcgtggacgagcatgatcggccaatcagaacctaccaggtttgtaatgtgctcgaacctaaccaggacaattggcttcaaactggctggatttccagggggagaggccagaggatattcgtggaactccaattcacattaagagattgttcgtcaatacctggagcggcaggcacgtgcaaagaaactttcaacgtctattatttggagactgaagcggatctgggaaggggaagacctagattaggcgggtctcgcccacgaaagatcgacactattgcagccgacgagagtttcacgcagggggatctgggggagaggaagatgaaattgaatactgaggtcagggaaattggtccactgtcacggcggggattccacctggcctttcaggacgtcggtgcttgcgtcgcactcgtgtcggttagagtgtactataaacaatgccgcgctacagtccgcggcctcgctacgttccccgccacagcagcggaatcagccttttctacattggtggaggtagcaggaacctgcgtggctcacagcgaaggggagccgggttcccccccacgtatgcactgcggcgcggatggcgaatggctggtcccggtcggaagatgcagttgtagcgcaggttttcaggaacgcggggatttctgtgaggcatgtccgcctggcttctacaaggtcagcccacgacgccccttgtgtagcccttgtccagagcatagtcgggcgttggaaaatgctagcaccttttgtgtgtgccaagactcgtatgctcggagtccgacagatccgccaagcgcctcctgcacccggcctccatctgccccaagggacttacagtactctttatcacgctctcctctggtgctgcgcctgcggtggttgcctcccgccgacagtggcggaaggtcagacgtaacgtattcactgctgtgtctgagatgcggtcgagaaggtcctgccggggcctgtgagccatgtggccctagggtggcttttctcccccgacaggctggacttcgcgaacgcgctgctaccttgctgcatctgcgccccggcgcccggtatactgtaagggtcgccgcgctcaatggcgtgtctggaccagctgctgccgcaggcacaacctacgctcaagtgacagtgtcgactggacctggggccccatgggaagaggatgagatcaggcgcgaccgggttgaaccccaatcagtctctctatcttggagggaacccatccctgccggagccccgggggcaaatgataccgaatatgagatccgttattacgaaaagggccagtcagagcagacatactcaatggtcaagacgggagcccccaccgtcactgtgaccaaccttaaaccggcgacacgatatgtctttcagataagggcagcttcgcctggaccttcttgggaagcacaatccttcaacccaagcatagaagtgcagactttgggcgaggccgcctccggaagcagagatcagtcccccgccattgtcgtgaccgtggtcactatttcagccctcctggtcctcgggtcagtaatgtccgttcttgccatctggaggaggccctgtagctacggcaaaggcgggggggatgcccatgatgaagaggaactgtattttcactttaaggtgcccacgcggcgtacgttcctggatccacagagttgcggtgatttgctccaggcagtacacctgtttgcgaaagagctcgatgccaagagtgtgacgttagagcgaagcttgggaggcggaaggttcggcgagctgtgctgtggatgtctgcaattgcctggccgtcaggaattacttgtagctgtgcacatgttgcgcgattctgccagtgattcccagcgattaggttttcttgccgaagccctgactctggggcagttcgaccattcccatatcgtgcgcctggagggagtggttacaagagggtcaactctgatgatcgtcaccgagtacatgtcgcacggagctttggatggatttcttcggcgccacgagggacagctcgtagccgggcaactcatgggactgttacccggacttgcctcggccatgaaatacttgagtgaaatggggtatgtgcacaggggcttagccgcccgacacgtgcttgtgagctccgatctggtttgcaaaatatcggggttcggacgcgggccaagggacagatctgaagccgtctacaccacgatgtctggtcgatctccggccctgtgggcagcaccagagacgcttcagttcgggcacttctccagcgcctccgacgtgtggagcttcggtattataatgtgggaagtgatggctttcggagaacgaccctactgggatatgagcggacaggatgttataaaggcggtcgaagacgggttcaggctcccaccacctcgtaactgccccaacctgcttcataggctgatgctggactgttggcagaaggaccccggcgaacggccccgtttttcgcagatccattcaattctatctaaaatggttcaggaccccgagccacccaaatgtgccctcacaacatgtccacggccaccaacccccttagcggaccgggccttcagtaccttccccagcttcggcagcgtgggtgcttggttggaagctctcgatctttgcaggtacaaagatagttttgcggctgcaggatacgggagcttggaagcagttgccgagatgactgcacaggatctcgtctccctggggataagccttgccgaacatagggaagcgttgctgtctggcatcagtgctctgcaagccagagttttgcagctgcagggccaaggtgtgcaagtgtag

SEQ ID NO: 115872 - DNA, 3045 bp, synthetic construct
  misc_feature 1..3045: note = Description of Artificial Sequence: Synthetic coding sequence
  source 1..3045: mol_type = other DNA
atggagacatgcgcaggcccacaccctctgcgcctatttctttgcagaatgcagctgtgtctggctctcttgctgggcccttggagaccaggcaccgcggaagaggtgatccttctggactcaaaggcgagtcaggctgagttgggctggacagccttgccaagcaacggttgggaggagatcagcggtgtggatgaacatgacaggccaatccgaacctaccaggtttgcaacgtgctggaaccaaatcaggacaactggctgcagaccgggtggatctcccggggtagaggacagaggatatttgtcgagcttcagtttaccttgcgcgactgtagttccatcccaggcgcagccggtacttgtaaggaaacatttaacgtctactatctggaaactgaagctgacctgggcaggggtcgaccaaggctgggtgggtctaggcctcgcaagattgataccatagccgccgacgaatcctttacccagggcgatctcggagagaggaaaatgaagctcaacaccgaggtgcgcgaaatcggacctctatccaggagaggtttccacctcgcctttcaggacgtgggtgcatgcgtggcattggtgtccgtgcgcgtgtactataaacaatgccgggccactgtgcgcggtcttgcgactttccctgcaaccgcagcggagagtgcattcagtactctggtggaggtggctggtacgtgcgtcgcccacagtgaaggcgaaccaggttcccctccacggatgcactgtggagccgatggcgaatggttggtgcccgtcggccgctgttcttgtagcgctggttttcaggagagaggagacttttgcgaagcctgtcccccaggcttttacaaggtgagtccaaggcgccccttatgctccccttgtcccgagcacagtcgcgctctggagaacgcgtctaccttctgtgtgtgccaggatagttatgctagaagccctacggatcctcctagtgcctcctgcacccgccctcctagtgctcccagggatctccagtacagtttgagtcgctcacccctggtgttgaggctcagatggttgcccccagccgactccgggggccgttctgatgtcacttacagcctcctgtgcttaagatgcggtcgggagggccccgccggagcatgtgagccttgtggtcctagggttgccttcttgcctcgtcaggcaggcctgagagagcgcgccgcaacgctcctccaccttcgcccaggggcccggtatacagttagggtcgccgccctcaatggagtatccggccctgctgctgctgctgggacgacttatgctcaagtcactgtcagcaccgggcccggtgctccctgggaagaggacgaaatacggcgtgaccgagtggagccacaaagcgtgagcttaagctggcgtgagccaattcccgccggggctcccggagcaaacgatacagagtatgagattaggtattacgagaaaggacagtccgagcagacttattccatggttaagaccggggctccaaccgtcacagtgacgaatctgaaacctgcaaccagatatgttttccaaatcagagcggcaagccccggaccttcgtgggaggcgcagtccttcaacccatcgatcgaggttcagacacttggcgaagctgcttcagggtctagagatcagagtcctgcaatagtggtcacagtggtaaccatcagcgcactgctcgtcctggggagtgtgatgtccgttctggccatctggaggagaccatgctcctatggcaaaggcggtggcgatgcccatgacgaagaagagctgtactttcattttaaggttccgacccggagaacttttttggatccccagagttgcggggatctccttcaggcggttcacttgttcgccaaagagttggatgccaagagcgttaccctggagagatccctgggcggaggccgctttggcgaactatgctgcggctgtctgcagctgcccgggcgtcaggaattgctcgtcgccgtccacatgctccgagattcagcttccgattctcagagactgggttttcttgccgaagccctgacgcttgggcaattcgaccacagtcacatcgttcgcctggagggggtggtgacgcggggaagcaccctgatgatagtcactgagtacatgagtcatggggcgctggatggctttcttcgccggcatgagggccagctggtggcgggccaattaatgggtttgcttcccgggttagccagtgcaatgaagtacctgtccgaaatgggatatgtccaccgaggacttgctgctaggcacgtgcttgtgtcgtccgatttggtgtgtaaaatttcaggtttcggacggggaccacgagatcggtccgaagcagtgtacacgacgatgtctgggagatcccccgccctatgggcagccccggaaacattgcaattcggacacttcagcagtgcttcagatgtctggtcctttggaatcattatgtgggaagtgatggcattcggagagcgaccttactgggatatgtccggacaggatgttatcaaagccgtggaggatggcttcagattgccaccgcctaggaactgtcctaacctgttacaccgactgatgcttgattgctggcagaaagatccgggggaacgcccacgctttagtcagatccattcaattttatccaaaatggtccaggatcccgagccccctaagtgtgcgctgactacatgccctcgcccgcctacccctctggccgaccgagccttttctacctttccatccttcggcagtgttggggcttggctggaggccctggatctgtgtagatacaaagattccttcgctgccgcaggctatggcagtctcgaggccgtagctgagatgacagcacaagatttggtaagtctggggatatctctggcagaacaccgcgaggctctgctctcaggtatatcagctctccaggctcgtgtgctgcagctgcaggggcagggggtacaggtcattataaaaacttgcctgtag

SEQ ID NO: 115873 - DNA, 468 bp, synthetic construct
  misc_feature 1..468: note = Description of Artificial Sequence: Synthetic coding sequence
  source 1..468: mol_type = other DNA
atggttaaaaccggtgcacccacggtgaccgtaaccaacttaaagcctgcaactcggtacgtgtttcagattcgggcagcctcaccagggccctcctgggaggcacaaagcttcaacccctctatcgaagtccagaccttgggggaagcggccagcggttcgcgtgaccagtctcccgccatagtagtcaccgtggtgacaatctccgctcttctggtgctcggaagcgtcatgtccgtgttggctatttggcggagaccctgttcatacgggaaaggcggcggcgacgcccacgacgaagaagagctctacttccactttaaagttcctacaaggaggaccttcctagatccacagtcatgcggggatctcctgcaggcagtgcatctgttcgctaaggagctggacgctaagagcgtaaccttagagcgatcattgggtgggggtctcgagacaagccctcactag

SEQ ID NO: 115874 - DNA, 2931 bp, synthetic construct
  misc_feature 1..2931: note = Description of Artificial Sequence: Synthetic coding sequence
  source 1..2931: mol_type = other DNA
atggagctccaggccgcaagagcttgttttgcacttttatggggatgcgcgctggctgctgctgccgctgcccaggggaaggaggtcgtgctgctcgacttcgcagcagctggtggggagttgggatggttgactcatccctacgggaaggggtgggatttgatgcagaatattatgaacgacatgcctatttatatgtactcagtgtgcaacgtcatgtcaggggatcaggataattggttgcgtactaactgggtgtataggggagaggctgagagaatcttcatcgaactgaagttcactgtgagggattgtaattccttccctgggggcgcatcatcctgcaaagagactttcaatttgtactacgcagagtccgatttagattatggcacgaactttcaaaagaggctcttcaccaagatcgatacgatcgcacccgatgaaatcaccgtgtcatcagacttcgaagcaagacacgtcaaactcaatgtagaagagagaagcgtgggccccctgaccagaaaaggattttatctagcgtttcaggacatcggcgcttgtgtcgcattactctctgtgcgggtttattacaagaaatgtcccgagcttctccagggcctggcgcactttcctgagaccatcgcaggcagcgatgctccatcactggccactgtcgcagggacttgcgttgaccatgctgtggtgcctccaggaggcgaagagccgagaatgcattgtgccgtagacggtgagtggttggttccaatcgggcaatgcctgtgccaggcagggtacgagaaggtcgaggatgcttgccaggcttgtagccccggcttttttaagttcgaagcctccgagtcgccttgcctcgaatgtccggaacatacactgcccagtcccgagggggccacaagttgcgagtgcgaggagggattctttagagcaccccaagaccctgcaagcatgccttgtacaaggccacctagtgcccctcactacctcactgcagtaggcatgggagcgaaagtggaacttcgatggactccaccacaggactcgggcggaagggaagatatagtgtatagtgttacctgtgagcagtgttggccagagtcaggtgagtgcggcccctgcgaggccagtgtgcgttactcagaaccgccccatggattgactagaaccagtgttaccgtatcagatttggagccacatatgaattacaccttcacggtagaggcacgcaacggagtgtcagggctagtgacatctagaagcttccggacggccagcgtttctattaaccagaccgagccaccaaaagtccgtctcgaaggccgatccaccacgagtctgagcgtgtcctggtctattcccccaccacaacagagccgggtgtggaagtacgaagtgacatatcggaaaaaaggagattccaactcctacaacgtgcgtcggaccgaagggtttagtgttacactggatgacctggccccagacaccacctacctggtgcaggtgcaggctttaactcaggagggccagggcgcagggagcaaggtacatgaatttcaaaccctgtcaccagaggggagtggcaacctggccgttatcggcggcgtcgccgtcggggtggtcctgcttctcgttcttgcaggcgtgggatttttcatccacagaagacgcaagaaccaaagagcacgccagagccctgaggacgtgtacttctcaaagagcgagcagcttaaaccgctgaaaacatatgtcgatcctcatacttacgaggaccccaatcaggcggtgctgaaatttaccaccgaaatccatccaagttgtgtaacaaggcagaaggtaattggcgctggtgaatttggtgaggtatataaaggtatgctgaagacgagtagcggaaaaaaagaagtgccggtggctatcaagaccctaaaagctgggtacacagagaaacaaagggtggattttctgggtgaggccgggatcatggggcaattttcacaccataatattattaggttggaaggggtcatcagtaagtataaaccgatgatgattatcactgaatacatggagaatggggctctcgacaagtttctgagagagaaggacggtgaattttctgtcttacagctggtcgggatgttgagggggatcgctgctggcatgaagtacctcgcaaacatgaattatgtgcacagagatctggccgcacgaaacatcctggtgaactccaatctggtctgtaaagtttccgactttggactcagccgtgtcctcgaggacgatcctgaagcgacctacacgacctccggcggcaagattcctattaggtggacggcacctgaggccatctcctacagaaaatttacttcagcttctgacgtgtggtcattcggtatagtcatgtgggaggtcatgacttacggggagcgaccttactgggaactgtcgaaccacgaggtcatgaaggccataaatgatggcttccggcttcctacacccatggattgccctagcgcaatctatcagttgatgatgcagtgttggcagcaagagagggcccggcggcccaagtttgccgatatcgtgtccattctcgacaagctgatcagagcgcccgactcattgaaaactcttgccgatttcgacccgcgcgtctcaattcggctcccttcgacgtccggcagcgagggcgttccatttcgcactgtgagcgaatggctggagagcatcaagatgcagcagtacacagagcacttcatggcagctggctacaccgcaatcgaaaaagtagttcagatgacaaatgacgatattaagaggataggcgtgcgactacccgggcaccagaaacgtatcgcgtactccctcctgggtctcaaagatcaggtgaacactgtcggaattcctatctag

SEQ ID NO: 115875 - DNA, 2952 bp, synthetic construct
  misc_feature 1..2952: note = Description of Artificial Sequence: Synthetic coding sequence
  source 1..2952: mol_type = other DNA
atggactgtcaactgtcaatactcctgttgctcagttgtagcgtgttggacagcttcggcgaactaattccccaaccttccaatgaggtgaacctgcttgattccaagaccatccaaggagagctgggatggatttcatatccctcacatggctgggaggagatcagcggcgtagatgagcattatactcccatccgtacctaccaggtgtgtaacgtcatggatcacagtcaaaataactggctcaggacaaactgggtgcctcggaattcagcccaaaagatttacgttgaactgaaatttacgttgcgcgactgcaatagtatcccactcgtgcttggcacctgtaaagaaacatttaacctctattatatggagtctgacgacgatcacggcgttaaattcagagaacatcagtttacgaagatcgacacaatcgctgccgatgaaagttttactcaaatggacctgggagaccgaatcttgaaacttaataccgagatcagagaagtggggcccgtgaataagaagggattttatctggccttccaggatgtgggcgcttgcgtggccctcgtgagcgtccgggtctactttaagaagtgtccttttacagtaaaaaatctggcaatgtttcccgatactgtgccgatggactcccagtcattagttgaggtcagagggagttgcgtgaacaactcaaaggaagaggatccgccgcgtatgtattgctccacagaaggcgagtggctagtgcctattggaaaatgtagttgcaacgcaggatacgaagaacgcggtttcatgtgccaggcctgcagacctgggttctacaaggccttagatggtaatatgaagtgtgcaaaatgtcccccccactcttcaacacaggaggacggttccatgaactgccgctgcgagaacaactactttcgagctgataaggatcctccaagtatggcatgcacacgacccccatcttctccgcgaaatgttattagtaatattaatgaaacgagcgttattttggactggtcatggcctttggatacaggcggccggaaggacgttacctttaatattatttgtaagaaatgcggatggaacatcaaacagtgcgagccctgttcacccaatgtacgctttctgccccggcaatttggactgacaaacacaacagtaaccgtcaccgacctgttggcacataccaactatacctttgagatagatgccgttaacggtgtgagtgaactctcatcgcctccccgccagtttgccgccgtttcaattaccaccaaccaggcagcaccctctccagtgctcacaattaagaaagaccgaacctccagaaacagcattagcttgtcgtggcaagaacccgagcatccaaatgggataatcctagactacgaggttaaatattatgagaagcaggaacaggagactagctacactatcttacgcgccagggggaccaatgttacaatcagtagtctaaagcccgacacaatctacgttttccagattagggctaggacggccgcgggatatgggacgaacagtaggaaatttgagtttgaaactagccctgactctttctctatctccggtgagtcttcccaagttgtcatgattgccatatccgctgctgtggcgatcatcctcttgaccgtcgtgatttacgtgctgataggcaggttctgcggctacaaatccaagcatggggcggatgaaaagcgacttcacttcggaaacggtcatctcaagctcccagggttaagaacctacgttgatccccacacctatgaagaccccacccaggcggtccacgaatttgccaaggaactggatgcgaccaatatttccatagacaaagtggtgggtgctggggaattcggagaggtgtgttccggacgtctcaaactgcccagtaaaaaggaaatctcagtggccatcaaaactctgaaggtgggttacactgagaaacagaggagagactttttgggggaggcaagcataatgggacagtttgaccaccctaatatcatccggttggagggcgtcgttacaaaatccaagcctgttatgatcgtgacggaatatatggaaaatgggtcactcgatagctttctacggaagcatgacgcgcagttcaccgtcatccagctcgtggggatgctgcgcggcattgctagcggtatgaagtatctctccgatatgggttacgttcatagagacctcgccgcaaggaacatactgatcaatagtaaccttgtgtgtaaggtgagcgattttggcctgagccgcgttctcgaagatgaccccgaggccgcttatacgaccagaggaggaaagattcctatccgatggacatctcctgaggccattgcctacagaaagttcactagcgccagcgacgtttggtcttacggcatcgtactgtgggaagtcatgtcatatggtgagcgtccttattgggaaatgtcaaatcaggacgtaattaaggccgtggacgagggatacagactgccaccccccatggactgccctgccgccctgtaccagctcatgctcgactgttggcagaaagaccgcaataatcgtccaaagtttgagcaaattgtctccatccttgacaagttaattagaaaccctggaagcctgaagattatcacttcggctgcagcccgtcctagcaacctactgctagaccagagcaatgtggacatcaccaccttccggaccaccggagattggctgaacggggtgtggactgcgcactgcaaggaaatattcactggcgtcgagtacagctcttgtgatactattgccaaaatctccacggatgacatgaagaaggtgggtgtcacagtggtaggcccacagaagaagataatcagctctatcaaagcactcgagacgcagtccaagaatggacctgtgcctgtatag

SEQ ID NO: 115876 - DNA, 1620 bp, synthetic construct
  misc_feature 1..1620: note = Description of Artificial Sequence: Synthetic coding sequence
  source 1..1620: mol_type = other DNA
atggactgccaattatccatccttcttctgctctcttgctctgtgctcgacagctttggggaattgattccacagcccagcaatgaagtgaacttgcttgattcaaaaaccatccagggtgaactgggatggatcagctatcctagccatgggtgggaggagatctcgggggtggacgaacattatacacctatcagaacatatcaggtgtgtaacgttatggatcactctcagaataattggttgaggacaaactgggtgcctcgaaattccgcccagaagatatacgtggagcttaaattcaccctgcgggactgcaactccatccctttggtgctgggcacctgcaaggagaccttcaatctgtactacatggagtccgacgacgatcatggcgtgaagtttcgtgagcatcagttcacgaagattgataccatcgctgcagatgagtcattcactcaaatggacttgggcgaccgcattctcaaattaaacaccgaaatccgtgaggtgggaccggtgaacaaaaagggtttttacctcgcatttcaggacgtgggagcgtgcgtggctcttgtgtcggtacgggtatacttcaagaaatgccccttcactgtaaagaacttagcaatgttccctgataccgttccgatggacagccagtcattggtcgaggttcggggctcctgtgttaataatagcaaggaggaggatcctcccagaatgtactgctcaaccgagggcgagtggttggttcctatcgggaaatgttcctgcaacgctggatacgaggagcggggctttatgtgtcaggcctgtagaccgggattttataaggcgttagatggcaacatgaagtgtgctaaatgcccaccgcatagctccacacaggaggacggtagtatgaactgccgatgtgaaaacaactatttccgcgccgataaggacccaccctccatggcctgcaccagacctccatccagtcctcggaatgtcatctctaacatcaatgagacttcagtaatcctcgactggtcctggcctctcgataccggcgggagaaaggatgtgacattcaacattatctgcaaaaagtgtggctggaacattaagcagtgcgaaccatgttctcctaatgtacgctttctgccaaggcagttcgggcttaccaatacgaccgtgaccgtgactgacttgctcgctcacactaactacacgttcgagatcgatgccgtgaacggtgtatctgagctctcgtcaccacccaggcagttcgcagccgtcagcattactacgaaccaagccgctccatctcctgtcctgactattaagaaagaccgtacatctcgaaactcaatctccctcagttggcaggagcccgaacatcctaatggtatcattctcgattatgaagttaagtattacgagaagcaggagcaggaaacttcctatacaatcctgcgcgctagaggaacaaacgtcactatcagctctctgaagcccgatactatttatgtgtttcagatccgggcaagaaccgctgcaggttacggaacaaactcacggaagtttgaatttgagacaagccccgattgtatgtactatttcaacgcagtctag

SEQ ID NO: 115877 - DNA, 3114 bp, synthetic construct
  misc_feature 1..3114: note = Description of Artificial Sequence: Synthetic coding sequence
  source 1..3114: mol_type = other DNA
atgcgcgggtcgggccctcgtggcgctggtcggcggcgcccccccagcggtggcggcgacactcctatcactcccgcctcactggcaggctgttactctgccccccggagagcccccctgtggacctgcctgctgctgtgcgcagctcttaggacgctgctggcatccccctccaacgaggtaaacctactggacagtagaaccgttatgggagacctaggttggatcgcattccccaagaacggatgggaggaaatcggcgaggtagacgagaactacgcacctattcacacataccaagtctgcaaagttatggagcagaatcagaacaactggcttctgactagttggatcagtaatgaaggcgctagtaggattttcatcgaactgaaattcacactaagagactgcaacagcctccccggcggacttggcacctgcaaggaaactttcaacatgtattacttcgaatccgacgatcaaaacgggaggaatatcaaagagaaccaatatatcaaaattgatacgattgcagcagacgagagctttacagagctggacctgggtgatagggtgatgaagctaaataccgaggtgagagacgtgggtccactaagtaagaagggattctacctggcctttcaggacgttggcgcttgtatcgctctggtgtccgtgagagtttattacaagaagtgcccctccgtcgtgcggcacctcgcggtgttcccagatacgatcacgggggctgacagcagccagttactggaggtttccggctcttgcgtgaatcatagtgtgacagatgagcctcccaaaatgcattgctctgctgaaggggaatggctggtgccaattggaaagtgtatgtgcaaggcagggtacgaggagaagaatggaacttgtcaggtgtgccgtcctggcttcttcaaagcttcgccccacatacagtcatgcggaaaatgcccgccccacagttatacccacgaggaggcaagtacatcttgcgtgtgcgaaaaggactactttagacgggaaagtgatccacccaccatggcttgcacaagaccacctagcgcccccagaaacgctatttccaacgtcaatgaaaccagcgtatttttagagtggattccccctgccgacactggaggacgcaaggacgtgagctattatattgcctgtaaaaaatgcaatagccacgccggcgtgtgcgaagagtgcggcggtcacgtccgctacctacctcgtcaaagcgggcttaaaaatacctcagtgatgatggtggatctgctagcccataccaattacacttttgaaatagaagccgtgaacggcgtctctgacctctcaccgggcgcacgccagtatgtgtccgtgaacgtcaccaccaatcaggcagctccatctccggtgaccaatgttaaaaaagggaaaattgcgaagaatagcataagcctaagctggcaggagcccgatcggccgaacggcattattttggaatatgaaattaaatacttcgagaaagaccaggagacttcttacacgatcattaagtcgaaagagaccacaattaccgctgagggccttaaaccagcgtcagtctacgtatttcagatcagggctcgaaccgctgccggctatggcgttttcagccgccgtttcgaattcgagaccacaccagtatttgccgcttcatcggatcagtctcaaatccctgtgatcgctgtctcggttacagtgggcgtgattttattggctgtagtaatcggcgtcctcctgtctggatcttgttgcgaatgtggatgcgggcgcgcatccagtctgtgcgctgtggcccacccctctctgatatggaggtgtggctactccaaggctaaacaggaccctgaagaggagaagatgcacttccataatggccacataaagctgccaggagtacggacatatatagacccccacacttacgaagaccctaatcaggcagtacacgagttcgcaaaagaaatagaggcttcctgcatcactatcgagagagtgataggcgccggcgaattcggtgaggtgtgctcaggtcggttgaagcttcctggcaaacgcgagttacctgtggctatcaaaacacttaaagtgggatacaccgagaagcaacgccgcgatttcttaggggaggcttccattatgggccagttcgaccatcctaacattatacacttggagggcgtggtcacgaaaagcaaaccggtcatgatcgtaacagaatacatggaaaacggaagcctggacacctttctgaagaagaacgacggccagtttactgtcatacagttggtcggtatgctgcgcgggatttcagccggtatgaagtacctgtccgatatgggatacgtccaccgcgacctggctgcaaggaatattttgatcaacagcaatttagtttgcaaagtcagcgatttcggattgtccagggttttggaggacgatcccgaggcagcttacaccacccgtggaggcaagatcccgattagatggacagctcccgaagctatcgcattcaggaaattcacttctgcctccgatgtgtggagctatggtatcgtgatgtgggaggtcgtttcttatggagagcgaccctactgggagatgacgaatcaggacgttatcaaggctgtggaggaaggttatagactgccctctcccatggactgccctgccgcactatatcaattgatgctggactgctggcagaaagaaaggaattcacggccaaaatttgacgagatcgtcaacatgctggacaagctgattcggaacccctcatcgctgaagaccctcgtcaatgcttcttgtcgtgtctccaaccttttggccgagcactctcccttggggtccggagcctatcggtccgtgggtgagtggctggaagccatcaagatgggccgatacactgaaattttcatggagaacgggtacagcagcatggatgcggtggcccaagtcacactggaggacctgcgacgtctcggcgtcacactggttggccaccagaaaaagatcatgaactctctccaggagatgaaggtgcagctggtcaacggcatggttccactttag

SEQ ID NO: 115878 - DNA, 3048 bp, synthetic construct
  misc_feature 1..3048: note = Description of Artificial Sequence: Synthetic coding sequence
  source 1..3048: mol_type = other DNA
atgcgcggatccggacccaggggggctgggcggcgccgccctcctagcggaggaggcgacaccccgatcactcctgccagtctggctggctgctactctgcgccccgccgtgcccccttgtggacttgcctcttactttgtgccgcccttcgaacattactggccagtcccagcaatgaggtgaatcttctggacagtcggacggtcatgggcgaccttggctggattgccttcccaaagaatggttgggaggaaatcggcgaggtagacgaaaattatgcccctatccacacttaccaggtgtgtaaggtcatggagcaaaaccagaataattggttacttacttcttggatctctaatgaaggggcatccaggatcttcatagaattgaagttcacattgcgcgattgcaacagcctgcccggaggcctggggacatgcaaggagactttcaacatgtattattttgagagtgacgaccagaacggacgtaacatcaaagaaaatcagtatattaaaattgatacaattgcagccgacgagagcttcactgagctagatctcggtgaccgggtgatgaagctgaacaccgaagtgcgggatgtgggccctctttccaagaagggattttacctggcattccaggacgtgggagcttgcattgcactcgtatcagtccgcgtgtattacaagaagtgtccatctgttgttcggcacctggccgtcttccccgacactattactggtgctgactcgagtcaattgctggaagtgtctggctcatgtgttaaccacagcgtcactgacgagccccctaagatgcattgctccgctgaaggagaatggctggtccccattggaaaatgcatgtgtaaggctggctacgaggagaaaaatggcacttgtcaagtctgccggcctggcttcttcaaagcctccccacacatccagagctgtggcaaatgtcctccgcactcatatacccatgaggaggctagtactagctgcgtctgtgaaaaagattatttcaggcgcgagtctgacccgcccaccatggcatgcacacggccaccttctgccccccgcaacgcgatatctaacgtaaatgagacttctgtcttcctcgagtggattcccccagctgataccggtgggcgcaaggatgtcagttattacatcgcttgcaaaaaatgtaattctcacgcaggagtatgtgaggagtgtggtggacatgtcagatacctcccaagacaatcaggcctcaagaatacgtccgtcatgatggtggatctcctagctcacacaaattatacatttgaaatagaggccgtgaatggggtatcagacttgtctcctggagcaaggcaatatgtgtccgtgaatgtaaccacaaaccaggccgcccctagcccagtgacgaatgttaaaaagggcaagatagctaagaacagcatctccctgtcttggcaggagcctgaccgccctaacggtattatcttggaatatgaaattaaatatttcgaaaaagaccaggaaaccagttacacaattatcaagtctaaggaaacgacaataacagcggaaggtcttaagcctgcaagtgtgtacgtctttcagatacgtgcaagaaccgccgcgggctatggggtttttagcagacgatttgaatttgaaactactcccgtcttcgctgcctcatcagaccagtcccagataccagttattgctgtaagtgtgactgtgggcgtcatccttctggcagtggtaattggggtgcttctttccggacgacgctgcggttacagcaaggctaaacaggaccctgaggaggaaaaaatgcattttcacaacggccatatcaaactaccaggcgtcaggacgtatatcgatccccatacctacgaggatcccaatcaggccgtgcacgagttcgccaaagagatcgaagcaagctgcattacaattgaaagagttataggggcaggcgagttcggcgaagtgtgctcaggtcggctgaagttgccagggaagagggagcttccagtcgcgataaagactctgaaggttggttacaccgaaaagcaacgacgcgactttctcggggaggccagtatcatggggcagttcgatcatcctaacattatccacctggagggcgttgtgaccaaatctaaacctgtaatgattgtcacagagtacatggagaatggttcactagacacattccttaaaaagaatgatggtcagttcaccgtgatccaattagtaggcatgttgaggggcatcagcgccggtatgaagtatctctctgacatggggtacgtccatagagatctggcggcgcgcaatatcttgatcaacagtaaccttgtatgcaaagtgtctgattttggtctctcacgggtcctggaagacgatcctgaggcagcatacaccacccgggggggtaagatcccgattagatggaccgccccagaggccatcgcgtttagaaaatttacctccgccagcgatgtgtggagctatgggatcgtcatgtgggaggtcgtgagctacggggagcgtccatactgggagatgaccaaccaggacgttatcaaggcagtggaggagggctatcgtttgccgtctcctatggattgtcccgcagccctgtaccagctcatgttagactgctggcaaaaagaacgtaactcaagacccaagtttgatgaaatcgtgaacatgctcgataaactcatccggaatccatcaagtctgaaaacattagtcaacgccagctgcagggtctccaatttactggctgaacactctcccctaggatcgggtgcttatcgctctgtgggagagtggcttgaagccatcaaaatgggcagatataccgagatcttcatggagaacggctacagttcgatggatgccgtagcccaggtaacgttggaggatctgcgacgcctcggagtgactctggtggggcaccaaaaaaagatcatgaatagtctccaagagatgaaggtacagctggttaatggaatggttccactttag

SEQ ID NO: 115879 - DNA, 3015 bp, synthetic construct
  misc_feature 1..3015: note = Description of Artificial Sequence: Synthetic coding sequence
  source 1..3015: mol_type = other DNA
atgcggggctcgggcccaaggggcgccggccggcgcagacccccttcagggggcggggacacgcctatcactcccgcttctttggcgggctgctattctgcccctagacgggctcccctgtggacatgtcttctcctgtgcgccgctctgcggacactactggcttccccatctaacgaagttaacttactggactctagaactgttatgggggacttgggttggatcgcctttcctaaaaacggctgggaagagatcggagaggtcgatgagaactacgctccaatccatacataccaagtgtgcaaggtgatggagcaaaatcagaacaactggctgctgacttcctggatttctaacgagggcgcaagccggatttttatcgagctgaagttcactttgagggattgcaactctttgcctgggggcctgggaacatgcaaagagacatttaacatgtattactttgagtctgatgatcaaaatggaagaaacattaaagagaaccagtacatcaaaatcgacaccattgccgctgacgaatcttttaccgaactggatctgggggatagagtgatgaagttaaacacagaagtacgagacgtcggccctctgagcaaaaagggcttctatctggctttccaggacgtgggggcctgcatcgctcttgtctcagtgcgcgtttactataagaaatgcccaagtgtcgtgcgccacctcgcggttttccccgatacaataacgggcgctgacagttcacaactgctggaagtttctggcagttgtgtgaaccatagtgtaaccgacgaacccccaaaaatgcactgcagcgctgaaggggaatggctggtcccaattggcaaatgcatgtgcaaggctggctatgaagagaagaacgggacttgccaggtgtgtaggcctggcttttttaaggcctcaccgcacatccaaagctgcggcaaatgtccccctcattcttacacacacgaggaagctagcacttcatgcgtgtgcgagaaagattacttccgcagggagtcggacccaccgaccatggcatgcacccggccgcccagcgcaccaaggaatgcaatctccaatgtgaacgaaactagtgtgtttctggaatggatcccccctgctgacaccggaggacgcaaggacgtctcttactacattgcgtgcaagaaatgtaattcccacgctggagtgtgcgaagaatgtggcggccacgtcaggtacttgcctcggcagtctggcctgaaaaataccagtgtgatgatggtagacttactcgctcatacaaattatactttcgagattgaggccgtgaatggcgtgtccgacctcagccctggagcccgccagtatgtgtccgtcaatgtgactaccaatcaggcagctccatcgccggtgaccaatgtcaagaaaggaaaaattgctaagaattccatatcgctcagctggcaagagccagaccgcccaaacgggatcatcctggaatacgaaattaagtatttcgaaaaagaccaggaaacatcatatactatcatcaagtctaaggagaccactatcacagccgaaggattaaagcctgcatctgtatacgtctttcaaatccgcgccaggaccgccgcaggatatggagttttttcaagacggtttgaatttgagacgacacctgtgagtgttgctgcctcttctgaccagagccagatacctgtcatcgccgtgtctgtcaccgttggcgtgatcctgttggccgtggtgattggcgtgctgttgagtgggagctgctgtgagtgtggctgtggaagggcgtcaagtctctgcgctgtggcacatccatctcttatatggcgctgcgggtacagtaaggccaaacaggatcccgaggaagagaagatgcactttcataatgggcatataaagctgccaggcgtgcgcacttacatcgatcctcatacatatgaggaccctaaccaggcagtccatgaattcgcaaaggaaatcgaggcatcttgtataaccatcgaacgcgtcattggagcaggagaatttggggaggtttgcagcggaaggcttaaactacccgggaagagagagttgcccgtggctattaaaaccctaaaagtcgggtacaccgagaagcaacgcagggactttctcggagaggcaagtattatgggacaatttgaccatccaaatatcattcaccttgagggtgtggtaacaaaatctaagccggtcatgattgtgacagaatacatggagaatggatccctcgataccttcttgaagaagaatgatggccagtttaccgttattcaactggtgggcatgctccggggaattagcgcgggtatgaaatacctgtctgacatgggatatgtgcatcgcgatctcgcagccagaaacattctgattaactccaacctggtttgtaaggtgtccgacttcggactgagtcgggttctggaggatgacccagaagccgcgtacactacgagaggtggcaagatcccaatccgatggactgccccagaggctatagccttccgtaagtttacgagcgcttccgatgtatggagttacgggatagtgatgtgggaggtagtgtcctacggggaacggccgtactgggaaatgactaaccaggatgtgatcaaggccgttgaggaagggtacaggctgccaagccccatggattgccccgcagccctctatcaactgatgctcgactgttggcagaaagagagaaattcaaggcctaagtttgatgagatagtgaacatgctcgataagctgattcggaacccatcaagcttgaagactctggtcaacgcttcatgtagagtcagtaatttactcgctgagcatagcccgttgggtagtggtgcataccgctcagtcggagagtggctggaggctattaagatggggcggtacacggaaatcttcatggaaaatggctatagttcgatggacgccgtcgcacaggtcacactggaatag

SEQ ID NO: 115880 - DNA, 3018 bp, synthetic construct
  misc_feature 1..3018: note = Description of Artificial Sequence: Synthetic coding sequence
  source 1..3018: mol_type = other DNA
atggccccagcacggggcagacttccacccgcactgtgggtggtgaccgctgccgctgctgcagccacctgcgtgtcggctgcccgcggggaagtgaacctccttgataccagcacaatccacggggactggggatggctgacttatcctgcccatggatgggattctattaacgaggtggatgagagttttcagccaattcatacctatcaggtgtgtaatgtaatgagtccgaaccagaacaactggctccgtacaagctgggtccctagagacggcgctagacgcgtgtacgccgagatcaagttcactctcagggactgcaacagcatgccaggagtgctaggaacatgtaaagaaacatttaacctgtattatcttgaatcagatcgggatctgggagcaagcacccaggagtcacagtttctgaaaatcgataccatcgctgccgacgagtctttcactggtgccgatctgggggtgcggcggctgaagctcaacaccgaggtgagaagcgtcgggcccctaagtaagcgcggattctatcttgccttccaggatatcggtgcctgtttggctattcttagcttaagaatctactataagaaatgtcccgccatggtcagaaacctggccgccttttctgaggccgttacaggggcggactcaagctcccttgtcgaagtgcgagggcagtgcgtgagacactctgaggagagagacaccccaaaaatgtattgttcagcagagggcgaatggctggtaccaatcgggaagtgtgtatgttcggctgggtatgaagaaagacgcgatgcctgtgtcgcctgtgaactaggtttctataagtctgcaccaggcgatcagctttgtgcgaggtgcccaccgcatagccattctgccgcaccagcagctcaggcttgtcactgtgacttatcatattaccgggcagccttggatcctccaagcagtgcgtgtactagaccaccctccgctcccgtgaaccttatctcttccgtgaatggcacctctgtgacccttgagtgggcccctcctctggatccaggggggcgctccgacatcacttataatgcagtatgtagaaggtgtccttgggccctgtcaaggtgtgaggcctgtggcagcggaacacggtttgttcctcagcaaacgagcctggtgcaagcgagcttgcttgtcgcaaatctgctcgcgcatatgaattattcattttggatcgaggccgtcaatggcgtgtctgatctgagcccagagcctcgccgtgccgcggttgtcaacattaccacgaaccaagcagctccgagccaggtagtggtgatcagacaggagagagccgggcagacatctgtttccctgctgtggcaagaaccggagcagcctaatgggattatcctcgagtacgaaattaagtactatgaaaaagataaggaaatgcagtcatacagcactctcaaggccgtcactacacgggccactgtgtcaggtttaaaacccggtactagatatgtgtttcaggtgcgggcacgaaccagcgcagggtgtggccgcttttctcaagcaatggaggtggagacaggaaaaccgaggcctagatatgacactaggaccattgtctggatttgtctgaccctaatcaccgggctagttgtactgcttctcttgctgatctgcaaaaagagacactgtggctactcgaaagcattccaggactccgacgaggaaaaaatgcattatcagaatgggcaggccccaccacccgtttttctccctctacaccatccccccggaaaattgcccgagccgcagttttatgccgagccgcatacgtatgaggaaccagggcgagctggcaggtcctttacacgagagatcgaggcctccaggattcacatagaaaagatcatcggaagcggcgacagcggtgaggtgtgttatggccgactgagggtgcctggccagcgtgatgtgccagtcgccatcaaggcccttaaggctggatacacagaacgacaaaggagagactttttatcagaagcatctattatggggcaattcgatcatccaaatattatccggctagagggggtggttacccgggggcgcttggccatgatcgtgaccgaatatatggagaacggcagcctggatacttttctgagaactcatgacgggcagttcacaattatgcagctcgtggggatgctgcggggcgtgggggcgggaatgaggtacctgagcgatctcggctacgtgcaccgggatctggcagctcggaacgttttggtggacagtaacctggtgtgtaaggtctcagattttgggctgtccagggtcttggaagacgatcccgacgctgcctacacgaccactggggggaagattcctattcggtggactgcccccgaggcaatcgcgttccgcacattctccagtgcatcagacgtgtggtcctttggagtggtcatgtgggaagtcttagcatacggcgagaggccctactggaacatgaccaatcgggacgtcatctcttctgtggaagagggttatcgtctgcccgcacccatgggttgtccccacgccctgcaccagctgatgttggattgctggcataaagatagagcacagcgacctcgattttctcagatagtttctgtgctggacgccctgatcaggagtcctgagtctctaagggctacagctactgtgtcccgatgcccacctcctgcatttgtgagaagctgtttcgatttgagaggaggctctggaggaggcgggggactgactgttggcgactggctcgatagcattcggatggggcgttacagggaccacttcgcagccggaggatacagctcgctcggcatggttctgcggatgaatgcccaggacgttcgcgctttggggataacactgatggggcaccagaaaaagattctcggcagtatccagaccatgagggcacagctcacatcaacacagggtcctagacgccacctttag

SEQ ID NO: 115881 - DNA, 1488 bp, synthetic construct
  misc_feature 1..1488: note = Description of Artificial Sequence: Synthetic coding sequence
  source 1..1488: mol_type = other DNA
atggcccccgcccggggcaggttgccccccgccttgtgggtggtcaccgcggcagctgctgctgctacctgcgtcagcgctgccagaggcgaggtgaacctgctggacacctccaccattcacggcgactggggatggctaacgtatccagcccacgggtgggactctatcaatgaggtagacgaatcatttcagcctatccacacctaccaggtgtgcaacgtgatgagcccaaaccagaataattggctgcggacatcatgggttccacgggacggggcccggcgggtctacgccgagattaaatttacattaagggactgtaatagtatgcctggggtgctaggtacatgtaaggagacattcaacctgtactaccttgaatctgaccgggatttgggcgctagcacccaggagtcccaattcttgaaaatcgatactatcgccgccgatgaatcattcactggtgccgatctcggcgtgaggagactgaagctcaataccgaggttagatctgtgggtccattgtctaagcggggtttttacctggcgttccaagacataggcgcatgtttggcaattcttagtctgaggatctactacaaaaaatgtcctgctatggtgcggaacttggctgcgttcagtgaagcagtcaccggagccgacagttctagtctagtggaggtgcgtggtcaatgcgtaaggcacagcgaagagcgtgacactcctaaaatgtactgttccgctgagggcgaatggctggtgcccatcggaaaatgcgtgtgctctgccggttacgaagagcggagagacgcatgtgtggcgtgcgaactcggcttctacaagtctgctcctggcgatcagctctgtgccaggtgtcctccccatagtcattcagcggctcctgccgcgcaagcgtgccactgcgacctgtcatattacagggccgcacttgaccctccatctagcgcttgtactcggcccccttccgccccagtcaatcttataagctccgtcaatgggacaagtgtgacactggaatgggccccgcccctggacccggggggtcgatcagacattacttacaacgctgtgtgccggcggtgcccctgggccctctctagatgcgaggcctgtggcagtggaacccgctttgtgcctcaacagacttccctggttcaggcctccctcctggtggcgaatctcctggctcatatgaattatagcttttggatcgaagcggtgaatggggtctccgatctaagcccagaacccagacgggcagcggtggtgaatattaccactaaccaagccggtaggaggcggaatagcgttccgcagagacctgggccgccagcctcgccagctagcgaccctagtcgggaccaaagctcagccggagatgtgctctgggcgtttcgccaggtgcccttgtggccctgtgcaccccaccaggacccggagctggaggcccttcattgcctttag

SEQ ID NO: 115882 - DNA, 1488 bp, synthetic construct
  misc_feature 1..1488: note = Description of Artificial Sequence: Synthetic coding sequence
  source 1..1488: mol_type = other DNA
atggcccctgcacgcggacggctccctcccgcgctatgggtggtcacagctgctgctgccgcggccacatgcgtctcagctgcccggggggaggtcaatctgctcgatacctctactatacatggcgattggggctggctcacctatcctgctcacggttgggactcaattaacgaagtcgatgaaagcttccagccaattcatacttatcaggtgtgcaacgtcatgtctcccaatcagaacaattggctgcggaccagctgggttcccagggacggcgcgcgaagagtttatgccgaaatcaaatttaccttaagagactgcaactcaatgcctggtgtattagggacgtgcaaagagactttcaacttgtactatctggaatctgatcgagatcttggtgccagcactcaagaatcccagttccttaagattgacaccatcgccgccgacgaatctttcactggcgctgatctcggcgtgaggcgtctgaaattaaatacggaggtcagatctgttggaccactttcgaaacgtgggttctacctcgcattccaagacattggtgcatgtctggccatcctgagtcttcggatctactacaaaaagtgccctgctatggtccgcaacttggcagctttttcagaagcagtgacaggagcagattccagtagcctggtcgaggtgaggggacagtgcgttagacatagcgaggagagagacacccctaagatgtactgttctgcagagggggaatggctagtcccaatcggaaaatgtgtatgttctgcaggctatgaggaaagaagggacgcttgcgtagcttgcgagttaggcttctataagtccgcgccgggggatcaactgtgcgcgcgttgccctccacacagccactcagctgcgcccgcagcccaagcttgtcattgcgatctctcatactatcgggctgcactggatcctccctcatcggcctgtaccagacctccttctgctcctgtgaacctcattagtagtgtgaatggtactagtgtaactttggaatgggcccccccgctagaccccggaggtcgctctgacatcacgtataacgctgtgtgtcgtcgatgcccgtgggctctcagtcgctgcgaagcttgcggttccgggactcgcttcgtgccacagcagactagtctggttcaggcaagcctgcttgtggctaatctgcttgcgcacatgaactactccttctggatcgaggcagtcaacggggtcagcgacctgtctcccgaaccacgcagggcggctgtggtaaatataacaactaaccaggcaggccgcagacggaacagtgttccccagagacctgggccacctgcaagtccagccagcgacccatccagagaccagtcttcagcaggagatgtgctgtgggcgttcagacaagtccccttgtggccctgcgcgcctcaccaggacccggaactggaggccttgcactgtctctag

SEQ ID NO: 115883 - DNA, 2955 bp, synthetic construct
  misc_feature 1..2955: note = Description of Artificial Sequence: Synthetic coding sequence
  source 1..2955: mol_type = other DNA
atggccctcgattacctcttgctgctccttcttgcttctgcagtcgcagccatggaggaaacactgatggatacaaggactgccactgccgaacttggctggaccgctaatcccgcaagtggatgggaggaagttagtggctatgatgaaaatctaaatacaatccgcacttaccaggtttgtaatgtgttcgaacccaatcagaataactggttactgactacattcattaaccgacgcggcgctcacaggatttatactgagatgcggttcacggtgagggactgcagttcgttgcctaatgtcccaggaagctgcaaagagaccttcaacctgtattattatgagacagacagcgtgatagctacgaaaaagtctgcattctggagcgaggccccgtacctgaaggtcgacaccatcgctgccgatgaatccttcagtcaagtggatttcggggggcggctgatgaaggtgaatacagaggtacggagttttggccctttgacgagaaacggcttctatttggcgttccaggattacggagcttgcatgtccctcctgagcgtgcgagtattctttaaaaaatgcccgagcattgttcaaaacttcgcagtattcccggaaaccatgaccggtgcggaaagtacatctctcgttattgctcgtgggacgtgcataccaaatgccgaagaggtggacgttccgataaagctttattgcaatggcgatggcgaatggatggtcccaataggccggtgtacatgtaaaccaggctatgaacccgaaaacagtgtcgcttgcaaggcttgtccggcagggacctttaaggcttcccaagaggccgaggggtgtagccattgtccctcaaactcacgcagccccgcagaggcttctcctatttgtacttgtcgaactggctattatagagcagatttcgatccaccagaagtggcatgcacttctgtaccttcaggacctaggaatgtcatcagcatcgttaatgaaacttccatcatcttggaatggcaccccccccgcgagacgggcggccgggacgatgtaacttacaacatcatctgtaaaaaatgccgagctgaccgccgatcttgcagtcggtgtgatgacaacgtagaatttgtgcctcggcaactgggcctcactgagtgtcgtgtgagcatttcgagtctctgggcacacacgccttacaccttcgacattcaggcaataaacggggtaagtagcaagtccccctttcctccccagcacgtgtccgtgaacattaccacgaaccaggctgcccccagcaccgtgccaatcatgcatcaagtgtccgccaccatgaggagtatcactctatcctggcctcaaccagaacagcccaacggtatcatccttgattacgaaatcaggtattatgagaaggaacataacgaattcaatagttccatggccagaagccagacgaatacagctcggattgatgggctacgacccggaatggtgtacgtagttcaggtgcgggctcgcaccgttgccgggtacggaaagttttctggtaaaatgtgcttccaaacgctcactgacgacgattacaagagcgagttgcgggaacagctcccactgatagctggatccgccgccgccggcgttgtcttcgtggtgtcacttgtagctattagcatagtgtgctctagaaaaagagcatactcaaaagaggcagtttactccgataagctccagcattacagtaccggaaggggttcacctggcatgaagatttacatcgatccctttacatatgaggatcccaacgaggccgtgagggaattcgccaaagagattgacgtgagttttgtgaagattgaggaggtgattggtgctggagagttcggcgaggtgtacaagggcaggctgaagttgcccggtaaaagggagatctatgtggccattaaaacgcttaaggctggttacagcgagaaacaaagaagggattttttgagtgaagcgagcatcatgggacagttcgaccaccctaacatcatccgcctggaaggcgtggtgaccaagagccgtcctgtcatgatcattactgaatttatggagaacggcgccttagacagtttcctcaggcagaatgatggacagttcacagtcattcagctcgtgggcatgctccgtgggatcgcggccggcatgaagtatcttgccgaaatgaactacgtgcaccgggacctggctgctcggaatatcctcgtgaactccaatttagtgtgcaaggtgtcagactttggcctcagccgctacctgcaggacgacacctctgacccaacctacacgtcttccctggggggaaaaattcctgtgcgatggaccgcaccggaggccattgcctatcggaaattcaccagcgccagcgatgtatggagttacgggatcgtaatgtgggaagttatgagctttggcgagcggccttattgggatatgtctaaccaggacgtcatcaacgcaatcgaacaggactatagactgcccccccccatggactgcccagctgccctccatcagctgatgctggactgttggcagaaagaccggaattctcgccctcgcttcgctgagattgtgaacactctggataaaatgattagaaaccctgcctcactgaaaaccgttgcaacgattaccgcagtgccttctcagcccctgttagataggagcattcctgactttactgccttcacaacagttgacgactggttgtctgcaatcaaaatggttcagtaccgggacagtttcctgaccgccggattcacgagcctccagttggttacccagatgacttctgaggatctccttcgtatcggtatcacactagcaggacaccaaaagaaaattttgaattcaatccactccatgcgggtacagatcagccagagcccgaccgcaatggcatag

SEQ ID NO: 115884 - DNA, 1638 bp, synthetic construct
  misc_feature 1..1638: note = Description of Artificial Sequence: Synthetic coding sequence
  source 1..1638: mol_type = other DNA
atgcaccaagtctccgcaaccatgaggagcattaccctttcatggcctcagcctgagcaacctaacggaattattctggattacgaaatccggtattacgaaaaagaacacaacgaattcaacagctccatggccagaagtcagacgaacaccgcgcgcattgacggacttcgccctggcatggtttacgtcgtgcaggtgcgcgcccgcactgtcgcaggttacggaaagtttagcggtaagatgtgctttcaaacattaacagatgatgactacaagtcggaactgagggagcaattgccactgatcgccggcagcgccgccgccggtgtggtcttcgtggtgtctctggtggccatatccattgtttgctcgcgcaaacgggcctattcaaaggaagccgtatactccgacaaacttcagcactactctacaggaagagggagtccaggcatgaaaatctacatcgatccatttacgtatgaggaccccaatgaagctgtgcgcgagttcgctaaggagatcgacgtgtctttcgtgaagattgaggaagttataggagccggggaattcggcgaggtgtacaagggcagactgaagctccctggcaagcgagagatctatgtcgcaatcaaaactctaaaagcagggtatagtgaaaaacaacggagggattttctcagcgaagcttcaataatgggccagtttgatcacccaaatattatccggttagagggggtggtgactaagtctcgaccagtgatgatcatcaccgaattcatggagaatggtgccctagatagttttcttcggcagaacgatgggcaattcaccgtgattcagcttgtgggaatgctgagaggtatagccgccgggatgaaatacttggctgagatgaactacgtacatcgagacctcgctgctagaaatattttagtgaatagtaatttggtttgcaaggtatccgatttcggtctctctagatacttgcaggatgacaccagtgatccaacctatacgagttcgctcgggggaaagatcccagttagatggacagccccagaagcgattgcttataggaagttcacgagtgcctctgatgtttggtcatacggtattgttatgtgggaggtcatgtcctttggcgaaagaccctattgggacatgagcaaccaagacgtcattaacgctatcgagcaggattaccgccttcctcccccgatggactgccctgcagcactccaccagcttatgctggactgctggcagaaagatcggaatagcagaccccgcttcgccgagattgtgaatacactggacaagatgatccggaatcctgctagtttgaaaacagtcgccactataactgcagtcccaagtcagccccttctggatcgctctatacccgacttcactgcattcactacagtggacgattggctgagcgcaataaagatggtgcagtatagagactctttcctcacagctggtttcacttccttgcaactggtcacccagatgacatcagaggacctcctgcgtataggaatcactttagccggccaccagaagaaaatccttaatagcatccacagcatgagagtgcagatcagccagtccccgacggctatggcttag

SEQ ID NO: 115885 - DNA, 2997 bp, synthetic construct
  misc_feature 1..2997: note = Description of Artificial Sequence: Synthetic coding sequence
  source 1..2997: mol_type = other DNA
atggcccgggcccgccccccacctccccctagcccccctccgggcctgcttccacttctgcctcctctgcttctattgcccttactcttacttcccgccggatgccgcgcccttgaggagaccttgatggataccaaatgggtgacaagcgaactcgcctggacaagccatccagagtccgggtgggaggaggtatctggatatgacgaagcaatgaacccgattcgaacttaccaggtgtgcaatgtgcgtgaatccagccagaacaactggcttcgcaccggattcatttggcgcagagacgtgcagcgcgtgtatgtggagttaaagttcaccgtccgggactgtaacagcatcccaaacattcctggcagttgcaaagagacctttaatctgttctactacgaggccgactccgatgttgcaagcgccagctctccattttggatggaaaatccttacgtcaaggtggacacaatagcgccagacgagtcctttagcaggctagatgccggacgggtgaacactaaggtccggagctttggaccactgagtaaggccggtttttacctggcctttcaggatcaaggcgcatgtatgagtctgattagtgtccgcgccttctacaaaaaatgtgccagtacgacggccggctttgctttattccccgagacacttaccggcgctgagcctacttccctagtgattgctcccggcacttgtattcctaatgctgtggaagtttccgtgccgttaaagctgtactgtaacggcgacggggagtggatggtccctgtgggtgcctgtacttgtgcgaccggccacgagcccgcagccaaagagagccagtgtcgcccatgtccccctggaagttacaaggctaaacagggcgagggaccgtgtctgccttgcccaccaaacagtcgcacaacttctccggccgcctccatttgtacctgtcataataatttctatcgggctgacagtgactcagctgactcagcctgtactacagtccccagcccgcctcgaggtgtcattagcaacgtgaacgaaacaagcctgattctcgaatggtcggaacctcgtgacctgggcggacgtgacgacctgctgtacaatgtgatttgcaagaaatgccacggggcggggggagccagtgcttgctcacggtgcgatgacaacgtggaattcgttcctaggcagctggggctcactgagcggagagtacacatttcacatctgttggcccatacgaggtacacattcgaggtgcaggccgtaaatggagttagtggcaagagtcccctgccaccgaggtacgcagctgtgaatattaccactaatcaggcagctcctagcgaggtgccaactcttcgcctgcatagctcatcagggtctagcctgaccctgtcctgggcccctcccgagagacccaatggggttatactcgactacgagatgaaatacttcgaaaaaagcgaaggcatcgcttcgacagtgacatcccagatgaactccgtacagctagacggtctgagaccggatgcacggtacgtggtgcaagttagagcccgaacagttgcagggtatggccagtactcccgtcccgctgaatttgagaccacctcagaaaggggctcaggtgcacagcagctccaggagcaactgccactgatagtcggttctgccacagccggactggtgtttgttgtggctgtggtggttatcgccatcgtgtgtctgcgcaagcaaaggcatggctccgacagtgaatacaccgagaaactgcaacaatatatcgcgcccgggatgaaagtctatattgatccgttcacttatgaagacccgaacgaggccgttagggagttcgctaaggaaattgacgtctcgtgcgtcaagattgaagaagtgatcggcgctggagaattcggagaagtttgtcgagggcgccttaagcagccgggacgaagggaggttttcgtggcaattaagaccctgaaggtgggttacacagagagacaacgaagagatttcctgtctgaagctagcatcatgggccagttcgatcatccgaacatcatacggttggagggagttgtaacgaagtctcggcccgttatgatcctgactgagttcatggaaaactgcgccctggacagctttctccggttaaatgatgggcagttcaccgtgattcagctggtgggaatgctgaggggcatcgcagcgggcatgaaatatcttagcgagatgaactacgtgcacagggacctggcagccagaaacattctggtcaactcgaatctggtgtgcaaagtatccgactttgggctgagccggtttctcgaggatgatccctccgacccaacgtacactagttcacttgggggcaagattcccatccgttggacagcccctgaggccatcgcctaccgcaagtttacctctgcgtccgatgtgtggtcgtacgggattgtcatgtgggaagtgatgtcatatggcgagcggccatactgggacatgagtaaccaggacgtcattaacgctgttgaacaagactacagattgcctccgcctatggactgtccgaccgctctccaccagctgatgttggactgttgggttagggatcggaatttacgtcccaagttttcacagatcgtgaatactctggataagctgatccgcaatgcagctagcctgaaagtgatcgctagcgcgcaatcagggatgtcccaacccctcctggatcgaactgttcccgattacacaaccttcactacagttggcgactggctggatgccatcaaaatggggaggtataaggagtctttcgttagtgctggcttcgccagtttcgacctggtggctcagatgactgcagaagatctgctccgcattggtgttacgctggcaggacaccaaaagaagatcttatctagcatccaggatatgcgccttcagatgaaccagaccctcccggtccaggtatag

SEQ ID NO: 115886 - DNA, 3066 bp, synthetic construct
  misc_feature 1..3066: note = Description of Artificial Sequence: Synthetic coding sequence
  source 1..3066: mol_type = other DNA
atggccactgagggcgcggctcagctgggcaatagagtggcagggatggtttgctccctgtgggttctcctgcttgtgagtagtgtcttagctctggaagaagtactcctggacacaacgggggagacgtccgagattgggtggctgacttacccgccaggggggtgggatgaagtgagcgtcctggacgatcagaggcgactgacacgcacatttgaggcttgtcacgtcgccggtgcgccacccggcacaggccaggataattggctgcagactcacttcgtggaaaggaggggtgcccagcgagcccacatccgtctgcacttcagtgtccgtgcctgttcaagcctcggcgtcagcgggggtacctgtcgggagacatttacgttgtattaccgccaagctgaggaacctgactctcccgattccgttagttcctggcacctcaaacgttggacaaaagttgatacaattgctgctgatgaaagcttcccctcctcgtcatcttcctcctctagttcgagctctgcagcgtgggctgtgggaccccacggagctggacagcgagccggcttgcagctcaacgtgaaggaacggagtttcggcccgttgacccagcggggtttttacgttgctttccaggacaccggggcatgcctggccctagttgccgtgaggcttttttcctatacctgtcccgctgtgctgcggagcttcgcgtcatttccggaaacacaggcctccggggctggtggggctagtctggtggctgccgtagggacttgtgttgctcacgcagaacccgaggaagatggagtaggagggcaggcaggcggctcccctcctcgccttcattgtaacggggagggtaaatggatggttgcggtggggggatgtagatgtcagcctggttaccagcctgcaagaggagacaaggcttgtcaggcttgtccacgcggactttataagagcagcgcgggaaatgccccatgttctccgtgcccagcaagatctcacgcccccaatcctgctgcaccagtgtgtccatgtttagaggggttctacagggccagcagtgaccccccagaagctccatgtacgggtcccccatctgccccccaggagctttggtttgaggtccaagggtcagccctgatgctgcactggcgcctacctcgtgaacttggaggtcgcggcgatttgctgttcaacgtcgtgtgcaaagaatgcgaaggacgacaggagcctgcgagcggtggaggtgggacatgtcataggtgtagagacgaggtgcatttcgatcccagacagcgggggctcactgaaagccgagtgctggtcgggggcttgcgcgctcacgtcccatacatattggaggttcaggcagtgaatggcgtgtccgagctttcaccagatccaccacaggccgcagccataaatgtctccacaagtcacgaagtgccaagtgcggttccggtggtacaccaggtgtccagagcgtccaatagcatcaccgtctcctggccacaacccgatcagaccaacgggaatatcctggattatcagctgaggtattacgaccaagccgaagatgagagccactcttttacacttacaagcgagacaaatacagcaactgtcacccagttgagtccagggcacatatatggcttccaagtgagagcccggacagccgccgggcacgggccttatggcgggaaggtatactttcagacgttaccccaaggagaactgagctcgcagttaccggaaaggttgtccctcgtgattggaagcattctcggagcacttgcctttctccttcttgcagccattaccgttctcgcagtcgtctttcagcgcaagaggcgcggtaccggctacacagaacagcttcagcagtactcttctccaggactgggcgtgaaatattatatcgacccctcgacatatgaagacccgtgtcaggcaattcgcgagctcgccagggaggtcgatcccgcgtacattaaaatcgaagaagtcattggtaccggcagctttggtgaagtacggcagggtcggttgcaaccaagaggaagaagagagcagaccgtcgcaattcaggccctttgggccggaggcgccgagtcattacagatgaccttcctgggacgggctgcggtccttggccagttccagcacccaaacattctacggctggaaggagtcgttacaaagagcagaccactaatggtcctgactgaattcatggaattaggccccctcgattcatttctcaggcagcgggagggccaatttagttcattgcagcttgttgcgatgcagcgcggtgtggccgctgccatgcagtacctctctagtttcgcatttgtccacaggtccctcagcgcacattccgtgctggtgaacagtcatctagtgtgtaaggttgcccgactgggacattcccctcagggtccaagttgtctactgcgctgggcggctccagaggtcatcgcccatggcaagcacactacttcttctgatgtttggagcttcggcattcttatgtgggaggtgatgagctacggggagcgcccctactgggacatgtcagagcaagaggtgcttaacgccatagagcaggagtttcgcctgccaccgcctccagggtgccctcctggcctgcatcttcttatgttagatacgtggcagaaggaccgagctcgtcgaccacactttgaccagttggtggccgcgttcgataagatgatcaggaagcctgacaccctgcaggcagggggcgatccaggcgaaaggccgtctcaagctcttctgacccccgttgccctggatttcccatgtctggatagccctcaggcctggctctccgcaattggcctggaatgctatcaagataacttttctaaattcggtctctgtacattttccgacgtcgcacagctgtctctggaagatcttccagcactgggtataactctggcaggtcaccagaagaaattactccaccatattcagctactacagcagcacctccggcagcagggctcagtggaggtatag

SEQ ID NO: 115887 - DNA, 2235 bp, synthetic construct
  misc_feature 1..2235: note = Description of Artificial Sequence: Synthetic coding sequence
  source 1..2235: mol_type = other DNA
atggcgacagagggagcggcgcagctcgggaatagggtggccggtatggtttcagtcgggggttgtcgatgtcagcctggctaccagccagcaagaggggacaaagcgtgccaggcctgtccccgcggcttgtacaaatccagtgctggtaacgcaccctgcagcccttgcccggctcggtcgcacgctccgaacccggctgctccagtctgcccctgtctggagggattttatagagcttcttccgaccccccagaggccccctgcaccggtccaccttctgccccccaggagttgtggttcgaggtacaaggtagtgcattgatgttgcactggcggctcccacgagagttaggcgggaggggtgatctgttattcaacgtggtgtgtaaagagtgtgagggacgccaggagcccgctagtggcggcgggggcacatgccaccggtgccgcgacgaagttcacttcgacccccgtcaaaggggtctgacagagtcccgagttctcgtcggcggcctccgcgcgcacgtgccctacatcctggaggtacaagctgttaatggagtctcggaactgtcgccagatcccccccaagctgccgctataaacgtatcaacttcacatgaggtgccaagtgccgtgccagtcgtccatcaggtctccagggcttctaattcaattaccgtgtcgtggccccagcctgaccagaccaacgggaatattctggactaccagttgcggtactacgaccaagctgaggacgaaagtcactccttcacactgactagtgaaactaatacagccaccgtgacacagcttagccccggtcacatctacggctttcaggtcagggcgagaaccgccgccggccatggaccatacggagggaaggtgtactttcagacattgccacagggggaattgagtagccagttgccagagaggttgagccttgttatcggatcaatcttaggggctctggcttttctcctgctggctgctatcacagtgctcgcagtggtgttccaaagaaagcggcggggtaccggctacacagaacagctccaacagtactcatctccaggtctgggagtcaagtattacattgatccgtctacgtacgaggacccatgtcaggccatacgcgagctcgcaagagaagtcgatcccgcctacattaaaattgaggaggttatcggtaccggatccttcggggaagtgagacagggccggctgcagccccggggccgacgcgagcagacagttgccattcaggccctttgggcggggggcgccgaatcacttcagatgacctttcttggtcgcgccgccgtgctaggccagtttcagcatccaaatatcctacgcctcgaaggcgtggtcactaagtctagaccgctgatggttttgaccgaattcatggaattagggcctttagacagcttcctccgacagcgcgagggccaattttctagtctgcagcttgtcgccatgcaaaggggggtcgcagccgccatgcagtatctgagctctttcgcctttgtgcatagatctctcagtgcccatagtgtgctggtcaactcccacttagtgtgtaaagtggctaggctgggtcacagtcctcagggcccaagctgtttgctacggtgggccgcccctgaagtaatagcacacggcaagcacaccacgagcagcgatgtctggtccttcggcatcctgatgtgggaggtaatgagctacggagagaggccatactgggacatgagcgagcaggaggttttgaatgcaattgagcaggagtttagactgccacctcctccggggtgtccccccggtctacatttactcatgctggacacatggcaaaaagaccgagcacgccgcccccacttcgatcaactggtggccgcgtttgacaagatgatccgcaaacccgacaccctgcaagctggtggggatccgggtgagaggccctcccaggcactgttgactcctgtcgctctggactttccctgtctggacagcccccaggcatggttatctgcaatcgggctggaatgttaccaagataacttcagcaagttcggcctctgtactttttcggatgtagctcaactctctctggaggatctgccagcactaggtattaccttagccggccatcaaaagaagctcttgcatcatatacaactgctgcaacagcacctacgacaacaaggtagtgtcgaagtttag

SEQ ID NO: 115888 - DNA, 3066 bp, synthetic construct
  misc_feature 1..3066: note = Description of Artificial Sequence: Synthetic coding sequence
  source 1..3066: mol_type = other DNA
atggcaactgagggtgcagctcagttggggaaccgtgtggcaggtatggtctgtagcctgtgggtcctgctcctagtgtcctcagttctggctctagaagaggtcctgctcgacactactggggagacctccgagatcggctggctcacatatccccccggaggctgggacgaagttagcgtcctggatgatcagcggcgcttaactaggacgtttgaggcctgccacgtagcgggcgcacccccaggaaccgggcaagataactggttacagacccacttcgtcgaacggaggggcgctcagagagcgcacatacgtctgcacttttcagttcgagcatgcagcagcttaggggtaagtggagggacgtgtcgcgagacatttacactttactatagacaggccgaagagcccgatagccctgatagtgtttccagctggcaccttaagaggtggactaaggtggacactatcgccgcagatgaatcttttccttcgtcaagctccagttccagctcatcatcttcagccgcgtgggccgtgggaccccacggcgccggacaaagggcaggcctacagctgaacgtcaaggaacggtcgttcgggcctttgacccagcgcgggttttacgtagcgttccaggacacaggggcctgcctggcactggtagccgttaggctgttctcttacacatgccccgcggttctgcggagctttgcttcgttcccagagacacaggcttccggcgcagggggggctagtctggtggccgccgtcggcacatgtgtcgctcacgcagaaccggaggaagatggggtcggcgggcaagccggcggctctccacccaggcttcactgtaatggagagggcaagtggatggttgccgtgggcgggtgccgatgccagcccggatatcagccggcacggggcgacaaggcttgccaggcttgtccacgtggcctgtacaaaagcagcgcaggcaacgccccgtgctcgccatgtcccgcacggtcccacgccccaaaccccgccgcaccagtgtgtccctgcctcgagggtttttaccgcgcctcctcggaccctcctgaggcaccctgtactggacctccctcagccccgcaagaactatggtttgaggtccagggttctgcattgatgctgcactggagacttccccgagagcttggcgggcgaggagatctcctgtttaatgttgtttgtaaggaatgcgagggaagacaagagcccgcatcaggcggaggcggtacttgccacaggtgccgcgacgaggtccattttgaccctagacaacgtggcctgactgagtcgcgagtgctcgtgggcggcctcagagcgcatgtgccatacattctggaggtgcaggccgtgaatggagtctccgaactctcccctgacccgccacaggctgccgcgatcaacgtctcaaccagtcacgaggtgccttctgcggttccggttgtccaccaggtgtcacgggcatctaacagcatcaccgttagctggccgcagcccgaccagaccaatgggaatattctggattatcagcttcgctactacgaccaggctgaagacgagtcccattcattcacgctcacctccgagaccaacaccgccaccgtgactcagctctcacctgggcatatctacggatttcaggtgagggctcgaaccgctgcggggcacggcccctatggaggtaaggtgtactttcagaccctccctcagggcgagctgtccagccaactgcctgagaggctgagtctcgtgattggctccatcctcggagcccttgctttccttcttttggcagcgatcactgtcttggccgtcgtgttccagagaaaaaggagggggacggggtacacagaacagctccagcagtactcttctccagggctcggcgtaaagtactacatcgacccctccacttacgaagatccatgccaggcaatccgagagctcgctagagaggttgaccccgcctatatcaagatcgaggaagtgattgggaccgggagctttggcgaggtaaggcagggaaggctacaacccagaggacggagagaacagacggtggctatacaggccctgtgggctggaggcgccgaatcactccagatgacctttttaggtcgtgccgcggtcctcggtcagttccaacaccccaatatattgaggttggagggggtggtgaccaaatcacggccgttgatggtactgactgaattcatggagctgggtccacttgacagctttttgcggcaacgcgagggtcagttcagcagtctgcagctcgtggcaatgcagcgcggcgtcgccgccgctatgcagtatctgagctctttcgcatttgttcatcgatcgctgtcggcccactccgttcttgtgaactcccacctcgtctgcaaggtagcgcgcttaggtcattccccacagggaccgtcttgcttgctcaggtgggctgcacctgaggtcatcgcacatggcaagcataccacctcctctgatgtctggtccttcggcatcctgatgtgggaggtaatgagctatggggagaggccgtactgggatatgtccgaacaggaagttttaaatgctattgagcaagaatttcgactcccacccccaccagggtgtcctccaggcctgcatctcctcatgctggacacatggcaaaaggatcgcgcccggagaccgcactttgatcaactggtcgccgcttttgataaaatgatcagaaagcccgatacactgcaggcggggggagaccctggagagaggccatcacaggccttgttgacccccgtagccctcgactttccatgtctcgactctccccaggcctggctctctgcgatcggcctggagtgctaccaggacaacttcagcaaatttgggctgtgcacattcagcgatgtggctcagctgtctcttgaggacctgccagctctgggcataaccctggctggtcatcagaagaagttattgcaccacatccagctcctgcaacagcatcttagacagcagggatcggtggaggtttag

SEQ ID NO: 115889 - DNA, 654 bp, synthetic construct
  misc_feature 1..654: note = Description of Artificial Sequence: Synthetic coding sequence
  source 1..654: mol_type = other DNA
atggccggcaggacggtccgggctgagactagaagtcgggccaaagatgacattaagaaggttatggctactatcgagaaggtgagaagatgggaaaaaaggtgggtcacggtgggggacacttcccttagaatattcaagtgggtgcccgtggtcgatccacaagaggaggaacgccggcgggccggggggggcgctgaacgctctcgaggtcgggagcgcagaggccgtggggctagcccgaggggggggggtccattgatcctcctcgaccttaatgacgagaatagtaatcaatcctttcacagtgaaggctccctgcagaaagggaccgagccatctcccggggggacaccacagccttctagaccagtgtcccctgcaggccctccagagggcgtccctgaggaggctcagccccccagactggggcaggagcgcgaccctggaggcatcactgctggaagcactgatgagccacccatgctgaccaaagaagaacccgttcccgaactgctggaggcggaagctcccgaagcgtacccggtgttcgaaccagtgccccccgtacccgaggctgctcagggcgacacagaggacagtgagggggcccctcctttgaagcgcatctgccccaatgcccccgacccatag

SEQ ID NO: 115890 - DNA, 717 bp, synthetic construct
  misc_feature 1..717: note = Description of Artificial Sequence: Synthetic coding sequence
  source 1..717: mol_type = other DNA
atggctgcggcaccattgctcctcctgctcctgctcgttccagtacctctgctacctctgctggcacagggtccaggcggagcattgggaaaccggcacgccgtctactggaattcatccaatcagcacctgcgaagagagggttacaccgtgcaggtgaacgtgaacgattacctggacatttattgtccgcactacaattcttcaggcgtggggcctggggcaggtccaggccccggcgggggcgccgaacagtacgtgttatatatggtatcccgcaacggttatcggacttgcaacgctagtcagggattcaagcggtgggagtgtaataggccccatgcgcctcactccccaatcaagttctcggaaaagttccagagatactctgctttctccctcgggtacgagtttcatgcaggccacgaatattattacatcagtacacctacccacaatcttcattggaagtgcctgcgaatgaaggtgtttgtctgctgcgcgagcacaagtcattcaggtgagaagcccgtgccaactttaccccagttcaccatgggtccgaacgtaaaaatcaatgtgcttgaggattttgagggcgaaaatccacaggtgccgaaactcgaaaaatcgatatccggaacttctcccaagagggaacacctgcccctggcggttggcatagctttcttcttaatgacgttcctggctagttag

SEQ ID NO: 115891 - DNA, 639 bp, synthetic construct
  misc_feature 1..639: note = Description of Artificial Sequence: Synthetic coding sequence
  source 1..639: mol_type = other DNA
atggccgctgctcctctgctgctcctgcttttactagtgcccgtgcccctccttccgcttctcgcacaggggcctggcggggctctcgggaacagacacgccgtgtactggaactcctccaatcagcatctcaggcgggagggttatactgtgcaggtgaacgtgaatgattatttggacatctattgccctcattacaatagctcaggcgttggcccaggggcagggcctggccccggcggaggcgctgagcaatacgtcctctatatggtgtctcggaacggatacagaacatgcaacgccagtcagggctttaagcgttgggaatgtaacaggcctcacgccccccactcccctatcaaattttctgagaaattccagagatattcagcatttagtttgggatatgaatttcacgccggccacgagtactattacatttcaacaccaacacacaacctgcattggaaatgcttacgaatgaaagttttcgtgtgttgtgcttccaaagattttgagggagagaatcctcaggttccaaaactggagaagtcgataagtgggacgagccccaagagagagcatctcccactagcagtgggcattgcattcttcctgatgacatttctggcatcttag

SEQ ID NO: 115892 - DNA, 702 bp, synthetic construct
  misc_feature 1..702: note = Description of Artificial Sequence: Synthetic coding sequence
  source 1..702: mol_type = other DNA
atgaggttgctgcccctcctgcgtacggtgctgtgggctgcctttctgggatcgccactgcgtggcgggagcagccttaggcatgtggtctattggaattccagcaacccgtccctgcgcagggagggatacaccgtgcaggttaacgtcaacgactaccttgatatttactgcccgcactataattcaagcggcgttggccccggagccgggcctgggcctggcgggggcgccgagcaatatgtcctgtatatggtctcacgaaacggctatcgaacgtgcaatgcaagtcaaggcttcaagaggtgggagtgtaatcggcctcacgctccccactctcccatcaaattttctgagaaattccaaagatattctgcatttagcctaggttatgagttccacgctggacacgagtattattacatatccactccaactcataacttgcactggaagtgcttgcgcatgaaggtcttcgtttgttgtgcctcaacaagccatagcggggagaagcccgttcctacccttccgcagtttactatgggccctaatgtgaaaatcaacgtactggaggatttcgaaggagagaacccccaggtaccaaaactggagaaatctatctcaggcactagccctaaacgagagcatttacccctggccgtcggaattgccttcttcttaatgactttccttgctagttag

SEQ ID NO: 115893 - DNA, 582 bp, synthetic construct
  misc_feature 1..582: note = Description of Artificial Sequence: Synthetic coding sequence
  source 1..582: mol_type = other DNA
atgcgattgctgcctctccttaggaccgtgctatgggcagccttcttgggctcacctctgaggggagggtcttcattaagacatgtagtgtattggaattcatcaaatcccaggcttctgagaggagacgccgtagtggagcttggtctgaatgattatttagacatagtctgccctcattacgagggtcctggtccaccagagggtcccgaaactttcgcgctgtacatggtcgactggccaggttacgaaagctgtcaggccgagggcccccgagcctacaagcgctgggtgtgcagtctccctttcggccacgtgcagttctccgagaagatccagcggttcacccctttttctctagggtttgaattcttgcctggagagacctactattatatatctgttcccacaccagagagctccggacagtgtttacgcttgcaggtgtccgtgtgctgcaaggaaagaaacctgccgtctcaccccaaagagcctgagagctctcaagatccccttgaagaggaggggagcctcctgcctgcattaggcgtgccaatacagaccgacaagatggagcactag

SEQ ID NO: 115894 - DNA, 606 bp, synthetic construct
  misc_feature 1..606: note = Description of Artificial Sequence: Synthetic coding sequence
  source 1..606: mol_type = other DNA
atgaggctcctacccttacttcgcacggtcctatgggctgcattcctagggtcgccgttgagagggggcagtagcctccggcacgtagtgtactggaactcttccaacccccggctgttaagaggggatgccgtcgtcgagctcgggttgaatgactacttggacatagtttgcccccattacgagggaccagggccgccggaggggccagaaaccttcgccctttacatggttgattggcccggctatgagtcctgccaagccgaggggccccgcgcctataagcgatgggtgtgctctctcccttttggacatgtgcagttttcagagaaaattcagcggttcacgcccttttcgctgggtttcgagttcctgcctggcgaaacatactactatattagcgtcccaacaccggaaagctctgggcagtgcctaagactgcaggtgagcgtgtgttgtaaagagcggaaatcagagagcgcacaccctgtggggagtccaggggagtctggaacaagcgggtggcgggggggggatacgcccagccccctgtgcctgctcctgctactgttgttactgatcctgcgcctgctaaggatcctctag

SEQ ID NO: 115895 - DNA, 624 bp, synthetic construct
  misc_feature 1..624: note = Description of Artificial Sequence: Synthetic coding sequence
  source 1..624: mol_type = other DNA
atgagactgcttcctcttctgaggaccgtgttatgggctgcatttctggggagccctctccgggggggatcttcactcaggcatgttgtttactggaacagtagtaacccgaggctgttaagaggcgatgccgtggtcgagctgggacttaacgattatcttgacatcgtttgcccccattacgagggtccagggcccccagaaggtccagagacttttgcactgtacatggtggactggcctggatatgaaagctgccaggctgagggccctcgcgcctataaaagatgggtttgtagtctccccttcggccacgtacagttctccgagaagatccaaagattcactccattttctctagggtttgagttccttccgggcgaaacttattactatatttcagttcctacacccgagtcttccggccagtgtcttcgactgcaggttagtgtttgttgcaaggaaaggcgggctcgcgtactgcctcgcagtcctggaggggggggtatccccgccgcctgcactggtggtgcgaacagtgatcgtcaggacggcgccctcatgggtgaaattagaggatccgaagtcaccttggcaggagcctgtcctctgattacaggctag

SEQ ID NO: 115896 - DNA, 1083 bp, synthetic construct
  misc_feature 1..1083: note = Description of Artificial Sequence: Synthetic coding sequence
  source 1..1083: mol_type = other DNA
atgagtgactccaaggagcctaggctacaacagttaggactgctggtctccaaagttccaagttctatctcccaggagcagagcagacaggatgcaatctaccagaacctgactcaacttaaggccgccgttggcgaactctcagaaaagtctaagctacaggaaatttatcaggagttgactcagcttaaagctgccgtaggagaactaccagaaaaaagcaagctgcaggaaatttaccaggaacttactcggctgaaagccgctgtgggagaattgcccgagaagagtaagctccaggaaatctatcaggagctgacgtggctgaaggcggccgtgggagagttaccggaaaagtcaaaaatgcaggagatataccaggaactaaccaggctgaaagcagctgtcggagaattgcccgagaagagcaaacaacaagaaatctaccaagaattgaccagactaaaggccgctgtcggcgagttacccgagaaatccaaacagcaagaaatctatcaagaattaacccgactgaaagccgcggtgggtgaacttccagaaaaaagtaaacagcaagaaatttatcaggagctgacccagttgaaagccgccgtagagagactctgccatccatgtccgtgggagtggacctttttccaggggaactgttacttcatgtcgaacagtcagcgaaattggcatgactcaatcacagcttgcaaagaggtaggcgcccagctagttgttatcaagtccgctgaagagcagaatttcctgcaactgcagtcgagtaggtccaacagatttacatggatgggactttccgatttgaatcaggagggaacctggcaatgggtggacggcagccctctactacccagctttaaacagtattggaacagaggggagcccaataacgttggggaggaagattgtgccgaatttagcggcaacggatggaatgacgataagtgtaacctagccaagttctggatctgcaaaaaaagtgcagccagctgttctagggatgaggagcaatttctgagtcccgcccctgcaaccccaaacccaccgccagcatag

SEQ ID NO: 115897 - DNA, 888 bp, synthetic construct
  misc_feature 1..888: note = Description of Artificial Sequence: Synthetic coding sequence
  source 1..888: mol_type = other DNA
atggagaagatgtctcgcccactccccctcaatcccacttttataccccccccatacggcgtgctgcgctccttgctggagaaccctcttaaattgccattgcaccacgaagatgctttctccaaggataaggataaggaaaagaagctggatgacgaatccaatagtcccacagtgccccagagcgctttcctcggtccaactctgtgggacaagacacttccttacgatggagatacattccagcttgaatacatggacctggaagaatttctcagtgagaatggcatcccacccagtccttcacagcacgaccacagcccccaccctcccggcctccagcccgccagctccgcggccccctctgtgatggacctctcctcacgcgcgagcgctcctttgcatcctggaattccgagcccaaactgcatgcaatcgccaatcaggccagggcaacttctgccagccaacaggaacacccctagtcctatcgatcctgatacgatccaggtgccagtgggttacgagccagaccccgcggatttggctctttcttcgatccccggacaggagatgtttgatccccgcaagagaaaattctcagaagaggaattaaagccacagccaatgatcaaaaaggcccgtaaggtgtttattccagacgacctgaaggatgacaaatactgggcccgaaggcggaaaaacaatatggccgcgaagcgatcccgggacgcccggagactgaaagaaaatcagatagcgattcgtgcatctttcctggagaaggaaaacagtgccctgagacaggaagttgcggacttacgcaaggaactcggaaaatgcaaaaatattttggcaaagtacgaagcaagacacgggccactctag

SEQ ID NO: 115898 - DNA, 780 bp, synthetic construct
  misc_feature 1..780: note = Description of Artificial Sequence: Synthetic coding sequence
  source 1..780: mol_type = other DNA
atggccgcagctgcacagttgagcctcacgcagctgtcttccggtaaccccgtctatgagaagtattacagacaggtcgatactgggaacaccggtagagtacttgcaagcgacgctgcggcatttctcaagaaatcaggtctgcccgacctcattctcgggaaaatttgggacctggcggacacggatgggaagggtatcttaaacaagcaagagttcttcgtagcactgagactggtggcgtgcgcacagaacggcctggaggtgtccctcagctccttgaatcttgcagttcctccaccacgattccacgatactagcagccccctgctgatctctggtacatccgccgctgagttgccgtgggctgtgaagcctgaggataaggcaaagtacgacgcgatcttcgatagcttaagccctgtgaatggcttcctgagtggcgataaagtgaagccggtactcctgaattcgaaactgccggtggatatattaggccgtgtctgggaactgtcagacatagatcatgacggaatgctggaccgggatgagttcgctgtcacggagtctcacagcgtcactcaggccggggtgcagtggcgcgatctgtcatccttgcagccccggcccccagggttcaaactgtttttccacttgtcacttctaaggtcttgggactatcggcacgccccaccacccccggccaacttctacattttctcccgagattctgtcagtccctgcctgccggactggtccagggcccctgacaatcgctag

SEQ ID NO: 115899 - DNA, 2289 bp, synthetic construct
  misc_feature 1..2289: note = Description of Artificial Sequence: Synthetic coding sequence
  source 1..2289: mol_type = other DNA
atggctgccgccgctcagctgtccctcactcagctgagctccgggaatcctgtctacgagaagtactatagacaggtcgacacgggaaacaccggcagggtcttggcttcagacgcagccgcctttctaaaaaagtctggcctgcctgaccttatcctgggcaagatttgggatctcgccgacacagacggtaaagggattttaaacaaacaggagtttttcgtcgccctacggttggttgcgtgtgcccagaatggactcgaggtgagcctcagctccttaaaccttgcagtacctccacctaggtttcatgataccagcagccctttattgatttcagggacatctgccgctgaactgccttgggccgtgaaacccgaagacaaagccaagtatgatgccattttcgactcactgtcaccggtgaatggatttctgtccggcgataaagtaaagccagttctgctgaatagcaagctgcctgttgatattctgggaagggtgtgggaactcagcgacatagatcatgacggaatgctagacagagatgaatttgcagtggctatgttcctggtctattgtgccctggaaaaggagcctgtgcccatgtctttaccccccgccctggtgccccccagtaagcgaaagacatgggtggtaagccctgccgaaaaggccaagtacgatgagatcttcctgaaaacagataaggatatggatggattcgtttccggcctggaagtcagggaaatattccttaagacggggctgccttcaacattgctagctcacatatggtctctgtgcgatactaaggactgcggcaagctgtcaaaggatcagttcgccttagccttccacttgatctcacagaagttgattaaaggcattgacccaccccacgtgcttacacctgagatgatacctccgagtgacagagcctctctgcagaagaacataattggaagttcccctgtggctgatttttcagccatcaaagagctggataccttaaataatgaaatcgtcgacctccagagagaaaagaacaacgttgaacaggacttaaaagagaaggaggataccatcaagcaaagaacttccgaagtgcaagatctgcaggacgaggtgcagcgcgaaaatacaaatcttcaaaaattacaggcccaaaagcagcaagtacaggagctgttggacgagctggatgagcagaaggcacagcttgaggagcagctgaaggaagtccgaaaaaaatgtgctgaggaggcccaactcgctaggagctctcctgagctgctgccttcgggcgtgacggacgagaacgaagtgacaaccgctgttactgagaaggtctgttccgagttggataataacagacacagtaaagaggaggacccgtttaatgtggacagctcatctctgacagggccagtggccgacaccaacttggacttctttcagagtgacccctttgtggggagcgatcctttcaaggacgacccattcggcaagatcgatccctttgggggagacccctttaagggttctgaccccttcgcctcagattgtttcttccggcaatccacagaccctttcgcaacctcaagcaccgatccgttctcagctgctaacaattcatctattacaagcgtggagactttgaagcacaacgaccctttcgcacctggtggcaccgtggtagcagcctctgacagtgcgacagaccccttcgcctcagtgttcggcaatgagagcttcggaggcgggtttgccgacttcagcacactaagcaaggtgaataatgaggaccccttccgtagtgccacctcttcatctgtgtctaacgtggttattacgaaaaacgttttcgaagagacttcagttaaatccgaagatgagcccccagcattaccccccaaaatcggtactcccactaggccttgtcccctgcctccagggaaacgctccattaacaagcttgacagccctgatcccttcaagctcaatgatccctttcaaccattcccaggcaatgactctcctaaggaaaaagatcccgagattttttgcgacccctttacgagcgccaccaccaccaccaacaaagaggcggatccatctaatttcgccaactttagcgcataccctagcgaggaggatatgattgagtgggcaaagcgggaatcggaacgcgaggaggagcagcgacttgcccgcctgaatcagcaggaacaggaagacttagaactggcaatcgcgttgagcaagagcgaaatttcagaggcttag

SEQ ID NO: 115900 - DNA, 2691 bp, synthetic construct
  misc_feature 1..2691: note = Description of Artificial Sequence: Synthetic coding sequence
  source 1..2691: mol_type = other DNA
atggcggcggccgctcagctgtccctgacccagctgagctcgggtaatccggtctacgagaaatattataggcaggtggacactggtaacaccggacgggttttagctagcgacgctgcggcatttctgaagaaatccggactgcctgatctgattttagggaaaatctgggatcttgcggataccgacggaaaaggtatactgaataagcaggagttttttgtggcactgcgcttggtggcctgtgcccagaacggcttagaggtgagcctgtcctcactgaatctggccgttccgcctcctagattccatgacacatccagccctcttcttatctcaggcacctcagccgccgaactgccgtgggctgtcaaacctgaggataaagcgaaatacgatgcgattttcgattccctctcccccgttaatggtttcttaagcggagataaagtgaaacctgtgctgttgaactccaaattgcccgtggacatactcggtcgggtgtgggagctgtcagatatcgatcacgatggaatgctcgacagggacgagtttgctgtggcaatgtttctcgtatattgcgctctcgagaaagagcccgttccgatgtcactgcctcctgctttagtccctccctctaagcgcaaaacatgggtcgtgtctcccgctgagaaggcaaaatatgacgagatctttctgaaaactgacaaggacatggatgggttcgtgtcagggctggaggtgcgagaaatctttctgaagaccggtcttcccagtaccctgcttgcacacatttggagcctgtgtgacacaaaagattgcggcaaactatcgaaggaccagttcgccttggcatttcacctgatctcccagaaattaattaagggaattgatccacctcacgttttgacccctgaaatgatccctcctagtgatagggcttcactccagaagaacattattggctcctcccccgtggccgattttagcgccatcaaagagctggataccttaaacaatgagattgtggatctgcaacgggaaaagaacaacgttgagcaggacctgaaggagaaagaggatacaatcaagcagaggactagtgaagtgcaggacctgcaggatgaagtacagcgcgaaaacaccaacttgcaaaagctgcaggcccagaagcagcaggtccaggagctgttggatgaactcgatgaacagaaagcacagctagaggagcagttgaaggaggtgcggaaaaagtgtgcagaagaagcacagcttatctcgtccctaaaggcggaactaacctcgcaggaatctcagatctccacctatgaggaagagctcgcaaaagctagggaagagctgtcccgcctgcagcaggagaccgctgagttagaggagtctgtagaatctggaaaagcccaactggaaccattgcagcagcatctccaggatagtcaacaggagatctcctcgatgcagatgaagctcatggagatgaaagatctggagaaccataacagtcaactgaattggtgctcctccccgcatagtatcctggttaacggggccaccgattattgctcgctctctacatctagcagtgagactgccaacctgaatgagcatgtggaaggacagtccaatctggaatctgaaccaattcatcaagaatcccccgcccggtcgtcacctgagctcctcccttctggagtgacagatgagaacgaagttactaccgcagtgaccgagaaagtctgttctgagctggacaacaacaggcactctaaagaggaagatccttttaatgtggattcctcctctcttacgggtcccgtcgcggatacaaacctggactttttccagtccgacccattcgtggggagcgacccgtttaaggacgaccccttcggtaaaattgatcccttcgggggagatccatttaagggctctgacccatttgcctcagattgtttctttcgccagagcaccgacccatttgctacatctagcaccgacccctttagtgctgctaataatagctcgatcacctccgtcgagaccctgaagcataacgatcctttcgcccctggaggtacggtcgtggcagcctctgatagcgcaactgacccctttgcatcagttttcggaaatgaaagcttcgggggaggattcgcagatttctccaccctgtctaaggtcaacaatgaagatcccttcaggtctgctacgagctcgagcgttagtaatgttgtgattacaaagaatgtgtttgaagaaacctccgtcaaaagcgaagatgagcctccagccttgccaccaaaaatcggaacacccaccaggccttgtccactgccacctggcaagcggtccattaacaagctggactctcctgaccccttcaagctgaacgatccatttcagccctttcctggtaatgattctcctaaggagaaggaccctgaaatcttttgcgatcctttcacttcggcaacgacgaccacgaataaggaggctgatccatccaacttcgccaactttagcgcctacccttccgaggaggacatgatcgaatgggccaagcgcgagagtgaaagagaagaagaacagagactggcaaggctcaatcagcaggaacaggaggacctagagctggcaatcgctctctccaagagtgaaatcagtgaagcctag

SEQ ID NO: 115901 - DNA, 1722 bp, synthetic construct
  misc_feature 1..1722: note = Description of Artificial Sequence: Synthetic coding sequence
  source 1..1722: mol_type = other DNA
atgatcctgatggtccgcgactgcctgaaaagtcagcacagggatccacactgcgaccctagcgacaagcgtgagaagaataatgtggagcaagacttgaaggaaaaagaggacaccatcaaacagagaacgagtgaggtgcaagacctccaggacgaagtccagcgtgagaataccaatttacagaagctccaagctcagaaacagcaggtgcaggagctgcttgacgaactggacgaacagaaagcccagctcgaggaacagctgaaggaggtgcggaagaaatgtgctgaggaagcacaactgatctcgagcctcaaagccgagctcaccagtcaggagagccagatttcgacctatgaggaagaattggcaaaagcccgtgaggagcttagcaggctgcagcaggaaactgcagaactggaagagagtgtggaaagtggaaaggctcagctggagccccttcagcaacacctccaggactcgcagcaggagatttcttccatgcagatgaagcttatggaaatgaaggatctggagaaccacaacagtcagcttaactggtgctcaagcccacattctatattagtgaatggcgcgacagactattgctcgttgagcacttcctcctcagagaccgccaatttgaatgaacacgtggagggtcagtcaaaccttgagtccgagccgattcaccaggagagcccagcccgaagtagtcccgaactgctaccatcaggagtcacagatgagaacgaggtcacgacagccgtgactgagaaagtctgttccgagctggacaacaataggcattccaaggaagaggacccgttcaatgtggacagcagttctctcacaggcccagttgctgataccaacctcgatttctttcagtctgacccgtttgtcggctctgatccttttaaagacgatccttttggcaagatcgacccgtttggtggcgatcccttcaagggcagcgatccttttgcctccgactgtttcttccggcagtcaaccgacccattcgcaacctcttcgaccgaccccttctccgccgctaataactctagtataacctcagtggagacgttgaagcacaacgatccatttgcgcccggaggtaccgtggtggctgcatccgattccgccactgaccccttcgcaagcgtgtttggtaacgagagttttggcggtggatttgccgacttttcaacgctgagcaaggttaataatgaggacccgttcaggtccgccacgagctcatctgtttcaaatgttgtgatcacgaaaaatgtgttcgaagagacatcggtcaaatccgaggatgagccaccggcccttccacccaagattggcacccctacccgcccttgtcccctgcctcctgggaagcgatctattaacaagctggattcaccggatccattcaaactaaacgatccatttcagccttttccgggcaatgattctcccaaagagaaagatccagaaatcttttgcgatccttttacgagtgcgaccaccaccacaaacaaggaggccgacccttctaacttcgctaatttctctgcctacccatccgaagaagatatgatcgaatgggccaaaagggagtctgagagagaagaggagcagcgtctcgcacgcttgaatcagcaggaacaggaggatttggagttagccatcgccctatctaagtccgagatttctgaagcctag

SEQ ID NO: 115902 - DNA, 2469 bp, synthetic construct
  misc_feature 1..2469: note = Description of Artificial Sequence: Synthetic coding sequence
  source 1..2469: mol_type = other DNA
atgaatggtcatatctcgaatcacccaagctcctttggcatgtaccccagtcagatgaacggctatggcagcagccccacattctcccaaacggaccgagagcatggctcaaaaacctctgccaaggccttatatgagcagaggaagaactacgcacgagacagcgtgtcctccgtgtctgacatctcacagtacagggtggagcacctcacaacgttcgttttggacagaaaggatgctatgatcacggtggacgacggaattaggaagttgaaactgttggatgccaaaggcaaggtgtggactcaagacatgatcctgcaggtggacgatcgggcagtttccctcattgacttggagtctaagaacgaactggaaaatttcccgctcaatacaattcagcactgccaggccgtgatgcacagctgctcctacgactccgtactggctttagtttgtaaagagccaacacagaacaaacccgatctgcatctgttccagtgtgacgaggtcaaggccaatctgatttcggaggatatcgagtctgccatctcggattccaagggaggcaaacagaagagacggccagacgcactgagaatgatcagtaatgcagacccttcaatcccacctccaccaagggcaccagctccagctccacccgggaccgtaacacaggtggacgtaaggtcccgagtcgccgcctggagcgcctgggccgctgatcagggcgatttcgaaaagcctcgacagtaccatgagcaggaagaaaccccagaaatgatggcggctcggatagatcgggatgtgcagatactgaatcacatcctcgatgacatcgaatttttcatcacaaaacttcaaaaggcagccgaggcattctcggaattgagcaagcgcaaaaaaaacaaaaagggaaagcgaaaggggcctggggagggggtgctgacactgcgcgccaagcctcctccccctgacgagttccttgactgtttccaaaagtttaagcacggctttaatctgctggctaagctcaaatctcatatccaaaatccctctgctgccgatctggtccactttctgttcacccccctgaacatggtcgtgcaggccactggaggaccagaactggcctcttccgtgctgtccccactgctgaataaggatactatcgactttctcaactataccgtcaacggggatgagcgccagctttggatgtctttgggaggaacctggatgaaggcacgcgcagagtggccaaaggagcagttcatcccaccttacgtgcctcggttcagaaatggatgggagcccccgatgttgaatttcatgggcgcaaccatggagcaggacctctatcagttggcagaaagtgtcgcgaatgtggccgagcaccagagaaaacaggagatcaaaaggttgtcaactgaacatagctccgtgtctgagtaccatccggccgacggctatgcctttagctccaacatctacacaagagggagccacctggaccaaggcgaggccgctgtggcattcaagcccacgtcgaataggcacatcgaccgcaactacgaaccactgaagacacagccgaaaaagtacgctaagtcaaagtacgatttcgtggctcgtaataattctgagctcagcgtgctgaaggacgacatccttgagattttggacgacagaaagcagtggtggaaagttcggaatgccagcggcgatagtggttttgtgccaaacaatatactggacatcgttcggcctccagaaagtggccttggccgggcggatcccccatacactcatacaatccaaaagcagaggatggagtacggaccacggcccgcagataccccaccggccccatccccacctcccacacctgcacccgtgccagttcccctgcccccttccacccccgcgcccgttcccgtgtcaaaagtgcccgccaatataacccgtcaaaactcatcaagttcagactctggaggtagcattgtacgagactcacagaggcacaaacaattgccagttgacaggaggaaatcccagatggaggaggtgcaggatgaattgatacaccggcttacaatcgggaggtccgcggcacagaagaaatttcacgtgcctaggcagaatgtgcccgttattaatataacatatgactcaactcctgaggacgtcaagacctggttacagtccaaagggttcaaccctgttaccgtgaacagcctgggcgtccttaacggcgctcagcttttctccctgaacaaagacgaattgcgcacggtgtgccctgagggcgcccgagtttactcacagatcacagttcagaaagctgctctggaggactctagcggttcgtccgaactgcaggagataatgcggagacgtcaagagaaaatatccgcagccgcatctgacagcggagtggagtcattcgatgagggctcatctcactag

SEQ ID NO: 115903 - DNA, 366 bp, synthetic construct
  misc_feature 1..366: note = Description of Artificial Sequence: Synthetic coding sequence
  source 1..366: mol_type = other DNA
atgaatggccatattagcaatcacccatccagttttggcatgtatccatcccagatgaacggatacgggtcttctcctacatttagtcagactgatcgagagcatgggagtaaaacatccgccaaggccttgtacgaacagaggaagaattatgccagagatagtgttagctccgtgtcagatattagccagtatagagtcgagcacctgacgacatttgtgctggatcgtaaggacgccatgattacagtggatgacggtatacggaaactgaaactcctggatgccaagggaaaggtgtggacgcaggatatgatcctccaggtggacgatcgggcagtgagcctgatcgatcttgagagctag

SEQ ID NO: 115904 - DNA, 207 bp, synthetic construct
  misc_feature 1..207: note = Description of Artificial Sequence: Synthetic coding sequence
  source 1..207: mol_type = other DNA
atgaacggacacatttctaaccatccctccagctttggcatgtatccatctcagatgaacggctatgggtcttcaccaactttctcccaaaccgaccgggaacacgggagcaaaaccagcgccaaggcgctttatgagcagcggaaaaattacgcacgcgactccgtgagttcggtatctgacatcagccagtacagagtggagtag

SEQ ID NO: 115905 - DNA, 1689 bp, synthetic construct
  misc_feature 1..1689: note = Description of Artificial Sequence: Synthetic coding sequence
  source 1..1689: mol_type = other DNA
atgatggcagcgcgaattgaccgcgacgtgcagatcctcaatcatattctggatgacatcgaattcttcattaccaagctgcagaaggcagcagaggctttcagtgaattgtctaagcgcaagaagaacaagaaaggcaaaaggaaaggcccaggtgaaggcgttctgactctgcgggcaaagcctcctccccctgatgaatttctggactgcttccagaaattcaagcacggcttcaacctgttagccaagctgaaaagccacattcagaacccctccgccgcggatctcgtgcacttcctgttcacgccactaaatatggtggtccaggccactggaggtccagagctggcctcatctgtcttatccccactgctcaataaggacacgatagattttttaaactatactgtgaatggtgacgaaaggcagctgtggatgagcctggggggtacatggatgaaagctcgggcagagtggccgaaagagcagttcattcccccgtacgtgcccaggtttagaaacggctgggaaccaccaatgttaaattttatgggagcaaccatggaacaggatttatatcaactggctgagtcagtggccaatgtggccgaacatcagagaaaacaggagataaaacgcctgtcaaccgaacattcgtctgttagcgagtatcatccagctgatggctatgccttctcttcaaatatttacacaagggggtctcacctggatcagggggaggcagccgtcgcgttcaaacccaccagtaaccgccacattgaccgcaactacgagcctctgaagacacaacctaagaagtacgctaaatccaagtatgattttgtagctcgcaacaattccgagctctccgtcctcaaagacgacatccttgaaatactggatgatagaaaacaatggtggaaggtgcgaaacgcatcgggcgatagtggattcgtgcctaacaacattctggacatcgtcaggccccctgaatccggtttgggccgcgccgatcctccctacacccataccatccagaaacagcgaatggagtatggcccccgccccgccgacactccacccgcaccttcaccgccgccaacccctgctcccgtgcctgtcccactgcccccatctaccccagccccggttcctgtttcaaaagtgccagccaacatcacccgccaaaattcctcctcctcagacagcggaggctccatcgtccgcgattcacagaggcataaacagttgcctgtcgatcgacgaaaatctcagatggaggaagttcaggatgagcttattcataggctgacgatcggacgcagcgctgcacagaaaaagtttcacgtgcccagacagaacgtgccagtgatcaacatcacttacgattctacccctgaagacgtcaagacctggctgcagtctaaggggtttaaccctgtcacagtcaattcccttggcgtcctgaatggtgcccagctgttcagtcttaataaagatgagttaagaaccgtgtgtcctgaaggggctagggtgtacagccagatcacagttcagaaggccgcgctcgaggattcatcaggatcatcagagcttcaggagattatgcggcgtcgccaagagaaaatctctgctgctgcaagcgactccggcgtggaatcttttgatgagggcagttcccattag

SEQ ID NO: 115906 - DNA, 1689 bp, synthetic construct
  misc_feature 1..1689: note = Description of Artificial Sequence: Synthetic coding sequence
  source 1..1689: mol_type = other DNA
atgatggctgcccggattgaccgtgacgtgcagattttgaatcacattttggacgacatcgagttctttattacaaagctccaaaaagcagccgaggcattttcagaattgagcaaacgcaaaaaaaataaaaaaggcaaaaggaaaggccctggggagggcgttttgactctgagggctaagcctcccccccccgatgagtttctggactgctttcaaaagtttaaacatggatttaatctgctggccaaactgaaatcacacatacagaacccctcagccgccgatctggtgcactttctatttacccctctgaatatggtcgtccaagccacgggtggaccagagcttgcttctagtgtgctatcaccactgctgaataaggataccattgatttcctgaactacaccgtcaacggcgacgagcgccaactctggatgagcctggggggtacctggatgaaggcaagggccgagtggcctaaagagcaattcataccaccatacgtgccccgcttcagaaatggctgggaaccacccatgctgaactttatgggcgcgaccatggagcaagatctgtatcagctggcagagagcgttgccaacgtagccgagcatcagcgcaagcaggagataaagcggctatcaactgagcattctagcgtatccgagtatcatcccgctgacggctacgcttttagcagcaacatctacacccgcggttcgcatttagaccaaggcgaggcggccgtggcattcaagcctaccagcaatcgacacattgacaggaattacgagccgctcaagacgcagcctaaaaaatatgcaaagagtaagtatgattttgtcgcgcgtaacaattctgaacttagcgttctgaaggacgatatactggagatcctggatgatcgaaaacagtggtggaaggtcaggaatgccagcggggattcaggattcgttccaaataacatattagatattgtaaggcctcccgagtctggactcggacgtgccgacccgccctacacacataccattcagaaacagcgaatggaatatgggcctcgcccagccgatacacccccagcacctagccctccgccaaccccagcccccgtccccgtacctctcccgccctccaccccagcacccgtacctgtgagcaaagtgcccgccaatattaccagacagaactcatcgagctcagactcaggaggctctattgttcgggatagccaaaggcacaaacaattgcctgtggaccgccgcaagtcccagatggaggaagttcaggacgaactgatccacaggttgaccattggaagatccgcagctcagaagaaattccatgtgccaaggcagaatgttcccgtcattaatataacatatgattctactcctgaagatgttaagacatggctgcagtcaaagggcttcaacccagtaacagtgaactccctgggcgtgctgaatggggcccagctcttctctttgaataaggatgagctgaggactgtttgtcctgagggagcacgggtatactctcagataactgttcagaaggcagcccttgaggactcctccggaagctctgaactccaagaaatcatgagacgccggcaggagaaaatatcagccgccgcatcagatagcggagtggaatcatttgatgaggggagtagtcattag

SEQ ID NO: 115907 - DNA, 2076 bp, synthetic construct
  misc_feature 1..2076: note = Description of Artificial Sequence: Synthetic coding sequence
  source 1..2076: mol_type = other DNA
atgaatgggcacatctccaaccacccaagcagctttggcatgtatccatcacagatgaatgggtacggctccagcccaactttttcccagaccgacagagagcacggttcaaagactagcgctaaggcactgtacgagcagcgcaagaactatgcccgcgatagcgtgagctccgtttccgacatctctcagtacagagtcgagcacctaaccaccttcgtccttgacagaaaagacgccatgatcacagtagacgacggtatccggaagctgaagctgctggacgctaagggaaaggtgtggacacaggacatgatccttcaggtggatgaccgcgccgtatctcttattgacctcgaaagcaaaaatgagctggagaacttccctctcaatacaatccagcactgtcaggctgtaatgcatagctgcagttacgactccgtgctggccctggtgtgcaaagagcccacccagaacaagcccgacctccaccttttccaatgcgatgaagtcaaggcaaatctgatcagcgaagacattgagtcggcaatctccgatagtaaaggtgggaaacaaaagaggcgaccagatgcactccggatgattagcaacgctgatccctcaataccacctcccccccgcgcaccagccccggctccaccagggacggttactcaggtagacgtgagatctcgcgtcgccgcctggtcagcatgggcggcggaccagggcgatttcgaaaagccaaggcagtatcacgagcaggaggaaactccagagatgatggcggccagaattgacagggacgtgcaaattctcaatcacatcctggatgacattgaatttttcatcacaaagctgcagaaggccgcagaggcattttccgagctctcaaaaaggaaaaaaaacaagaagggcaagcgaaaagggcccggagagggtgtgttaactctgagggctaaacctccaccccccgacgaattcctggattgcttccagaaattcaaacacgggtttaacctgctagccaagcttaagtctcacatacaaaatccgtcagcagctgaccttgtacactttttgttcactcctctgaacatggtggtgcaggctaccggcgggcctgagctagcgagcagcgtactgtcaccactgctgaacaaggatacaattgacttcttgaattacactgtgaacggagacgagagacagctttggatgagccttggcggcacctggatgaaggcacgcgcagagtggcctaaggagcagttcattccaccatatgtcccccgctttcggaacggctgggagccccccatgcttaactttatgggagccacaatggagcaagacttataccagctggctgagtccgtggccaatgttgccgagcaccaaagaaagcaggagatcaagagactgtctactgaacacagctcagtgagtgaatatcaccctgcagatggttacgccttttctagtaacatttacactcgcggcagccacctcgatcaaggtgaagccgctgttgcctttaagccaacgtctaacagacacatcgatcgcaactacgagcctctgaagacccagccgaagaaatatgcaaagagcaaatatgacttcgttgcccgcaacaacagcgaactcagtgtattgaaggacgacatattggaaatcttagatgaccggaaacaatggtggaaggtccgtaatgctagcggcgactcaggtttcgttcctaataacatcttggacatagtgcgaccccccgaaagcggactgggccgcgccgatcccccatatactcacacaattcagaagcagcgtatggagtatgggccccgccccgccgacactcctccagcccctagccctcctcccacacccgcccccgtgcctgtgccgctccctcccagcacacctgccccagtcccagtctcaaaggtccctgcgaatataacccgacagaattccagcagcagtgactccggaggatctattgtacgagattcgcagcgtcataagaccagcggagggccgaaggaaatctcagacggtggttccgctagatag

SEQ ID NO: 115908 - DNA, 207 bp, synthetic construct
  misc_feature 1..207: note = Description of Artificial Sequence: Synthetic coding sequence
  source 1..207: mol_type = other DNA
atgaacggccatatcagtaaccatccttcctcattcggcatgtacccttcccagatgaatggatacgggagcagccctaccttctcacagaccgatagagaacacggctcaaaaacttcagccaaggctctgtacgaacaacgcaaaaattatgctagagattccgtctccagcgtcagtgacattagtcaatatcgcgtggagtag

SEQ ID NO: 115909 - DNA, 2469 bp, synthetic construct
  misc_feature 1..2469: note = Description of Artificial Sequence: Synthetic coding sequence
  source 1..2469: mol_type = other DNA
atgaatggccacattagtaaccatccctccagcttcgggatgtacccctctcagatgaatggatatggttcctctccaactttttcccagacagaccgcgaacacgggtccaagaccagcgccaaagcactgtacgagcagcgcaagaattacgctagagattccgtgagctctgtgtccgatatcagccaataccgcgtcgaacaccttacaaccttcgtgctagacaggaaggacgccatgatcacagtggatgacggaatcaggaagcttaagctgttagatgctaaaggcaaggtgtggacacaggacatgattttgcaggtagacgaccgagcagtgtcactgattgatctggagtcaaagaatgaactcgagaacttcccccttaacaccatacagcattgtcaggcagttatgcactcatgctcttatgatagcgtgctggccctcgtgtgtaaggagcccactcaaaacaagccagatttgcacctttttcagtgtgatgaagtgaaggcaaacttgatctcggaagatatcgagtccgccatcagcgattctaagggcgggaagcaaaaaagacgccccgatgccctcaggatgatttccaacgccgacccttccattcccccacctcctagggctccagcccccgcccctcccgggactgtgactcaagtggatgtccggtcccgtgtagcagcatggagcgcatgggctgccgaccagggagattttgagaagccccgccaatatcatgagcaagaggagactccagagatgatggccgctcggattgaccgggacgtgcagatactgaaccacatactggatgacattgagttcttcattactaaactacagaaggctgccgaggctttcagtgagctctccaagcgcaagaaaaacaaaaagggcaaacgcaaggggccgggggagggagtgctcaccttgcgggccaagcccccacctccggatgagttcctggattgcttccaaaaattcaagcatgggttcaatcttttggccaagctgaagtctcacatccagaatccctcggccgccgatttggttcattttttgtttaccccactaaacatggtcgttcaggccacagggggtcctgaactggcctcatcagttctatctcctcttcttaataaggacaccatcgattttctgaactacaccgttaacggagacgagcggcagttgtggatgtcactaggcggcacctggatgaaggcccgggctgaatggcctaaagaacaatttattcctccctacgtaccccgcttcagaaacggctgggaaccaccaatgttgaattttatgggggcaaccatggaacaggatttgtaccagctcgccgagagcgtagccaatgttgcggaacaccaacgcaaacaagaaatcaagagattaagtacagagcattcatctgtctccgaataccaccccgccgacggctatgccttctcttctaatatttatacccggggctcccacctggatcagggcgaggccgcagttgcttttaaacccacttccaacagacacatcgatagaaactacgaaccattgaagacacagccaaagaagtatgctaaatcgaaatatgacttcgtcgctaggaataactccgaactttcagttctaaaagacgacatccttgaaattctcgatgatcgcaagcaatggtggaaagtgcggaacgccagcggggactctggattcgtacccaataacattctcgacatcgtcaggccccccgagagtggcctggggcgagcagatcctccttatacccacaccatccaaaaacaaagaatggaatatggcccccggcccgccgacacaccacccgcccctagtcctccccccacacccgccccagtgccggttcccctacccccctcaaccccagccccggtacctgtgtcaaaagtcccggcgaacattactcggcagaattctagtagctccgatagcggcgggagcatagtcagagattcacagaggcacaaacaactgccggtggaccggcgcaagagccagatggaagaggttcaagatgagctcattcacaggctcactatcggacgctctgcggctcagaagaaatttcacgtcccccgacaaaatgtccccgtcatcaacatcacttatgattctacaccagaggacgtgaagacatggttgcaaagcaagggctttaatcccgtaacagtaaactccctgggagtgcttaacggcgcccaactattttcgctgaacaaggatgagctgagaaccgtctgtccagagggcgccagggtctactcccagattacagttcaaaaggccgcacttgaagattccagtggcagcagcgaattacaggaaattatgcgtaggcggcaagaaaagatctctgctgccgcaagcgatagcggagtggagtcctttgatgagggctcttcacactag

SEQ ID NO: 115910 - DNA, 2469 bp, synthetic construct
  misc_feature 1..2469: note = Description of Artificial Sequence: Synthetic coding sequence
  source 1..2469: mol_type = other DNA
atgaacgggcacatcagtaaccatccctcttcattcgggatgtaccccagccagatgaacggatacggaagtagccccactttcagccaaactgaccgggaacacggatcaaagacctcagccaaggcgctgtatgagcagaggaaaaattatgcccgtgactccgtgagtagcgtcagcgacatctcccagtatagagtggagcatctgactacttttgtgctagacaggaaagacgctatgataactgtggacgatggaattagaaagctaaagctgctagacgccaaaggcaaggtgtggactcaggacatgatccttcaggtggacgaccgagcagtgagcttgattgacttagagtcgaagaacgagttggagaatttcccactgaacaccattcagcattgccaggctgttatgcattcctgtagctatgatagcgtactagctctggtgtgtaaagaacctactcaaaataaacccgatcttcacttgtttcagtgtgatgaggtgaaggccaatctgatcagtgaggatatcgaatcagctatttccgactccaagggcgggaagcagaagcgccgccctgacgctctgagaatgatttccaatgccgatccctccatccctccacctcctcgggcccctgcccccgccccacccgggaccgtgacccaggtcgatgtgcggagtagagtggctgcatggagcgcctgggcggccgatcagggcgattttgagaaaccacgtcaataccacgaacaggaggagacaccagagatgatggcggccaggattgaccgggacgtgcaaatcttaaaccacattctcgacgatatagaattcttcatcaccaaactgcagaaagctgcagaggcattttccgaactgagcaaaagaaagaaaaataaaaagggcaagcggaaggggccaggggaaggcgttctcactctccgcgccaaacctccccccccggacgaatttctggactgcttccaaaagtttaaacacggctttaacctgctggcaaagcttaaaagccacattcagaatccatctgctgcagatctggtccactttctgtttactcccctgaacatggtggtgcaagcgaccggtggtccagagctagcaagcagcgtgctgtctcccttgctgaataaggatacgattgacttcttgaattacactgtgaacggcgatgaacgtcagctgtggatgtccctgggcgggacgtggatgaaggccagggcagaatggcccaaagagcagtttattcctccttatgtacctcgcttcagaaatggttgggagccccctatgctgaattttatgggcgccacaatggaacaggatttgtaccagctcgcagagtccgtcgctaatgttgcagagcaccagaggaagcaggagataaagcgcttgagtactgagcatagctccgtgtctgaatatcacccggcggatgggtacgccttcagctcgaacatttacacccgcgggagccacttggatcagggcgaggcggccgttgcttttaagcctacaagcaatcgccacatagatcggaattatgaaccactgaagacccaacctaaaaagtacgccaagtcgaaatatgatttcgtggccaggaacaactcggaacttagcgtccttaaggacgatattcttgagattctcgatgatcgaaagcagtggtggaaagtcaggaacgcttccggagacagcgggtttgtgcccaacaatattctggatattgtgcgccccccagaatcaggactggggcgcgccgacccgccgtacacgcatactattcagaaacagagaatggaatacgggccaaggcccgccgacacccccccagccccctccccgcccccaacaccggcccctgttcccgtccctctgccacctagcaccccagcaccagtcccagtcagcaaggtcccagcgaacatcacacgccaaaattcgtccagtagcgatagcggcggatcaatcgttcgtgacagtcaacgtcataagcagctccccgtggaccgcaggaaatcgcagatggaggaagtgcaggacgaactcatacaccgtctgactattggccgcagtgcagcccagaaaaagtttcacgtgccaagacagaatgtccccgtcattaacattacttatgattctacaccggaggacgtcaagacctggctccagtccaagggattcaatccggtgaccgtgaattccctgggagtgttaaacggcgcccagctcttttccttaaacaaagacgagctgcgaactgtgtgccccgagggcgctcgggtttatagtcagatcactgtccagaaagcagcactggaagacagttctggttcaagtgagttgcaggaaattatgagacggaggcaggaaaagatcagcgccgccgcgtctgactctggggtggaaagttttgatgaaggatcctcacattag

SEQ ID NO: 115911 - DNA, 204 bp, synthetic construct
  misc_feature 1..204: note = Description of Artificial Sequence: Synthetic coding sequence
  source 1..204: mol_type = other DNA
atgaacggtcacatcagcaatcacccctcatccttcggcatgtacccgagccagatgaacgggtatgggtcatctccaacgttctcgcagacagatagagagcatggctcaaaaactagcgctaaagctctgtatgaacagagaaaaaattatgctcgggactccgtgtccagtgtgtccgacataagccagtatcgtgtatag

SEQ ID NO: 115912 - DNA, 387 bp, synthetic construct
  misc_feature 1..387: note = Description of Artificial Sequence: Synthetic coding sequence
  source 1..387: mol_type = other DNA
atgaacgggcatatcagcaatcacccatcaagtttcgggatgtatccgtctcaaatgaacggctatggtagctcccccacattctcacagaccgatagggagcacggttctaagaccagtgccaaagccctgtacgaacagcgaaagaactacgctcgggatagcgtgagcagcgtaagcgatatttcacaatatcgagttgagcacttgaccacttttgttctggaccgaaaagacgccatgattacagtggacgacgggattaggaaactgaagctcctagacgccaaaggcaaagtgtggacgcaagatatgatcctccaagtagacgaccgggccgtgagcttgatcgacctagagtcaaagaatgagctggagaatttctag

SEQ ID NO: 115913 - DNA, 996 bp, synthetic construct
  misc_feature 1..996: note = Description of Artificial Sequence: Synthetic coding sequence
  source 1..996: mol_type = other DNA
atgaggttcaggtttggtgtcgtggttccaccagccgtggctggagcaagaccagaactcctggttgtgggtagcagacccgagcttggtcgatgggagcctcggggagccgtccggctgcgcccagccgggacagccgccggagatggtgcattggcgctgcaagagcccggcctttggctgggtgaggtggagctggccgccgaggaagccgctcaagacggcgctgaaattggagctaccccgaagttgccctctacaatatttccttggtttgtgctgcgacaaggcctgattctagggaacggtccacaccatgatagatgctgcacttataatgagaacaatcttgttgatggcgtgtattgcctgcctatcgggcattggatcgaggctaccggacatacaaatgagatgaaacataccactgatttctactttaacatagcagggcatcaagccatgcactactctcggatcctgccaaacatctggttggggtcctgccctaggcaggtggagcacgtgactattaagctcaagcatgagctgggtattactgcagtcatgaatttccagactgagtgggatatcgtccagaatagttccggatgcaacagataccctgagccaatgactcccgacacaatgataaagctgtatcgcgaagaaggcctggcgtacatctggatgccaactccggacatgtctacagaaggtagagttcagatgttgccccaggcggtgtgtctcttacacgctctcctagaaaaaggccatattgtctacgtccattgcaacgccggggtgggccggagcaccgccgccgtatgcggatggctccagtatgtcatggggtggaatctgaggaaagtacagtacttcctgatggccaagcgaccagccgtatacatcgatgaagaagcgctggcaagggcccaggaggatttcttccagaagttcggcaaggtcaggagctccgtgtgctcactgtag

SEQ ID NO: 115914 - DNA, 996 bp, synthetic construct
  misc_feature 1..996: note = Description of Artificial Sequence: Synthetic coding sequence
  source 1..996: mol_type = other DNA
atgagattccggttcggcgtggttgtcccccccgctgtggccggagcacggcctgagctactcgttgtggggtcccgtccagagttggggaggtgggagccacgaggggctgtgaggctgcgccccgctgggaccgctgcaggagacggcgcactagctctacaggagcccgggctgtggctcggcgaagtcgagttagccgccgaggaggcagcccaggatggggctgagcctggcagggtagataccttttggtacaagttcctgaagcgcgaacctggtggcgaactaagctgggaggggaacggacctcatcatgacagatgttgcacctacaacgagaacaatctcgtagacggcgtctactgtctcccgatcggccactggattgaggcaaccggtcatacgaacgaaatgaagcacaccacagacttttattttaacattgccggccatcaggctatgcactattctcgcatactccccaacatttggctgggctcttgccccaggcaggtcgagcacgtgactattaagctgaagcacgagcttggcattactgccgtaatgaattttcagaccgaatgggacatcgtgcagaacagctctgggtgcaacagataccctgaaccaatgaccccagatacaatgattaagctctacagagaagagggtctggcttacatctggatgccaacccccgacatgtccactgagggacgagtgcaaatgctacctcaggccgtatgcctgcttcatgccctgctggagaaagggcatattgtctatgtccactgcaacgccggggtgggccgatcaacagctgcagtttgcggctggctgcaatacgtaatggggtggaacttgcggaaggtgcagtattttctcatggccaaaaggcctgcagtgtacatcgacgaggaagcactggctagggcccaagaagatttttttcagaagttcggaaaggttagaagttctgtgtgcagtctttag

SEQ ID NO: 115915 - DNA, 954 bp, synthetic construct
  misc_feature 1..954: note = Description of Artificial Sequence: Synthetic coding sequence
  source 1..954: mol_type = other DNA
atgaggttccggtttggcgtcgttgttcccccggcagtggcaggcgcccgccctgagctactcgtggtggggtcaagaccagagctggggagatgggagccgagaggcgcagtccgtctgcgccctgcaggcactgctgccggggacggtgcattggctctccaagagcccgggctgtggctcggcgaagtggaacttgccgcggaggaggccgcgcaagatggggctgagcccggaagggtcgacacattctggtataagttccttaagcgcgaacccggcggcgagctgagctgggaaggaaacgggccacatcatgaccggtgttgcacttataacgaaaacaatcttgtcgacggcgtctactgtctgccgatcgggcactggattgaggcaactggccacactaatgagatgaaacacacaacagacttctactttaacatcgccgggcaccaagccatgcattattcccggatactgccaaatatctggctgggaagctgtccccgtcaagtggagcacgtgacgattaagctcaaacacgagctgggaatcactgccgtaatgaactttcagacagagtgggatatagtgcagaacagctctggctgcaaccgctatccagagcctatgacgcccgacacgatgataaaactttatcgtgaagagggtctggcttatatttggatgccgactccggacatgtccaccgagggcagggtccaaatgcttcctcaggctgtgtgcctgctgcatgcgctgttagaaaagggacacatagtttatgttcactgcaatgctggggttggtcgcagtacagccgccgtgtgtggatggctgcagtacgtaatgggatggaatctccgcaaagttcaatatttcctcatggccaagaggcccgcggtatacattgatgaagaggccgcatcccaggacaccttccctctgtag

SEQ ID NO: 115916 - DNA, 714 bp, synthetic construct
  misc_feature 1..714: note = Description of Artificial Sequence: Synthetic coding sequence
  source 1..714: mol_type = other DNA
tgagatacattttggtacaaattcttaaagcgtgagcccggcggcgagctgtcctgggaaggaaatgggccacaccacgatagatgctgtacctataacgagaataatttggtagatggagtgtattgcctgcctatcggccattggatcgaggctacaggccacacaaatgaaatgaaacacaccactgacttttatttcaatatagctggtcaccaggccatgcactattcccgcatcctgcccaacatctggctgggatcctgccctcgacaggtggaacacgtgaccattaaactaaaacatgagctcggaatcaccgccgtcatgaacttccaaaccgagtgggatatcgtgcagaacagtagtggctgcaatcggtatcctgagcctatgaccccagacacaatgatcaagctctaccgggaggaggggcttgcttacatttggatgcctactccagatatgtccaccgaaggccgagtgcagatgctaccgcaggcggtgtgcttgttgcatgctctgttggaaaagggacatattgtctacgtgcactgcaacgccggggtgggcaggagcactgccgctgtgtgcggttggctgcagtacgttatgggctggaatctgcgaaaagtgcagtatttcctcatggcaaagcgacctgccgtgtatattgacgaggaggccgcctctcaggataccttccccctgtag

SEQ ID NO: 115917 - DNA, 513 bp, synthetic construct
  misc_feature 1..513: note = Description of Artificial Sequence: Synthetic coding sequence
  source 1..513: mol_type = other DNA
tagaatggacctcaccacgacaggtgctgtacctacaatgagaataacctggtggacggagtgtactgcttgccgatcggacattggattgaggctaccgggcatacgaacgagatgaagcatacaactgatttctacttcaacattgcaggccaccaggctatgcattattcacgcatcttgccaaacatttggttaggatcatgcccgaggcaagtggagcacgtcactattaagctgaagcatgagctgggaattacagcggtaatgaactttcagactgaatgggatatcgtccaaaattcttctgggtgcaatcgctatcccgaaccaatgacaccagatactatgatcaagttgtatcgcgaagaaggactggcgtatatatggatgccgaccccggacatgtccactgaagatgaaaaacgaaccgccgatatgtgctgcagcggcatgtgggaggaaacagctgacttcggactaggtattttggactatctgaaacaaaagtag

SEQ ID NO: 115918 - DNA, 813 bp, synthetic construct
  misc_feature 1..813: note = Description of Artificial Sequence: Synthetic coding sequence
  source 1..813: mol_type = other DNA
atgcggttccggtttggagtggtggtcccccccgcagtggctggcgcgaggcctgagttgttggttgtgggctctaggcccgaattgggccggtgggagccacgtggcgctgtccggctaaggccagccggaacagccgccggggacggcgcactcgcgttgcaggagcccggcctttggcttggcgaggtagaactggcagccgaagaggcggcccaggatggggcagaacccggccgggtcgacacattttggtataaattcttgaagagggagccaggtggtgagctaagttgggaggggaacggcccccatcacgatcgttgttgtacttacaacgagaataatctcgtcgacggggtgtattgcctacccataggccattggatcgaggccacgggacatacaaacgagatgaaacatacaacagatttttattttaatatcgctggacatcaggcaatgcactattctcggatcctccccaacatctggctcggctcctgcccacgccaggtcgaacatgttactataaaattgaagcacgagctcggcattaccgcggtcatgaacttccagaccgagtgggatatcgtgcagaacagttcaggttgcaaccgctaccccgagcccatgactcccgacacgatgatcaagctctacagagaggagggtctagcttacatatggatgcccacacccgatatgtctacagaggacgaaaaacgtacggcagatatgtgctgctctggaatgtgggaggagacagctgacttcggcctgggaatcctcgattaccttaagcaaaagtag

SEQ ID NO: 115919 - DNA, 945 bp, synthetic construct
  misc_feature 1..945: note = Description of Artificial Sequence: Synthetic coding sequence
  source 1..945: mol_type = other DNA
atggcacctccgcaggtgctggctttcggactcctgctggctgccgctacggccacattcgcagccgcccaagaggagtgtgtgtgtgagaactacaagcttgccgttaattgcttcgtgaataacaatcggcaatgccagtgtacctccgtcggagcccaaaataccgtaatttgcagcaaactcgccgccaaatgtctggttatgaaggcggagatgaatggcagcaaactcggaaggcgcgctaagcccgaaggcgctttacagaataatgacgggttgtatgacccagactgcgatgaatctgggctgtttaaggctaaacaatgcaacgggacgagcatgtgttggtgtgttaacactgctggggttagaagaaccgataaagacaccgaaataacctgttcagaaagagtacgaacttattggatcatcatagagctgaagcacaaagcccgcgagaagccctatgatagtaagagcctgaggaccgccttgcagaaagaaatcactactagataccagttagatccgaaattcatcacgagtattctctacgaaaataacgtcataacaatagacctcgtgcaaaattcctcacagaagacccagaatgacgttgatatcgccgacgtggcttactacttcgagaaggacgttaagggagagtcattattccactccaaaaaaatggatcttactgtgaacggggagcagctggacctcgacccgggccagacactcatctattatgttgatgaaaaagcccccgagttctcaatgcagggactaaaagctggagtcatcgccgtgatagtggtggttgttattgcagtggtggccggcatcgttgtactggtgatatccagaaaaaagagaatggcaaaatacgagaaggccgagatcaaagagatgggggagatgcacagagagttaaatgcctag

SEQ ID NO: 115920 - DNA, 474 bp, synthetic construct
  misc_feature 1..474: note = Description of Artificial Sequence: Synthetic coding sequence
  source 1..474: mol_type = other DNA
atgctcgttctcctggccggcatcttcgtggtccatatcgccaccgtgatcatgttatttgtctctactatagccaatgtgtggctggtgtccaacaccgttgatgcttctgtcgggctgtggaagaactgtacaaatatatcctgcagtgattcgctatcatacgcgtccgaagatgctctcaaaactgtgcaggcgtttatgattctaagtatcattttctgtgtgatagctcttctggttttcgtgtttcaattatttaccatggagaaaggtaatcgtttctttctgagtggggctactaccctcgtgtgctggctttgcattttagtgggagtgtcaatctacacttcccattacgctaacagggacggaactcaataccaccacgggtatagctacattcttggttggatctgcttctgtttcagttttatcatcggcgttctctaccttgtgctcagaaagaaatag

SEQ ID NO: 115921 - DNA, 426 bp, synthetic construct
  misc_feature 1..426: note = Description of Artificial Sequence: Synthetic coding sequence
  source 1..426: mol_type = other DNA
atgctcgtgctccttgccgggatcttcgtggtgcatattgccaccgtgatcatgctctttgttagcaccattgccaacgtttggttagtgagcaacaccgtggatgcctccgtcggcctgtggaaaaattgcacaaatatatcctgtagcgatagccttagttacgcgagtgaagacgccttgaagacggtgcaggcttttatgatcctcagtatcattttttgcgtcattgcattgcttgtgttcgtatttcagttgttcaccatggagaagggaaacaggttctttcttagtggggctactaccttagtatgttttattatgcggattgttatggagcgctcaatcaccacagcgatacccaccagttgggctggctctgcatcagcttctgcttcgagtagcgcgttttcaatttggtcttag

SEQ ID NO: 115922 - DNA, 12 bp, synthetic construct
  misc_feature 1..12: note = Description of Artificial Sequence: Synthetic coding sequence
  source 1..12: mol_type = other DNA
atgctggtgtag

SEQ ID NO: 115923 - DNA, 504 bp, synthetic construct
  misc_feature 1..504: note = Description of Artificial Sequence: Synthetic coding sequence
  source 1..504: mol_type = other DNA
atgctcgtcctgcttgccttcattatcgccttccacatcacttccgccgctctcttattcattgcgacagtggacaatgcttggtgggtcggcgacgagttttttgccgacgtgtggcggatctgtaccaacaatactaactgtacggtaatcaatgactcgtttcaggagtatagcacgctacaggccgtccaggcgacaatgattctgtctacaatcctatgttgtatcgcctttttcatttttgtactgcagctattcaggcttaagcaaggagagcgattcgtactgacctccattattcaactcatgagctgcctgtgcgttatgattgccgcttctatctatactgacagacgcgaggacatccacgataaaaatgccaagttctatccggtaacccgagaaggtagctacggctactcatatatcctcgcatgggtcgctttcgcctgcacattcatcagcgggatgatgtatctgattctcagaaagaggaagtag

SEQ ID NO: 115924 - DNA, 504 bp, synthetic construct
  misc_feature 1..504: note = Description of Artificial Sequence: Synthetic coding sequence
  source 1..504: mol_type = other DNA
atgctggtcttgctggcatttatcatcgccttccatatcacctccgccgctctgttattcattgccacagtagataacgcctggtgggtgggagacgagttcttcgccgacgtgtggcggatttgtactaataatactaactgtacagtgataaacgattccttccaggagtactcaactttacaggccgtccaggcaaccatgattctatctacaatattatgctgtatagccttctttatcttcgtgctgcaactcttccgcctgaagcagggcgaacgttttgtattaaccagtataatccagctcatgtcctgcctgtgcgtcatgatcgcggcttccatctacaccgaccgcagggaggatatccacgataagaatgccaagttttatcctgtgacccgggagggaagttatggatacagttacattctggcttgggtcgccttcgcatgtacattcatctccgggatgatgtacctcattttgcgaaagcgcaaatag

SEQ ID NO: 115925 - DNA, 492 bp, synthetic construct
  misc_feature 1..492: note = Description of Artificial Sequence: Synthetic coding sequence
  source 1..492: mol_type = other DNA
atgagcctgctgcttctggtggtgtccgcactgcacattctgatcctgattttactcttcgtggcgacgctcgacaaatcttggtggacgctgcctgggaaggaatctctgaatttgtggtacgactgcacatggaataatgacaccaagacctgggcctgctcaaacgtcagtgaaaacggatggctgaaggcagtccaggtcttgatggttctttctctcattctttgctgcttgtcgttcatcctctttatgttccagctatataccatgagaagaggcggactgttttacgcaactggcttgtgtcagctgtgtacatcggttgccgttttcacaggtgccctcatatatgccattcacgctgaagagattctcgagaagcaccccaggggcggcagcttcgggtactgcttcgccctcgcctgggtcgccttcccccttgcactcgtgtccggaattatctatatccacttgcgcaaacgcgaatag

SEQ ID NO: 115926 - DNA, 2034 bp, synthetic construct
  misc_feature 1..2034: note = Description of Artificial Sequence: Synthetic coding sequence
  source 1..2034: mol_type = other DNA
atgaccgcgtcaccagactaccttgtcgtgctgtttggaattacagcaggggctaccggtgcaaagttgggcagtgacgaaaaggaactcatcctcctgttttggaaagtcgtggatctggcaaacaagaaagtcgggcaactacatgaagtgctcgtgcgacctgaccaactggagctgaccgaagattgtaaggaggagacgaagatcgatgtggaatctctctcctccgcatcacagctggaccaagcccttcgtcagttcaaccagagcgttagcaatgaattgaacattggtgttggaacttcgttctgcctctgtaccgatggacaactgcacgtccgtcagatccttcatccggaggcctctaagaaaaacgtactgctgcctgaatgtttttattcctttttcgacttgagaaaggagttcaagaagtgctgtccaggcagccccgacatagataagctcgatgtggccacgatgactgaatacttaaacttcgagaaatcctcgtctgtgtcccggtatggcgcatcccaagtggaggatatgggtaacataattctggcgatgatctccgagccatacaatcatagattttctgacccagaaagggtcaactataaatttgagagtggcacctgttccaaaatggagcttatagatgacaacacagttgtgcgggctaggggcctcccttggcagagctcagaccaggacatcgctcgcttttttaagggactgaacattgcgaaaggaggtgctgccctttgcctgaatgctcagggcagaagaaatggcgaagccctagtgcgctttgtctcggaggagcaccgagatttagccctgcagcggcacaagcatcatatggggactcggtatatagaagtgtataaagccaccggggaagatttcttgaagatcgctggtgggacctccaacgaagttgcccagttcctgagcaaagagaaccaagttatcgttcggatgcgtggccttcctttcacagctaccgccgaggaggtggtcgcgttctttggccagcactgccctattacaggtggcaaagaagggatattatttgtcacttaccccgatggaaggcccaccggagacgcgttcgtcctgtttgcatgtgaggaatacgcccaaaacgctctgcgtaagcacaaagatcttctgggcaaacgctatatcgagcttttccgatccactgctgctgaggtacagcaggtcctaaaccggttcagctccgcccctttgatccccctcccaacgccacccattatccctgtcctcccacagcagttcgtacccccaaccaacgtgagggactgcattcgactgagggggctgccgtatgctgcaactattgaggatattctagatttccttggcgagtttgctaccgatattcgaactcatggtgtccatatggtattaaaccaccagggacgcccatccggcgacgcgtttatccagatgaagagcgccgaccgggcattcatggctgcacagaagtgccataagaaaaacatgaaagaccgatatgtcgaggtgttccagtgcagcgcagaggaaatgaacttcgtgttgatgggagggacattaaatcgaaatggcctgagccctcccccttgtctgtccccaccttcttacacttttccagcccctgccgcagtcataccaacagaagccgctatctatcaaccttcagtcattctaaaccctcgagcgcttcaaccgtcaaccgcgtattacccagccggcacgcaactgtttatgaactacacagcatactacccttcccctcccgggtcacccaacagcctgggctatttccccactgccgcaaatctgtccggggtgcctccacagcctggcaccgtggtgagaatgcaggggttagcttacaatacaggcgtaaaggaaatactgaatttcttccaaggatatcagtatgcgaccgaggatgggctgatccataccaacgaccaggctaggaccctacctaaagaatgggtgtgtatctag

SEQ ID NO: 115927 - DNA, 1980 bp, synthetic construct
  misc_feature 1..1980: note = Description of Artificial Sequence: Synthetic coding sequence
  source 1..1980: mol_type = other DNA
atgactgctagccccgactatctggtagtcctcttcggcataacggctggtgctacaggcgctaaattaggctccgacgagaaggaactgatacttttattttggaaggtggtagatctcgcaaacaaaaaagtgggacagctgcatgaggtgctcgtgaggccagatcagttggaactgaccgaagactgcaaggaggaaacaaagatcgacgtggaatcactgtccagtgccagccagcttgaccaagccctgcggcaatttaaccagagtgtatccaatgagctgaatataggcgtgggcacctccttttgtctgtgtactgacggacaactccatgtgaggcagatcctgcaccctgaggcctctaaaaagaacgttcttctgccagaatgtttttattctttttttgatctaagaaaggaattcaagaaatgctgtcctggttcccctgacatcgataagttggatgtggctactatgactgagtaccttaacttcgagaaaagtagcagcgtcagccggtacggcgcaagccaggtcgaagatatgggtaacattatcctagcaatgatctccgagccatacaatcatcgatttagcgacccagagagagttaattataagttcgaaagcggaacgtgtagcaaaatggagctcatcgatgacaacacagtggtgcgcgctcgtgggttgccctggcagtcctcggatcaggacattgcacgctttttcaaagggctgaacatcgctaaggggggtgctgccttgtgcctcaacgctcagggccgccgtaacggggaggctttggtccgattcgtctcagaagagcaccgcgaccttgccttgcagcgccacaagcaccatatgggcaccaggtatatcgaagtgtacaaggccacaggtgaagatttcctcaagattgctggggggacgtccaacgaggtcgcgcagttcctcagcaaggaaaaccaggtcattgtgaggatgcgcgggttgccgttcactgcgaccgcagaggaagtcgtagctttcttcggccagcactgtccaatcaccggtggcaaagaaggcattttatttgtgacctaccctgatgggaggcccaccggcgatgccttcgtactgttcgcttgtgaggaatacgcccagaacgcccttcgcaaacataaggatttacttgggaaaaggtacatcgaactgtttagatcaactgcggctgaagtgcagcaagtcctcaatagattttcctcggcaccactgattccgctccccacccctcctataattccagtgttgcctcagcagtttgtaccccccactaacgtgagggattgcatacgcctgcgcgggctgccttatgccgccaccatagaagatatcctggatttcctgggagagtttgctaccgatatcaggacccacggcgtccacatggtcctaaatcatcaggggcgaccctcgggcgacgcgttcatccagatgaaaagcgctgacagggcctttatggccgctcagaagtgtcacaaaaaaaacatgaaagaccggtatgtcgaagtgtttcagtgttcagccgaagagatgaactttgtcttgatgggtgggacacttaaccgcaacggattgtcccctcctccctgtctgtcgccgccctcctatacgttcccagctccagctgcggtgattccaaccgaagccgctatctaccaaccttcagtgatactgaaccccagagccctgcagcctagtaccgcctattatcccgccggcacacagcttttcatgaactacactgcatactaccccagtccacctggcagtcctaattctctggggtattttcccacggccgccaacctctctggagtgcctccgcagccaggtaccgtggtgcgtatgcagggactggcctataataccggggtgaaggaaatcctcaacttttttcaggggtaccagtgcctcaaagatgtgtggtag

SEQ ID NO: 115928 - DNA, 2046 bp, synthetic construct
  misc_feature 1..2046: note = Description of Artificial Sequence: Synthetic coding sequence
  source 1..2046: mol_type = other DNA
atgacagcctcccccgactatctggtggtcctatttggcattaccgcgggcgctaccggtgctaaacttggaagcgatgagaaggaacttattctgctcttttggaaggtagttgacttggctaacaaaaaggtagggcagctccacgaggtgcttgtacgccctgaccagctggaactcactgaggattgtaaagaggagactaagatcgacgtcgaaagcctgtcttctgcctctcagctcgaccaggcgttgcggcaatttaatcagagtgtgagcaatgagctaaatataggcgtgggcaccagcttttgtctgtgcacggacggccagctgcatgtgcgccagatcttgcaccctgaggcaagtaagaagaacgtcttgcttccagaatgcttctatagtttttttgacctgaggaaggagtttaagaaatgttgtccaggtagccccgacatcgataagttagacgtggccaccatgacggagtatctcaacttcgagaaatcgtccagtgtgtccaggtacggggcctcccaggtggaagacatggggaatatcattctggccatgatatctgagccttacaaccatagattctcagatcctgagagggtcaattacaaatttgagtccggtacctgtagcaagatggaattaatcgacgacaacacagttgttcgggcccgaggactcccttggcaaagcagcgatcaggatatcgcaagatttttcaagggcctgaatatagcgaaaggcggagctgcattatgtctgaacgcgcaagggcgacgtaatggtgaggcactggtgaggttcgtgtccgaggagcaccgggatctggctctgcagaggcacaagcatcacatgggtacccgctatatcgaagtgtacaaggctactggggaagactttctgaagatcgccggcggaaccagtaatgaggtggctcaattcctgtcaaaggagaatcaggtaatcgttcgtatgcgggggctgccctttactgctacagctgaagaggtggtggcctttttcggacagcactgcccgatcaccggtgggaaggaaggaatcctttttgtgacctatcctgatggcagacctacgggtgatgccttcgtgcttttcgcctgcgaggagtatgcacaaaacgcacttcggaaacataaagatcttcttggcaagcggtacatcgagctcttccgctcaactgctgccgaggtccagcaggtcctgaaccggttctctagcgcccctctgattcccctgcctactccaccaatcatccccgtgctaccccagcaatttgtcccccccaccaatgtgcgtgactgtatccgcctgaggggcctgccttacgccgctacaatcgaggacatcctggacttcttgggggaatttgcgaccgacattcgcacacacggggtgcatatggtactgaatcaccaggggaggccttcaggggacgcttttattcagatgaagagcgctgatcgggcctttatggcggcccagaaatgccacaaaaaaaatatgaaagatagatatgtggaggtgttccagtgttcggctgaagaaatgaacttcgtgctgatgggcggaactctaaaccgcaatgggctgtctcccccaccctgtaagctcccatgcctgtcaccacccagctacacctttccagcccccgctgccgtcattcctactgaggctgcgatatatcagccatcggtcatcctgaatccacgggccttgcagcccagtactgcgtactacccagccggaactcagctctttatgaattacacagcctactatccatccccacctggtagtccaaactctctgggatactttcccactgcagccaatctctcaggtgtgcctccacagccaggcactgttgttcgaatgcaagggctggcctataacaccggggtaaaagaaatcctgaactttttccaaggctaccagtacgccaccgaagacggccttatccataccaatgaccaggccaggactttgccaaaggagtgggtttgcatctag

SEQ ID NO: 115929 - DNA, 1827 bp, synthetic construct
  misc_feature 1..1827: note = Description of Artificial Sequence: Synthetic coding sequence
  source 1..1827: mol_type = other DNA
atgacagcatcccctgattacctggtcgtactgttcggaattactgcgggagccaccggtgcaaagctgggctcagatgaaaaagaacttatcctgctgttctggaaggtggtcgatctcgcaaataagaaggttggacagctccatgaagtgctggtaagacctgatcagctggagctaactgaagactgcaaagaagagactaaaatcgacgtggagagtctgagtagcgcctcccagctcgaccaggccctcaggcagtttaatcagagtgtcagcaacgaactcaatattggagttggaacctcattctgtctgtgcaccgatggccagctgcatgtgcgccaaatcctgcaccctgaagcttctaagaagaatgtattactccccgaatgtttttacagtttctttgacctccggaaggagttcaagaaatgttgccctggatcccccgacattgacaaacttgatgttgcgacaatgacagagtatctcaacttcgagaaatcaagctcagtcagtagatatggagcctcacaggtcgaagatatgggcaacataatcctggcaatgatttctgagccctacaaccatcggttcagtgatccggagagggttaattacaaattcgaatcaggtacctgttctaaaatggagcttattgatgataacactgtggtacgggcacgcggactgccatggcagtcctcggatcaggatattgcaaggtttttcaaaggcttgaacatcgcgaaaggaggggctgccttgtgtcttaatgctcagggacgcagaaatggagaggcactagtacggtttgtttccgaagagcatagggacctcgcactacagcggcacaagcatcacatgggaacacggtacatcgaagtttacaaagccacgggggaggatttcctcaagattgcaggcgggaccagcaacgaggttgcccagttcctctccaaggagaaccaagttatagtccggatgagagggctcccctttacagccacagcagaagaggtggtggcattctttggccagcactgcccaatcaccgggggaaaagaaggcatcctcttcgtcacttacccagacggccgccccactggggacgcattcgtgctgtttgcatgtgaggaatatgcccagaacgccctgaggaaacataaagatctcttggggaagcggtacatcgagttattcagatcaacggcggcagaagtgcaacaagtgctaaataggttctcatcagcccccctgatacctctgcccacaccacctattattccagttctcccacagcagttcgtgccccctaccaatgtcagggactgcatccgtctgcgggggcttccctacgctgccactatcgaggatatcctcgactttctgggagaatttgccaccgacatcagaacccatggagtccatatggtcctgaatcatcaggggaggccttccggtgacgcgttcatccaaatgaagagtgccgaccgcgcctttatggccgcccagaagtgccataagaaaaatatgaaggatcggtacgtggaggtcttccaatgctccgctgaggaaatgaatttcgtactgatgggaggaaccctgaaccgcaacggattgtcccccccaccttgcaaactgccttgtctgtcgcctccatcctacacattccctgccccggccgccgttattcccacagaggcagctatttaccaacccagtgttattctcaacccaagggccctgcagccctctacggcatattatcccgcggggactcagctctttatgaattacaccgcgtattacccctccgtctag

SEQ ID NO: 115930 - DNA, 2154 bp, synthetic construct
  misc_feature 1..2154: note = Description of Artificial Sequence: Synthetic coding sequence
  source 1..2154: mol_type = other DNA
atgacacctccccctccgccccctcctccaccaggacccgacccggcagccgatcctgccgccgacccgtgcccttggcccggctcactggttgtcctctttggagccaccgccggagctctaggccgagatttgggttctgacgaaacggacttaattctcttggtctggcaggttgtggaaccgcggagtcggcaggtcggaactctgcataagtctctcgtgagagccgaggcagccgcactttccacacagtgcagagaggcttctggtctctccgctgatagtttggcccgcgctgagcctcttgacaaggtcctgcagcagttctctcagctggtcaacggagatgttgccctgctgggtggaggcccgtatatgctgtgcactgatggtcagcaactcctgagacaggtcttgcacccagaagcatctagaaagaaccttgtactgcccgatatgttcttctccttctacgacttgcgacgggaattccatatgcagcatcccagcacctgtcctgctcgggatctgacagtcgccacaatggcacagggcctgggtctagaaactgacgcgacagaagatgatttcggcgtgtgggaggtgaagaccatggtggcagtaatcctgcacctattaaaggagccgtcttcccagctgtttagtaaaccggaagtcatcaagcagaagtacgagactggcccatgctctaaagcagacgtggtggattctgaaacagtggtgcgcgctcgggggctaccatggcaatctagcgatcaagatgttgcacggtttttcaagggcctcaacgttgctcgcggaggagtggccctgtgcctgaacgcgcagggccgccggaacggcgaggccctcattcgcttcgtggactcagaacaaagggacttagctctccagagacataaacaccatatgggagtaagatatatcgaggtgtataaggccacaggggaggaatttgtcaagatcgccgggggaactagtttggaggtggcccgatttctgtcgcgagaagaccaggttatcttgcgccttcggggcctgccattctccgccgggcctacggatgtgctcggctttctgggacctgagtgtcctgttactggaggtaccgaaggccttctcttcgtccggcatccagatgggaggccaaccggagacgcctttgcattgttcgcttgcgaagagctggcccaagcagcactgagacgccacaaggggatgctcggcaaacgatacatagaacttttcaggtcgaccgccgctgaagtgcaacaagtactgaatcggtacgccagcggccctctgctccccaccctgactgcaccactccttcccatcccatttcctctcgcacctggaactgggcgggactgcgttagactgagaggtttgccctatactgccaccatcgaagacatcctgtctttccttggcgaagccgccgcggatatccgacctcatggtgtccacatggtgttgaatcaacaggggagaccctctggagacgccttcatccagatgacatccgctgagagggccctggccgcggctcaacgatgccataagaaggttatgaaggaacggtatgtagaggtcgtaccttgctccactgaagagatgtctcgggtcctgatgggggggaccctcggccggtccggcatgtccccccctccatgcaagctgccctgcctgagccccccgacctacactacattccaagccactccaaccctgatccccactgagacagccgccctgtacccctcaagcgcccttctgccagcagccagagttcccgccgcccctacacccgtcgcctactacccagggccggctacccagctgtatctaaattacacagcgtactacccgagccctccagtgagtcccaccactgtcggctacctgacgacccccacagcagcactggcgagcgcccctacgtccgtcttgagtcagtccggagccctggttcggatgcagggggtgccttacacagcaggaatgaaagatctgctaagcgtgttccaggcttaccagttgcccgccgatgactacacgtcgctgatgcccgtgggtgacccaccacgtacggtcctgcaggccccaaaggagtgggtgtgcctgtag

SEQ ID NO: 115931 - DNA, 924 bp, synthetic construct
  misc_feature 1..924: note = Description of Artificial Sequence: Synthetic coding sequence
  source 1..924: mol_type = other DNA
atgaacacccgcaaccgggtagtcaactccggactgggggccagtcctgcttcacggcctactagagaccctcaagacccatccgggagacaaggggaactgtctccggtggaggaccagagagagggactcgaagctgccccgaaggggccatcgcgagagtctgtggttcacgccggccagcgacgcacatcagcatacacgctgatcgcccctaacattaatcgtaggaacgaaatccaacgcattgccgagcaggagcttgccaatctagagaagtggaaggagcagaaccgggctaagcctgtgcacctcgttcccagacgactgggtgggtcccagagtgagactgaggtgcgacagaaacaacagctgcaactgatgcaatccaagtacaaacagaaactgaaacgtgaggaatctgtgaggatcaagaaggaggccgaagaggccgagttgcagaagatgaaagccatacagcgggaaaagtctaacaaactggaggaaaagaaacgcctacaggaaaacctaaggagagaagcctttagggaacatcagcaatacaagacagctgaatttctgagtaaactgaacacagaatcccccgaccgcagtgcctgccaatctgccgtgtgtggcccccagagttctacgtgggcccggagttgggcctacagagactcattaaaagctgaagagaatcgaaagctgcagaaaatgaaggatgagcagcaccagaagtcagagcttttagagctgaagagacaacaacaggagcaagagcgcgctaaaatccatcaaactgagcatcgaagagtgaacaatgcattcctggaccgcttgcaagggaagtcgcagccgggcggcctggagcagtccggagggtgctggaacatgaattccggcaactcctggggtatttag

SEQ ID NO: 115932 - DNA, 1233 bp, synthetic construct
  misc_feature 1..1233: note = Description of Artificial Sequence: Synthetic coding sequence
  source 1..1233: mol_type = other DNA
atgaatacaagaaatagagtggttaatagtgggcttggtgcctccccggcctcacggccgacgagagatccccaggatccgagcggccgccagggcgaattatcaccagtggaagaccagcgggagggcctcgaagccgcaccaaagggcccctcacgggagtctgtagtgcatgccggtcaaagaaggacaagcgcatacacacttattgctccaaacatcaacagacgcaacgagatccagagaatcgcagagcaggagttggctaacctcgagaaatggaaggaacaaaatcgagcgaaacctgtccacctcgtccctcggagacttggtggctcccagtctgaaacggaggtgcgccaaaagcagcaactgcagctgatgcagtcaaagtacaaacagaagctaaaaagagaagaatcggtccgcatcaaaaaagaggctgaagaggccgagcttcagaagatgaaggcaattcaacgcgaaaaatccaacaaacttgaggagaagaagcgcctgcaggaaaatctgagacgggaagccttccgagagcaccagcagtataagacagccgagtttctgtcaaaattgaatacagagtccccggacagatcagcatgtcagagcgccgtgtgcggtccgcagtcttctacttggaaattgccgatacttcctcgggatcattcctgggcccggtcatgggcctaccgagactccctcaaggccgaagagaatcggaagctccagaagatgaaggacgagcagcatcagaaaagtgaactactcgagctgaagagacagcagcaagaacaggagagggcaaaaatccatcagacagaacaccgacgtgtcaataacgctttcttagatcgactccagggaaagagccagcccggggggctcgaacagagtggcgggtgctggaatatgaactctggaaactcctggggctcactgctggtcttttcccggcatctgcgggtatatgaaaagatcctcaccccaatttggccttctagcactgacctggaaaaaccacacgaaatgctgtttctaaacgtgatcctattctccttgaccgtctttactcttatttcaactgctcatacgctggatcgggcggtacgtagcgactggctactactggtgctgatctacgcttgtctcgaagagttaatcccagaactgattttcaatctatactgccagggaaacgcaactttgttcttttag

SEQ ID NO: 115933 - DNA, 1368 bp, synthetic construct
  misc_feature 1..1368: note = Description of Artificial Sequence: Synthetic coding sequence
  source 1..1368: mol_type = other DNA
atgtggctggagatactgctgaccagcgtgctgggctttgctatctattggttcatttctcgggataaagaagagaccctgcctttggaagacgggtggtggggtcccggcacccgctcagcagcccgggaggacgattctatcaggcccttcaaggttgaaacgagcgatgaagaaattcatgacctgcatcagaggatcgacaagttcaggttcacccctccactcgaagatagctgcttccactacggtttcaattcaaattacttgaaaaaggtgatctcatattggcggaatgagttcgattggaagaaacaggtagagattctcaacaggtacccacattttaaaactaaaatcgaaggcttggatattcattttatccacgtgaaacctccgcagctcccagctggacatacgcccaaaccactgctgatggtacacggatggcctggcagcttctatgagttttacaagattatacccctactgaccgacccgaagaaccacggcctgtccgatgagcacgtgttcgaggtgatttgtccttcaataccaggatatggcttttccgaagcaagttctaagaagggctttaacagcgttgctaccgcgagaatattttacaagctgatgcttcgcctgggctttcaggagttttacattcagggcggcgattgggggtctctaatatgcaccaatatggcacagttggtgccctctcacgtaaagggactgcatctcaacatggccctggttttgagcaatttctccacactcaccttattgttagggcagagatttggcagattcctgggtctgacagagcgcgatgtagagcttctgtatcctgtgaaggaaaaggtcttctatagcctgatgagggaaagcggctatatgcatattcaatgcactaagccagatacagtgggaagtgccctgaatgactcccctgttgggctggccgcttacattttagaaaagttttctacctggaccaatacagaattcagatacctggaggatgggggcttagaaaggaagttcagcctggacgatcttctgacaaacgtgatgctgtactggactaccgggactattatatcttcccagcgcttctacaaggagaacctgggacaggggtggatgacacaaaaacacgaaaggatgaaggtgtacgtcccgaccggattttcagcctttccgtttgagctgttgcacacccccgaaaaatgggtgcgtttcaaatatcctaagctgattagttattcgtatatggtcagaggcggccacttcgccgcctttgaagagccggagctgctggcacaggatatccgcaagttcttgtcagtgctggaacgtcagtag

SEQ ID NO: 115934 - DNA, 1368 bp, synthetic construct
  misc_feature 1..1368: note = Description of Artificial Sequence: Synthetic coding sequence
  source 1..1368: mol_type = other DNA
atgtggcttgagatcctgctcactagcgttcttggcttcgccatctactggttcatcagccgggataaagaggagactctcccactggaagacggctggtggggcccaggcacacggagcgccgctagggaagatgacagtatccgcccattcaaggttgaaacaagcgacgaagaaatccacgatctacatcaacgcattgacaaattccgttttacacccccgttggaggatagttgtttccactacggattcaacagcaattacttgaagaaagtaataagctattggagaaacgagttcgattggaaaaaacaggtagagatcctaaaccggtaccctcatttcaagaccaaaattgagggcttggacattcacttcatccacgtcaaaccaccacaactgccagcaggccatactcccaagcccctgctaatggtgcatggctggccggggagtttctacgaattctataaaattattccactgctaacagatcccaagaaccacggcttgtccgacgaacatgtttttgaggtgatttgcccctctatccccggctatggattcagtgaagccagtagcaaaaaaggtttcaatagcgttgctactgccaggattttctataaactcatgctacgcctgggtttccaggagttctacattcagggcggtgattggggaagtcttatctgcacaaatatggcccagctcgttccttctcatgttaaaggcttgcacctgaatatggctctggttttatctaacttctccacccttaccctgctgttaggacagagatttgggagattcctggggctcactgagcgagacgtggagctgctgtatccagtcaaggaaaaagttttctacagcctgatgcgcgaatccggctacatgcacattcagtgcacaaaaccagacaccgtgggatctgctctcaacgatagtcctgtgggtctggccgcatatatactcgagaagttttcaacctggactaacacagagttcagatacctcgaagacggcgggcttgaacgaaagttctcactggacgacctcctcaccaatgtgatgctctactggacaacaggcaccattatctctagccagcgcttctacaaggagaacctgggtcaagggtggatgacccagaagcacgagcggatgaaagtgtatgtgcccacaggcttcagtgctttcccttttgagcttcttcatacaccagagaagtgggttcgatttaagtatccaaagctcatttcctatagctatatggtacgtggcggccatttcgccgcgttcgaagagccggagctgttggctcaggacataagaaaattcttaagcgtgctagaacggcagtag

SEQ ID NO: 115935 - DNA, 486 bp, synthetic construct
  misc_feature 1..486: note = Description of Artificial Sequence: Synthetic coding sequence
  source 1..486: mol_type = other DNA
atgtggttggaaattcttcttaccagcgtcctcggcttcgccatttactggttcattagtcgggataaggaggagacactgcccctggaagacggatggtggggcccaggcactcgatctgccgctcgggaagatgactcaatccgcccatttaaggttgaaacgagcgacgaggagatccacgacctgcaccagagaatcgacaaattcaggtttacccctcctttggaggactcctgcttccactatggcttcaactcaaattatctgaagaaagtcattagctactggagaaatgagttcgactggaagaagcaggtggagatcctgaatcggtaccctcacttcaagaccaagatagaaggactagatatccactttatacatgtgaaaccgccccagttgccggccggccacaccccaaaaccactgttgatggtccacggctggccaggaagtttttacgagttttacaagatcatctag

SEQ ID NO: 115936 - DNA, 411 bp, synthetic construct
  misc_feature 1..411: note = Description of Artificial Sequence: Synthetic coding sequence
  source 1..411: mol_type = other DNA
atgtggttagaaatccttctcacgtctgtcttggggttcgcgatatattggttcatctcccgcgacaaagaagaaaccctgccacttgaagacggatggtgggggccaggcacacgttctgctgcacgggaggatgactctattcggccgttcaaagtggagacttctgacgaagaaatccacgatctgcatcagcgcattgataagttcaggttcaccccccccctcgaggactcatgcttccattatggatttaactccaactatttgaagaaggtgatctcatactggagaaatgagttcgactggaagaagcaggtggagatacttaataggtatcctcacttcaagaccaagatcgagggtctagacatccatttcatccacgtgaaacctcctcagctaccttag

SEQ ID NO: 115937 - DNA, 1509 bp, synthetic construct
  misc_feature 1..1509: note = Description of Artificial Sequence: Synthetic coding sequence
  source 1..1509: mol_type = other DNA
atgaagggcgaaataaccctctcgcaatggatcccactgatggaggagaattgtcgcaagtgcagcgagacagctaaggtctgcttaccaaaaaatttctctatcaaagagatctttgacaaggcaatctctgcccgcaaaataaacagacctatgctgcaggcggctctgatgctgaggaagaaaggctttaccactgccatcctgacgaacacttggctggatgatcgcgctgagcgggatggactcgctcagctcatgtgcgagctgaaaatgcatttcgactttttgatcgaaagctgtcaggtgggaatggtgaaacccgaacctcagatctataaatttcttttagatactctgaaagcttctcctagcgaagtggtgttcctggatgacattggtgccaacctgaaaccggctcgtgacttgggcatggtcaccattctggttcaggacacagatacagccctcaaagaactggagaaggtaaccgggatccagctcctaaatacccctgcaccactccctaccagctgcaacccatccgacatgtcccacggctatgtcacagtcaagccgcgggtgcgcttgcattttgtggaactcggctccggtccggccgtctgcctatgccacggctttccagagtcctggtatagctggcggtatcagattccagccttagcccaggcaggttacagggttctggctatggacatgaaagggtatggtgaaagctcagctccaccagagatcgaagaatactgcatggaggttttatgcaaggagatggtcacgttcctggataagttaggactttcccaagctgttttcatcggccacgactggggcggaatgctcgtttggtatatggctttattttatccagaacgtgtgcgagcagttgctagtctcaacacacccttcatcccagccaaccccaatatgtccccactcgaaagcattaaggccaaccccgtttttgattatcagctgtattttcaggagcccggtgtcgccgaagccgagctggagcagaatctgtcacggaccttcaagtccctgtttcgggcctccgacgagtccgtattgagcatgcataaggtatgcgaggcagggggcctgttcgtcaactcaccagaggaaccaagtttgtcccgcatggtgactgaggaggaaattcagttctatgtgcagcagtttaagaagtcaggctttagaggtcccctgaattggtatcgtaacatggaacgtaactggaagtgggcctgcaagtctctaggccgaaaaattctcatcccggcactaatggtcactgccgagaaagacttcgtgctggtcccgcagatgagccagcatatggaggattggatcccccacctcaagcgcggccacattgaggactgcggacattggacgcagatggataaacctacagaggtgaaccaaatcctgattaaatggctcgatagcgatgcaaggaaccccccagttgtgtccaagatgtag

SEQ ID NO: 115938 - DNA, 1470 bp, synthetic construct
  misc_feature 1..1470: note = Description of Artificial Sequence: Synthetic coding sequence
  source 1..1470: mol_type = other DNA
atggaggaaaattgcagaaagtgtagtgaaacagccaaggtctgtctgcccaagaatttctctattaaggagatcttcgacaaagccatcagcgcaaggaaaataaaccggccgatgctgcaagcagccctcatgctacggaaaaaaggctttacaacggctatcctaactaatacctggttggatgatagggcggagagagatggccttgctcaactcatgtgcgagcttaaaatgcactttgacttcctaatcgaaagctgtcaagtagggatggtcaaacctgaaccgcaaatttacaaatttttgctggatactctgaaggcttcaccttcagaggtggttttcttagacgacataggcgcaaatctcaaacctgccagggaccttgggatggtaaccatcctggtccaggacacagacaccgctctgaaggagctggaaaaagtcacaggtattcagctgctgaatacaccggcgcccctccctacaagttgcaatccctctgacatgtctcatgggtacgtaacggtgaaaccccgagtgagactgcactttgttgaactgggatccgggcccgccgtctgtctctgccacggatttcctgagagctggtacagctggagataccaaattccagcccttgcacaggcggggtaccgggtcctggctatggacatgaaggggtacggagaatcctcagccccacctgaaatcgaagagtactgcatggaagtgttgtgtaaggaaatggtgacatttcttgacaagctagggctgtctcaggctgtcttcatcgggcacgactggggaggaatgctggtatggtatatggccctgttttacccagagcgtgtgagggccgtggccagcctcaacaccccatttattccagccaatcctaacatgagccccttggaaagtattaaggctaatcctgtgttcgactaccaactgtacttccaggagccaggcgtagctgaggcagaactagaacagaacctttctagaacttttaagtctctgttcagagcctcagacgagtctgtcctgagtatgcataaggtgtgtgaggccggagggttgtttgtaaactctcccgaggagccgtctctgtccaggatggtgacagaggaagagattcagttctacgtccaacaattcaagaaatccgggttcaggggaccattaaactggtataggaatatggagaggaattggaaatgggcctgtaagagtttgggacgcaagattctaatacccgccctgatggttaccgctgagaaagatttcgttctggtgccccagatgtcccagcatatggaggactggataccccatctcaagcgggggcacatcgaggactgcggccattggacacagatggataagccaaccgaagtgaatcagattctgattaagtggttggactctgacgccagaaacccaccagtggtgtccaagatgtag

SEQ ID NO: 115939 - DNA, 1509 bp, synthetic construct
  misc_feature 1..1509: note = Description of Artificial Sequence: Synthetic coding sequence
  source 1..1509: mol_type = other DNA
atgactttgcgcgctgccgtttttgacctggacggggttcttgcactgcccgccgtgtttggggtgttgggtcgtaccgaggaggcgctcgcattgccccgtggactgctcaatgacgccttccagaagggtggcccggagggggcaaccactaggctaatgaagggtgaaatcactttgtctcaatggatccccctcatggaggagaattgtaggaagtgctccgagacagccaaagtgtgcctgcccaaaaacttttcaattaaggagattttcgacaaagctattagtgctcgtaaaatcaacagacccatgctccaagccgcactgatgctacggaaaaaggccttctgcagcggcttcacaaccgccatactgaccaatacatggctggacgatagggccgaaagagatggcctggcccagctcatgtgcgagctgaaaatgcattttgactttttaatcgagtcctgccaggtgggcatggtgaagcctgagccccagatctataagttcttgctcgacacacttaaggcgtcaccctctgaagtggtgttccttgatgacatcggagcgaacttgaagcctgcccgggacctcggtatggtgacgatactggtgcaagataccgacacagctcttaaggaactcgaaaaggttacaggaattcaactcttgaatacgccggcgccattacctacaagttgtaacccctctgatatgagccacggttatgttactgttaagccccgggtgcggcttcacttcgtcgagctgggttcaggcccagccgtctgtctctgccacgggtttcctgagtcatggtacagctggcgataccagattcctgcgctcgcccaagccgggtatcgcgttctcgcaatggacatgaagggttatggagagagctcagccccccccgagatcgaagagtactgtatggaggtcctctgcaaggagagcattaaggctaaccccgtcttcgactaccagctctacttccaggaacctggcgtggcggaggctgaattggagcaaaacctgtctcggacgttcaagtctttgttcagggcctccgatgagtctgtactgtccatgcacaaagtttgtgaagcagggggacttttcgtgaacagcccggaagagccttctctctcaaggatggttacagaggaggagatacagttttatgttcagcagttcaaaaagtcagggtttagaggcccccttaattggtacaggaacatggagcgcaattggaagtgggcatgtaagtcgctcggacggaaaatactgataccagccttgatggtgacagccgaaaaggactttgtactggttccacagatgagtcagcacatggaggactggataccccaccttaaacgtggccacatcgaagactgcggccattggacccagatggataaacccactgaggtgaatcaaattctgatcaagtggctggactcagatgctagaaatccaccagtggtgagtaagatgtag

SEQ ID NO: 115940 - DNA, 1668 bp, synthetic construct
  misc_feature 1..1668: note = Description of Artificial Sequence: Synthetic coding sequence
  source 1..1668: mol_type = other DNA
atgactctgagggccgcggtattcgacctggacggggtcctagcgctgccggctgtgtttggcgtccttggtcgcacggaagaggctctagcattacccagaggcctgttaaatgacgcattccagaaaggcggacctgagggcgccactacccgcttgatgaaaggggaaattaccctgtctcagtggatcccactcatggaggaaaattgccgtaagtgcagcgagaccgcaaaggtgtgtctgcccaagaacttttctattaaagagatatttgacaaagccatctccgcccggaaaatcaacagacctatgctccaagccgctctgatgcttagaaagaagggattcaccacagctatactgaccaacacgtggctggacgatcgggctgaacgagacggcctcgctcagctcatgtgtgaactaaaaatgcacttcgacttcctgatcgaaagctgccaggtgggaatggtgaaaccagaaccccagatttacaagtttttactggatactctgaaagctagcccaagcgaagttgtgtttctcgatgacattggggctaatctcaagcctgccagagatctggggatggtaacaatcctcgtgcaggacaccgacaccgccctcaaggaactggaaaaagtcacaggtatccagcttctaaatacacctgccccactcccgaccagctgtaacccctcggacatgtcccacggttacgtgacagtgaagccccgtgtgaggctgcacttcgtcgagttgggtagtggtcctgccgtgtgcctgtgccatggttttccagagagctggtacagttggcgatatcagattcccgccctagcccaggctggctatcgtgtcctcgccatggacatgaagggttatggcgagagctctgccccacctgaaatcgaggaatattgtatggaggttttgtgcaaagagatggtgacctttctggataagttgggactctcgcaggccgtgttcatagggcatgactggggcgggatgctcgtatggtatatggctttgttttaccctgagcgggtacgggccgttgcaagcctgaacacccctttcatcccagctaatccaaacatgagcccactggagtcgattaaggctaatcctgttttcgattaccagctctactttcaagagcctggtgtggccgaggctgagctggaacagaaccttagcaggacctttaagagccttttccgcgctagtgacgaaagtgtacttagcatgcacaaggtctgcgaagcaggaggactcttcgttaacagtccagaggaaccgtcactgtcccggatggtgacagaggaggagatccagttctatgtccagcagttcaagaaatcgggctttcgcgggccgctgaattggtatcgaaatatggaaagaaactggaagtgggcatgtaaatctttgggacggaagatcttgattcccgcccttatggtaactgctgaaaaagattttgtgctcgtgccccaaatgtcccaacatatggaggattggattccccacctaaaacgcggtcatatagaagattgtggccactggacccagatggacaagcctaccgaggtgaaccagatcctcatcaagtggttggactcagacgcccgaaacccacccgtagtgtctaaaatgtag

SEQ ID NO: 115941 - DNA, 1653 bp, synthetic construct
  misc_feature 1..1653: note = Description of Artificial Sequence: Synthetic coding sequence
  source 1..1653: mol_type = other DNA
atgagcacttcctctctcagacgccagatgaagaacattgttcataactacagtgaggctgagataaaggttagggaagccacatctaacgatccttggggaccaagctctagtttgatgtcggagatcgctgatttgacttataacgtggtagcattctctgaaatcatgtcaatgatttggaaacgattgaacgaccatggaaagaactggagacacgtttataaagccatgacactcatggagtatctcatcaaaaccggcagtgagcgcgtgtctcagcaatgcaaggagaatatgtacgccgtgcaaacactcaaagacttccagtatgtagaccgggacggcaaggaccagggcgttaacgtccgggaaaaggcaaagcagcttgtcgccctcctgcgggacgaggatcgactccgagaggagagggcccatgcactgaaaaccaaggagaaactggcccagaccgcaaccgctagcagcgccgccgtaggttcagggccaccccccgaagctgagcaagcctggccgcagtcctccggggaggaagaactgcagcttcagcttgccctggcgatgagcaaggaagaggctgaccaggaggagaggatcagacggggagatgacctaagactccagatggccatcgaggagtctaaacgggaaaccgggggaaaggaggagtcatctctgatggatctggccgatgtcttcaccgctccggccccagcgcctacgacagacccatggggcggtcctgctccaatggctgcggccgtgcccactgcagcgcccacctccgatccctggggcggccctccggtccctccagcagcagatccttggggcggtcctgcccctacgcccgcgtccggtgacccatggcgcccggctgccccagcagggccctcagtcgacccctggggtggtacacccgccccagctgcaggggaagggcccacccctgatccatggggatcatcagacggtggggtccctgtgagcgggccctcggcctctgatccatggaccccagcacccgcctttagcgatccatggggaggtagccccgcaaagccctcaacaaatggaactactgcaggcggattcgacaccgagccagacgaattctccgattttgatcgactcagaacagcccttcctactagcggttcaagcgccggggagctcgagttgctcgcaggagaggtgcctgcacgatccccaggtgccttcgacatgtcaggagtgcgggggagcctggccgaagccgtgggaagtccaccgccggcggcgactcccacgccaactccgccaacccggaagactccagagagcttcttaggaccgaacgctgctctagtggacttagactcgctcgtcagccgccccggcccgactccacccggcgctaaggcctccaatccttttcttcctggagggggcccggccacaggaccatccgtaactaatccattccagccggccccacctgccactctcacccttaatcagctccggctgtctccagttccaccagtcccaggagccccccctacctacatttccccattgggaggaggccccggccttccaccaatgatgccccccggtcctccggcacctaacacaaatcccttcctgttatag

SEQ ID NO: 115942 - DNA, 1731 bp, synthetic construct
  misc_feature 1..1731: note = Description of Artificial Sequence: Synthetic coding sequence
  source 1..1731: mol_type = other DNA
atgtcaacatcctccctgagacgtcaaatgaaaaacattgtacacaattactctgaagcagaaataaaggtgcgtgaggcaacatcgaatgacccctggggccctagcagctcactaatgagtgagatcgccgatcttacctacaatgtagttgccttctctgagatcatgtccatgatttggaagcggctgaacgaccacggtaaaaattggcgacacgtctacaaagccatgaccttaatggagtacttgatcaagacgggcagtgagagggtgagtcaacagtgtaaagagaacatgtatgccgtgcagaccctgaaggatttccagtacgtggatagggacgggaaagatcagggagtcaacgtcagagagaaagccaaacaactggtggcccttctgagggatgaggaccgtcttcgggaggagcgcgcacatgccttaaaaactaaggagaagctggcccagacagcaaccgctagcagcgccgcggttgggtcaggccctccgcccgaagcagagcaggcctggcctcagtcctccggtgaggaggaactacaactgcagctggcactcgcaatgtccaaggaagaggcggaccaacctccaagttgcgggccagaagatgacgcccaactgcagttagcactgtctctgagtcgggaggagcatgataaggaagagagaatacggaggggcgacgatctgcggctccagatggctatcgaggagagcaagagggagactggaggcaaagaggaaagtagcctgatggaccttgccgacgtcttcacagctcccgccccggctcctaccaccgatccatggggcgggccggcgccaatggccgcagccgtccccaccgcagctccaactagtgacccctgggggggacccccagtgccccctgctgccgatccgtgggggggccccgcccccacgcctgcttctggagatccctggcgccctgcagccccggcgggcccttccgtcgacccatggggcggaacccccgcacctgcggcaggggaaggtcctacccctgatccctggggctccagcgacggcggggtccccgttagtgggccctcagccagcgacccttggactccggccccagcatttagtgatccctggggcggctcgccagccaagccaagcacaaatggaactaccgccgccgggggattcgacaccgagcctgatgagtttagtgactttgatcggttaagaaccgccttgccaaccagcggaagtagcgcaggtgagttggagctccttgccggggaggttcccgctaggtctccaggcgcgtttgacatgtccggcgttaggggctccctcgccgaggctgtgggttcacctccaccggccgctactcctactcctaccccgcccactcggaagactcctgaaagcttcttaggccccaatgcagcgctcgtcgacttggattcactggtatctagaccagggcctacacctccaggggctaaagcctctaacccctttttgcccggagggggacctgctacaggaccttccgttacgaatccattccagcctgcccctcccgcaaccctgactttaaatcaattgcgactctcacccgtgccgcctgtgccaggagcccccccgacctatataagtccgctcgggggcggcccaggtctcccacctatgatgccccccgggcctccagcgccaaacaccaacccattcttgttatag

SEQ ID NO: 115943 - DNA, 1989 bp, synthetic construct
  misc_feature 1..1989: note = Description of Artificial Sequence: Synthetic coding sequence
  source 1..1989: mol_type = other DNA
atgggggatcagagctggttgtggaaccaagccgcacctggggttcgtagtccggtgttcgcctgttcggtggagaaagggaacgtgccgttggtgctgagcgagcaccttgctcattccagggatcccgggtccggcgctgtgagatttctcatttcacccgagccatgggcaagtgcaatcctggggacctccggattactggccagccctgtgttaccagcagccctggatgcagttacgtgccagcaccttccacaacctagttctgggtcgcgccctataagccctaggatcggggcactatgtccccttctcctgcagcccggcaccatgagcacatcctcactaaggcgccaaatgaagaatatagtgcataactacagcgaggccgagatcaaggtgcgggaggcaaccagtaatgacccatggggaccctcaagcagtctgatgtccgaaatcgctgaccttacgtataacgtggtggctttctctgaaatcatgagcatgatatggaagcgactgaacgatcacggcaaaaattggcggcacgtgtacaaggctatgacactgatggaatacctgattaaaactgggtctgaaagagtttcccagcagtgtaaagaaaatatgtacgctgtccagaccctgaaggactttcagtacgtggaccgggatgggaaagaccaaggggttaatgtacgggagaaggctaaacagttggtggccctgctccgcgatgaggacaggctgcgagaagagcgggcgcatgccctcaagactaaagagaagctcgcacagacagcgactgccagctccgcagcagtaggctcaggcccacctcctgaggctgagcaggcatggccacagtcctctggcgaggaggagttacaactccagctggctcttgccatgagcaaggaggaggctgaccaagaagaacgtattcgcagaggtgatgatctgaggcttcaaatggccattgaagaaagcaagcgtgaaaccggagggaaagaggagagctccctcatggacttggcggacgtgttcacggctccagccccagcccccaccacagacccatggggtgggccggcgcctatggccgctgccgtgcccacagccgccccaacctctgatccatgggggggcccacccgtccccccagctgccgacccctgggggggacctgcccccacacctgccagtggcgacccatggcggcctgccgcacctgcgggaccatccgtggacccttgggggggaacgcctgcgccagcagctggagaaggaccaacgccagacccctggggcagttctgatggcggcgtccctgtaagcgggcctagcgcctctgatccttggactcctgcccccgcgttcagcgacccctggggcggatctccggccaaaccaagcacaaacggcacaactgctgctggtggctttgatactgaacccgacgaatttagtgactttgataggcttaggacagccctaccaacttccgggtccagcgcgggcgagctggaactccttgccggggaggtcccagcacgatcaccgggagcattcgacatgtccggggtcagagggtctctggccgaggcggtaggatcccctccaccagccgcaactccaacacccacccctcctacccgaaagacgcctgagtcttttctaggtccgaatgccgctctggtggatctggatagcttagtgtccagacctggccctactccacccggtgctaaggcatcaaatccatttttgccaggaggggggcctgcaaccggccccagtgtgaccaatcccttccagcccgccccacctgccaccctcactctcaatcagttgcgcttgtccccggtacctcctgtccccggagcaccccctacatatatctctccactaggaggaggcccaggactgcctcctatgatgccgccaggaccacctgcccctaacaccaacccttttctgttgtag

SEQ ID NO: 115944 - DNA, 1611 bp, synthetic construct
  misc_feature 1..1611: note = Description of Artificial Sequence: Synthetic coding sequence
  source 1..1611: mol_type = other DNA
atgtccgagatagcagacctgacttataatgtggtcgctttctccgagattatgagcatgatttggaaacgcttgaacgaccacggtaagaattggcgccatgtgtataaagcaatgaccttaatggagtacttgattaaaactggttcagaaagggttagccagcagtgtaaggagaatatgtatgccgtgcagacgctaaaagattttcagtacgtggatcgggatgggaaagatcaaggagtgaatgttagagagaaggcaaagcaactggtggctctgctccgagacgaagataggttgcgagaagaaagagctcacgcgctgaagaccaaggaaaagcttgctcaaaccgctactgcaagttctgccgccgttggaagtgggccaccgcccgaggcagagcaggcgtggccccagtcttcaggtgaggaggagctccaactccagctggcgcttgcaatgtccaaggaagaagctgaccagcccccatcctgcggtccggaagatgacgcccagctgcagttggcgctgagcctgagcagggaagaacatgataaagaagaacgcatcagacgcggtgatgacctcaggctgcaaatggcgattgaagaaagcaagcgggagactgggggaaaagaggagagcagtctgatggaccttgccgacgtctttactgcgccggcacccgcccctactaccgacccctggggaggtcctgcgccaatggcggctgctgttcctactgccgcccccacttcagacccttggggtggccctcccgtaccccccgcagcggatccctggggcggccccgcgcctacaccggcctctggtgacccatggcgcccagccgcccctgccggcccatctgtcgatccctggggcggcacacctgctcctgctgcaggcgaaggacccacccccgatccttggggaagcagcgacggaggcgtaccggtgtcaggaccttccgcatccgacccctggacacctgctccagctttctccgacccctggggcggaagcccagccaaaccttccactaacggaaccactgcaggcgggtttgacaccgagcctgatgaattcagcgactttgatcgcctccgcactgccctgcccacctctggaagctctgccggagaactggagctcctagccggggaagtgccagctcgctcaccgggtgccttcgatatgagtggcgtccgcgggagtttggctgaagccgtggggtcccctccacccgccgctactcccactccaactccaccaacaagaaagactccagagtcctttttaggtcccaacgctgcacttgtagaccttgattccttggtctctcgacctggaccgaccccacctggagctaaagccagtaacccattcctgccgggaggcgggcccgcaaccggcccaagcgtgaccaatccctttcagccagctcccccagctaccctgactctgaaccagttacgactttcacctgttcctcccgtccctggcgcccctcccacgtacattagccctctaggcggcgggccaggtctccctcccatgatgcctccgggacccccagctcccaatacgaacccgtttctcctgtag

SEQ ID NO: 115945 - DNA, 1926 bp, synthetic construct
  misc_feature 1..1926: note = Description of Artificial Sequence: Synthetic coding sequence
  source 1..1926: mol_type = other DNA
atgacaacatcttctattcggagacagatgaagaatatcgtgaataactacagtgaagcagagattaaagtcagggaagctacaagtaacgatccatggggccccagctcttccttgatgaccgaaatcgccgacctgacatataacgtagtggccttctccgaaatcatgtcgatggtatggaagcgacttaatgaccatggtaagaactggcggcacgtgtataaggccctgactttgttagattacttgattaaaaccggatccgagcgcgtggctcagcagtgtcgggagaatatctttgcaattcagactcttaaagactttcaatacattgatcgggatggtaaagaccaaggcattaacgtgcgcgagaaatccaagcaactggtggctctactgaaggatgaggaacgccttaaggcagagcgcgcacaagccttaaagactaaagaacgcatggcccaggtcgccaccggcatgggatccaaccaaattacttttggcagaggcagttcacaaccaaatctatcaacctctcactccgagcaggagtacgggaaggccggggggtcgcccgccagttatcacgggagtcccgaggcgtctctctgtcctcagcataggactggcgctccgctcggacagtcagaagagctgcaaccgttgtcccagcgacacccctttcttccccatttggggcttgcctcccgcccaaacggggattggtcacagccatgcttgacctgtgaccgggcagcacgtgcaacgagccctagagtgagctctgagctcgagcaggcaaggcctcagacaagcggggaagaagagctgcagctgcagttggcccttgccatgtctcgcgaggtggcagaacaggaagagaggctgagaagaggagatgatctgaggctccaaatggctctggaagagagccggagagatacagtgaaaatccccaagaagaaggagcacggtagcctgcctcagcagactacgttgctggaccttatggatgccctgccatcttccggacctgccgcacagaaagcggagccatggggaccctctgccagcaccaatcaaactaatccatggggaggcccggccgccccagccagtacttccgatccatggccttcattcggtaccaagcctgccgcaagtatagacccatggggcgtccctacaggcgccaccgtccaatctgtgcccaagaactccgacccctgggctgccagtcagcagccagcctcgagtgccggaaagcgggcctctgacgcctggggagctgtgagtacaactaaacccgttagcgtgtcagggtcttttgaactcttcagtaacttgaacggtaccatcaaggacgactttagtgaattcgataacctgcgcacaagcaagaaaacagccgaaagtgtgacgtcacttcccagccagaataatggtaccacctctcctgatccgtttgaaagtcagcccctcacagtggcttccagcaaaccgagcagcgcgcgaaaaaccccggaatcctttctcggtcccaacgcagccctcgtaaatctggattctttggtaactagacccgcacccccagcacaaagcttaaatccctttctcgcgcccggagcgccagcgacatcagctccagtgaatccttttcaagtgaatcagccgcaacctctgacactgaaccagctccgtgggagccctgtgctcggcacttcaacatcgtttgggcctggcccgggagtggagtctatggctgtcgcctctatgacttccgccgcccctcagccggccttgggcgctacgggttcctccctgaccccgctcggacctgccatgatgaacatggtcgggtccgtggggataccaccaagtgctgctcaagcgacgggcacaaccaacccgttcttgctatag

SEQ ID NO: 115946 - DNA, 1755 bp, synthetic construct
  misc_feature 1..1755: note = Description of Artificial Sequence: Synthetic coding sequence
  source 1..1755: mol_type = other DNA
atgacaacttcctccatcaggaggcagatgaaaaatattgttaacaattacagcgaggccgaaataaaagtgcgcgaggcaacatccaacgatccgtggggtccatctagttcccttatgacggaaattgcggaccttacttataatgtggttgcattctctgaaatcatgagtatggtgtggaagcggctgaatgaccatggtaagaattggcgccacgtatacaaagctctcactctgcttgattatcttataaagaccgggagcgagcgggtggcacagcagtgtagagagaacatctttgccattcaaactctcaaagacttccagtatatcgacagagacggcaaggatcagggaattaatgtgcgagaaaagtccaaacagctcgtcgctcttctgaaagacgaggagcggctcaaggccgaaagagcccaggccctcaaaaccaaggaaaggatggcacaagtagccacaggcatggggtctaatcagatcaccttcggcagaggctctagccaaccaaacctgtccactagtcactctgagcaagagtatggaaaagccggtgggtcccctgcctcgtaccacggatctacctccccgcgggtgtcaagcgagttggagcaggccagacctcagacaagcggagaggaggaacttcagttgcaattggctcttgctatgtctcgcgaggtagccgaacaggaagagcggttgcgtcgcggcgacgacctgagacttcagatggcattagaggagtctaggagagatacagtcaaaatacctaaaaagaaggaacacggttcacttccacaacagaccacgcttttggatttaatggatgctttgccctcaagcggacccgcagcacagaaggccgagccttgggggcccagcgccagcaccaaccaaacaaacccctggggcggacccgcggctccagcctcaacctctgatccctggccgtctttcgggacaaagcctgcagcctctatcgatccttggggagtccccaccggagcaactgtgcagagtgtcccaaagaactcagacccttgggcagcctcccagcagccagccagtagtgcagggaagagagcaagtgatgcctggggcgctgtctctaccaccaaacccgtctccgtcagcggctctttcgagcttttttcaaacctgaatggtactatcaaagacgacttctccgagtttgataacctacgaacatccaagaagactgcagagagcgtgacctcgctcccctcccagaacaatgggacaacttcccccgacccattcgagagtcagccccttacagtggcctcttcaaaaccaagcagcgctagaaaaactcccgagagtttcctgggtcccaacgccgcactggtgaatctcgattcccttgttacacgccctgcacctccagctcaaagcctgaatcctttcctcgccccgggcgctcccgcaacttccgcaccagtgaaccccttccaggtaaaccaacctcaaccactcaccttgaaccagctccgcggatctccagtgctcggtacaagcacgtcgtttgggcccgggcccggcgtggagtctatggcagtggcctctatgacatccgctgccccgcagccggcccttggggcaaccgggagctccctcacaccgctgggccccgccatgatgaatatggtcggaagcgtagggatcccgccctccgctgctcaggcaaccggaacaacaaacccatttcttctatag

SEQ ID NO: 115947 - DNA, 1071 bp, synthetic construct
  misc_feature 1..1071: note = Description of Artificial Sequence: Synthetic coding sequence
  source 1..1071: mol_type = other DNA
atgtcacgcgaggtcgcggaacaagaggagcgactcaggcgtggtgatgatctcagactgcagatggccctggaagagtcgcgcagagatacggtgaaaatccccaagaagaaagaacacgggagcctgccacagcagacgaccctgctcgacctcatggatgccctgccaagttccggccccgcggcacagaaggcggaaccctggggacccagtgcaagtacgaatcagacaaatccgtggggaggacctgccgcaccagcttctacctccgatccgtggcccagcttcgggacaaaacccgccgcctccattgacccatggggggtccctaccggggccacagtccaaagtgtgccaaagaattcagatccttgggctgcttcccagcaacctgcgagcagtgccggtaagcgtgcttcagatgcttggggtgcagtttcaactacaaagccggtgtccgtctctggatccttcgagctgttctctaacctgaacggtacgatcaaagatgatttttctgagtttgataatctgagaacaagcaaaaagaccgctgagtccgtgacctctctgccctcacagaacaacggaacaacctcaccagacccatttgagtcccagccactaactgtcgcgagctcaaaaccaagcagtgcaagaaagactcccgagagcttccttggtcctaatgccgcattggtgaatctcgattcattggtgacacgccctgcccctcccgctcagagcctcaacccatttctggcacctggcgctccagctacatccgctccagttaatccatttcaggtgaaccagcctcagccacttacgttgaaccagctcaggggctcacccgttttgggaacgagcacgtcttttggcccgggccctggagtggagtctatggcagtagcctctatgacgtccgccgcaccccagcccgcgcttggcgctactggaagttctctgacaccactcgggcctgccatgatgaacatggtgggcagcgtgggcattcccccctcagctgcgcaagccaccgggactaccaaccccttcctcctgtag

SEQ ID NO: 115948 - DNA, 1755 bp, synthetic construct
  misc_feature 1..1755: note = Description of Artificial Sequence: Synthetic coding sequence
  source 1..1755: mol_type = other DNA
atgaccaccagcagcattcggcggcaaatgaaaaacatcgttaacaattactctgaggccgaaattaaggtgagggaggctacttcaaacgacccatggggccctagctccagtctgatgacggagattgctgaccttacctataatgtagtggccttcagtgagattatgtctatggtgtggaaaaggcttaatgaccatggcaaaaactggaggcatgtgtacaaagctttaaccctgctggattacttgataaagactggatctgagcgggttgcacaacaatgtcgcgaaaacatcttcgcaatccagacgttgaaggactttcaatacatcgaccgagacggcaaggatcagggaattaatgtgcgagagaagagcaagcaactggtcgccctactcaaggatgaggaacgactgaaggccgagcgggcccaagctctcaaaaccaaggaacggatggcacaggtggccactggcatggggtcaaaccaaattacttttggacgcggaagtagtcagccaaatctgtctactagccatagcgaacaggaatacggcaaggccgggggcagtcccgcctcctaccacggcagtaccagccctagagtgtcaagcgagctggagcaggcccggccacagacttctggagaggaggagcttcagcttcagctggcccttgcaatgtcacgggaagtcgcggaacaggaggagaggctgcgcaggggcgacgatcttcgtctgcaaatggcattggaagagtcacgacgggataccgttaagattcccaagaaaaaagaacatggaagcctgccccagcaaactaccctcctggacttaatggatgccctgccgtccagtggccccgccgcccagaaagccgagccctggggaccatcagcttcaacaaaccagaccaacccttggggaggcccagccgctcccgcctcaacaagcgacccctggccaagctttggaacaaagccagcagcttctatagacccttggggggtgcccactggcgccacagtacaaagtgtgccaaaaaactcggatccctgggccgcctcacaacagcctgcctccagtgcgggcaaacgcgcctcagatgcctggggcgctgtttctacaacaaaacctgtctccgttagtggctcatttgaattgtttagcaacctgaacggtacgataaaggatgactttagcgagtttgataaccttagaacgtctaaaaagacagctgagtctgtcaccagccttccatcccagaacaacggaacaacttctcctgatccatttgagagtcagcctctgactgtagcatcttccaagccatccagcgcacgcaagacaccggagagtttccttggccctaacgccgctctggtgaacttggactcactggtgactcgccctgccccccctgcccaatcactgaatcctttcctcgccccgggggcccccgcaacttccgcacctgtcaacccctttcaagttaaccagccccagccccttactctcaatcagctccggggcagcccagttctgggaacaagtacctctttcgggccaggtccaggtgttgagtcaatggcggtcgcatcaatgacctcagctgcaccgcagcctgccctgggcgccacggggagctcactgaccccactgggacctgcaatgatgaatatggttgggagcgtcggcatccccccttccgcagctcaagctacgggaacgaccaatccctttctactatag

SEQ ID NO: 115949 - DNA, 1455 bp, synthetic construct
  misc_feature 1..1455: note = Description of Artificial Sequence: Synthetic coding sequence
  source 1..1455: mol_type = other DNA
atgacaacttcctccattaggagacagatgaagaatatcgtgaacaactactccgaggccgagattaaggttcgggaggccacttccaacgatccctgggggccctctagttcgttgatgaccgagatcgcggatctcacttacaatgtggtggccttctccgaaattatgagtatggtgtggaaacgcctgaacgaccacggcaaaaactggaggcatgtttacaaagccctaacgctgctggactacttaatcaagacgggttctgaacgtgtggcacaacagtgccgcgagaacatcttcgctatacaaacactgaaagacttccagtacatcgacagggacgggaaggaccagggtatcaatgtcagggagaaatctaagcagctggtggccctactgaaagatgaggagcggctgaaagccgagagggctcaggctttgaagaccaaagagaggatggcacaggtcgccacgggcatgggctccaaccagatcaccttcgggcgaggctcaagtcagcctaacctcagtacttcacatagcgagcaggagtacgggaaagccggaggtagtcccgcctcttaccacgggtctcctgaggcaagtctgtgcccacagcacaggactggcgcacccctcggacagagtgaagaactccagcctcttagccaaaggcacccgtttctgccgcacctgggcctcgcgtcccgacccaacggagactggtctcagccctgcctcacatgcgacagggctgctcgagccacctcaccacgtgttagcagtgagctagagcaggcaaggccacagacatccggggaagaggagctgcaactgcagcttgcactggcaatgtcaagagaggtggccgagcaggaagaaaggctcaggcggggagatgatctgaggctgcagatggctctcgaggagagccgtcgggatactgttaagattccaaaaaagaaggagcacggctctctgccacaacaaactacgttgctagaccttatggatgcactcccatcctctgggcctgctgcccagaaggcggagccctggggaccgagtgcatccaccaaccagactaatccttggggaggacccgcagctcctgcctccacctctgacccctggccgagttttggcaccaaacctgccgcgagtatcgacccctggggagtaccgaccggggctactgttcaatcggttcccaaaaattccgatccctgggccgcctcccagcagccagcctcctctgccggcaagagagcgagtgacgcttggggcgccgtgagcacaacaaagcctgtgtccgtctcagggagtttcgagctttttagtaatctgaacggcaccattaaggacgattttagcgaattcgataacctgcggacaagcaaaaagactgggatgcaagggttgaccggcctcctatttacaatggagatatag

SEQ ID NO: 115950 - DNA, 1500 bp, synthetic construct
  misc_feature 1..1500: note = Description of Artificial Sequence: Synthetic coding sequence
  source 1..1500: mol_type = other DNA
atgacaacatcttctatacggcgccagatgaagaatatcgttaataactacagcgaagctgagatcaaagtgagagaggctacttcaaatgatccttggggaccgtccagctcccttatgactgagattgccgaccttacctacaacgtggttgctttcagcgaaatcatgagcatggtgtggaagaggctgaacgatcacggtaagaactggaggcacgtctacaaggcactgactctgctcgactacctgatcaagaccgggtccgagagggtggctcagcagtgtcgggaaaatatttttgccatccagacactgaaggactttcagtatatagaccgggacggcaaggatcagggaattaacgttagagagaaaagtaaacagttagtcgcacttctgaaagatgaggagcgccttaaagccgagagggcccaggccctgaagacaaaggagcgcatggcccaggtggctaccggaatggggagcaatcagataacatttggtcgaggttcctcccagcctaacctgagcacaagccattccgagcaggagtatggcaaagcaggaggatccccagcttcctatcacggcagtacctcacctcgcgtttcatccgaattagaacaggctcggccccagacttccggagaggaagagcttcagctgcagttggccttggcgatgtcgagagaagtggctgagcaggaggaacgcctgcgtcgaggcgacgacctcagactgcagatggccctcgaggaaagtcggcgggatacagtcaagataccgaaaaagaaggagcatggctctttaccacagcaaacaacccttctggatcttatggatgctcttcccagctctggtcccgcagcccaaaaggctgagccttggggtccctccgccagcaccaaccagacaaatccctggggaggacctgctgcacctgcgagtactagtgacccatggccttccttcgggaccaagccagctgcctccatagatccctggggagtcccgaccggcgccacagtgcagtcggtccccaaaaattccgatccgtgggccgcctcccagcaaccagcttcctccgccggtaagcgagcttctgacgcctggggcgcagtatctaccactaagccagtatccgtatcaggcagcttcgagctcttcagcaatctcaatgggacgattaaagatgatttcagtgaattcgacaatctgcgcacctccaagaagaccgcggaatccgtgacatctctgccatctcagaacaacggcactactagccccgatccttttgagtcacagcccctaacggtggctagttctaaaccttcctctgcgcgaaagaccccagagtccttcctgggacccaatgccgccttagtaaatctcgattctctcgttactcgaccagctcctccagcccagagcctgaatccttttctggctcccggcatgcagggactcacagggctgctgtttacaatggagatctag

SEQ ID NO: 115951 - DNA, 1899 bp, synthetic construct
  misc_feature 1..1899: note = Description of Artificial Sequence: Synthetic coding sequence
  source 1..1899: mol_type = other DNA
atgactaccagtgccctgcgcaggcaggttaagaacattgtccacaactacagcgaggctgagataaaagtccgagaggctacttcaaatgacccctggggcccaccctcctccctcatgagcgaaatcgccgacctcacctttaacacggttgctttcaccgaagttatgggcatgctgtggcgtaggttgaacgacagcggtaaaaactggagacacgtgtacaaggcgttgaccttgttagattacctcttgaagactggatcagagcgggtggcccaccagtgcagggagaatctgtacacaatccagactttgaaggacttccagtatatcgaccgtgatggaaaagaccagggagtgaatgtgagggagaaagtgaagcaggtaatggctcttctgaaagacgaggagaggctccgtcaggagaggacgcatgcattaaaaactaaggagcgaatggccctggagggtatcggcatcgggtccggtcaactcggctttagtcgcagatatggggaggattatagccgaagcaggggcagtcctagctcgtataacagctcgtcttctagccccagatatacctccgaccttgaacaggctcgaccccagacaagtggcgaggaggagctgcagttgcaactggctctggcaatgagccgggaggaggccgaaaaacccgttcccccggcctcgcatagagacgaggacttacagctgcagctggctttgcggctgtctcggcaggagcatgagaaagaagtgcgctcatggcagggagacgggtcccccatggccaatggagccggcgcagtcgtgcatcaccaaagggatcgggaaccagaacgggaggagagaaaggaagaagaaaagcttaagacaagtcagtcatcaattcttgacctggccgacatctttgtccccgcacttgccccccccagcacacactgctcggctgatccctgggacattcccggttttcggccaaacacagaggctagcggctcctcatggggaccatcagcagacccatggagtcctatccctagtggcaccgtgctgtcacgcagtcagccatgggatctcacccccatgctgagttcttccgagccctggggccgcacacccgtgcttcccgctggaccgccaacaacagacccctgggccctgaatagtccacatcataagctcccatccacaggggctgacccttggggcgcgagcttggagaccagtgacacccccggcggtgcctccacctttgatcccttcgctaagcccccagagagcaccgagactaaggaagggctggaacaagcactgccgtccggaaagccatctagccctgtcgaactggatctattcggtgacccttctccatcatcaaagcagaacggtacgaaggaacctgatgccctggacttgggcattctcggcgaggccctcactcagccaagcaaggaagctagggcatgtcgcacgcctgaaagtttcttaggaccatcagcttcctcccttgtaaacctcgacagcttggtcaaggcgccccaagtggccaaaacaaggaatcccttcctgacggggctgagtgcacctagtcccaccaatccttttggcgctggggagccgggacgtcccactctaaaccagatgagaacagggtcccccgccctcggcttagccggcggccccgttggggctccacttggctcaatgacctattctgcatccctccctttgcctctgtcaagtgtgccagcaggattgacccttcctgcaagcgtctccgtttttccacaagctggagcctttgctccccaacccctgctccctacgcccagcagtgccggtcctcgtcccccacccccccagacagggacgaatccattcttatag

SEQ ID NO: 115952 - DNA, 957 bp, synthetic construct
  misc_feature 1..957: note = Description of Artificial Sequence: Synthetic coding sequence
  source 1..957: mol_type = other DNA
atgacaacatctgcactaaggaggcaggtgaaaaatattgtccataattattctgaggcagaaatcaaagtgagggaagccacgtcaaatgatccgtggggcccaccgtctagtctgatgtcggaaatcgccgacctgactttcaatacagtggcattcactgaggtgatgggcatgctgtggcggcgcttgaacgatagcggcaagaattggaggcacgtgtataaggcactgactctgttagattacttgcttaagacagggtccgagagggtcgctcatcagtgccgcgagaacttatacacaatccagacgctgaaggatttccaatacatcgatagagatggaaaggatcagggtgtaaacgtgcgcgaaaaagtgaaacaggtgatggctctcctgaaggatgaagagagacttcgacaggagcgcactcatgcactgaaaacaaaggaacgtatggcgctcgaaggcattgggatcgggtccgggcaactgggcttctctcgcaggtatggagaggactatagccgctccaggggtagtcctagttcttacaattcctcttctagcagcccacgctacacttctgacctggaacaagcccgaccccagactagtggcgaagaggaacttcagcttcagttggctctcgcgatgtctagagaggaggccgagaagccagtccctccagctagtcaccgggatgaagatctccaactgcaactggctctccgcctctcaagacaggaacacgaaaaggaagtaaggagctggcagggagacggatcccctatggccaacggtgccggagccgtcgtgcaccatcaaagagacagagagcctgagcgagaagagcgaaaagaagaggagaagttgaaaacctcgcaggcccccccaacatccgaaccacggttgccgctcccctcaaccgtgctgcacccgggactgggatag

SEQ ID NO: 115953 - DNA, 1725 bp, synthetic construct
  misc_feature 1..1725: note = Description of Artificial Sequence: Synthetic coding sequence
  source 1..1725: mol_type = other DNA
atggcgttagagaccctaccgcgcctttgcaggccagctgccgcccaggtgggcgggtccccccaacgcctcctgggactggggcttggtccgagagagccggccctagagccccacgtcgagccaaaggacgctgcagccctactgaccaggcagcccatcctgcaggactgcgacctcgccactgtggcattaagtccgcctccgcccgctggggctcgtgcaacccatctccaggtttcatcccacgacgatttgcggacccctgccccaggggaagaacatcgcgcgcagttgctccgaggtcggaatcaggttgctttcaccgaagtcatgggcatgctatggcggcgccttaatgacagcggcaaaaattggagacacgtgtacaaggccctcacgctcctcgactatctcttaaaaacggggagtgaacgcgtagcccaccagtgcagagagaatctgtacacgatccagaccctcaaagacttccagtacatagatagagatggtaaggaccagggcgtgaacgtaagggagaaagtgaaacaagtaatggcgcttctaaaggatgaggagagattgaggcaggaacgaacacatgctctgaaaacgaaggaaagaatggcactcgaaggtattggcatcggctccggccagctggggtttagtcgccgctatggcgaagattattcacgcagtcggggatcacctagctcctataacagttctagctcgagcccacggtataccagcgatctcgaacaggcccgacctcagacctccggtgaagaggaactgcagttgcaactggcattagccatgtcccgagaggaagctgagaaggaggttcgcagctggcagggtgacgggagccctatggcaaatggcgcgggcgccgtggtgcatcaccaaagggaccgcgagcctgaacgggaggagagaaaagaagaagaaaaactcaaaacatcccagtcaagcatcctggacttggccgatatatttgtgcctgccctagcccctccgagcactcattgtagcgctgacccctgggatatccctggcttcaggcctaacacagaagccagtggaagctcctgggggccgagtgcagacccctggtctcccatcccatcaggtaccgtgctcagtcgttctcagccatgggacctgacgccaatgctgtcctcctccgaaccttggggcagaaccccagtcctgcccgccgggccccccacaactgatccatgggccctgaattccccccatcacaagctgccgtcaacgggggcagatccttggggcgcaagtttggagacttccgacacgcccggaggggcatctacttttgatccttttgcaaaacctccggagagtacagagaccaaggagggcctggagcaggcgctgccatctggaaaaccaagctcccccgtcgaattagacttgtttggagacccctcgccatctagcaagcagaacggcaccaaggaaccggatgccctggacctgggcatcctgggtgaagcccttactcagccaagtaaggaagcaagagcctgccggacacccgagagctttctcggcccctctgccagctccctggtgaacttggattccttggtgaaggccccacaggtggccaaaacaagaaacccgttcttgaccggcctgtctgccccccccagattgagaactaggggctgggctggtcggcgctgctag

SEQ ID NO: 115954 - DNA, 507 bp, synthetic construct
  misc_feature 1..507: note = Description of Artificial Sequence: Synthetic coding sequence
  source 1..507: mol_type = other DNA
atgacaacatcagcgctgcggcggcaggttaagaatatcgtgcataactactccgaggcagagatcaaggtgcgagaggcgacatcaaatgacccttggggcccaccctcctcattaatgagcgagattgcagacctcactttcaacaccgtggcgtttacagaggtaatgggtatgctgtggcggcggctcaacgactctgggaaaaattggcggcacgtatacaaggctctcaccctactggattatctgctgaaaacgggctctgaaagggtcgcccaccaatgtcgcgagaatctgtatacaatccagacactcaaggatttccagtatattgatagggacggaaaagaccagggcgttaacgttcgagagaaggttaagcaggttatggctctcctgaaggacgaggaacgcctcaggcaggagaggacgcacgctctaaagacaaaggagcgaatggcccttgaaggaatcggcataggctctggacaattgggattttag

SEQ ID NO: 115955 - DNA, 36 bp, synthetic construct
  misc_feature 1..36: note = Description of Artificial Sequence: Synthetic coding sequence
  source 1..36: mol_type = other DNA
atgacaacgagtgcgctacggaggcaggtaaagtag

SEQ ID NO: 115956 - DNA, 411 bp, synthetic construct
  misc_feature 1..411: note = Description of Artificial Sequence: Synthetic coding sequence
  source 1..411: mol_type = other DNA
atgaccacatccgctctgaggcggcaagtgaaaaatatcgtccacaactactccgaagccgagattaaggtgcgggaggccacatccaacgacccctggggccccccaagctctctcatgtctgaaatcgccgacttgacctttaacacagtggccttcaccgaggtgatgggcatgctctggcgcagactgaatgactccggaaagaactggagacacgtctacaaagccctaacattattagactatctcctgaagaccgggagcgagcgggttgcacaccaatgtcgcgagaacctctacactatacagacactgaaggattttcaatatatcgaccgcgacggcaaggatcaaggcgtaaatgtacgcgagaaggttaagcaggttatggccctgcttaaagattag

SEQ ID NO: 115957 - DNA, 156 bp, synthetic construct
  misc_feature 1..156: note = Description of Artificial Sequence: Synthetic coding sequence
  source 1..156: mol_type = other DNA
atgacaacaagtgccctgcgccggcaagtgaaaaatatcgtccataattactccgaggctgaaatcaaagtcagggaggctacctcaaacgacccttggggaccaccttcgtccctgatgtctgaaatagccgatctgacattcaatactgtctag

SEQ ID NO: 115958 - DNA, 327 bp, synthetic construct
  misc_feature 1..327: note = Description of Artificial Sequence: Synthetic coding sequence
  source 1..327: mol_type = other DNA
atgacaacttctgccctgcgccgccaagttaaaaacatcgtccacaattattctgaggccgaaatcaaagtgagggaggcaacctcgaacgacccctgggggcctccttcttccctcatgtcagagattgcagacctgacttttaacacagtagctttcacagaagtgatggggatgctgtggcgtcgactgaatgattccgggaagaactggaggcacgtctataaagcactgaccctgttagattatcttcttaagaccgggtcagaacgggtcgcccatcagtgcagggaaaacctgtataccatacagaccctcaaagactag

SEQ ID NO: 115959 - DNA, 1983 bp, synthetic construct
  misc_feature 1..1983: note = Description of Artificial Sequence: Synthetic coding sequence
  source 1..1983: mol_type = other DNA
atggctctagagaccctgccccggctctgtcgcccagctgctgctcaggtgggcggctcacctcagagactcctcggacttggccttggccctagagaaccagcgctggaacctcacgtggagcctaaggatgctgccgccctccttacccgccagccaattctgcaggactgtgatcttgccaccgtggccttgtcccccccaccacctgctggcgcgcgggccacacacctgcaggtctcttcccatgatgatttgcggactccagcccccggcgaggagcaccgcgcgcagctgctccggggaagaaaccaagtggcttttacagaggtcatgggtatgctttggaggcgcctgaacgactccggcaagaattggcggcatgtctacaaagctcttactcttcttgactaccttttaaagacggggagcgaacgtgtggcacatcagtgccgggaaaacttatataccatacagacactcaaggatttccagtacatagatagagacggtaaggatcagggcgtgaatgtccgagagaaagttaagcaggtgatggcccttctgaaggatgaggaacggctaagacaggagagaactcatgcccttaagacgaaggaacgaatggcccttgagggcattggaataggttcagggcagcttggtttcagtaggagatatggtgaagactacagccgatctaggggaagtcctagctcttataattcctccagctcctcccctcgctacacgtccgacttagaacaagccagaccacagacctcaggggaggaggaactgcaactgcaactggccctggccatgtcacgcgaggaagccgagaaagaggttaggtcttggcagggagacggctccccgatggcaaacggggccggcgcagtcgtgcatcatcagagagaccgcgaacctgagagggaagagcgcaaggaagaggaaaagctgaaaacttctcagagttccattctcgacctggctgacatctttgtccccgcattggcgcccccttccacgcactgctccgccgatccttgggatatccctggatttagaccaaatactgaagcctccggctcaagttggggcccctccgcagacccgtggtcccccataccctcaggcaccgtgctatccagatcccagccttgggaccttacacctatgctttcgtcctctgaaccatggggcaggacccccgtcttgcctgccgggccccctacaaccgacccgtgggctctcaactcaccccatcacaaactgccatctactggcgctgatccttggggagcttcgctagagactagtgataccccaggtggcgccagtactttcgatccatttgctaaacccccagaaagtaccgagacaaaggagggtctcgaacaagctttaccgtcaggcaagccctcttccccagtggagctcgacctgtttggagacccatccccctcgtctaaacagaacggcacaaaagagcccgatgctttagacctgggcatcttgggagaagctctgacacaaccttctaaggaggcccgggcctgtagaacacctgagagttttctaggccccagtgcgagtagcttggtgaaccttgattccctcgtcaaagcaccccaagtggccaagacacgaaatccattcctcacaggtctgagtgccccgagcccaacgaatccatttggagccggggaacccgggcggccaacattgaatcagatgagaactggctcccccgcgctcggtctggcaggaggcccagttggggcacccctgggtagcatgacatactctgctagcctgccgctgccacttagcagcgtccccgccggactgaccctcccagcctccgtgagcgtgtttcctcaagctggcgcatttgccccacagcctctgcttccgacacctagtagcgctggtccgcgaccccctcccccacagaccgggacaaatccgttcctgtag

SEQ ID NO: 115960 - DNA, 753 bp, synthetic construct
  misc_feature 1..753: note = Description of Artificial Sequence: Synthetic coding sequence
  source 1..753: mol_type = other DNA
atggggatgttatggagaaggctgaatgattccggcaagaactggcgacacgtgtataaggcactcacgttactggattacctgctaaagactggaagcgaacgcgtggctcaccaatgcagggagaatctgtatacaattcagaccctcaaagatttccagtatatagaccgggatggcaaagaccagggagttaacgttagggagaaagttaaacaagtgatggctctgctgaaggacgaggaacgcctaaggcaagagaggacacacgcgctgaagacaaaggaacgtatggccctggaggggattgggatcggaagcggtcagctgggctttagcagacgctatggagaggactactctcgcagcaggggcagcccctcctcttacaattcgagctctagttctccacggtatactagtgaccttgaacaggccaggcctcagactagcggcgaagaagagctgcagctgcaactggccttggctatgtcccgcgaggaggctgagaaagaggtacgcagctggcagggcgacggaagtccaatggcaaacggggcgggggccgtggtgcatcaccagcgagatagagagcccgagagagaggagcggaaggaagaggaaaaactcaagacctcacaggtgttgggccgaacacagagaccagtagatccacccggtggactgttacaaacaccaggtctccgttccccacaggagccttcctgcccagaggcaagccccggtatctag

SEQ ID NO: 115961 - DNA, 429 bp, synthetic construct
  misc_feature 1..429: note = Description of Artificial Sequence: Synthetic coding sequence
  source 1..429: mol_type = other DNA
atgagccttttacccgtcccctacacagaagccgcttcattgtctacaggctccacagtcactatcaagggccggcccctggcctgtttcttaaacgaaccatacctgcaggtcgacttccacaccgaaatgaaggaggaaagcgacatcgtttttcactttcaggtttgtttcgggaggagagtagtgatgaatagccgggagtacggcgcttggaaacagcaagtggaatccaaaaacatgccctttcaggacggacaggagtttgagctgagcatttccgtcctgcctgataagtatcaggttatggtgaatggccagtccagctacacattcgaccatcggatcaaaccagaagccgtgaagatggtccaggtctggagagatatcagtctgaccaaattcaatgttagctatctgaaacggtag

SEQ ID NO: 115962 - DNA, 828 bp, synthetic construct
  misc_feature 1..828: note = Description of Artificial Sequence: Synthetic coding sequence
  source 1..828: mol_type = other DNA
atgaacatgacgcaggctagagtcctggtcgcagctgtggtgggactcgtggccgtgctcctatacgccagcatccacaaaatcgaggaagggcatctggctgtttattacagagggggtgccctcctgactagtccctccggaccagggtatcatattatgctccctttcattactaccttcagaagtgtgcagacgaccctccagactgatgaagttaaaaacgtgccatgtggaacgtctggcggtgttatgatatatatcgacagaatagaagtggtaaatatgttggcgccctatgccgtttttgatatagtgcggaattataccgccgattacgacaagactctgatctttaacaagatccaccacgaactcaaccaattctgtagcgctcatacgcttcaggaggtctacattgagctgtttgatcagatcgatgagaacctgaagcaggcactccagaaagatctcaacctgatggcccccgggctgactatccaggccgtgagggtgaccaaacctaaaattcctgaagccatcaggagaaactttgaactcatggaggcagaaaaaaccaagttgctcattgcagcacagaaacagaaagtcgtggagaaagaggctgagactgaaaggaagaaggccgttattgaagcagagaagatcgctcaggtggctaagattaggttccagcaaaaagtgatggagaaggagacagaaaagcgtatctccgaaatcgaagacgctgcatttctggcacgcgaaaaggccaaagccgatgccgaatactatgctgcccacaagtatgccacctcaaataaatag

SEQ ID NO: 115963 - DNA, 699 bp, synthetic construct
  misc_feature 1..699: note = Description of Artificial Sequence: Synthetic coding sequence
  source 1..699: mol_type = other DNA
atgatctacatagaccggattgaggtggtgaatatgctggccccctacgcggtgtttgacattgtgcgaaattatacggcagattatgataagaccctaatctttaataaaatccaccacgaactcaaccaattttgtagtgcccacactctccaggaagtatatattgagctgttcgaccagatcgatgagaacctgaaacaggctctacagaaagacctgaatcttatggcacctggactcacaattcaggccgtgcgggtcacaaagcctaaaatcccagaagccatacgtcgcaatttcgagcttatggaggctgaaaaaacgaaactcctgatcgccgcacagaaacagaaagtggttgagaaggaggccgaaacagagcgaaaaaaagcagtgatcgaggcagagaagatcgcccaggtagctaagatccgattccagcagaaagtgatggaaaaggagaccgagaagaggatctccgaaatcgaggatgccgccttcctggctcgggaaaaagccaaggcggacgccgaatattatgctgcccacaaatatgcgaccagcaacaagcataaacttacacctgaatacctagaacttaaaaagtaccaggctatcgcctcaaactccaagatttattttggaagcaacatccccaacatgttcagcatctccagatgcggccctcgaggctag

SEQ ID NO: 115964 - DNA, 1047 bp, synthetic construct
  misc_feature 1..1047: note = Description of Artificial Sequence: Synthetic coding sequence
  source 1..1047: mol_type = other DNA
atgaacatgacacaagcccgggtcctagtcgcagcagtggtcggactggtggctgtcctgctttatgcttcgatccacaagatcgaagaaggacacttggcggtgtactacagaggtggtgccctgctgacgagtccgagtgggcctggataccacattatgttgcccttcatcaccacctttcgctcagtgcagacaaccctgcagactgacgaggtgaaaaacgttccctgcggaacatccggcggagtgatgatttatatcgatagaattgaggtagtgaacatgctcgcaccatacgccgtattcgatatcgtcaggaactacacagccgactacgacaagacgctgattttcaataagattcaccacgaactgaaccaattctgcagtgcacatacacttcaagaggtgtacattgaactttttgaccaaattgacgagaatctgaagcaggcattgcagaaggatctgaatttgatggctcctggcctcactattcaggccgtgcgtgtgactaagcccaagattcccgaagctatcagaagaaattttgaactgatggaagctgaaaagaccaagctgctcatcgctgctcagaaacagaaggttgtggaaaaggaagcggaaactgaacgcaagaaagccgttatcgaggccgaaaagattgctcaggtggccaagattagatttcagcagaaggttatggagaaggagacagagaaacgcattagtgagatcgaggatgcagctttcctggcgcgagaaaaagctaaagccgatgcagagtattacgcagcccacaagtacgctactagtaataaacacaagctgacccctgaatacctcgaactgaaaaagtaccaggcaatcgctagtaattcgaaaatttatttcggatcaaacatcccaaacatgttcgtagacagcagctgtgccctgaagtactcggacatcaggacggggcgggagagcagccttccctcaaaagaagccctggaaccgtcaggggagaatgtgattcagaacaaggagtctaccgggtag

SEQ ID NO: 115965 - DNA, 1047 bp, synthetic construct
  misc_feature 1..1047: note = Description of Artificial Sequence: Synthetic coding sequence
  source 1..1047: mol_type = other DNA
atgaacatgacccaagctcgagtactggtggccgcagtggtgggccttgttgcggtgctgctgtacgcgtccatccataaaatcgaagagggacatctagccgtatattatcgcgggggcgccctactgacatctccctcaggtcccggttatcatatcatgttgccctttataaccactttccgctccgtgcagaccaccctccagacagacgaggtaaagaatgtgccttgcggaacgtccgggggcgtgatgatttatatcgaccgaatcgaggtagttaacatgctggcaccatacgctgtcttcgatattgtaagaaattatactgccgattacgacaagacgcttattttcaacaaaatacatcacgaattgaaccagttctgctccgcccacaccctccaggaagtctatattgagcttttcgaccagattgacgaaaatcttaaacaagccctgcagaaagacctcaatcttatggcccccgggttaacgattcaggccgtgagggttacaaagccaaagattcccgaggcaatccggcggaactttgagctgatggaggccgaaaaaactaaactgttgatagcggcgcagaaacagaaggttgttgagaaagaagctgagaccgaaaggaaaaaagccgtcattgaagcagaaaaaattgcccaggtagccaagattaggttccaacaaaaggtcatggagaaagagaccgagaaacgcatctctgagatcgaggacgccgctttcttggccagagaaaaggcaaaagcagacgccgaatactatgcagcccacaagtatgccaccagcaataaacacaaactgacacccgagtacctcgagttaaaaaagtaccaggctatagcttccaatagcaaaatatatttcggaagcaatatcccgaatatgttcgtggactcatcatgtgcattgaagtactccgatatccggaccggccgggaatcctcacttccctccaaggaggcactggaacccagcggagaaaacgttattcaaaataaggagagtacggggtag

SEQ ID NO: 115966 - DNA, 1020 bp, synthetic construct
  misc_feature 1..1020: note = Description of Artificial Sequence: Synthetic coding sequence
  source 1..1020: mol_type = other DNA
atggcgcagctcggcgctgtggtggccgtggcttcctctttcttttgtgcgtcactttttagtgccgtccataaaatcgaggagggtcatatcggtgtctactatcgcggcggagcactactgacttccaccagtggccctggttttcatctgatgcttccttttattacgagctataagagcgttcaaactacactgcagacagacgaggtaaagaacgtaccgtgcggcaccagtgggggggttatgatttattttgatcggattgaggtcgttaatttcttggttcctaatgcagtgtatgacatcgtgaagaattatactgctgattatgataaggccctgatttttaacaaaatccaccatgagttgaatcagttctgctcagtccatactctgcaggaggtttacattgagttatttgaccaaatcgacgagaacctaaaattagcactgcagcaggacctgacctcaatggcaccagggcttgttattcaggcagtgagagttaccaaacccaacatcccggaggccatcaggagaaactacgagctcatggaatccgaaaaaacgaagctcttgattgccgcgcagaaacagaaggtggtagagaaggaggcggagacggagaggaagaaggccctgattgaggccgaaaaagtggctcaggtcgctgagataacctatggccagaaagtcatggaaaaagaaactgagaagaagatttctgaaatcgaagatgcggcctttctggcacgggaaaaggcaaaagccgatgcagaatgttacacggccatgaaaattgccgaagccaacaaactgaagctcacgcccgagtatttgcagctcatgaaatacaaggcaattgcgtccaatagcaaaatctattttggcaaggacattccaaatatgtttatggactcagcaggctccgttagtaaacagtttgagggcctagcggataaactttcatttggcctggaggatgagcccttggaaactgccactaaagaaaattag

SEQ ID NO: 115967 - DNA, 459 bp, synthetic construct
  misc_feature 1..459: note = Description of Artificial Sequence: Synthetic coding sequence
  source 1..459: mol_type = other DNA
atggcccaactgggggccgtcgtcgcggtagcttcgtccttcttctgcgcctccctattttcggcagtacacaagattgaagaggggcatataggcgtgtactaccgtggcggcgcactgctaacatcaacaagtggacccggtttccatctgatgctgcctttcattactagttacaagagcgtgcaaactaccctgcagacagacgaggttaagaatgtgccctgtgggacttcaggcggggtgatgatctacttcgataggatagaagtggtcaatttcctagtgccgaatgctgtgtacgatatcgtcaagaattatacggccgattacgacaaggcactgattttcaacaaaattcaccacgagctgaatcaattttgcagcgtgcacacactccaagaagtttatatcgagctcttcgggctagagaacgatttctctcaggaaagttcttag

SEQ ID NO: 115968 - DNA, 1020 bp, synthetic construct
  misc_feature 1..1020: note = Description of Artificial Sequence: Synthetic coding sequence
  source 1..1020: mol_type = other DNA
atggcacagctcggcgccgtggtggccgtggcttcttcttttttttgcgcaagtttgttctccgcggtacataagatagaggagggacatatcggggtctattacaggggcggggctcttctgaccagtacgagcggtccaggattccaccttatgctcccttttatcacctcttataaatccgtgcagaccactctgcaaacagacgaggtaaaaaacgtgccctgtggcaccagcggtggtgtgatgatctacttcgatagaatcgaagtcgtgaactttctcgtaccaaatgcagtgtatgatattgtcaaaaactacaccgcagattatgataaagcgctaatattcaataaaatacatcacgaattgaatcaattctgttctgtgcataccctccaagaggtttacattgagctcttcgatcagattgatgaaaacctgaagctagccctgcagcaggatctgacttccatggcacctggcctagtgatccaggcagtgagggttaccaaaccgaacatcccagaagctatacgccggaattacgaactgatggaatccgagaaaacaaagctgttgattgctgcacagaagcagaaagtagtagagaaagaggcagagaccgagagaaaaaaggccctaattgaagctgaaaaggtggcccaggtggccgagatcacttacgggcagaaggtcatggaaaaggaaacagaaaagaagatttccgagattgaagatgcagcctttctggcaagggaaaaggccaaagctgatgccgagtgttacacagccatgaaaatcgcggaggccaataaattaaagctcacacctgagtaccttcagctcatgaaatacaaagctatcgcttctaattctaagatatacttcggaaaggacattcccaacatgttcatggactctgctgggtcagtgtcaaaacaatttgagggcctggcagacaagctgagttttggactggaagacgaaccactggaaaccgcgactaaggagaactag

SEQ ID NO: 115969 - DNA, 621 bp, synthetic construct
  misc_feature 1..621: note = Description of Artificial Sequence: Synthetic coding sequence
  source 1..621: mol_type = other DNA
atggcccagttgggagctgtggttgctgtggccagctcgttcttttgtgccagcctgttctctgcggtccacaaaattgaagaagggcatatcggggtgtactaccggggaggagcactgctgaccagcacatccgggcccggattccacctgatgttgccatttattacctcctataaaagcgtgcaaactacgcttcagaccgatgaagttaagaacgtaccttgtgggaccagcggaggagtcatgatttattttgacaggatcgaagtagttaacttcctcgtccctaacgcagtttatgacattgtgaaaaattacactgctgattacgataaagccttgatctttaataaaattcaccatgaattaaaccaattctgcagtgtccatactttacaagaagtgtatatcgaactgttcggcaaaaaagtgtcccccgagcatgctgtgctaaagcaaggctcctggaacccagcttccctgcattgcttgaagcctggctgcctgcagggtgtgatggtgacgtacggccaggaaatgctgaaaaacctcgtattaaggtcctggagccagcggtccagttggaggatgctgatcgccatgcaacaagacccatag

SEQ ID NO: 115970 - DNA, 459 bp, synthetic construct
  misc_feature 1..459: note = Description of Artificial Sequence: Synthetic coding sequence
  source 1..459: mol_type = other DNA
atggcacagctgggcgcagtcgtggctgttgccagtagctttttttgtgcgagtctgttctctgccgtgcacaagatagaggagggacatataggagtttattatagagggggtgccctgctgaccagtacatctggaccgggtttccacctgatgctgccattcataacaagctataaaagcgtgcagaccaccctgcagactgacgaggtaaagaatgttccttgcggtacgtccggcggagttatgatctattttgatagaatcgaggtggtcaattttctggtaccaaatgcagtctatgacattgtgaagaactatacagccgattacgataaggcacttatcttcaataagattcatcacgaactgaatcagttttgcagcgtccacaccttacaggaggtttacattgaactatttggacttgagaacgattttagtcaggagtcctcatag

SEQ ID NO: 115971 - DNA, 4239 bp, synthetic construct
  misc_feature 1..4239: note = Description of Artificial Sequence: Synthetic coding sequence
  source 1..4239: mol_type = other DNA
atgacaacaaaacgtagcctgtttgtgagactcgtgccatgtagatgcttgaggggtgaggaggaaaccgtgactacactggactacagccactgttccttggagcaggtgcccaaagaaatctttacgttcgagaaaactttggaggaattgtacctggacgccaaccagattgaagagttgccaaagcaactcttcaactgtcagtctctccataaactatcattgcctgacaacgacctgacgaccctccccgcttccattgctaacctaatcaacttacgcgaactcgacgtgagcaaaaacggaattcaggagtttccagagaacatcaagaattgtaaggttcttaccattgtggaggcttccgtcaatcccatttcgaaactcccggacggcttctcacagcttctgaacttgacgcagctgtatctcaatgatgcttttctcgaatttttgcctgccaacttcggcaggttaaccaagctgcagattctcgaacttcgcgaaaaccagctaaaaatgctgccaaagaccatgaataggttgacccagcttgaacgtctggatttgggcagtaatgagttcactgaagttcccgaagtgctcgagcaactttctggattaaaagagttttggatggacgccaacaggctgaccttcatccccgggttcattggaagtctgaaacagcttacctatctggacgtcagcaaaaacaacattgaaatggtcgaagagggcatctcaacttgtgagaaccttcaagatctgttactgtccagcaacagcctgcagcagctgcctgagacgatagggtccctaaaaaacattaccacgctgaaaatcgatgagaatcagcttatgtacctccccgacagtatcggtgggctcatttctgtggaggagctcgattgttctttcaacgaggttgaagccttgcccagctccatcggacagcttacgaacctcagaacgtttgcagcggaccataactatctgcagcagctgccgccagaaatcggtagctggaagaatatcaccgtgctgttcttacacagcaacaagcttgagaccctgccagaggagatgggagacatgcagaagttgaaggtaatcaatctgagcgacaaccgactcaaaaacttgccgtttagcttcaccaaacttcaacagctgactgctatgtggctgagcgacaatcagagtaagccactcatccccctgcagaaggaaaccgactcggaaactcagaagatggtactgaccaactatatgttcccccagcagcctaggaccgaggacgtaatgttcatttcagacaacgagtcatttaacccatctctgtgggaggagcaacgaaagcagagagcacaggtggcttttgaatgtgacgaggataaagacgaacgggaagcacctcctcgagaaggcaacctgaagcggtaccccaccccataccccgacgagctcaagaatatggttaagaccgtgcaaaccattgtacataggctgaaagatgaggagaccaatgaggattccggcagagacctaaagccgcatgaggatcagcaggatattaacaaggatgtgggcgtcaaaacctcagaatccaccaccacagtgaaatctaaggtggacgagcgcgagaaatacatgatcggcaattcagtgcagaagatcagcgagcctgaggctgaaataagtccaggctcattgccagttaccgccaatatgaaggccagcgaaaatcttaagcatatcgttaaccacgacgatgtgttcgaggaaagtgaggagctttcttctgacgaagagatgaagatggcagagatgcgtcctccccttatagagacctccattaatcaaccgaaggtagtggcactttccaacaataagaaggatgataccaaggaaacagactcattaagcgacgaggttactcataactcaaaccagaataactctaattgctcttctcctagtaggatgtctgattccgtgagcttaaataccgattctagtcaggacacatctctctgcagcccagtcaaacagactcacatcgatatcaacagcaaaatcaggcaggaagacgagaactttaattctttactgcaaaatggcgacatcctgaactcttccacagaagagaagtttaaagcccatgacaaaaaagactttaacctacctgagtatgatctcaatgtagaagagcggctcgtgttgatcgaaaagtcagtcgacagcacagcaaccgccgatgacacccacaagttggatcacataaacatgaacctgaataaactgataaccaacgatacctttcagcctgaaatcatggagcggagcaagacgcaggatattgtgttgggaaccagcttcttgtctatcaactctaaagaggaaacagagcatctggagaacggaaacaagtatcctaacctggagtcagtcaacaaggtaaatggccacagcgaggagactagccagagtcccaacaggactgaaccccacgattctgactgttctgttgacctcggcatctcaaaatctacagaggatctgtcaccccagaagtcaggcccggtgggatctgtcgtgaagtcacattctattacaaatatggaaattggcgggcttaaaatatatgatatcctttcagacaatggcccgcagcagccatcaacaacagtcaagatcacaagtgccgtagacggcaaaaacattgtacggagtaagtccgcaacgctgctctatgaccagcctctgcaggtttttaccggcagcagttcctctagtgatctcatcagcggtacgaaagctatctttaagtttgacagtaatcacaaccctgaagaacctaatattatcaggggacctaccagtgggccacagtccgccccccagatctatggcccaccgcagtacaatatacagtattccagctcagctgctgtgaaggacacgctctggcacagtaaacaaaacccacagattgaccacgctagtttccctccccagcttctcccccggtctgagtctacggagaaccaatcctatgctaagcactcggctaacatgaactttagtaaccacaacaatgtgcgggcaaataccgcatatcatcttcaccaacgcctaggtcctgccagacacggtgagatgtgggcaatctcaccaaacgataggctaatccccgctgtgacaagatcaactatccaaaggcagtctagcgtctcatcgacagcaagcgtgaacctgggcgatccagggtcaactcggcgcgcacaaattcccgaaggcgactatctgtcttatcgggaattccactcagctggacggaccccacctatgatgccagggagccagcggccgctctctgcacgaacttactccattgacggacccaacgcctcgaggccccagtccgcccgcccttccattaacgaaattcccgaacggaccatgagtgtgagtgatttcaactacagtcgcactagccctagcaaacgcccgaacgctcgagtgggctccgagcactccttattggaccccccagggaagtccaaggtgcctagagactggcgcgaacaggtccttcgccacatcgaggccaagaagttggagaagaagcaccctcaaacatccagttcgggcgacccttgccaggatggtatcttcatcagtggccaacagaattattcatctgcaaccctgtcccataaggacgtgccacctgacagcctcatgaagatgcctttaagtaacggccagatgggccagcccctgagaccccaagcaaactatagccagatccaccatccaccccaggcatcggtagcacggcacccatcaagagagcagttgatcgattacttgatgctgaaggttgctcaccagccgccttacacacaaccacattgttcgcctcggcagggacatgaactcgccaaacaagagattagagtgcgcgtagagaaagacccggagcttgggtttagcatttcgggtggagtcggaggcagaggtaatccatttaggcccgacgatgatggcatattcgtgactcgagtgcagcccgaaggtcccgcatctaagttactccagcccggagataaaataatacaggctaacggctatagtttcatcaacattgagcacggacaggccgtaagtttgctgaagaccttccaaaatactgtcgagttgatcattgtgagagaggtgtcaagctag

SEQ ID NO: 115972 - DNA, 3909 bp, synthetic construct
  misc_feature 1..3909: note = Description of Artificial Sequence: Synthetic coding sequence
  source 1..3909: mol_type = other DNA
atgaccactaaaagatcactgttcgtaaggctggtaccgtgcaggtgccttcgcggcgaagaggagactgtgacgacactggattatagccactgttctttggaacaggtgcccaaagagatcttcacattcgagaaaaccctggaggagctgtatttggacgctaatcaaatcgaggagcttccaaagcagctttttaattgccagtctttgcataaactgtcacttcccgataatgatctgaccactctccccgccagcatcgccaatctaattaaccttcgggaattagacgttagcaaaaacggaatccaagaattccccgagaatatcaagaattgcaaggtgctaacaatcgttgaagctagcgtcaaccctattagcaaattgccagacggcttttctcaactactaaatttaactcagttgtatttaaacgacgccttcctcgagttcctacctgctaactttggtcgactgaccaagttgcagattctggagctgagggagaatcagctgaaaatgctccccaaaacgatgaatcgcctgacacagctggagcggttagatctcgggagtaacgaatttacagaagtgccagaggtcctagaacagctctccggtcttaaggagttttggatggacgcaaacagattgacatttatcccgggcttcatcggctccttaaagcagctgacctacctagatgtaagcaaaaataacatcgagatggtggaggaggggatcagcacctgcgagaatctacaggacttattgctgtcttccaacagcctgcagcagctgccggagactatcggctccttgaaaaacattaccacactgaagattgacgaaaatcagctcatgtatctcccagatagcatcggtgggctgatatccgtcgaggaacttgactgctctttcaatgaggttgaggcgctcccatcctctattggacagctcactaatctgagaacctttgctgccgaccataactatctccaacaacttcccccagagattggctcctggaagaatatcaccgtgttatttttgcacagcaacaagctggaaactctgccggaggagatgggtgacatgcaaaagctcaaagtgatcaatttgagtgacaataggctgaaaaacttgccctttagctttacaaagctgcaacaactgaccgccatgtggctctccgataaccaatcaaagcccctcatacccctccagaaagaaacagactctgaaactcagaagatggttttgaccaattacatgtttccacaacaacctcgtactgaggatgtgatgtttatcagcgacaacgagagctttaatcctagcctgtgggaagaacagagaaaacaaagagcccaggttgcattcgagtgcgatgaggataaggacgagagggaagctcctccaagggaaggcaacctgaagagatacccaacaccttatccagacgagctaaaaaacatggtcaagactgtacagacaattgtgcatcgcttaaaggacgaagagacgaatgaagactccggccgcgatttgaaacctcacgaggaccagcaggacatcaacaaggatgtaggcgtgaaaacttctgaaagcacaaccacagtcaagagtaaggtcgacgagagagagaagtacatgattggcaactcagtgcaaaaaatctcagaaccggaggccgaaatttctcccggatcactgccagtgactgcaaacatgaaggcctcagaaaaccttaagcacattgtgaatcacgacgatgtcttcgaagaatctgaggaactaagctccgacgaggagatgaaaatggccgaaatgcggccccctctgatcgagacaagcataaatcagcccaaagtggtcgcgctgtcaaacaataaaaaagacgacacaaaggagacagactccctcagtgatgaggtcacccataattcaaaccagaacaactctaactgtagctctccgagccggatgtccgactccgtcagcctgaacactgacagcagccaggacactagcctgtgttcacctgtcaagcagactcatatcgacatcaatagcaaaatccggcaggaggatgagaatttcaatagtttgcttcaaaacggtgacatactgaacagctctactgaggagaagttcaaagcccatgacaagaaggatttcaaccttcccgaatacgacctcaatgtggaagaacgcctggtcctaatcgagaagagcgtcgacagtacggccactgcagatgacactcataagctggaccacatcaacatgaatctgaacaagctgattaccaacgatacgtttcaacccgagatcatggagcggtcgaagacccaggatatagtcctcggtacgagtttccttagcataaatagtaaagaggaaaccgagcacctcgagaacggcaataagtacccaaacctcgaatctgtgaacaaggtcaacggtcatagcgaagagacatctcagagccctaaccggactgagccacatgactctgattgtagtgtggacctagggatttccaaatccacagaagatctgtcaccccagaagagtggaccagtgggtagcgtggtgaagtcccattccatcactaacatggagattggcggccttaagatctatgacattttgagcgacaacggcccacagcagccaagtactaccgtgaaaatcacaagtgcagtggacgggaaaaatatcgtgcggtccaagtctgctacactgctgtacgatcaacctttgcaggtgttcacaggcagttcaagttcaagcgacctaattagtgggaccaaggcaatcttcaagtttgattccaatcataaccccgaggagcctaatataatccgtgggcctaccagcgggccacaatcagctccccagatttatggacccccgcaatacaatattcaatattcctcgtccgctgcagtgaaggacaccctgtggcacagcaagcagaacccacagatcgaccacgcctcttttcccccccagctacttcctcgaagtgaatctaccgaaaatcagagctacgcgaaacacagtgctaatatgaacttttctaaccacaacaacgtgagagctaatacagcctaccacctccaccagcgcctcggccccgccaggcatggggaaatgtgggccatatctcctaatgatcgcctgattccggcagttacacggagcaccatacagcggcagtcctccgtttcaagcacagcatcagttaaccttggagaccctggctcaacccgtcgcgcccagattcccgagggcgactacctatcctatcgggaattccactctgcagggaggactccacctatgatgccagggtcccaaagacctttatccgccagaacctattccatcgatggccctaatgcctcccggccccagtcagctcgacccagcatcaatgaaattcccgagcggacaatgagcgtgtctgactttaactactctagaacatctccatcaaagaggcccaatgccagagtcgggtcagagcactcactgctagatccaccaggaaagtcaaaggtaccccgcgattggcgcgagcaggtcctgcgccacattgaggctaagaaactcgaaaaaatccgtgtgagggtggagaaggatcccgaactgggcttctcgatcagcggaggcgtgggcgggcgtgggaatccttttcggcctgatgatgacggcattttcgtcactcgagtgcagccagagggccctgcctcaaagctgctacagccgggtgataaaattattcaagctaacggttattcattcattaacatcgagcacggccaggccgtgagtttgctgaagacattccagaacaccgtggaattaattatcgtccgcgaggtaagttcttag

SEQ ID NO: 115973 - DNA, 4023 bp, synthetic construct
  misc_feature 1..4023: note = Description of Artificial Sequence: Synthetic coding sequence
  source 1..4023: mol_type = other DNA
atgactacaaaaaggtccctgtttgtgcgcctcgtcccgtgcagatgtcttaggggagaggaagaaactgtcacgacattggactattcacattgctccttagaacaggtgcctaaggaaatcttcacctttgagaagacccttgaggagctctatctggatgcgaatcagatcgaagaactaccgaaacagcttttcaattgccagagtctgcataaattatccctcccagacaacgatttgacaaccctacccgcctctatcgctaatcttatcaatctccgcgaactggatgttagcaaaaacggaatccaggagtttcccgagaatataaagaattgcaaggtactgactatcgtggaggcctctgtgaatcccatatccaagttaccagacggattttcacagctgctgaatctcactcagctgtatttgaacgatgcttttctggagttcctgccagcaaattttggtagactgacaaagctgcaaattctcgaactgagggagaatcaattaaagatgctgcctaagacgatgaatagactgactcaattagagcgcttggatctaggatccaacgagtttaccgaggttccagaggtgctagaacagctgtccggactcaaagaattctggatggacgccaaccgattgacattcattcccggcttcatcgggtccctgaagcagctgacctaccttgacgttagcaaaaataatatcgaaatggtcgaggaagggataagcacttgcgagaacctgcaggacctactcttatctagcaactcactccaacagctaccagaaaccatcggatccctaaaaaatatcacaactctcaagattgatgagaatcagctgatgtacctacccgacagcatcggcggccttatctccgtagaagagctggattgctccttcaatgaggtagaggcacttcctagcagtatcggacagctgaccaacttgaggacttttgctgcagaccacaattacctccagcaactccccccagagatcggctcctggaagaatatcaccgtgctttttctccacagtaacaagctggagactctccctgaggagatgggggatatgcagaagctgaaggtgattaatctcagcgacaaccgcctgaaaaaccttccatttagcttcaccaaactgcagcagctgacagccatgtggctgagtgataatcagagtaagccactgattcccctacagaaggaaaccgactcagagacccagaaaatggttctgacgaattacatgttccctcagcagccacgtactgaagacgtgatgttcatttcagacaacgaatcatttaacccatccctgtgggaggagcagagaaagcagagggcacaggtcgctttcgaatgcgacgaggataaggacgagcgcgaggctccaccccgagaggggaatcttaaacggtatccaaccccttacccagacgagctgaaaaatatggtgaagaccgtgcagactatcgtgcacagattgaaagatgaggaaaccaacgaggatagcgggagggatttgaaacctcatgaggaccaacaggacattaacaaagacgtcggggttaagacaagtgagtctaccaccactgtgaagagcaaagtcgatgagcgagaaaaatacatgattggaaactccgttcagaaaatttcagaacctgaagctgagattagcccgggatcactgcccgtgacagccaacatgaaagcgtcagagaacctcaagcatattgtgaatcacgacgatgtctttgaggagagcgaagaactgtcttctgacgaggagatgaagatggcggaaatgcgtccacctcttatcgagacatccattaatcagcccaaagtggtggccctgtctaataataaaaaagacgatacaaaagagactgactcccttagtgacgaagtcactcacaacagcaaccaaaacaactccaactgttcctccccaagccggatgagtgatagcgtgtcactgaatacagacagttctcaggataccagcctctgctcacctgtgaaacaaactcacatcgatatcaactctaagattcgtcaggaagatgagaactttaacagcttgctccagaatggtgatatactgaattctagtactgaggagaaattcaaggcccacgataagaaggactttaatctccctgaatacgacctgaatgtcgaagagcgactggtgctgatagagaagagcgttgactcaactgctacggcagacgacactcacaagcttgatcacattaacatgaatctcaacaagcttatcaccaacgatacgttccagcccgagattatggagagaagcaagacacaagacatcgtcttgggcacttcgtttctttccatcaatagcaaagaggagacagagcacctggaaaatggcaataaatatccaaatctggagagcgtgaataaagtcaacggacactcggaggagacctctcagtccccaaatcgcacagagccccacgacagcgactgtagtgtcgaccttgggatctccaagagtaccgaagatctcagcccacaaaagtcagggccggtgggctcagtggtgaagtctcacagtatcactaacatggagatcggcggactgaaaatctatgatatcctctctgataatggaccacagcagccaagtactaccgtaaagattacgtctgcagtcgacgggaaaaatattgtcagaagcaaatccgccacgctgttatatgatcaaccgcttcaggttttcactggcagcagtagcagcagcgacctaataagtggcaccaaagctatctttaagtttgatagtaatcataatccggaagagccgaatataatcaggggcccgacgtccggaccccagtctgccccacagatttacggcccaccccaatacaacatacagtactcttccagcgccgccgtcaaagataccctgtggcactcgaagcagaatccccaaatagatcacgcatctttccctcctcaactcctgccgcgctctgagagcaccgagaaccagtcatatgctaagcacagcgcaaacatgaactttagcaatcacaacaatgtccgcgccaatactgcctaccatctgcatcagcggctgggccccgcgcgccacggcgagatgtgggcaattagcccaaatgatcgtctcatcccagctgtgacccgaagcaccattcagcggcaatccagtgtgtcttcaacagcatcagtgaacctcggagatcccggcagcacaagaagggctcagatcccagagggcgattacttatcttacagagagttccacagtgctggaaggacaccaccgatgatgccggggtcacagcgacctctgtctgcccgaacctatagcatcgatggcccaaatgcttcgcgcccccaaagtgctagaccctccatcaatgagatccccgaaagaactatgtcagttagcgactttaattattctagaacgtctcccagtaaacgccctaatgccagagtggggtcagaacactccctactggacccacctgggaaatctaaagtgcccagagactggcgcgagcaggtgctgcgccacattgaggccaagaaactcgagaaaatgcctctgtccaacggccagatggggcagcccttgcggccacaggccaattacagtcagattcatcatccgccacaggcatctgtggccaggcacccctcccgtgagcagctgatcgactacctcatgctaaaagtggcgcatcagccaccctatacacaaccacactgttcaccacgccaaggccacgagcttgcaaagcaagagggaatcttcgtcactcgggtgcagccggagggcccggcttccaaacttctccaacccggcgataagataatccaggccaatggctatagctttatcaatattgaacacggacaggcagtaagcttgctgaaaacattccaaaacaccgtcgagctgattattgtacgcgaggtttcttcttag

SEQ ID NO: 115974 - DNA, 4041 bp, synthetic construct
  misc_feature 1..4041: note = Description of Artificial Sequence: Synthetic coding sequence
  source 1..4041: mol_type = other DNA
atgacaacaaagcgatctctgttcgtgagattggtaccgtgcagatgtctcaggggggaggaagagaccgtaaccactctcgactactcccattgttcacttgagcaagtgcctaaggaaatttttacattcgagaaaaccctggaggagctatacctggacgcaaatcagattgaggagctgcccaaacagctatttaattgccaaagcctccataaattgtctttgcccgataacgacctgacaacgctgcctgcttcaattgcaaaccttattaacttacgggagctggatgtgtcgaagaatggaatccaagaatttcctgagaacattaaaaactgtaaggtgctgaccatcgtggaagcgtctgtgaacccaattagcaaacttcccgacgggttttcacaactcctcaatctgacccagctttacctgaacgatgcctttcttgagtttctgccggctaacttcggacgcttgaccaaactgcaaatcctagagctccgggaaaaccaactgaagatgctgccgaagaccatgaatagacttacacagcttgaacggctggatctgggcagcaatgagtttacagaggtgccggaagtcctcgagcagctctccgggttaaaggaattttggatggacgcaaatagactcacttttatccccggtttcataggttctcttaaacaacttacttatttggacgtgagcaaaaacaatatcgagatggtggaagagggaatcagcacctgtgagaatctacaggacctgttgctttcatccaactcactgcagcagctgcctgaaaccataggtagcctgaaaaacattacaacactgaaaattgatgagaaccagcttatgtacctcccagatagcatcggaggtctcatctctgttgaggagcttgactgctcttttaacgaggtagaggccttaccctcaagcattgggcagctcactaacctgcgaacatttgctgccgaccataattacctacaacagcttccccctgagatcgggagctggaagaacattaccgttctttttttacactccaataaactcgagactctcccggaagagatgggcgatatgcagaaattaaaggttatcaatctcagtgataaccgtctaaaaaatctgccattttcctttaccaagctgcaacagttgaccgccatgtggctgtcagacaaccagagcaaacccttaatacccctccagaaggagacagatagcgagacacagaaaatggtgctcaccaactatatgtttccacagcagcctcggaccgaggatgtaatgttcatcagcgacaatgagtcctttaatcccagcctttgggaagagcagcgaaagcagagagcccaagtggctttcgagtgcgacgaagataaagatgagcgcgaggctccacccagggagggtaatctgaagagatatccaacaccgtaccccgacgagctcaaaaatatggtgaagacagtacagacgatcgtccatcgcctaaaggacgaggaaacaaatgaggacagcggacgggatctgaagcctcacgaagaccaacaagatatcaataaggacgtcggtgttaagacatcagaatctacaaccaccgtgaaaagcaaggtcgatgaaagggagaagtacatgatcggcaacagtgttcaaaagatctcagagccagaggctgagatctccccaggaagcctccccgtgactgctaacatgaaagcctcagagaacctgaagcatatcgttaatcacgacgatgtttttgaggagagcgaggaactgagctcagacgaggaaatgaaaatggccgaaatgagacctcccttaatcgagacctcaattaatcagcctaaggtggttgctctctctaacaacaagaaggatgatacgaaggaaacagattcgctctctgatgaggttacgcacaacagcaaccagaataattccaactgtagttctcctagcaggatgtctgatagtgtctccctcaataccgattcctcacaggacactagtctgtgttctccagtcaagcagacacacatcgacattaattccaagatcagacaggaggatgaaaacttcaattctctcctccagaacggcgatatcctgaatagcagcaccgaagaaaagtttaaagcccatgacaaaaaggactttaacctgcccgaatacgatctgaacgtcgaagaaagactggtcttgattgaaaaaagcgttgactctacggctactgctgacgatacgcacaagctggaccacattaacatgaacttaaacaagttgattaccaatgacacctttcagccagaaatcatggaaagatctaagacgcaggacatagtgttagggacctccttcctctctatcaactctaaggaagagaccgagcatttggagaatggtaataaatacccgaacctcgaatccgtaaataaggttaatggccattcagaagaaacctctcagtcccccaaccggacagagccccacgatagcgattgttcggtcgatctgggcatctccaaatctacggaagatctttctccacagaagtctggcccggtcggatctgtggtaaaatcgcacagtatcactaacatggaaattggcgggcttaaaatatatgatatcctctccgataatggaccccaacagccgtctactaccgtcaaaattactagcgctgtagatgggaaaaacattgtcagatccaagtccgcgacattgctatatgatcagcctctgcaagttttcacaggttcaagttctagtagtgatctgatctctggaactaaggccatcttcaagtttgacagcaaccacaaccccgaggagcccaatatcattaggggccctactagcggccctcaaagcgctcctcagatctacgggccgcctcaatataacatccagtattcttcatctgcagcggttaaggataccctttggcactctaaacaaaatcctcagattgaccacgcaagcttcccccctcagctgctgccccgatctgaaagcaccgagaatcaatcatacgccaaacatagtgcaaacatgaacttttctaatcacaataatgtccgggccaacacggcttaccacctgcaccaacgcctgggacctgctagacacggggagatgtgggcgatctcgccaaacgataggctgatccccgctgtaactcgatctactattcagcggcagagcagcgtctccagcactgcaagtgtgaacctgggtgatccaggttcaacaaggagagcacagatcccagaaggcgactacctcagctatcgcgaattccactctgcaggcaggaccccccccatgatgccggggagtcagcgaccccttagcgctagaacttatagtatcgacggtcccaacgcctcacgtccccaaagtgcaagaccttctatcaacgaaatccccgaacgaacaatgtcagtgagcgattttaattactcccgaacaagccctagcaaacgacctaacgcccgggtgggatcggagcacagcctcctggaccccccaggcaagagcaaggtgccaagggactggcgggagcaggtgctgaggcatattgaagctaagaagctggaaaaaatgcctttaagtaatggacagatgggtcaacccctgagaccccaggccaattatagtcagatacatcacccacctcaggctagcgtggcccggcatccctcccgggagcaactgatagactaccttatgctgaaggtggctcatcaacccccctatacccagccccactgttcaccacgccagggccacgagctggccaaacaagagatcagagttcgagtcgaaaaggatcctgagctgggtttctcaattagtggaggtgtgggggggagaggcaacccctttcgccccgacgatgatgcaaatggttacagcttcatcaatatcgaacacgggcaggccgtgtccctgctcaagacatttcaaaacaccgtcgagctgatcatcgtcagggaagtttcttcttag

SEQ ID NO: 115975 - DNA, 4083 bp, synthetic construct
  misc_feature 1..4083: note = Description of Artificial Sequence: Synthetic coding sequence
  source 1..4083: mol_type = other DNA
atgaccactaagaggtctctgttcgtcaggctggtaccgtgtcgctgcctgagaggggaggaggaaactgtgaccaccttagactattcccactgctcgctggaacaggtccccaaggagatcttcacatttgaaaagacactggaggaactgtatctggatgcaaaccagatagaggagcttcctaagcagctcttcaactgtcaaagtctgcacaaactgtcactcccagacaacgatcttactactctacccgcgtctatcgcaaacttgatcaacttaagagagctggacgtctcaaagaatggcatccaggaatttccggagaacattaagaactgcaaggtgctgaccattgtggaagccagcgtaaatcccattagcaaattgccagacggcttctcccagctgttaaacctcacgcaattgtatttgaatgacgccttcttggagtttttacccgcgaactttggtaggctcacgaagctgcagatcttggagctccgggagaatcagttaaagatgcttccaaaaaccatgaatcggctgacccagctggaacgcctggaccttgggtccaacgagtttacagaagtgcccgaagtgctggaacagctgtcgggactgaaagagttttggatggacgccaataggctaacatttattcccggattcattggaagcctgaagcagctgacctatttggatgtcagcaaaaataatattgaaatggtggaggaagggatatccacatgcgagaatcttcaggatctcctcctctcctcgaattcccttcagcaactgcccgagaccattgggtccctcaaaaacattactactctgaagatcgatgagaaccaactgatgtacctgcctgatagtatagggggtttaatcagcgtggaagaacttgactgctcgttcaatgaagtggaggccctgccctcttcgatcggacagctcaccaacctgaggaccttcgccgccgaccataactatctgcagcagctgccgccagaaatcggttcctggaaaaatatcacagtgctttttctgcacagcaataaacttgagaccctgcccgaggagatgggggacatgcaaaagctcaaagtgattaacctttctgataataggctgaaaaatctcccttttagcttcactaagctacagcagcttaccgcaatgtggctcagcgacaaccaatcaaagcctctgattcctctgcaaaaggaaaccgactcggaaacccaaaaaatggtgctaacaaactacatgtttcctcaacagcctagaaccgaagatgttatgtttatttccgataatgaaagtttcaacccttctctatgggaagaacagagaaaacagagggcgcaggtggcattcgagtgtgatgaagataaggatgaaagagaagctcctcctcgtgaggggaatctgaaacggtacccgaccccataccctgatgagctgaaaaatatggtgaaaacagtgcagacaattgttcataggctaaaagatgaggaaacgaacgaggattcaggacgagatcttaagccccatgaggaccaacaggacatcaacaaagatgttggagtcaagacatcagagagcaccaccacggtgaagtccaaggtagacgagcgcgaaaaatacatgattggaaacagcgtgcagaagatttcagaacctgaagcagaaatctccccagggtctctccccgtaaccgccaacatgaaggccagcgagaatctgaaacacatagtaaatcatgacgatgtcttcgaagaatccgaggagctctcttccgatgaagaaatgaagatggccgaaatgcgaccaccgctgattgaaacaagcatcaaccagccaaaggttgtcgcactgtctaacaataagaaagacgatacaaaggaaacggattccctgagcgacgaggttacccacaacagtaaccagaataatagtaattgctcatcacccagccgcatgtctgacagcgtctccctcaatactgatagtagccaggacacctccctgtgctctcccgtcaagcaaacccacatagatattaactcaaagattaggcaagaggacgaaaactttaattccttgctccagaatggagacatcctgaattccagcacagaagaaaagtttaaagctcatgataagaaagatttcaacttgcctgagtacgacctgaacgtagaggagagacttgtgcttatcgagaagagcgtggacagcacggctaccgccgacgacacacacaaacttgatcacatcaatatgaacttgaataagctgattacaaacgataccttccagcccgaaatcatggagagatcaaaaacgcaggacatagtgctgggtactagtttcctcagcatcaatagcaaagaggaaaccgagcacctggaaaacggcaataagtaccccaatctcgaaagcgtgaataaggtaaatggccactcagaagagacctcgcagagtccaaaccgtacggaacctcacgattctgactgctcagtggatctcggaatcagtaagagtactgaagacttgtctccccagaagagtgggccagtgggtagtgttgtcaagtcgcacagcatcaccaatatggagatcgggggcctgaaaatatatgacattctgtcagacaacggccctcaacagccctcgactacggtgaaaatcactagcgcagtggacggtaagaatatagttcgcagtaagagtgccacactcctgtacgatcagccactgcaggtctttactggtagcagctcctcaagcgaccttataagcggcacaaaagcgatctttaagttcgactccaaccacaatccggaggagcctaacattatccgaggccccaccagtggtccacagtccgccccacaaatctacgggcctcctcaatacaacatccagtatagcagttctgcagctgttaaagataccctctggcattccaagcagaatcctcaaattgatcatgcatcttttcccccacagctcctgccccgatccgagtcaaccgaaaaccagtcatacgccaagcattcagcgaatatgaattttagcaatcacaacaacgtgcgggccaacactgcatatcatctgcaccagagactggggcccgcccgacatggggaaatgtgggccatcagccccaatgatcggctgatccccgccgtgaccaggtcgaccattcaacggcagtcttctgtctcaagtaccgcctctgtgaatctcggggacccaggttctacccgtagggcacagatcccagagggggactacctttcctaccgcgagttccactctgcgggccgtaccccacccatgatgcccggcagccagcgtccactcagtgccagaacttacagtatcgatggcccaaacgctagccgccctcagtctgcccgtccttctatcaatgaaatcccagagcgcaccatgtctgtctcagattttaattacagcagaacaagtccctcaaaaagacctaatgcaagggtggggagcgagcacagcctgttagacccaccgggaaaaagcaaggtgccccgagactggagggaacaggtactcagacacattgaagccaagaaactggagaagatgcctctgagtaacgggcagatgggtcagcccctgcggccgcaggcctctgtggccaggcatcctagtagagaacaactaattgactacttgatgctgaaggttgcccaccagcctccatatacacaaccgcactgctcaccaaggcaagggcacgagcttgccaagcaggaaattagagtgcgggtggagaaagatcccgaattaggcttttccatctctggcggcgtggggggaagaggcaatcccttccggcctgacgatgacggcatctttgtgactcgcgtgcagccggaagggccagcgagtaaactcctccagcccggggataaaataattcaagccaatggatactcttttataaatattgaacatggtcaggctgtaagtcttctcaaaactttccagaacaccgtcgagctgattatcgtgcgagaggtatcgagttag

SEQ ID NO: 115976 - DNA, 4116 bp, synthetic construct
  misc_feature 1..4116: note = Description of Artificial Sequence: Synthetic coding sequence
  source 1..4116: mol_type = other DNA
atgaccacaaaacgcagtctcttcgtgcgattggtcccgtgcagatgcctgcggggcgaggaagagacagttactactctggactactcgcactgtagcctggaacaggtgcccaaggagatatttacatttgagaagacccttgaagaactttacctagacgccaaccagattgaggaactacccaagcagctgtttaattgccagtcactgcataaactgagccttccagacaatgatcttaccacattgccagcttccattgccaacctgatcaacctcagggaattggatgtttccaagaacgggatccaggagttccccgagaacataaaaaattgtaaggttctgactattgtggaagcttccgtgaatcctatctctaagctgcctgatgggttttcccagctgctgaaccttactcagttgtatctgaacgacgcttttctggagtttttaccagccaacttcggaaggctgacaaaactgcagattcttgagctgcgcgaaaaccagctgaagatgctgcctaaaacaatgaacagactgactcagctcgaaaggctggacttagggagcaatgaatttacagaagtgcccgaagtgcttgagcagctgtccggccttaaagaattctggatggacgccaacaggcttacttttatccccggctttatcgggtcccttaaacagttgacttatctggacgttagtaaaaataacattgagatggtggaagaggggatctctacttgtgagaacctgcaggacctgctcttgtcaagtaatagcctgcagcaactcccagaaactattggcagtctaaagaatatcacgaccctgaagattgacgaaaatcagttaatgtacctgcctgacagcattggaggacttattagtgttgaggagctagactgttctttcaatgaggtagaggcccttccatcatcgatagggcaactcacaaacctgcgaactttcgccgccgaccataattacttgcagcagctaccaccagagataggctcttggaagaacataactgtgctctttcttcatagtaataagttggagacactccctgaggagatgggggatatgcaaaagctgaaggtgattaacctgtctgacaatcgcttgaagaacctccctttttccttcaccaaattgcagcagctgaccgccatgtggcttagcgataaccagtctaagcccctaattcctctgcagaaggagacagatagcgagactcagaagatggtactcactaactatatgtttcctcagcaaccgcgcactgaggacgtgatgttcatttccgacaacgagtcatttaatcctagcctttgggaggaacagcggaagcagcgcgcccaggtggccttcgagtgcgacgaggataaggacgagagagaggctcccccgcgtgaaggcaatctaaagcgctaccctaccccttatcccgacgagctaaagaacatggtcaaaactgtgcagaccatcgtacacaggcttaaagatgaggaaaccaacgaagacagtgggcgggacttaaagccccatgaggatcagcaagacataaacaaggatgtgggggttaaaacatcagagagcactaccactgtcaagagcaaagtggatgagcgtgagaaatacatgatcggcaacagtgtgcaaaagatttctgagcccgaagcagagattagccctggatccctgccagtgactgcaaatatgaaggcttccgaaaatctgaagcatatcgtgaatcatgatgacgtttttgaagaatctgaagagttatcttccgacgaggaaatgaaaatggcggagatgaggccccccctcattgagacctctataaatcagcctaaagtcgtggcgctctctaacaacaagaaggacgatacgaaagaaaccgattccctgagtgatgaggtgacccacaacagtaaccagaataactccaattgttcatcgccttcccgcatgtcagattctgtctcattgaacacagattcttctcaggacacctccctgtgctctcctgtgaaacagacacacattgacatcaactcaaagatccggcaggaggacgagaacttcaactcactcctgcagaatggcgatatcttgaattcctcaacagaagaaaaattcaaggcccatgataaaaaggactttaatttaccagagtacgatctgaacgtggaagagcgcctcgtgctaattgaaaaaagcgtagactccacagcaactgccgacgatactcacaagctagaccacattaacatgaaccttaataagcttatcacaaacgataccttccaacctgaaattatggagcgcagcaaaacacaggacattgtactgggtacctccttcttaagtataaatagtaaagaagagacggagcatctggagaacggcaataagtatccaaacctggagtcagtaaacaaggtcaacggacactctgaggagactagccagagtccaaatcgcacagagcctcatgacagcgattgtagcgtggacctaggcatatctaagagcaccgaggacctgtctcctcagaaatcagggccagtaggatctgtcgtgaagagtcattcgatcactaacatggagatagggggcttgaaaatctatgacatcctctctgataatggtccgcagcagccatccaccaccgtaaaaatcacgagtgctgtggacggcaaaaatattgtcaggtctaagtccgcaacattattatacgatcagccgctgcaggtgtttacaggaagttcttcttcatctgatctgatttccgggaccaaggcaatctttaagttcgattccaatcataaccccgaggagccaaatattatacgcgggcctacctcgggaccacagagtgctcctcagatttatgggccccctcaatataacattcagtattcctcctccgcggctgtaaaggataccctgtggcacagcaaacagaacccccagatcgaccatgccagtttcccaccccaacttctgccacggtctgagtcaaccgaaaaccaatcttacgcgaaacattctgccaacatgaatttctcaaaccataataatgtaagagctaacacagcctaccatctgcatcagaggctgggccctgcccgccacggggaaatgtgggccatttcgccaaatgaccggctaataccggcagtgacaagaagtacaatccagagacagagttccgtgtctagcaccgcctccgtcaacctgggggaccccggaagtacacgccgggctcaaatcccggaaggagactacctgtcttatagggagtttcacagtgcaggtagaactccacctatgatgcccggcagccagcgtcctctgtctgcaaggacatactcaattgacggtcctaatgcctccagacctcagagcgcaaggcccagtatcaacgagattcctgagagaactatgtctgtaagtgatttcaactactccaggacttcacctagtaaaagacccaacgcccgcgttggctccgagcacagccttcttgaccctcctgggaagtctaaggttccgagagattggagggagcaagtgctgaggcatattgaggccaagaagttggaaaagatgcccctctctaacggtcagatgggtcagcccttgcgcccccaggccaattacagccagatccatcatccaccacaggcatccgtggctaggcaccctagccgcgagcaactgatagattatctgatgctaaaggtcgctcatcaacccccttatacgcagccacactgttctccaagacagggtcacgaactggctaagcaagaaataagggtgcgagtcgaaaaagatcctgagttggggttctctatcagcggcggggtgggaggcaggggcaacccattcagaccagacgatgatggcatctttgtgactagagtacaaccggaaggacccgcaagcaaattactgcaaccgggtgataaaattatacaagctaatggctattccttcatcaatatcgagcatgggcaggcagtgtccttgctgaaaacctttcagaacaccgtggaactgattattgtgcgcgaagtctccagttag

SEQ ID NO: 115977 - DNA, 3909 bp, synthetic construct
  misc_feature 1..3909: note = Description of Artificial Sequence: Synthetic coding sequence
  source 1..3909: mol_type = other DNA
atgaccacgaagcgcagtctattcgtgcgcctggttccctgtaggtgtctacgaggagaggaagaaacagtgaccacccttgattattcccactgcagcctcgaacaggtgcctaaggagatttttacgttcgagaaaaccctggaggagctgtacctggatgcaaatcagattgaagaactgccaaaacagctctttaactgccagtccctgcataagctgtcactgcccgataacgatcttactaccctcccggccagtattgctaatctcattaacctcagagagcttgatgtgtcgaagaacgggatccaagaattccctgagaacatcaaaaattgcaaagttctgaccattgtggaggccagtgtgaatccgatctccaagctgcccgacgggttttctcagctgctgaatctaacgcaactttatctaaacgatgcctttctggagtttctcccagccaactttggaaggctgacaaagttacagatcctggaactgcgtgaaaaccagctaaaaatgttgcccaaaacaatgaataggctcactcaactggagaggctcgatttgggcagcaacgaattcaccgaggttcctgaggtcttagagcaactctctggcctgaaagagttctggatggacgctaacaggctcactttcatcccgggcttcatagggagcctgaaacaactcacctacctcgacgtgagcaaaaataatattgaaatggtagaggaggggatctcaacgtgcgagaatctccaggatctcctgctgagcagtaatagcctccagcagctgccagagacaatcgggtccctgaaaaacataacgacactgaagattgatgagaatcagctgatgtacctgccagattccattggaggcctcataagtgtggaagagctggactgctctttcaatgaagtcgaggctcttcccagttcaatagggcaactgactaatctgagaacctttgcagccgaccataattatttacagcagctgccccccgagatcggcagttggaagaacattacagtgttgtttctgcactcaaacaagctggagaccctgcccgaggaaatgggggacatgcaaaagctgaaggtgatcaacctcagtgacaaccgcctcaagaacctccctttctctttcacgaagttacagcagctaaccgcgatgtggttgtccgataaccaaagtaagccgttgattccgctccagaaagagacggactccgagacacagaaaatggttctgactaactacatgttcccccagcagcccagaaccgaggacgtcatgttcatctccgataatgagtccttcaaccccagcctgtgggaagaacagaggaaacagagggctcaggttgcctttgagtgtgacgaggataaggatgaacgagaagctccacctagggagggtaacctaaaacgctaccccaccccctatcccgatgagctgaagaatatggtaaaaaccgtgcagaccatagtccatcggctaaaagatgaggagactaacgaggactccggacgtgatctgaagccccacgaagaccagcaggatataaacaaggacgtgggggtcaagacatcagagagcaccaccacggttaaaagcaaggttgatgagcgggagaagtacatgattggtaattccgtccagaagatatcagagcccgaagctgagatttctcctggcagcctgcctgtgaccgccaacatgaaggcatccgaaaatcttaagcacattgtgaaccacgacgacgtgttcgaggagtccgaggaattgagttccgatgaggagatgaaaatggctgaaatgaggccaccgcttatcgagacaagcatcaatcagcctaaagtcgtggctctcagcaacaacaaaaaggacgacacgaaagaaaccgactcactttcggatgaagtgacccacaacagcaatcagaacaacagtaattgcagttcccctagtcggatgtctgatagcgtgagtctgaacacagatagctctcaggatacctctttgtgctcacccgtgaagcagacgcacatcgacatcaactcgaagattagacaggaggatgagaacttcaactcattgttacagaacggcgacattctgaacagttccacagaggagaaatttaaggcccacgataagaaggactttaacctgcccgagtatgatctgaacgtggaggaacgcctcgtgctgatcgaaaagagcgttgactcaaccgccactgctgacgacacgcacaagctggatcatatcaacatgaacttgaacaagttgatcaccaatgatacctttcaaccagagataatggaaaggagtaagactcaggatatagtactgggcacgtccttcttgagtatcaattcaaaggaggaaacggaacaccttgagaatggcaataagtacccaaacctggaatcggtgaacaaggtgaacggacactcagaagaaaccagccagagtcctaatcggaccgaaccacacgactcagattgttcagtcgatctgggtataagcaaatccacagaggacctgtccccccagaaatcaggcccagttggctccgttgtgaaatctcattccattaccaatatggaaatcggaggactcaagatttatgacatacttagcgacaacggcccgcagcaaccctctacaacagtgaagatcacaagcgcggtcgacgggaagaatattgtgcgatcaaaatcagcgaccctgctgtacgatcaacccttacaggtcttcacaggaagctcgtcaagttccgacctgatctcgggaaccaaggcgatcttcaagtttgacagcaaccacaaccccgaggaaccgaatatcattcggggacctacatctggaccacagagcgcaccccagatctatggtcccccacagtataatatacagtactccagcagcgctgcggtcaaggacaccttgtggcacagcaagcagaatccacagatagatcatgcgtcgttccccccgcaactcctacctcgaagcgagtcaaccgagaatcagagttacgctaaacacagcgcgaacatgaatttctcgaatcataacaacgttagagccaacaccgcataccacttgcaccagcgccttggaccagccagacacggagaaatgtgggcaatttctcccaatgatagactgattccagcagtgacacgatcaacaattcagaggcagtcttcagtcagtagcaccgcatcagtaaacctcggcgatcccgggagcacgcgacgagcacagatccctgagggggattatttgtcatacagggaatttcacagtgcaggcagaacacctccaatgatgcccggcagtcagcgcccactcagcgctagaacctacagcattgacggacctaatgccagtcgcccccagtcagctaggccgagcataaatgaaattcccgagaggaccatgtcagtttcagacttcaattattccagaaccagtccatctaaacgccccaatgccagggtcgggagcgaacacagccttctcgatcctcctggtaagtccaaagtgcccagggattggcgagagcaggtgttaagacacatcgaagcgaagaagctggagaagatccgcgtgcgagttgaaaaagacccagagctcggatttagtataagtggcggcgtgggcgggagagggaacccttttagaccagacgacgacggaatattcgtcaccagggtccagccagaagggcccgcaagcaagcttctccagcctggcgacaaaataatccaagctaatggctacagctttattaacattgagcacggccaggctgtctctctccttaaaacctttcaaaatacggttgaactcattatcgtcagggaggtgtctagctag

SEQ ID NO: 115978 - DNA, 4260 bp, synthetic construct
  misc_feature 1..4260: note = Description of Artificial Sequence: Synthetic coding sequence
  source 1..4260: mol_type = other DNA
atgaccactaagagatcgctgtttgtcagactcgttccttgccgctgcctccgtggagaagaggagaccgtcacaaccctggactactcccattgctcactcgaacaagtgcctaaagaaatctttacttttgagaagacgctcgaggaactttacctcgacgcaaaccagattgaggagttgcccaaacagttgttcaactgccagtcgctccacaagttgagcctccccgacaatgacctcactaccctgccagcatcaatcgctaatctcattaatctcagagagctggatgttagcaaaaatggcatacaggagttcccggagaacatcaaaaattgtaaagtgctgactatcgtggaggcgagcgtgaatcccatcagcaagctgcctgacggcttcagtcaattacttaatttaacccaactatatcttaacgatgcctttctggagttccttccggccaactttggcagactcaccaagctgcagatcctggagctaagggaaaaccaactaaagatgctgcccaaaacgatgaatcggttaactcagctcgagcggctggatctgggctcaaatgaatttactgaggtgcccgaggtccttgaacagctgtctggactgaaggagttttggatggacgctaatcggctgaccttcatcccgggattcatcggctcactgaaacagttaacatatctggacgtatctaaaaataatattgagatggtggaggaagggattagtacatgtgagaacttgcaggacctgctgctgtccagtaattcactccagcagcttccagagacgataggcagcttgaaaaacatcactactttgaagatagatgaaaaccagcttatgtacttacccgattccatcggcgggcttatttctgtggaggaattggattgtagctttaacgaggtggaggccctgccatcctctattggccagttgacaaatctcagaacattcgccgcagaccataactacctgcaacagctgccccccgaaataggctcctggaagaatatcaccgtgctcttcttgcacagtaataagctcgaaactttgccagaagagatgggagacatgcagaaacttaaggttatcaatctgtcagacaacagactaaagaatctgcccttctcctttacaaagttgcagcaactgacagctatgtggctcagcgataaccagtccaaacctcttattccattacagaaggaaactgattcagagactcagaagatggtactgacaaattatatgtttccccagcagccacgcactgaggacgtgatgttcatctcagacaacgagtctttcaacccgagcctgtgggaggaacaacgcaagcagagagcccaggtagccttcgagtgcgatgaggataaggacgaacgcgaagccccaccgcgcgagggcaacctcaaaagataccctactccctaccccgatgagctgaagaatatggtgaaaaccgtgcagacaattgtgcacagacttaaggacgaggaaactaatgaggatagtggccgtgacctgaagcctcacgaggaccagcaggatataaacaaggatgttggcgtgaagacaagcgagtctactaccacagtgaagagtaaagtggacgagagggagaagtatatgattgggaattcagtgcagaagatcagcgaacctgaggccgaaatcagtcctggctccctgcccgtgaccgccaacatgaaggcgtctgagaatctcaagcacatcgttaatcatgatgatgtgttcgaggagtctgaagaattgagtagcgatgaagagatgaagatggcagagatgcggccccccctcattgagaccagtatcaatcagcccaaggtggtggccctgtctaacaataagaaggatgataccaaagaaaccgactcacttagcgatgaggtgactcacaactccaatcaaaacaattccaattgctcttctccttcacgcatgtccgattctgtgtcactgaacactgattctagccaggacacttccctgtgctcacctgtcaaacagacccatattgatatcaactctaagatccgccaggaagacgaaaacttcaactctctgcttcagaacggggatatcctgaattcctcaacagaggagaagttcaaagcccatgacaagaaggactttaacctgccagagtacgatcttaacgtggaggaaaggttggtgctcatcgaaaaatcagtggacagtaccgctaccgcagatgacactcacaagctcgaccacattaatatgaacctgaataaactgatcacgaacgacaccttccagccagaaataatggaaaggtccaagactcaggacatcgtgctgggcacgtccttcctgtcgattaactctaaagaggagactgagcatctggaaaacggtaataagtatccaaatctcgaatcagtcaataaggtcaacggccatagcgaggagacctcccagtcccccaatcgaacagagccacatgattctgactgcagcgtagatttgggcatttcaaaatcaacagaagatttgtcacctcagaagagcgggccagtgggatcagtggtgaagagccacagcataactaacatggaaattggcgggctgaagatctatgacattctgtcagataatgggccgcaacagccaagtacaaccgtcaagatcacaagtgccgtggacggcaaaaatatcgtgcggagcaagagcgccacgttgctctacgatcaaccacttcaggtgtttacgggctctagttcctcttccgacctgatctctggaacaaaagccatctttaaattcgactctaaccataacccagaggaaccaaacatcattaggggtcctaccagtggcccacagtccgccccccaaatatacggcccgcctcaatataatattcagtattctagcagcgctgctgtgaaagacaccttgtggcatagcaaacaaaacccccaaatcgatcatgcctcgtttcctccccagcttttgccccgctcggaatccactgagaaccagtcttacgccaaacattcggcaaacatgaattttagcaatcacaacaatgtccgtgccaataccgcttaccatttgcaccagcggttggggcccgcgcggcacggagagatgtgggcgatcagccctaatgacagactcatccccgcagtcacccgcagcacaatccagcgccagagcagtgtcagtagtaccgcctcagtcaatcttggcgatcctgggtcgacgagacgggcccaaatcccagagggcgactaccttagctatagagagtttcactcagcaggacgtacccctcccatgatgccaggttctcagagacccctgtccgccagaacctattcgatcgacggccccaatgcctcgcgcccccagtcagctaggccaagcataaacgaaattccagagcgtactatgagcgtctctgacttcaactattcacgaacttcaccttctaagaggcctaatgcccgggtgggcagtgagcacagccttcttgaccctcctggaaagtccaaggtcccgcgcgactggcgtgaacaagtactgcggcacatcgaggccaaaaaactggaaaaaagcatgttatctaggtccttcaacagcaatttcactacggtaagctcatttcactgcggatccagcagggacctccacggaagccagggatctctggcactgagtgttgccgatcgaaggggtagcggaggtcacatttttcgaatgccactcagtaatggccagatgggccagccgctcaggccccaagccaactactctcagatccaccacccacctcaggccagcgtcgctaggcatccctcgagagaacaattaatcgactaccttatgctgaaagtggcacaccagcccccgtacactcagccccattgctccccccgacagggccacgaattggccaagcaggagatccgggtgagagtggaaaaggacccagaattagggttctctatttctggaggtgtgggaggccgcggcaatcctttccgcccagacgacgacggcatctttgtcaccagggttcaaccagaggggcctgcctccaagcttctccagcccggagataaaatcattcaggccaacggatactctttcatcaatattgagcacggtcaggctgtgagtctcctgaaaacattccagaacacagtcgaattgattatagtccgggaggttagctcctag

SEQ ID NO: 115979 - DNA, 1158 bp, synthetic construct
  misc_feature 1..1158: note = Description of Artificial Sequence: Synthetic coding sequence
  source 1..1158: mol_type = other DNA
atgaaagaggaagagggctttcccgaggatgaggcgactgaaagtgagacactgtccctggtcaaggagttggatgcatttcctaaggtgcctgagtcgtatgtcgaaaccagtgcctcgggcggaacagtcagcctgattgcctttacaacaatggcccttttaacaataatggagttttccgtgtaccaagacacctggatgaaatatgagtatgaagtagataaggatttttcttctaaactcagaattaatattgacatcactgtcgcaatgaagtgtcaatatgtcggggctgacgtactggacctggccgagaccatggtggcctctgcggacgggctagtgtatgaacccactgtctttgacctgagccctcagcagaaggaatggcagaggatgctgcaactgatccagtcccgattgcaagaagagcattctctgcaagatgttattttcaaatccgcgttcaaatcaacgtccaccgccctccccccacgcgaggatgacagttctcaatctccaaacgcttgcaggatacacggccacctgtacgtgaacaaagtagcgggaaatttccatattacagtgggtaaggccattccccaccctagggggcatgcacatctggccgctctggtcaatcatgagtcatacaatttttctcacaggatcgatcatcttagtttcggagaactcgtacctgccattattaatccgctggatgggaccgaaaaaatcgccattgaccacaatcaaatgttccaatatttcatcacggtggtgccaacaaagttacacacatacaaaataagcgcggatactcatcaattctccgttaccgaaagagagaggattatcaatcatgctgcaggtagccatggagtgagcggtattttcatgaagtatgacttatcctcattaatggtcacagtgaccgaagaacatatgccgttttggcagtttttcgtgcgtctatgcggcattgttggaggaatcttctcaactactggaatgctgcatgggatcggaaagttcatcgtcgaaattatatgctgtaggttcagattgggctcgtacaagcccgtgaatagcgtcccctttgaggatgggcacacagataaccacctgccattactagagaacaacacacactag

SEQ ID NO: 115980 - DNA, 1134 bp, synthetic construct
  misc_feature 1..1134: note = Description of Artificial Sequence: Synthetic coding sequence
  source 1..1134: mol_type = other DNA
atgagacggctgaatcgtaaaaagaccctaagtctcgttaaggaattagacgcctttccaaaggttcctgaaagctacgtggaaacaagtgcctctggtggaacagtaagcttaatcgcttttacaaccatggctctcttaacaatcatggaatttagtgtctatcaggacacatggatgaagtacgagtatgaagtggataaggatttttcttcaaagctcaggattaacattgacattaccgtggctatgaagtgccagtatgttggagcggacgttctcgatcttgcagagacaatggtggccagtgccgatggtctggtgtacgagcccactgtatttgatctgagtccccagcagaaagaatggcaacggatgctccagcttatacagagcaggttgcaagaagagcacagcctccaggatgtcatcttcaagtcagccttcaaatcaacaagtacagcactgccgcctcgcgaggacgacagcagtcagtcacccaacgcttgtagaattcatggccacctctacgtcaacaaagtggccggcaatttccacatcaccgttgggaaagctatcccacacccccggggacacgcacatctcgctgctctggttaaccatgagagttacaatttttcccaccgcatcgaccacctctcttttggcgaactggtgccggctatcatcaatcctctggacggcaccgagaagattgcgattgaccataaccaaatgtttcagtactttattacagtggtccccaccaagttgcacacctacaagatcagtgccgatacgcaccaattttcagtcacggaacgtgaacgcataatcaaccacgccgcgggctcccacggagtgtcggggatattcatgaagtatgatctgtccagcctcatggtgactgtaaccgaagagcatatgccattttggcagttcttcgtgaggctgtgcggcattgttggcggaatcttttccaccactggaatgctccacggtataggcaagttcattgttgaaattatttgttgcagattcagactggggtcttacaagcctgttaactcagtcccattcgaagatggccacacggacaatcatctgccactgttggagaacaacacccactag

SEQ ID NO: 115981 - DNA, 663 bp, synthetic construct
  misc_feature 1..663: note = Description of Artificial Sequence: Synthetic coding sequence
  source 1..663: mol_type = other DNA
atgcgtcggcttaatcggaagaagacactgagtctggtgaaggagctagacgcatttccaaaggtgccagaatcttatgtagaaacttccgcatccggcggaacagtcagcctgatcgctttcacaacaatggcactactgacaattatggagttctccgtttatcaggatacctggatgaagtacgagtacgaagtcgataaagattttagcagtaaactgagaattaacatcgacataaccgtcgctatgaaatgtcagtacgtaggtgcagatgtgctggatctggccgaaactatggtggcatctgcagacggactggtatatgaaccaaccgtgttcgatctgtctcctcagcagaaagaatggcagaggatgctccaactcattcaaagcaggctccaagaggagcatagtctgcaggacgttatctttaaaagtgctttcaaatctacctcaactgccctgcccccgagggaagacgacagcagccagagccctaacgcttgcagaatccatgggcatctctacgtcaataaggttgcgggaaactttcacatcactgtggggaaagctatcccccatcctagaggccacgcccacctcgccgctctggtgaatcacgagtcttataacttttcacatcggatcgatcatctatag

SEQ ID NO: 115982 - DNA, 216 bp, synthetic construct
  misc_feature 1..216: note = Description of Artificial Sequence: Synthetic coding sequence
  source 1..216: mol_type = other DNA
atgaggcgcctgaaccgcaagaaaaccttaagtttggtcaaagaactggacgcattccctaaggtgccggagtcttacgtagagacttcggcatccggtggcacagtgagcttgattgccttcaccactatggcattgctaaccatcatggaattttccgtttaccaggatacatggatgaaatacgagtatgaggtggacaaggatttcagctag

SEQ ID NO: 115983 - DNA, 528 bp, synthetic construct
  misc_feature 1..528: note = Description of Artificial Sequence: Synthetic coding sequence
  source 1..528: mol_type = other DNA
atgaggagactcaaccggaaaaagactctgtccctcgtcaaagagctggacgccttccccaaggtgcccgagtcctatgtggagacctctgccagcggtggaacagtgtcccttattgcatttaccacaatggctcttcttacaattatggagttcagcgtataccaggacacatggatgaagtacgagtacgaggtagacaaagattttagctcaaagctgcgcattaatattgacattactgtggccatgaaatgccagtacgtcggagccgatgtgttggaccttgcggagactatggttgcatctgcagacggactcgtctacgagcccactgtttttgacctatctccacagcaaaaggaatggcaacgtatgctgcagctgatccaatcccgtctgcaagaggaacactctttgcaggacgtcattttcaagagcgcttttaaatcaaccagcaccgctctcccccctcgggaggacgattcaagccaaagtcctaatgcttgccgcatacacggccactag

SEQ ID NO: 115984 - DNA, 1158 bp, synthetic construct
  misc_feature 1..1158: note = Description of Artificial Sequence: Synthetic coding sequence
  source 1..1158: mol_type = other DNA
atgcccgaatacaaagggcggaccgtgctggtaagagacgctcaggagggcagcgtgacgttgcagattctggacgttcgcctcgaggatcagggaagctacagatgcctcattcaagttgggaatcttagcaaggaagatacggtaatactgcaagtagctgctccctccgtggggagtttatcaccttccgcagttgcactagcagtgattctgcccgttctcgttctgctgattatggtttgtctgtgcctaatctggaagcagcggagggcgaaggaaaaactcttatatgaacacgtgaccgaggtggacaacctgttatctgatcatgctaaggagaaaggaaagctccacaaagcagtaaagaagctgcgcagtgagctcaaattaaagagggccgccgcaaattcagggtggcgaagagccaggttgcactttgtggccgtgacactcgaccccgacaccgcacacccaaaactcatcctatcggaagatcagcgatgcgtgaggttgggagaccggaggcagcccgtgccggacaaccctcagagattcgactttgtggtatccatcctggggtcagagtactttactacggggtgccactactgggaagtttatgtgggagataagactaagtggattctgggggtgtgttcagaatcagtttctcgaaaagggaaggtgactgcctcccctgccaatgggcactggctgctgcgccagtctagggggaatgaatacgaggctttaacaagtccgcaaacctcctttcggcttaaggagccaccccgctgcgtggggatctttctcgactacgaggccggagtcatctcattctataacgtgaccaacaagtcccacatttttactttcacccacaacttctcaggaccattgcggccatttttcgagccgtgcctccacgacggcggcaagaacactgcaccacttgtcatatgcagtgagctccacaagagcgaggagagtattgtcccgcggccagagggtaagggccatgccaacggagatgtcagtctgaaagtcaacagctcgctgttgcccccaaaggcacccgaactgaaggacatcatactcagtttaccgcccgatctcggacccgctttgcaagagcttaaggccccctccttttag

SEQ ID NO: 115985 - DNA, 1428 bp, synthetic construct
  misc_feature 1..1428: note = Description of Artificial Sequence: Synthetic coding sequence
  source 1..1428: mol_type = other DNA
atggaaatggcctcctctgcaggatcttggctttcagggtgtctaatccccctcgtgttcctgagactctcagtgcacgtgtctggtcacgccggagacgctggaaaatttcacgtggccctcctaggggggacagccgaactgctgtgcccgctcagtttatggcctggtaccgtacccaaagaagtgcgttggctaagatccccctttcctcagagatcacaagcggtccacatattcagagacgggaaggatcaagatgaagacctaatgcctgagtacaagggaaggactgtgctagtgagagatgctcaggaaggcagtgtgactctccagatcctcgacgtgaggctcgaggaccagggctcataccgatgcctcatacaggtgggtaacctgagcaaggaggatacagtcattctacaggtggccgctccctccgtgggctctctatcaccgtccgccgtggccttggccgtcattttgccggtcctagtactcctgatcatggtttgcctgtgcctcatatggaagcaaagaagggccaaagaaaagctgttgtatgagcacgtgaccgaagtagataacctcctgtccgatcacgcaaaggagaaagggaagttacacaaggcagtgaaaaaactgagatcagagcttaagttgaaaagagccgcagccaactctggctggcgacgcgcacgcctccatttcgtcgcagtgacgttagacccagacacagctcatcccaagcttattctaagcgaagaccaacggtgcgtcaggcttggggataggagacagccagtcccagataatccccagcgcttcgactttgtcgtatccattctcggcagtgagtactttaccaccgggtgccactattgggaagtgtacgtgggcgataaaaccaagtggatcctcggcgtgtgttccgaatcagtgagtcggaaagggaaggtcaccgcatcccccgcaaatgggcattggctcttacggcaatcccggggaaatgaatacgaagcgttaacgagcccccagacctcctttagacttaaggaaccaccacgttgtgtcgggatattcctcgactatgaggcaggtgtaatctctttttataatgttacaaataagtcacacatctttacttttacgcataattttagtggccccctgaggccgttttttgaaccgtgcctgcacgacggaggaaaaaacaccgcccctcttgttatctgttcggagctccacaaatcagaggagtccatcgtcccacgccccgagggcaagggccacgctaacggtgacgtcagtcttaaggttaacagtagtctgctccccccgaaagccccggaattaaaagatataatcctcagcctgcctccagacctcggccccgccctgcaggaactgaaggccccatccttttag

SEQ ID NO: 115986 - DNA, 1428 bp, synthetic construct
  misc_feature 1..1428: note = Description of Artificial Sequence: Synthetic coding sequence
  source 1..1428: mol_type = other DNA
atggaaatggcgtcatctgctggttcctggctgagcgggtgcctcattcccctcgtcttcctccggcttagtgtgcacgtctctgggcacgctggggacgctgggaaattccatgtggcactgctgggcgggactgccgagctcctgtgtcctttgagcctgtggcctgggacagtgcccaaggaggttcggtggttgaggagcccctttccacagcgatcgcaagctgtgcatatctttagggacgggaaagatcaggacgaggatctcatgccagaatataagggcaggacggtgctggtgagagacgcccaagaagggtctgtaaccttgcagatccttgacgtgagactcgaggaccagggcagctacagatgcttgattcaggttggtaacctgtccaaagaagatacagtcatcctccaagtggccgcaccaagtgtcggctcactctccccgagcgcagttgcattagcagtgattctgcctgtgttagtgctgttaatcatggtatgcttgtgccttatctggaaacagcgcagggcgaaagaaaaactactgtatgagcacgttactgaagtagacaacctgctgagtgaccatgccaaggaaaaaggaaagctgcacaaagcggtaaagaaattgcggtcagaacttaaactcaaacgggctgccgccaatagcggctggagaagggctcgcctccattttgtggccgtcaccctggatccagatactgcccatcccaaattgatactctcagaggaccagaggtgcgtccgtctgggagacagaagacagcctgtccctgataacccccagcgattcgacttcgtggtctctatcctgggatccgaatattttaccacggggtgtcactattgggaagtctacgtgggggacaaaactaagtggatcttaggggtctgctccgaatccgttagcaggaaaggcaaggtaaccgcctcacctgccaatggccattggctcctccgccagagtcgaggcaacgagtacgaggctctgacctcgcctcagacgagctttagattgaaggaacctccacgctgcgtgggcatatttctcgactacgaagctggtgttatctcgttttacaacgtcaccaataagtcccatatctttaccttcactcataatttttcaggacccctgaggccattctttgaaccatgtttgcacgacggcggaaaaaataccgctcccctcgttatttgttcagagctccacaaatctgaggaatctatcgtgccaagaccagagggtaagggtcacgccaatggggatgttagtctgaaggtcaattcttccctgctcccgccgaaagctcctgagctaaaagacataattttgtcattaccccctgatcttgggcccgccctgcaagagctgaaagctccctccttttag

SEQ ID NO: 115987 - DNA, 2595 bp, synthetic construct
  misc_feature 1..2595: note = Description of Artificial Sequence: Synthetic coding sequence
  source 1..2595: mol_type = other DNA
atgaccacagagaagtccctcgtcactgaagccgaaaattcacagcatcagcagaaagaggagggggaagaggcaattaatagcggccagcaggagcctcagcaagaggagtcttgccagaccgccgcggaaggggataattggtgtgaacaaaagctcaaggcttccaacggtgacaccccgacacatgaggacctcaccaaaaacaaggaacgtaccagcgaatcacgcgggctatctcgcttgttctctagtttcctgaagaggcctaaatctcaagtcagtgaggaggaaggtaaggaagtcgagtccgacaaggagaagggcgagggcggtcagaaggaaattgagtttggcaccagtctcgatgaggagatcatactgaaagcacctattgcggccccggaaccggaactgaagacagacccaagcctggacctgcacagtctgtcctcagcagagactcaacctgcgcaagaggagttacgtgaggaccccgatttcgagattaaggagggtgaaggcctggaggagtgctcaaaaatcgaagtgaaagaggaatctcctcaaagcaaggctgaaacagagctaaaggcaagccagaaaccaattcgaaagcatcggaatatgcactgcaaagtgtctctcctcgacgacactgtttacgagtgtgtggtggagaaacatgccaagggtcaggacctgttgaaacgcgtatgcgagcatttaaatttgctggaggaagactacttcggcttagctatctgggataatgctacttctaaaacgtggctcgatagcgccaaggagatcaagaaacaggtccgcggcgtgccatggaattttacttttaacgtgaaattttaccctcccgatccggctcagctgactgaggacatcactcggtactacctgtgtctgcaactccggcaggacatcgtggcaggcaggctgccctgcagttttgcgacacttgccctgcttgggagctatactatccagtccgagctgggggactatgatcctgaactgcacggggttgactacgtgtctgatttcaaactcgcgcccaatcaaacaaaggaacttgaggaaaaagtcatggaactacacaaatcctacaggagcatgactccagctcaggcggatctggagttcctggagaatgccaaaaaacttagcatgtatggtgtggatcttcataaagctaaggatctggaaggagtggatatcattctgggagtatgttcatcaggcctgctggtgtataaagacaagctgagaataaatcgctttccttggccaaaggtgctcaaaatcagctataagcgcagttccttcttcatcaagattaggcctggcgagcaggagcagtacgaatccacaatcggtttcaagctgcccagttaccgcgctgccaagaagctctggaaagtgtgcgtcgaacatcatacattttttcgtctcacttctacagatactatccccaagagcaagtttctggcattaggaagcaagtttagatactctggacgcactcaggcccagactaggcaggcctcagctttaatcgaccggcctgcccctcattttgaacgtaccgcttctaaacgtgcttcacgaagccttgatggagctgctgcggtggactccgctgatagaagtccgcgccctacgagcgcacctgctattactcaagggcaggttgcggagggaggggtcttggacgcctccgccaagaagaccgtggtacccaaggcccagaaagaaacagtgaaagccgaggtgaagaaggaagatgaacctcccgagcaagcggagcccgaacctaccgaagcatggaaagtcgagaagactcacattgaggttacagtgcccacatctaacggtgaccagactcagaagctcgccgaaaagacagaggatctaattaggatgagaaaaaagaagcgcgaacgcctggatggagagaatatctacatcaggcactctaatttaatgctcgaggacctcgataaatctcaggaggagatcaagaaacatcacgcgtccataagcgaacttaagaagaattttatggagtccgtcccggagccaaggccctctgagtgggacaagcggctcagcacccactccccttttcgcaccctcaatattaatgggcagattccaacaggggaaggacctccccttgtcaagactcaaacagtgactatcagtgataacgctaatgcagttaaatccgagattcccacaaaagacgttcctattgtgcacaccgagaccaaaaccatcacatatgaagccgcacagaccgacgataattctggggatctagaccccggggtgctgttaacagctcagacaataacatccgagacaccatccagcacgacaactacccagataaccaaaaccgtgaagggaggaatctcagagacgcgcattgaaaagagaattgtgattacgggagacgccgacatcgaccacgaccaggtgttggtgcaagcgatcaaagaggctaaagagcaacatccggatatgtccgtaactaaggtcgtcgtgcaccaagagaccgagatcgctgacgagtag

SEQ ID NO: 115988 - DNA, 2328 bp, synthetic construct
  misc_feature 1..2328: note = Description of Artificial Sequence: Synthetic coding sequence
  source 1..2328: mol_type = other DNA
atgactaccgaaaagagcttggtgacagaggcggagaactcgcagcatcagcagaaagaagaaggggaggaagccataaattctgggcagcaggagccccaacaagaggaaagttgccagacggcagcggaaggcgacaattggtgcgaacagaagctgaaggcctctaacggtgacactccaacccacgaggaccttacaaaaaacaaggagagaacctcagaatccaggggactgagccgacttttctcttcattcttgaagagaccgaaatcgcaggtgagtgaggaagaggggaaggaagtcgagtccgataaggaaaaaggcgagggcggccagaaagaaattgagtttggtacaagcctggacgaagagatcatcctgaaggcccctatagctgccccagaacccgaactgaagacagacccgagccttgatttacattctctttcctcagctgaaacccaacccgcgcaggaagagctgcgggaagaccccgatttcgaaatcaaggaaggtgagggcctggaagaatgtagcaagatagaagttaaggaggaatcaccacaatcaaaagccgagaccgaattgaaggcgagccagaaacccatcagaaaacacagaaatatgcattgtaaggtgtcgcttctggacgacacagtgtacgaatgtgtggttgaaacctggctggactccgccaaggagattaagaaacaggtgcgaggcgtgccctggaacttcactttcaatgtgaagttttacccaccagacccagcccagctgacagaagacatcaccagatattacttatgcctccagctccgccaggacatcgttgctggcagactgccctgctccttcgccacactcgccttgctcgggagctacactatacaatcagagctcggggattacgacccagaattacacggcgtagactatgtgtccgacttcaaactggcacctaatcaaacgaaggagctggaggaaaaggtgatggaactgcacaagagttaccgatcaatgacccctgctcaggctgacctcgagttcctggagaatgcgaaaaaattgtcgatgtatggcgtagatctgcacaaagcgaaggacctcgagggggtggatattatcctgggtgtatgcagctcagggctgttggtctataaggataaactgcgaattaaccgcttcccctggccaaaagtccttaagatttcttacaaacgttcctcgttttttattaagattaggcctggagagcaggaacaatacgagtcaactattggcttcaagctcccaagttatcgagccgcaaaaaaactctggaaggtgtgtgttgaacatcacacattctttcggctgacttcaaccgatactatcccaaagagcaaatttctagcactggggtctaagtttagatacagtggaaggacccaagcccagacaaggcaggcttccgccctgattgataggccggccccccattttgagcggaccgcgtcgaagcgggcaagccgatctctggacggcgctgcggcagtcgattctgccgatcgctctccccgcccaacctcagctcccgcgattacccagggacaggtggcagaggggggcgtgctggatgcgtctgcaaagaaaacagtggtgcccaaagcacagaaagaaacggtcaaagccgaggtgaaaaaggaagacgaaccgcccgagcaggcagagcccgaacctactgaggcttggaaggacttggataagagccaggaagaaataaagaaacaccacgcgagtatcagtgagctaaaaaagaacttcatggaaagtgtgcctgaacccaggccaagtgagtgggataagcgtctgagcacgcactcacccttccgcacgttaaacatcaacgggcaaattcccaccggagaggggcctcctctcgtcaagacacagactgtgactattagcgacaacgctaacgcagtgaagtccgagattccgaccaaggatgtacctatcgtgcacaccgagacaaaaacaatcacttacgaagctgctcaaacagatgataacagcggggacctggatccaggcgtactcctgaccgcacaaaccatcacaagtgaaaccccttcttccaccacaacgactcagatcactaagactgtgaagggtggcatctccgaaacgcgaatcgaaaaaaggatcgtcattacaggagacgctgacatcgatcacgatcaggtgctggtgcaggctatcaaggaagctaaggaacagcatcccgacatgtctgtaactaaggtggtcgtgcaccaggagacagagattgctgacgagtag

SEQ ID NO: 115989 - DNA, 1926 bp, synthetic construct
  misc_feature 1..1926: note = Description of Artificial Sequence: Synthetic coding sequence
  source 1..1926: mol_type = other DNA
atgcactgtaaagtatccctactggacgataccgtgtatgagtgcgtggtggagaagcatgctaagggccaggatctgctgaaaagagtatgcgagcatctaaatctgctggaggaggattactttgggcttgcgatatgggacaatgccaccagcaagacttggctggactctgctaaggaaataaaaaaacaggtcaggggtgtgccctggaatttcacattcaacgtgaagttctaccccccagaccccgcccagctgaccgaagatatcacgaggtactatctgtgccttcagctgcggcaggacatagtcgccgggagattgccgtgtagttttgcaaccctggcactacttggctcctacactatccagagcgaactcggtgactatgacccggagcttcacggagtagactacgtgtccgattttaagctggcccctaaccagaccaaggaacttgaagaaaaagtcatggagctgcataagtcatataggagtatgacacctgctcaggcagacttagagtttcttgagaatgctaaaaaactgtccatgtacggcgtggacctgcacaaggccaaggatctggagggagtggatatcattctgggcgtttgttcttcagggctgctagtctacaaagataagctaagaatcaatcgattcccttggcccaaagtgttgaagatttcctacaagcggtcctccttctttattaaaatcaggccaggtgaacaggagcaatacgaatctactatcggctttaagctccctagctacagagccgccaagaagttatggaaggtgtgcgtggagcaccacactttcttccggctcacctctaccgataccatccctaagagtaaatttttggctctagggtctaagtttagatacagcggcagaacccaggcccagacgcggcaggcatctgcgctcatagataggccagcaccccatttcgagcgcacagcgtcgaagcgcgccagccggagtctggatggagccgcggccgtcgatagcgccgaccggtccccccggcctacttctgctccggccattacccaagggcaggtagccgagggaggagtgctggatgcatcagccaagaagactgtagttcccaaggctcagaaggagaccgtcaaagccgaggttaaaaaggaagatgagccccccgaacaggccgagccggagcctacagaggcatggaaagtggagaaaactcatatcgaggtgactgtccccacttccaatggcgaccagacacaaaagaagcgggaaagattggacggggagaatatttatatcagacactctaacctaatgttagaggatcttgataagagtcaagaagagatcaagaagcaccatgcgtctatctctgagctgaagaaaaacttcatggaaagcgtgccggagccacggccaagtgagtgggacaagcggttgagcacacactccccgttccggacacttaatatcaatggacaaattccaacgggggaagggccaccactggtgaaaacccagacagtgacaatcagcgacaatgccaacgcggtgaaatcagagattcccaccaaggacgtccctatcgtgcataccgaaacaaagaccattacctacgaagccgcccagaccgacgataattccggagatttagatccaggagtgctgttgaccgcccagaccattacttctgagacgccttccagcaccacaaccacacagattactaagaccgtcaagggagggatttctgagaccaggatagagaagcgtatcgtcataacaggcgatgccgacatagatcatgatcaagtcctagtgcaggccattaaagaggcaaaagagcagcaccctgacatgtcggtaaccaaggtcgtcgtgcaccaggaaaccgagattgccgacgagtag

SEQ ID NO: 115990 - DNA, 2496 bp, synthetic construct
  misc_feature 1..2496: note = Description of Artificial Sequence: Synthetic coding sequence
  source 1..2496: mol_type = other DNA
atgactactgaaaaatcactggtgaccgaggccgaaaacagtcaacaccaacaaaaggaagagggggaagaagccatcaactccggacagcaggagccacagcaggaggagtcatgccagactgccgctgaaggcgacaattggtgcgaacagaagttaaaggccagcaacggtgacacacccactcacgaggatctgaccaaaaacaaggaacgcacctccgagtcccgtggcctgtcaagactgttcagcagttttctcaagagaccaaagtcacaggtcagtgaggaagagggaaaggaagtggagtccgataaggaaaagggagagggggggcagaaagaaattgagttcggcacctcactcgacgaggaaattatccttaaagccccgattgctgcaccagagccagagctgaagaccgacccttctcttgacctgcacagtctttcgagcgctgaaacacaaccagcccaggaagaattaagggaagatcccgacttcgagattaaggagggggagggcttggaggaatgcagcaaaatcgaagtgaaggaagaaagccctcagagcaaggccgagacggagcttaaagccagtcagaaaccaattaggaagcatcgcaatatgcactgtaaggtgagtctgttggacgatacggtctatgagtgtgtcgtggagaaacatgccaaagggcaggatctgctgaaacgggtttgtgaacatctgaacctgttagaggaagactattttggcctggccatctgggataatgctaccagcaagacctggctggattccgccaaagagatcaagaagcaggtgcggggggttccttggaatttcaccttcaatgttaagttttacccacctgatcctgcccagctcactgaagatataacgcggtattacttatgcctccagctgcggcaagatattgttgccggacgactgccctgttccttcgccacattggccctactcgggagctacacaatccagtctgaacttggtgattacgacccagagctgcacggggtcgactacgtgtccgatttcaaactcgcgccaaatcaaacaaaagagctcgaagaaaaagtcatggagctgcacaaaagttacaggagcatgacacccgcgcaagcagacttggagtttctggaaaatgctaagaagctctctatgtacggcgttgacctgcacaaagctaaggacttggagggggtggacattattctcggagtgtgttctagcggattgcttgtatataaggacaaactccggatcaaccgtttcccgtggccaaaagtactgaagatttcttataagagaagcagctttttcattaagattcgacctggagagcaggaacagtacgagtccaccattggctttaagttaccgtcttaccgcgccgcgaagaaactgtggaaggtatgtgtggaacatcatacgtttttccggctcacatcaacagatacgatcccgaagagtaagttcctggcactgggatcgaagttccgttacagtggacggacacaggctcagactagacaggcctcagcccttatcgatcggcctgctccacattttgagagaacagcgtcaaagcgggcctctcggtcactggatggagctgcggcagttgactccgctgaccgctcccccaggcccacttcggcgccagcaattactcagggacaggtggctgaaggtggagtgctcgatgcaagcgccaaaaagacggttgtcccgaaagcacagaaggaaaccgtgaaagccgaggtcaagaaagaagacgagcctcccgaacaggccgaaccagaacccaccgaagcttggaagaagaagcgggagcggctcgacggagagaatatatatatccggcatagtaacctgatgctggaggatttggacaagtcccaagaagagataaagaaacatcatgcctctatttctgaattgaaaaagaattttatggaaagcgtgcccgagccaaggccatcagaatgggataagagactgagtacgcactctccttttaggaccctgaatataaacgggcaaatcccaactggcgaaggaccccctctcgtcaagacccaaacagtaacaatttctgacaatgctaacgccgttaagtctgaaatcccaacaaaagatgtacccatcgtgcacaccgagactaagactatcacatatgaagctgcccagaccgacgataacagtggggacctggatccaggcgtgctgcttacggcacagaccatcacttcggagaccccttccagcaccaccaccactcagatcacaaaaaccgtgaaggggggcatatcagagactcgcatagagaagagaatcgttataactggagacgccgatattgatcacgaccaggtgcttgtgcaggcaatcaaagaggccaaagagcagcatcctgacatgtccgtcactaaggtggtggtgcaccaagagacagagatcgcagacgaatag

SEQ ID NO: 115991 - DNA, 2484 bp, synthetic construct
  misc_feature 1..2484: note = Description of Artificial Sequence: Synthetic coding sequence
  source 1..2484: mol_type = other DNA
agagcacgcgctgcacggagccagaatgccgttggacccgtgcccgctgcgccgtctccagagaagtctcttgtgactgaggccgagaattcccagcaccagcagaaagaagagggagaggaggccataaattccggccaacaggagcctcagcaggaagaatcctgtcagacagcagctgaaggtgacaattggtgcgagcagaagttaaaagcttctaatggggatactcctacgcacgaggatttgactaaaaacaaggagaggacgagcgagtctcggggactgagccgcttgttcagttcctttctgaaaagacccaagtctcaagtaagcgaagaggagggtaaggaagtcgagtctgataaagagaagggcgagggcggccagaaggagatcgagtttgggacatctctcgatgaagaaatcatattgaaagctcccattgctgcacctgagcccgagcttaaaacggatccgtccctggacttacattctctgtccagcgcggagactcagcccgctcaggaagagctgagagaagaccccgactttgagattaaagaaggcgagggcctcgaagaatgcagcaaaattgaggtgaaggaggaaagtccccaatctaaagcggagaccgagctcaaggcatctcagaaacctatccggaaacacaggaatatgcactgcaaagtttctcttctcgacgatacggtgtatgaatgcgtcgtggaaaaacacgccaaggggcaagatttgttgaagcgcgtgtgtgagcatctcaacctactcgaagaggattactttggccttgccatctgggataatgccacctccaagacctggctggacagtgctaaagaaatcaagaagcaggtccgcggcgtgccatggaattttacgtttaatgtgaagttttatcctccagatcccgcacagctcaccgaagatatcacccggtactacttgtgtttacagctgaggcaggacatcgtggccggaagattaccatgcagtttcgcgaccctggccttactcggtagctacacaattcaaagcgaactcggcgattacgacccggagctccacggggtggattacgtctccgacttcaaattagcccctaaccagacaaaggaactggaggagaaggtcatggagctgcataaatcttatcgtagtatgacacccgctcaggccgatctcgaattcctggaaaacgctaaaaagctcagcatgtacggagtggatctgcacaaggccaaggatctggagggagttgatattatactgggggtttgctcatccggacttctcgtgtacaaggacaaactgcgcataaacaggttcccttggcctaaggtgctcaagatttcctataaaaggtcctcattctttattaagattagacccggcgagcaggagcagtatgagagcactattggttttaagctgccaagctacagagccgcgaaaaaactgtggaaggtttgcgtagaacaccacactttcttccgcctgactagtacagacacaataccgaaaagtaaattcttagcattgggatcgaaattccggtacagtggcaggactcaggcacagacccggcaggcaagtgccctgatcgaccgccctgccccacacttcgaaagaacggcgagcaaacgcgcttccaggagcctagatggcgctgcagccgtcgattctgccgaccggtcccctaggcccactagcgcacctgctataacgcaggggcaagtggccgaagggggagtactagatgcatctgcgaagaaaaccgtagtgcctaaggctcagaaggagacggtgaaggctgaagtaaaaaaagaggatgaaccacccgagcaggcagagcctgaacccacggaagcctggaaggatctggacaagagccaggaagagattaaaaaacatcacgcctccatcagcgaactgaagaagaacttcatggaaagtgtgcccgaaccgcgcccaagcgaatgggacaaacggctgagcacccactcccccttccgcaccctgaatattaacggtcagatcccaacaggagagggcccgccgctggtgaaaacgcagaccgttacgatctcagacaacgccaacgctgtgaagtcagagatccctacaaaggatgtacctatcgtgcatacagaaacaaaaaccatcacatacgaggccgcgcaaacagacgataactctggggatctggaccctggcgtcttactgaccgcccaaaccataacttctgaaaccccttcaagcaccacaacaactcagataaccaagaccgtgaagggcggcatatccgagacgaggattgagaagaggatcgtgataactggcgacgcggatatagaccacgaccaggttctggtccaggccatcaaagaagccaaagagcagcatcctgacatgagcgtgaccaaagttgttgtgcatcaggagacagagatcgccgacgaatag

SEQ ID NO: 115992 - DNA, 2163 bp, synthetic construct
  misc_feature 1..2163: note = Description of Artificial Sequence: Synthetic coding sequence
  source 1..2163: mol_type = other DNA
atgacaaccgaaaagagcctggtgacagaggctgaaaattcgcaacaccaacagaaggaggagggggaggaagccattaactctgggcagcaggagccacagcaggaggagtcctgtcaaaccgccgcagaaggggacaattggtgcgagcagaagctgaaagcttcaaatggagacaccccaactcatgaagatctgacgaaaaataaagagcgcacctctgagtctcgaggcctatcccgcctgttcagtagcttcctgaagcgccctaagtcacaggtctccgaagaggaggggaaggaggtcgagtcagataaagagaagggcgaaggagggcaaaaagaaatcgagtttggcacgtccctggacgaagagatcatcctcaaggcgcccatcgccgcgcccgagcctgagctgaaaactgacccaagcctggatctgcactctctgtctagcgcagaaacacagcccgcacaggaagaactgcgcgaagatcctgactttgaaattaaggagggagagggactagaggagtgctccaagattgaggtaaaggaagagagtcctcagtctaaagccgaaacagagttgaaagcctcccaaaagcccatccgcaaacacaggaacatgcattgtaaagtttccctgcttgacgatactgtatatgagtgcgtcgtagagaaacacgcaaagggccaagaccttttgaagagagtttgtgagcaccttaacctgcttgaagaagactactttggactggcaatctgggataacgcaacgtccaagacctggctggacagcgctaaggagataaaaaaacaagttcgcggagtaccatggaattttaccttcaatgttaagttctatcctccggacccagcgcaattaactgaggatatcacgagatattacctgtgcctgcagttgcgacaggacatcgttgcaggaagactaccttgctcgttcgccactttagccttattgggttcttacacaatccagtccgagttgggagactacgaccccgagctgcatggcgtcgactacgtgagtgactttaagctagctcctaatcagaccaaagagcttgaagaaaaagtcatggaactccacaaatcctacagaagtatgactccagcccaagccgatctcgaattcctggaaaacgccaaaaagctctccatgtatggggttgatctccataaggcaaaggacttggagggcgtcgacattatccttggggtgtgctcttccggccttctcgtgtataaggacaagctgaggataaatcgattcccctggcccaaagtgcttaagatcagctataaacgctcctctttctttataaagattcgccccggtgagcaggagcagtacgagagtaccatcgggttcaagctcccttcctatcgcgctgccaagaaactgtggaaggtgtgcgttgaacaccatacattttttcgcctgacgtccacagatacgataccaaagagcaaattcctcgccttgggcagtaagtttcgttacagtggcaggactcaagcccagactaggcaagcaagtgcacttattgatcgtcctgccccacattttgagcggaccgcttcaaagcgggctagtcgttcgctcgacggggctgcagccgtggacagcgccgatagatcaccaaggccaactagcgctcctgctatcacacagggacaggttgccgaaggcggcgtgcttgatgcctccgcaaagaagacagtggtcccaaaagcccaaaaggaaaccgtcaaagccgaagtgaagaaagaggacgagcctccagagcaagcagagccagagcccactgaagcttggaaggtcgagaaaacacacattgaagtaacggtgccaactagcaatggcgatcaaactcagaagaagagggagcgcctggatggagagaacatatacattagacacagtaacctgatgctggaggatctagataagtcccaggaggaaatcaagaagcatcatgcgtcaatcagtgaacttaagaagaactttatggagtccgtgccagaacccaggccgtcggagtgggacaaaagactgagtacccattctccattcagaaccctcaatataaatggccagatccccactggagaaggggtgtctacacttagtacatag

SEQ ID NO: 115993 - DNA, 2595 bp, synthetic construct
  misc_feature 1..2595: note = Description of Artificial Sequence: Synthetic coding sequence
  source 1..2595: mol_type = other DNA
atgacaacagagaaatcactggtcaccgaggctgaaaatagccagcatcaacagaaagaggagggggaagaggcgatcaacagcgggcagcaggaacctcagcaggaggagagctgccagacagctgcagagggcgacaactggtgcgaacagaagctcaaggcctctaacggcgacaccccgactcacgaggacctgacaaagaataaggaacgaacatctgagagtcggggcctctccagactttttagctctttcctaaaaagaccgaagagccaagtgagtgaggaggaaggcaaggaagtcgaatcagacaaagagaaaggggaagggggccagaaggagattgagtttgggacgtccctggacgaggagattattctgaaagcccccattgctgccccagagcctgagctcaagaccgatccctctctagacctgcacagcctgtcttcggccgagacccaacccgcacaggaggaattaagagaagaccccgacttcgaaattaaggaaggcgaagggctcgaagagtgcagtaaaattgaagttaaagaggagagtccccagtctaaagccgagactgaactgaaggcatcacagaaacctatacgtaaacacaggaatatgcattgcaaggtatcattgctggacgacaccgtgtatgaatgcgtcgtggagaaacacgctaagggccaggaccttctgaagagggtgtgcgagcacctgaatctcctcgaggaggattactttggccttgccatctgggacaatgcaacatcgaagacttggctagactctgccaaggagatcaaaaagcaggttaggggtgtgccttggaacttcacatttaatgtcaaattttatccacccgatcccgcgcaactgacagaggacatcacaagatactacctgtgtctccagctccgacaagatatcgttgcgggaagattgccatgtagcttcgccaccttggcgctcttgggtagctataccatccaatcagagctcggggattatgacccagagcttcatggcgttgactacgtcagtgatttcaagcttgctcccaaccagaccaaagaacttgaggaaaaggtaatggaactgcataagagttacagatctatgacacccgcccaagctgacctggaatttttagaaaacgctaagaagctgagtatgtacggcgtggatttacataaggctaaagatcttgaaggcgtggacataattctgggagtatgtagttcgggcttgttggtgtacaaagataagctgcggattaatcgttttccatggccaaaggtcttaaagattagttacaaaaggtcatccttcttcatcaaaattcggccaggtgagcaggagcagtatgaatccaccatcggattcaagctgccctcctatcgggccgccaaaaagctttggaaggtgtgcgtcgagcaccataccttctttagactcacctctactgatactataccaaaatcgaaatttctcgctctggggagtaaatttcggtactcggggcgcactcaagcccagacacgacaggccagcgctcttattgaccgacccgcccctcattttgaacgtactgccagcaaacgtgcctcacgctcactggacggtgctgcagccgtcgactccgctgaccggagcccacgtcctacctctgctcctgctatcacgcagggtcaggttgccgagggaggcgtactggatgcttctgccaaaaagaccgtggtaccgaaggcccaaaaagagacagtgaaggctgaggtgaagaaagaagatgaacctccagagcaggctgagcccgaacctacagaagcttggaaggtcgaaaagacacatatcgaggtgaccgtgccaacttctaacggggaccagacccagaagctggccgagaagaccgaagacctcatccggatgcgcaaaaaaaagcgcgagcgactggacggagaaaatatttacattaggcactccaatctgatgttggaggatctggataagagccaggaagagattaaaaagcaccatgcctctatctccgagcttaagaagaactttatggagtccgtgcccgagccccgtcctagtgaatgggataagcgcttgtctacccattctccattccggacacttaacatcaatggacagatcccaaccggcgagggaccccccctagtgaaaacccagactgtaacaatctctgataacgcgaacgctgtgaagtctgagatacccaccaaggacgttccaatagtgcacacagaaaccaagaccattacttatgaagccgcgcagacagacgataatagcggcgacttagaccccggggtgctgctgaccgctcagacaattacttcggaaactccttcctcaacgactactacacaaatcactaagaccgttaaaggcggcatctctgaaacacgcatcgagaaacgtattgtcatcaccggcgatgccgacattgaccacgaccaggtccttgtacaggcaattaaggaggccaaggaacaacaccccgacatgtcagtgaccaaagtggtggtgcatcaagaaacagaaattgcggatgaatag

SEQ ID NO: 115994 - DNA, 1767 bp, synthetic construct
  misc_feature 1..1767: note = Description of Artificial Sequence: Synthetic coding sequence
  source 1..1767: mol_type = other DNA
atgcattgcaaggtaagcctgctggacgacactgtctacgagtgcgtcgtggagaagcacgccaaaggccaagacctgttaaaacgcgtgtgtgaacatctgaatcttctggaggaggactatttcggactcgctatttgggataacgcaacatctaagacttggctcgactctgccaaagagatcaaaaaacaagttcggggagtcccttggaactttacctttaatgtaaagttctacccacctgatcctgcgcagctgactgaggatattacccgttactacttgtgtctgcaactgagacaggatatagtcgcggggcgactcccgtgttccttcgctaccctggcgctcttaggatcatatactatccaatcagagcttggtgactatgatcctgagctgcacggcgtcgactacgtcagcgacttcaaattggcccctaaccagaccaaagaactggaagagaaggtaatggagctacacaagtcatacagatctatgacgcctgcccaggccgacctcgagttccttgaaaatgccaaaaaactaagcatgtacggagttgacctgcataaggcaaaagacctagagggcgtggacataattctcggggtctgcagctccggactgctcgtctacaaagacaaattgcggatcaataggttcccttggccaaaggtgttgaagatcagctataaacgctcttcctttttcatcaaaatccggccgggtgaacaagagcagtatgaaagcacaattggttttaaactgccttcttatagggctgccaagaaactgtggaaggtttgcgtagagcaccatactttctttcgcctgacatccacagacacaattcccaagtcgaaattcctcgctctgggttctaaattccggtacagcggtcggacacaggcacagacccggcaagcatccgcactgattgatagacccgcacctcatttcgaaaggaccgcgtctaagagagcctctaggtccctggatggtgcagcagccgtagacagcgcggacagaagtcctcgcccgacctcggccccagccattactcagggccaggtggctgagggtggcgtcctggatgcaagcgctaagaaaactgtcgtacctaaggctcagaaggaaaccgtcaaagctgaggtgaagaaggaggacgaaccacctgagcaggccgaaccagaaccaacagaggcgtggaagaagaagcgggaacggctggatggcgagaatatctacatccgacactcaaatttaatgctggaggacctggataagtcacaggaagagattaagaagcaccacgctagcatttctgagctgaagaagaacttcatggagtccgtgcctgaacctagaccttcggagtgggacaaacgcttaagcactcactctcccttcaggaccctaaacatcaacgggcagatccccactggcgaagggccccccctcgtcaagacacagacggtgactatttctgataatgccaacgctgttaaatccgagataccaaccaaggacgtccccattgtgcacacagagacaaagacgattacatacgaggcagcccagacagtgaaaggcggtatctcagaaactaggatcgagaagaggatagtaattaccggcgacgcagacattgaccatgatcaagtgctcgtgcaagcaattaaagaggccaaagaacagcacccagacatgagcgtgactaaggtagtggttcatcaggagaccgaaatcgccgacgagtag

SEQ ID NO: 115995 - DNA, 2115 bp, synthetic construct
  misc_feature 1..2115: note = Description of Artificial Sequence: Synthetic coding sequence
  source 1..2115: mol_type = other DNA
atgaccactgagaagtctctggtgacagaggcagagaactcgcagcaccagcagaaagaagagggcgaggaagcaatcaactcgggccagcaggaaccacagcaggaggaatcttgccagaccgcagccgaaggtgataactggtgtgaacagaaactaaaggcgagcaacggtgacacaccgacacatgaagatttgactaaaaataaggagaggactagcgagagcagagggctcagccgcctcttttcgtccttcttgaaacgccctaagtcgcaggtgtccgaggaagaaggcaaggaggtggaaagcgataaggagaaaggggagggcggccagaaagaaattgaatttgggacaagtctcgacgaagagatcattcttaaagctcccattgccgcacctgaacctgaactaaagaccgatccgtcgctggacttgcacagtctaagctctgctgaaacccagacttggctagacagcgccaaggaaatcaagaaacaggtgcgtggcgtgccttggaactttacgttcaacgtcaagttctacccaccagatcctgcgcagctaaccgaggatataacgcgttactatttgtgtttacagctgaggcaggatatcgtggctgggcggctaccttgttcttttgctaccctggcactcttagggtcttacactatccagagcgagctcggtgactatgatcctgaactgcatggtgtcgactacgtgtcagacttcaagctggccccaaaccaaactaaggagctggaggagaaggtaatggaactccataagtcttaccggtccatgactcctgcacaggccgatctggaattcctggaaaatgcaaagaaactctcaatgtacggagtcgatctgcataaggcaaaggacctggaaggagtggatataattctgggagtgtgttcttccggcctgcttgtgtataaggataagctaaggataaaccgctttccctggcccaaagtgcttaagatttcatacaagaggagttcattcttcataaaaattcggcccggcgagcaggaacagtacgaatctaccattggattcaagttgccttcttacagggctgctaaaaaactctggaaggtgtgcgtcgagcaccatacatttttccgactgacaagcacagatacaattccaaaaagcaagttccttgcactcggcagcaaatttcgctactccggaagaacgcaggctcagacaaggcaagcatccgcactgatcgatcgcccagccccccacttcgagcgcactgcctccaagcgagcctcaagatctctcgatggtgctgccgccgtggattccgctgatcgctcaccgaggccaacgagcgcacctgccataacccaggggcaggttgccgagggtggagtgctggatgcctctgccaagaagaccgtagtccctaaagcacaaaaggaaactgttaaggctgaagtgaagaaggaagacgaaccaccagaacaggccgaacctgagcccactgaggcttggaaggacttggataaatcccaggaagagatcaaaaagcaccacgctagtattagtgaactgaaaaagaacttcatggaatccgtgccagaaccacggccgtcagagtgggacaagcgtctgagcacacatagcccgttcaggaccctgaacattaatggacagatccctacgggggagggccccccactggtgaaaacccagacagtgacgatcagtgacaatgccaacgctgttaagtctgagatccccaccaaagatgttcccatagtacatacagagactaaaaccattacatatgaagcggcacagaccgatgataacagtggcgaccttgatccaggtgttctcttgaccgctcagacgatcacctctgagactccctcatccaccacaaccacccagattacaaagacagttaagggcggcattagtgaaactaggattgagaagagaattgttataactggcgatgctgatattgaccacgatcaggttctggtgcaggcaattaaagaagcaaaagagcagcaccccgacatgagcgtaaccaaggtggtggtccaccaggaaacagaaattgcagacgagtag

SEQ ID NO: 115996 - DNA, 2304 bp, synthetic construct
  misc_feature 1..2304: note = Description of Artificial Sequence: Synthetic coding sequence
  source 1..2304: mol_type = other DNA
atgacaactgagaaaagtttggttaccgaggcagagaacagccagcatcagcaaaaggaggagggcgaggaggccattaatagcggccagcaggagccgcagcaggaggaaagctgccaaacagctgccgagggagacaactggtgcgagcagaagttgaaggcgagcaatggcgatactcctacccatgaggaccttactaagaataaagaaaggacttcggagagtaggggactgtccagactattctcgagtttcctgaaacgacctaaaagccaggtgagtgaggaagaaggtaaggaagtggaaagtgacaaagagaagggagagggtggccagaaggagattgaattcggaacttcactggatgaggagatcatcctcaaagcgcccatcgctgcaccagagcccgaattgaagaccgatccctctttggatttgcactccctcagcagtgcagagacacagccagcccaggaagaacttagggaggaccccgattttgaaattaaagaaggcgaaggactggaggagtgtagtaagatcgaagtcaaagaagagtctccgcaaagcaaggctgaaactgagctgaaggctagtcagaaaccgattagaaagcatagaaatatgcattgtaaggtgagcctattggatgataccgtttacgagtgcgtggtagagaagcacgccaagggacaggacctgctcaaacgggtttgtgagcacctgaatttgctggaggaggattactttggcctcgctatttgggacaatgctacttccaaaacgtggctggatagcgcaaaggaaatcaaaaagcaggtgcgtggggtgccatggaactttactttcaatgtcaagttttacccacctgaccctgcccagctcacagaggacataacacgctattacttgtgtttgcagctcagacaggacattgttgcaggtagacttccttgtagcttcgcgactctagcactgcttgggtcatacactattcagtcagagctgggagactacgatccagaactgcacggcgtggactatgtgagcgacttcaagttggcaccaaatcagacaaaggagctggaggaaaaagttatggagcttcacaaatcataccgatcaatgactcctgcacaggcagatctagagttcttggaaaacgctaaaaaattgagcatgtatggagtcgacttgcacaaggcaaaagatctcgagggggtggacatcatattgggggtgtgctcgagcggcttgttggtgtacaaagataaactgcgaatcaatcgtttcccatggcctaaggtgctgaaaattagctataaacgttcctcatttttcatcaagatacgtcccggtgaacaagagcagtatgaatcaactatcgggttcaagttgcccagctaccgggctgcaaaaaaactttggaaggtctgtgtggagcaccataccttctttaggctcactagcactgacactatccccaagtcgaaattcttggctctcggtagtaaattccggtattctggtaggactcaggcgcagactcgacaggctagcgcactaatcgatagacctgcccctcactttgaacggaccgcgtctaagcgggccagccggagcctggatggggccgcggcagttgactccgccgatcgatcaccgcggccaacctcggcacctgctattacacaggggcaggtggcagagggcggagtcttagacgcctcggccaagaaaaccgtcgtcccgaaggcgcaaaaagagaccgtgaaggcagaggtcaagaaggaagatgagccaccagagcaggccgagcccgagccaacagaggcatggaaagacttggataaatcccaggaagagatcaaaaagcaccacgcctccatttcagagttgaagaaaaactttatggagtctgtccccgagcctcgtccctcggaatgggacaagaggttaagtacacactcccccttccgtacactcaatattaatggccaaattccaacgggtgaaggcacggatgataactcaggggatcttgacccaggagtgcttttgacggcccagaccataacttcggaaacaccttctagcactacaaccacccagattaccaagaccgtgaagggtggcatcagcgagacaagaatcgagaaaagaatagtgattactggggacgccgacatcgaccatgaccaggtacttgtgcaggccatcaaggaagcaaaggaacaacacccggacatgtccgtgacgaaagtggtcgtgcaccaggaaaccgaaattgccgatgaatag

SEQ ID NO: 115997 - DNA, 2145 bp, synthetic construct
  misc_feature 1..2145: note = Description of Artificial Sequence: Synthetic coding sequence
  source 1..2145: mol_type = other DNA
atgaccactgagaaatcattagtgacagaggccgaaaatagccagcaccagcagaaggaggagggggaggaggcaattaacagtggtcagcaggagccgcagcaggaggaatcatgccaaacagccgccgagggtgataactggtgcgagcagaagctgaaggcctccaacggcgacaccccgacccatgaagatctgacaaagaacaaagagagaacatctgaaagtcgcgggctgagtagactattttcgtcctttctgaaaagaccaaaaagtcaggtttccgaggaagaaggcaaggaagtggaatccgacaaggagaagggagagggcggacaaaaggaaatagagttcggaacctcacttgacgaggaaattattctcaaagcacctatcgccgctcctgaacccgaactaaaaacagatccaagcctggatctgcacagcttgagttctgccgaaacacaacctgcacaagaagaactgcgtgaggacccggatttcgaaattaaagagggcgagggccttgaggaatgttctaaaatcgaggtgaaagaggagagtccccagtctaaggccgaaacagagctaaaggcctcacagaagccaatacggaaacatcggaatatgcactgtaaggtcagtcttctggatgatacggtatatgaatgcgtggttgaaaagcacgctaagggacaggacttactgaagcgagtctgcgagcatctgaaccttctggaggaggactactttggtttggctatatgggataacgccaccagtaagacatggttggactccgctaaagaaattaagaaacaggtgagaggcgtgccatggaatttcacatttaacgtgaagttctacccgccagatccagctcaattaaccgaggatattaccagatactacttatgccttcagttgcggcaggatattgtggctggcagattaccctgttcctttgctaccttggctcttctcggctcatacacgattcaatccgagctcggcgactatgaccctgagctccatggcgttgactacgtcagcgactttaaactggctccaaaccagaccaaggaactggaagaaaaggtgatggaactgcacaaatcctaccggtcaatgacccccgctcaagccgacctggagtttctggagaatgcaaaaaagctgtcaatgtacggggtcgacctccacaaagccaaagatttagaaggagttgacataatcctcggtgtgtgctcttccgggctccttgtctacaaagacaagttgcggattaatcggttcccctggcctaaggtcctgaagatatcttataaacggagctcatttttcattaagattagaccaggcgaacaggagcagtatgagagcacgattggctttaaactgccttcgtaccgcgctgccaagaaactttggaaagtctgcgtggaacaccacacttttttccgtttaacatcaactgatactatcccgaaaagtaagttcctggccttaggcagcaagttcagatatagtggacgaacccaggcgcaaacccggcaggcttccgcactcattgatcgcccagccccgcacttcgaaagaacggcctcaaagcgcgccagccgctcccttgatggtgcagctgcggtggatagcgccgaccgctctccaagaccaactagtgctccagccataacccagggccaggttgccgagggcggggtgttagatgcgtctgcaaaaaagacggtggtgccaaaggcccagaaagaaacagtgaaggcagaggtcaagaaagaggatgaacccccggagcaggccgagccagagcccaccgaagcctggaaggtggaaaagacgcacatcgaagtgaccgttcccacctctaacggtgatcagacccagaagaaacgggagcggctggacggggaaaatatctacatccggcatagtaatctgatgctggaagacctggacaaaagccaagaagaaattaagaagcatcacgccagcatctcagagctgaagaaaaactttatggagagcgtgcccgagcctcggcccagcgagtgggataaaagattgagcacacacagcccgtttagaaccctcaatattaatggacagattcccacaggcgaggggtag

SEQ ID NO: 115998 - DNA, 2061 bp, synthetic construct
  misc_feature 1..2061: note = Description of Artificial Sequence: Synthetic coding sequence
  source 1..2061: mol_type = other DNA
atgggctgcttctgcgccgtgcctgaagagttttattgtgaagtgctcttgcttgatgagtcaaaactcactctaacaactcagcaacaaggcatcaaaaaatctaccaagggatctgtcgtgctggaccacgtgtttcaccacgtgaatctggtggaaattgattattttggactcaggtactgcgaccggtctcaccaaacctactggctggaccctgccaagactctggctgagcacaaagagttgatcaatacgggaccaccctacacgctctactttggaatcaagttctatgccgaagatccttgtaagctcaaggaggaaattacccgataccagttttttctacaagttaaacaggatgttctgcaggggcgactgccttgccctgtgaacaccgccgcccagctgggcgcctatgctattcaaagtgaactgggcgactatgacccttataagcatacagcaggctatgtatctgagtacaggttcgtacccgatcagaaggaggagttagaagaagccatagagcgcattcacaaaacacttatggggcaaattccgtcggaggccgagctcaactatttaagaacagctaagtctttggaaatgtacggtgtggatctgcacccagtgtacggagagaacaaatctgagtactttttggggctgacccccgtgggcgtagtcgtatataagaacaagaaacaggtgggaaagtacttctggccccgcatcaccaaggtccattttaaagagacacagtttgaactgagagtcctgggcaaagattgcaacgagactagcttcttttttgaggccagatcgaagaccgcttgtaagcacctgtggaagtgttccgtggagcaccataccttttttaggatgccagagaacgagtctaacagccttagtaggaagttgagcaagtttggatctatcaggtataagcaccgctactcgggccgcaccgcactacagatgtccagggacctgagcattcagctgccaaggccagaccaaaacgttacccgctccagatccaagacctaccctaagcggattgcccaaacacagccagcggaatccaattctatttcccggatcaccgccaacatggaaaatggagagaatgaaggaacgatcaaaatcatcgcccctagtcccgtgaaatcttttaagaaggccaaaaatgagaacagcccagacacgcagcgcagtaagtctcacgctccatgggaggaaaacggcccccagagtggactctacaactctccctcagatcgcactaagagccctaagttcccttatacacgcagaagaaaccctagctgcgggtcggacaacgactcggtgcagcccgtgaggcggcgaaaggcccataactccggcgaagactctgaccttaagcagcgccgacggtctagatcccgttgtaacaccagctccgggtctgaatccgagaacagcaaccgggagtaccggaaaaagagaaaccggattagacaggagaacgacatggttgactcagcaccccaatgggaggcggtcctgcggaggcagaaggagaagaatcaagccgatccgaataaccggagatccaggcaccgcagcagaagccggagccccgatatccaagccaaagaggagctctggaagcacatccaaaaggaattagtcgacccgagcggcctctccgaggagcagcttaaagagatcccgtacaccaaaatcgagacacagggagatcccataagaatcagacactcccacagccctaggtcttaccgccaatacaggaggtcccagtgcagcgacggagagagatccgttttgtccgaggtcaacagtaagaccgacctggtgccacctctcccagtgactagatcatctgatgcacagggctccggagatgccacagtgcaccagagacggaacggctccaaggattcgctgatggaggagaagccgcagactagtactaacaacctggccggtaaacacacagccaagactattaaaaccattcaagcctccaggctcaagaccgagacatag

SEQ ID NO: 115999 - DNA, 1836 bp, synthetic construct
  misc_feature 1..1836: note = Description of Artificial Sequence: Synthetic coding sequence
  source 1..1836: mol_type = other DNA
atggatttcaaaaaatccaagcttacacttgtagttgtggaggatgatgatcagggacgggaacaggaacacacattcgtgttccgcctagattccgcacgcacatgcaaacacttatggaagtgtgcggtcgagcaccacgccttctttcgcctacggactcccggcaatagcaaaagcaaccggagcgactttattcgactgggaagcagattcaggtttagcggacggaccgaatatcaggccacacatgggagcagactgcgcaggaccagcacattcgaacggaagcctagtaagaggtacccctcccgccggcactcgactttcaaagccagtaatccagtcatagctgctcagctgtgcagcaaaactaacccagaggtgcacaactatcagccacagtaccaccctaacattcaccctagccagccacgatggcatccacacagtcccaatgttagctacccactcccctctccggtgctatcaagttctgaccgacttccctttggcattgaagaaaatggcggcacaccttttctgactgcagctagcggcaggcaccatcatcagcatcagcaccagcaccaacaccagcaccattcaaactatagcctgtcacttacactggaaaataaagagggacccctcaggtcaccgaattcctcaagtaagtctctaacaaagctgagcccaggaacccctgccctattctccgaagccgcggcccatttaaagaaattggagctggaaaccgtgaaggccgctggcccctggccaccgctgcacattaatatcaacaaagcagaggagaagaaggtgagtgagaagacactccagaccccgttgctgccgtcccccgtggccgaccatgtgaagtgtaacattctgaaagcgcagctcgaaaatgcttccagggtcaatatacaaggaggcaaagaggaaagccccttcgtaaatatcaataaaaaaagcagcttacaggatgcgtccgttcggtcgccaattccaattagggtggaaaccgcacaaccagcagtggagaaacctgaaattaagcctccaagggtccggaaactgacccgccagtacagctttgatgaggacgacctccctcccgacttagcggaggccgtcggcgtgactacatctactactaccaataccactaccgccgccacacaagtgtccgtgccattgccatcacccaaagtccaaaacgtgagtagtccccataaatcagaaggtaaaggactgcttagccccggtgcgaagagtcctagtgaccggggtggcgcctttactttggaacccggcgacctgctcatggattttacagaggccacgccattggccgagcccgcctctaaccctcactgtgcgcattcacgatgcagcccacccctaagtttgcccatgaaagaggaaaccaccggcgtgtgcatgtaccctcccattaaaactcgattaattaagaccttccccgtcgacacaatgaatcccttcccggacacattcactacggggccacaattcacagctgattttcgcgattcaaaactgcaatgctgtcccggcccgacttcaccactgattcctgctgccacactgcggcctctcaccgaaactgtacacagtgccgaccacttgcaccacccagaaacatgtttttctgggtcccaatgccgcgatactcccgccgggactggcgagagagaagatgacgagaaaactgtcgacgatcgcacagttaaattctccccttgtcatctggaggacggaatggttccatccgtgcggctcttaagcagcggattcgtatgcagcctgtag

SEQ ID NO: 116000 - DNA, 1323 bp, synthetic construct
  misc_feature 1..1323: note = Description of Artificial Sequence: Synthetic coding sequence
  source 1..1323: mol_type = other DNA
atgaagtttctgctgatcaaagatgcccctggaaagaaaaagcgtaaaaatttgatgttgagcttcaaaagaaagcacgctaagggacaggacctctttgaccagatcgtctaccatctggatctcgtcgaaacagactactttggtttgcagttcttggattcggcccaagtcgcacattggcttgatcacgctaagcctattaaaaagcagatgaaaataggccctgcctacgcgcttcatttccgggtcaaatactatagcagcgagcccaataacctcagggaagagtttacccgctatctcttcgtgcttcagctgagacatgacatcctgtctggaaaactgaaatgcccctatgaaacagccgtagagctcgccgcactttgccttcaggccgagcttggagagtgtgagttacctgagcatacccccgaactcgtgagcgaattccgattcatccctaatcagacagaagcaatggagtttgatatttttcagcgatggaaggaatgtcggggaaaatccccggctcaagcggaactctcatacctgaacaaagcaaaatggctggagatgtatggtgttgatatgcacgtggtccgcggcagagacggctgcgaatatagtttagggctcacacccacaggcattctgatattcgagggcgctaacaagattggcctttttttctggccgaaaatcaccaaaatggacttcaagaaaagtaagctgaccctggtggttgtggaagatgatgatcagggccgcgagcaggagcacacattcgtctttagacttgattcggcgagaacatgcaagcatctctggaagtgcgccgttgaacaccatgcgttcttccggctgagaacgccaggcaattccaagtctaatcgatcggacttcatccggctgggatccagattccgtttctcagggagaacagagtatcaggcaacccacggtagtagactgcgcagaaccagtacattcgaacgcaaaccgtccaaacggtatcccagcaggaggcactcaacttttaaggctagtaatcctgtcattgccgcccagttgtgcagtaaaactaatcccgaggtgcataattatcagccacagtaccacccaaacattcatcctagtcagcctcgctggcacccgcactctccaaacgttcgtccaagtttccaggacgacagaagtcattggaaagcctcggcaagtggagacgattcacattttgattatgtacacgatcagaatcagaagaatttaggcggcatgcagtccatgatgtatagagataagctcatgaccgccctctag

SEQ ID NO: 116001 - DNA, 1557 bp, synthetic construct
  misc_feature 1..1557: note = Description of Artificial Sequence: Synthetic coding sequence
  source 1..1557: mol_type = other DNA
atgttgcggttcctgcggaggactttcggcagaagatcaatgcagcgatatgcccggggtgcggccgggcgtggagcggccggcctgggcgacgagagagacggaggaccgcgcggggggcccgcagccgctgcctcaagtagcgcgttgccagccgcccctggcggaagtgtcttcccagctggaggcggtccgctgcttaccggaggggctgctgttcatatttctgccgccggagcagctaaagccaccctgtactgcagagtctttctgctcgatgggacggaggtgtctgtagacttgcctaaacacgctaaggggcaagatctgttcgatcagatcgtctaccacctggacctggtcgagactgactatttcggtctccaatttctcgattccgcccaagttgcgcattggctggaccacgcaaaaccaataaaaaaacagatgaagattggacccgcgtatgctctgcacttccgtgtaaagtattactcttctgaaccaaataatctgcgggaggagttcacgagatacttgtttgttctgcagctgcggcacgatattctttcgggaaagctaaagtgcccttacgagaccgccgtcgagctggctgctctctgcctccaagctgaactaggcgaatgtgaactgccagaacacactcctgaactggtgtccgaattccggttcattcctaaccaaaccgaagctatggagtttgacatttttcagcgatggaaggaatgccgcggcaagagtccggcccaggctgagctgtcctaccttaacaaagctaagtggttggagatgtatggggtggatatgcatgtcgtccgcggacgtgacgggtgcgaatactccctggggctgaccccgacaggtatactcatatttgagggtgcgaacaagattggcctgttcttttggccgaaaatcactaagatggacttcaaaaagtccaaacttacgttggtggtggtggaagacgacgatcaggggcgcgagcaagagcacacgttcgtctttcgcctggactctgcccgcacttgcaaacatctgtggaagtgcgctgtcgagcaccacgcgtttttccggctgcgcacgcccggtaattcaaagtcgaataggagtgactttatccgcctcggatcacgattcagattctcaggccggacagaatatcaggctactcacggaagtcggcttagaagaacaagtacgtttgagagaaaaccatctaaaagatacccttcaaggcgacattctacattcaaagcatcaaatcccgttattgctgctcagttgtgctctaagaccaatcccgaagtgcacaactaccagcctcaatatcatcctaacatccacccatcacagcctagatggcaccctcactcaccgaacgtgaggccaagctttcaggacgataggtctcactggaaagcttccgcgagcggagacgatagtcacttcgactacgttcacgaccaaaatcaaaagaatcttggcggaatgcagagcatgatgtacagggacaaactgatgacggctctttag

SEQ ID NO: 116002 - DNA, 2703 bp, synthetic construct
  misc_feature 1..2703: note = Description of Artificial Sequence: Synthetic coding sequence
  source 1..2703: mol_type = other DNA
atgctgcgcttcttgcggaggacattcggtcgacgcagcatgcaacgttacgccaggggagccgctggccggggggccgctgggttgggggatgagagggacggtggaccgagaggggggcctgccgctgcagccagctctagtgctttaccagcggccccgggcggatcagtgttccccgccggtggagggccactgctcacgggaggcgccgctgtgcatatatcagccgctggggctgccaaagccactttgtactgccgtgtcttcttgcttgacggcaccgaggtgtcagtggatcttccgaagcacgccaagggacaagatcttttcgaccagattgtttatcacctggatcttgtcgagaccgattatttcgggctacaattcctagactccgcgcaagtagctcattggctggatcacgcaaagccaatcaagaaacagatgaaaatcggccccgcatatgccctgcactttagagtcaagtattattcctccgagccgaacaacttgcgcgaggaatttacacgctatctgtttgttcttcagcttaggcatgacattcttagtggaaaactaaaatgcccctatgagacagcagtggagttggccgcgctgtgcctacaagctgagctcggtgagtgcgagctgcctgagcatacaccggagttggtgagcgaattccggtttataccgaaccaaactgaggccatggagttcgacatcttccagagatggaaggaatgcagagggaaaagcccagctcaagccgaacttagctatctgaacaaggcaaaatggctcgaaatgtacggggtggatatgcacgtggttcggggaagagacggctgtgaatattcactgggcctgacccccacgggaatcctaatctttgaaggcgcaaataagatcggactatttttttggccaaaaatcactaagatggattttaaaaaaagcaaacttacacttgttgtggtggaagacgacgaccagggtagggaacaagagcacacattcgtgtttagattggacagtgctcgtacatgtaagcacctgtggaaatgcgcagtagaacaccacgcattcttccggctgagaacacctggaaacagtaagtccaatcgaagcgatttcatccggctgggctcacgcttccgctttagcggccggactgaatatcaggctacccacggatcacggttgcgacgcacttcaacctttgagcgcaaaccatctaagcgctacccatccaggagacatagtactttcaaggccagcaaccctgtcattgccgcacaactttgttctaagacaaatcccgaggtgcataactatcagccccaataccaccccaacattcacccatcccagccaaggtggcacccacacagtccaaacgtgtcctaccccctcccgagtccagtcctgagtagcagtgaccggctcccattcggaatagaggagaacggggggaccccgttcctgactgcagcttccggccggcatcatcaccagcaccagcaccaacatcagcaccagcaccatagcaattactcgctgtcacttactctggaaaataaagagggtcctctgagatcccccaatagtagttctaagagcctcaccaagttatctccaggcaccccggccttgttttctgaggccgcggctcacctgaagaagctggagcttgaaaccgtgaaggctgccggcccgtggccaccgcttcacattaacatcaataaggcagaagaaaaaaaagtgtctgaaaagacactgcagactccactgctgcctagtccagtagccgatcatgtgaaatgtaatatcttgaaggcgcagctcgaaaatgctagtcgcgtgaacatacagggcggcaaggaggagagcccattcgtgaatatcaataaaaagtcctctctgcaggacgctagtgtgagaagcccaattcccatccgagtggaaactgctcaaccagccgtggagaagccagagataaaaccccctcgggtgcggaagctcacacgccagtacagttttgatgaggatgatctgcccccagacttagccgaggccgtgggagtgacaacttcaacaaccactaacaccacaacagcagccacccaggtgagtgttcccctgccttcccctaaggtgcagaacgtgtccagtccgcacaagtccgagggtaagggactgctgtcccccggggctaaatctccaagcgatagaggaggagctttcacactcgagcctggggaccttcttatggacttcaccgaggccacaccgctagccgagcccgcttcgaacccccattgtgcgcattctagatgctcaccccctttgtccttacccatgaaggaggagacaacaggcgtgtgcatgtacccaccaattaaaacccgcctgataaagacatttccagtagacactatgaacccctttcccgacacttttaccacagggcctcaatttacagccgatttcagagactcaaagctgcaatgctgtccgggcccaacctcgccgctgattccggctgcaaccctgcgacccctaacagagaccgtaagcaccgtccaaacaatctataccacaagaaaaccagtttcgctcgccgcaagtgccgagacacttcgacaagaactcgaaagggaaaaaatgatgaagcgccttctcatgacagagctgtag

SEQ ID NO: 116003 - DNA, 2202 bp, synthetic construct
  misc_feature 1..2202: note = Description of Artificial Sequence: Synthetic coding sequence
  source 1..2202: mol_type = other DNA
atgctgtccttcttccgaagaacactcggccggaggtctatgaggaagcacgcggaaaaggaacgcctccgcgaggcccagcgggccgccactcacatccctgctgccggcgactcaaagtctattataacctgtcgcgtgtctcttttggatggaaccgacgtctccgtcgatctgcccaagaaagctaagggtcaggaactttttgaccagataatgtaccacttagaccttatagagtccgattactttggcctgaggtttatggattctgctcaggttgctcattggcttgatggtactaaatctataaaaaagcaggtaaagatcggaagcccttactgtctgcacctgcgcgtgaagttttacagctccgagcctaataacctgcgtgaagagctgaccaggtatctttttgttctgcagttgaagcaggatattctcagtgggaagttagactgcccattcgacactgccgtacagctggcagcatataatctgcaagccgaactcggcgattacgacttggctgaacatagccccgagctggtatcggaatttcggttcgtgccaatccagacagaagagatggagctggccatcttcgaaaagtggaaagagtatcgtggccagacacctgcacaggctgagaccaactacctgaataaggccaagtggctggagatgtatggcgtggatatgcacgtggtaaaagcaagggacggtaatgactatagcttaggtcttacaccgaccggtgtgctcgtcttcgagggtgacaccaagattggcttattcttctggcctaaaattaccagattagatttcaagaagaacaaacttactctggtcgttgtagaggatgacgaccaggggaaagaacaagagcatacattcgtcttccgcctcgatcatccgaaggcttgcaagcacctctggaaatgcgccgtggaacatcacgcctttttccgtcttaggggaccagtacagaaaagcagtcaccgaagcggctttatccggctggggtcaagatttcgatacagtggcaagacagaataccagaccacaaagacaaacaaggcccgtcggagtaccagctttgagaggaggccgagcaaaagatattctcgacgcaccctgcagatgaaggcctgcgcgaccaagccagaagagctgagcgtgcataacaatgtgtctacacaatctaacgggagccagcaggcttgggggatgagatctgccctaccggtgtcacctagtatcagctctgccccagtgcctgtcgaaattgagaacctgccccaatctccgggtacggatcagcatgaccgtaaatgtattcccctgaatatcgaccttcttaattctccagatcttctcgaagcaaccattggcgatgtgatcggcgctagcgataccatggaaacatcacaggcactgaatgacgtgaacgtggccacgcgacttcccggcctgggagagcctgaagtagagtacgagacactcaaggacacaagtgagaaactcaagcagctagagatggagaatagccctttgctctctcccagaagcaacatcgatgtcaatatcaactctcaggaggaggtggtgaagctgactgaaaaatgcttgaataacgtaatagagagccctgggctgaacgtgatgagagtccccccagactttaaaagcaatatactgaaggcccaggtggaagccgtgcacaaggtaactaaagaggacagtcttctctctcataagaacgctaacgttcaagatgccgcaaccaatagcgccgtcctcaacgagaataatgtgccgcttcccaaggaaagcctggagaccctcatgctgatcactccagcagactccggatctgtattaaaggaagctacagatgagctagacgccttgcttgctagtcttacagagaatctgattgaccacacggttgctcctcaggtatcttcaacttccatgattactccgaggtggattgtgcctcagtcgggcgccatgtccaacggcctggctgggtgtgaaatgttgttaactggaaaggaaggacacggcaataaagacggaatctcgctcatcagtccgccagcccccttcttggtggacgccgtcacatcctccggcccgattctggctgaggaggcagtgctaaaacaaaagtgccttctcacaacagagttgtag

SEQ ID NO: 116004 - DNA, 1518 bp, synthetic construct
  misc_feature 1..1518: note = Description of Artificial Sequence: Synthetic coding sequence
  source 1..1518: mol_type = other DNA
atgttgtcgtttttcagaagaaccctcggtcggcggagcatgagaaaacacgctgagaaggaaagactgcgggaggcacagcgcgccgccacacatatcccagccgcaggagacagtaaaagcatcatcacttgtcgggtttccctgctggatggaacagatgtgagcgtagacctgccaaagaaggctaagggccaggagctctttgaccagatcatgtatcacctggacctgatcgaaagcgactacttcggcctcagattcatggactcagcccaggtggcccattggctggatggaacaaagtctatcaagaagcaggttaagattgggagcccctattgcttgcatcttcgcgtcaagttctattcatccgagccaaataacctaagagaggagctcaccagatatttgttcgtgctgcagttgaagcaagacatactttcgggaaagctggactgtcctttcgatacggctgtgcagctggcggcttacaacctgcaggctgaactcggagattacgatctcgctgaacacagtcccgagcttgtaagcgagttcagatttgtgccaattcagacagaggaaatggaattggcaatctttgaaaagtggaaggagtataggggccagacaccagcacaggccgagacaaactacctgaacaaagctaaatggctggagatgtacggagtcgatatgcatgtagttaaggcgcgcgacggtaacgactatagcctgggtctgacccccacaggagttctggtgtttgaaggggacaccaagattggattattcttttggcctaagattactcgcctcgatttcaagaagaacaaactgacactcgtcgtagttgaagatgatgatcagggaaaagagcaggaacatacttttgtctttcgcctcgaccaccctaaggcttgcaaacacctttggaaatgcgcagttgagcaccacgcattctttcgcctgcgaggcccagtccaaaagtcctctcatcggtctgggtttatccgactcggctcccgctttcggtattccggcaaaacagaataccagacgacaaagactaacaaggcacggcgatcaacttcctttgagcgccggccttcaaaacgatattctagaagaacccttcagatgaaggcatgtgctaccaagccagaggagttgagtgtgcacaacaatgtctccacccaaagcaacggctcacagcaggcctggggcatgaggtcagccttgccggtgagcccctccatttccagtgcgcctgtgccagtggagatagagaacctaccacagtctcccgggacagaccagcacgacagaaagtggctcagcgcagcctccgattgttgccagcgtgggggtaatcagtggaatacacgagctctgccccccccacagactgcccacaggaactatactgactttgtgcacgagcataacgtgaaaaatgcagggatccggcatgacgtccactttcccggtcatactgctatgacggagatttag

SEQ ID NO: 116005 - DNA, 1518 bp, synthetic construct
  misc_feature 1..1518: note = Description of Artificial Sequence: Synthetic coding sequence
  source 1..1518: mol_type = other DNA
atgctgtctttttttagaagaacattgggaagaaggtcaatgaggaaacacgccgagaaggagcggcttcgggaggcccagcgggcagccactcacataccagccgccggggactcgaaaagtattatcacgtgtagggtgagcttgctggatgggactgacgttagtgttgatctgcctaagaaggcaaaggggcaggaactctttgatcagataatgtatcatctggatttgatagagagcgattatttcggtctccggtttatggattctgcacaggtagctcactggttggatgggactaagtctattaaaaaacaggtaaaaataggatctccttattgtctccatcttcgggtgaagttctactcatccgagcccaacaatctgcgggaagagttaactcgttatctgttcgtgctgcagctgaaacaagatatcctgtctggaaaactggactgtccctttgacaccgccgtgcagttggcagcatataatttgcaggcggaactgggagactacgatctcgccgaacatagtcccgagcttgtgagcgaattccggttcgtcccgatacaaactgaggaaatggaattggccatattcgagaaatggaaggagtacagaggccagacacccgcacaagctgagactaactatctgaacaaagccaagtggctggagatgtatggtgttgacatgcacgttgtgaaggcaagggacggcaacgattactctttagggttaactcccacgggagtgttagtatttgaaggggatactaaaattggcctgtttttctggccgaagattacacggctggacttcaagaaaaataagctgaccctagtggtcgtggaagatgatgatcagggaaaagagcaggagcacacattcgtattccggctcgaccaccccaaggcatgtaagcacctgtggaagtgtgcagtggagcaccacgccttttttcggctgcgcggccccgtgcaaaaatccagccatcgctccggttttattcggttgggatccagattcaggtattcaggcaaaaccgagtatcagaccactaagacaaacaaggccaggaggtcaacttccttcgaacgacgccccagtaagagatattctaggcggactctccagatgaaagcctgtgccaccaaacctgaggagttgtccgtgcacaataatgtgtccacccagtccaatgggtcccagcaagcctggggcatgagatcggcgctgcccgtatccccaagcataagcagcgcacccgtgccagtcgagatagagaatctgcctcagagtccagggaccgatcagcacgatagaaagtggttgtccgcagcaagcgattgctgccagcgcggcggtaaccagtggaatacccgcgctctgcctccaccacagaccgcccacaggaactacaccgactttgtgcacgagcataatgtgaaaaacgccggcataaggcacgacgtgcactttccaggccatacggccatgacggagatctag

SEQ ID NO: 116006 - DNA, 2064 bp, synthetic construct
  misc_feature 1..2064: note = Description of Artificial Sequence: Synthetic coding sequence
  source 1..2064: mol_type = other DNA
atgttgagctttttcaggcgcactctgggaaggaggagcatgcgtaagcacgcagagaaggagaggttgcgggaagcccaacgggctgcaacacatattcctgcggctggcgactccaaatcaatcattacttgtcgagtgagcttactggacggcacggacgtgtctgtggatctcccaaagaaggcaaaaggccaagaactgttcgatcagataatgtaccacctagatctaatagagagcgattacttcggcctcaggttcatggacagcgctcaagttgcccactggctcgacggaactaagtctattaaaaaacaggtgaagataggctcaccctattgtcttcacctccgggtgaaattttactcttccgagcctaacaatctgcgggaggagcttaccaggtatctcttcgttctgcaactgaagcaggatattctgtctgggaaactggattgtccattcgatacggcagtacagctcgctgcctacaacctgcaggcagaactcggcgattacgaccttgctgaacattcaccagaattagtgtctgagtttaggtttgtgcccattcagacagaagagatggaactggccatctttgagaagtggaaggaatatcgcggccaaacacctgcccaagccgagaccaactatcttaacaaagcaaagtggttggaaatgtacggggtggacatgcatgtggtgaaggccagggacgggaatgactacagtctgggtcttacacccacgggagttcttgtttttgagggagacaccaaaatcggtttattcttctggccaaagatcactaggctggatttcaagaagaataagctgacattggtcgtcgtggaagacgacgatcaggggaaggagcaagagcacacgttcgttttcaggctcgaccatccaaaagcgtgtaaacatctctggaaatgcgcggtggagcatcacgccttctttcgtctgcgagggcccgtccagaagtcctctcatcggagcggctttatccggttgggatctaggttcaggtactctggaaagacagaataccagaccaccaagaccaataaggcaagacggtcaactagtttcgagcgccgaccctcaaagcggtatagtagaaggactctgcagatgaaggcttgcgcgacaaaaccagaggagctgagcgtgcataataacgtgtccacacagtcgaacggtagccagcaagcttggggaatgcggtctgctctgcctgtctctccctccataagctccgcaccagtccccgtggaaattgagaatctcccccagtcccccggaactgaccagcacgacagaaagtgtattcccctgaatatcgacttgcttaattcgccagatcttttagaagccacaattggggatgtgatcggtgctagcgatacaatggaaaccagccaggccctaaacgacgttaacgtcgctactaggctccctggtcttggagagcctgaggttgagtatgaaaccctgaaagatacttccgagaaactgaagcagctggaaatggagaatagccctcttttgtcacctcgatctaatattgatgtcaatatcaacagccaagaagaggtcgtaaagctgaccgaaaagtgtctgaacaatgtaatcgagagccctggcctgaacgttatgcgagtaccacccgatttcaaatcaaatatcttgaaagcgcaggtggaggcggtgcacaaggtgaccaaagaagacagtttgctcagccacaagaacgccaatgtgcaggatgccgcaaccaacagcgcagtattgaacgagaataatgtgcccttaccaaaagagagcctagagaccttgatgctgatcactcccgcggacagcggaagcgtgctaaaggaggctacagacgagctcgatgctctcttggcctctttgaccgagaatctgattgaccatacagttgccccgcaagtgtcctccacgagcatgatcacaccacggtggattgttccgctgtggtcccattttggacggcgatcctgccctgaagctgaggttttcaccgaccattag

SEQ ID NO: 116007 - DNA, 2199 bp, synthetic construct
  misc_feature 1..2199: note = Description of Artificial Sequence: Synthetic coding sequence
  source 1..2199: mol_type = other DNA
atgttgtcatttttcagacgcacactggggcgtagatcgatgaggaaacatgccgaaaaagaaagacttagagaggcgcaaagagcagcaacccatatccctgctgctggtgactctaagtccatcataacttgccgggtttccttattggatggcaccgatgtaagtgtggatctacctaaaaaagcaaagggtcaggaactctttgatcaaatcatgtatcacctcgatctgattgaaagtgattacttcggactgcggtttatggacagcgcccaggtggcccattggctcgatggcactaagagtattaaaaagcaggtgaagatcggctctccctattgtcttcacctgcgcgtcaagttttactcttctgaaccaaataatcttagggaggaactgacccggtatttattcgttttgcagctgaagcaagacattcttagcggtaagctggactgtccttttgacacagccgttcagcttgccgcatataacctgcaggcagagcttggggactatgatctggctgaacactcgcccgagcttgtgtccgagtttcggtttgtccccatacaaaccgaggaaatggagctcgcaatcttcgaaaaatggaaggagtaccgcggacagaccccagctcaggcagagaccaattacctcaataaggcgaaatggctggagatgtatggcgtggacatgcacgtcgttaaagcaagggacggaaacgattactcgttgggcctcacacctacaggcgtactggtcttcgagggagacacgaagatcggactgtttttctggccaaaaattacacgccttgatttcaagaagaacaaactcaccctggtagtggtcgaagatgatgaccagggcaaggagcaggagcacacgtttgtttttagactggaccatcctaaggcttgtaagcacctgtggaagtgtgccgtcgagcatcacgcattttttcggttaaggggccctgtgcagaaatctagccacaggtccgggttcattaggctcggctccaggttcagatactccggaaagacagaatatcaaacaacaaaaacaaacaaggccagacgaagcaccagctttgagaggagaccctctaagcggtactctcggaggactctccagatgaaagcatgtgccaccaaacctgaagagctgtcggtgcataataacgtgtcgacacagagcaatgggtcgcagcaggcgtgggggatgaggagtgctctgccagtgtctccgagcatttcctcggcccccgtgcctgtggagatcgagaacctcccccagtcgcctggaaccgaccagcacgacagaaaatgcatacccctaaacattgacctcctgaattcacctgacttgctggaggccaccatcggggatgtaatcggagccagcgatactatggaaacctctcaggccctcaacgacgtgaacgtagctactcggcttccaggtctaggagagcccgaggttgagtacgaaacgctgaaggacacttccgaaaaactgaaacaattagagatggagaattcacccctcctctcccctaggtctaatatcgatgtgaacatcaactcacaggaggaagtggtcaaactgacagagaagtgcctgaacaacgtgatcgaaagccccggcctgaacgtgatgcgagtgcctccagattttaagtcaaatatattaaaggcgcaggttgaggctgttcacaaggtcactaaggaagactctctgttgtcccacaagaacgcaaacgtgcaggatgcagcaacgaactctgctgtcctgaacgaaaacaacgttccgctccctaaggaatctttagaaacactgatgctcatcactccagccgactcaggctcggtcttgaaagaggctacggatgagctcgacgcactgctagcctccctcactgagaatttaatcgatcacaccgttgctccgcaagttagttctacatctatgatcacccctcggtggattgtgccttccggagccatgtcaaatgggctggctgggtgtgagatgctgcttaccgggaaggagggccacggaaacaaagatggaatttccctcatatccccccccgccccctttctggtagatgccgtgaccagctcgggcccaattctggccgaggaggcggtacttaagcagaagtgcctgctgacaaccgagctgtag

SEQ ID NO: 116008 - DNA, 2340 bp, synthetic construct
  misc_feature 1..2340: note = Description of Artificial Sequence: Synthetic coding sequence
  source 1..2340: mol_type = other DNA
atggaggagaaagactactcagaggcagacgggctctccgagagaacaactcccagcaaggcccagaagtctccacagaagatcgccaaaaaatataaatccgccatttgtcgagtcacactgctcgatgcgtccgaatatgaatgcgaggtagagaaacacgggagagggcaggttctgtttgatttggtctgtgagcacttgaacctgctcgagaaagactattttggcctgaccttctgcgatgccgacagccagaagaactggctggacccgtcaaaagagataaagaagcaaataagaagctcaccatggaactttgccttcacagtcaagttttatcctcctgatcccgcgcagctgaccgaggatatcacccggtactatctgtgcttgcagctgcgcgctgatatcataactggcagacttccttgctcttttgtgacacacgctttgctcggctcttatgcagtccaagctgagctgggtgactatgacgcagaagagcatgttggcaactacgtgagcgagctgcgctttgctccgaaccaaactcgtgagctagaggaacggatcatggagttacataagacgtacaggggcatgacgcccggggaggcagaaatccactttctggaaaacgctaagaagttatccatgtacggggtggacctacaccacgctaaagactctgagggaattgatattatgctgggggtgtgcgcgaacggtctgttaatttatcgagaccgcctccgtattaataggtttgcctggcccaagattctgaaaatcagctacaaaaggtccaatttctacatcaaaatcagacccggtgagtacgaacagttcgagtccaccatcggatttaaactgcccaatcatcgatctgctaagcgcctctggaaggtgtgtatcgagcatcacaccttctttcgtttggtgtccccagaacccccccctaaaggtttcctggtcatgggaagcaaatttcgttactccggccggacacaggcacagacacgacaggcctctgcccttatcgataggcccgcaccttttttcgaacggtcctcatcgaaaagatacactatgagtcggtctctggatggagcggagttctccagacccgccagcgtgagcgagaatcacgatgccggtcccgatggagacaagagggatgaggatggagaaagcgggggccagcggagtgaggcagaagaaggcgaagttcgcactcctaccaaaattaaagagctcaaattcttagacaaacctgaggacgtgcttctgaaacaccaggcaagcataaacgaactaaaacgcaccctcaaggagccaaattctaagctaattcatagggacagggactgggagagggagaggaggttgcccagttctcctgcgagccctagtcctaaaggaacgcctgagaaagcaaatgagcgcgccgggctgagagagggcagcgaagagaaggtaaaaccaccccgaccacgcgcacccgaatcagacacaggtgacgaagatcaggatcaggaacgcgacacagtatttttgaaggacaaccacctagccatcgaacgaaagtgttccagcattaccgtatcttcaacgtcaagcctcgaagccgaggtggacttcacggtcattggggactaccacggatctgcttttgaggatttcagccgttctctgcccgagttggatagggataagagcgactcagataccgaagggctgctattctccagagatctcaacaagggcgcaccctcacaggacgatgagagcggaggaattgaggactcgcctgaccgcggggcttgttccacgccagacatgccccagtttgagcccgtgaaaacagaaaccatgactgtcagcagcctggctatccggaagaagatcgagccagaagcagtcctacagacgcgcgtgagtgccatggacaacacccaagagaattctctcaagtctggaaagggcgctgccgcaatgatccctggccctcagaccgtggccacagagatccgttctctgtcacccattatcgggaaagacgtgctcacctccacatacggggcgaccgctgagaccctgagtacttcaacaacaacacacgtgacaaaaactgtgaagggtggattcagtgagacgcgaatcgaaaagcgaatcatcattacaggtgatgaggacgttgatcaggaccaggctttggcactggccattaaggaggccaagctgcaacaccccgacatgctcgttacaaaggcagtcgtgtacagagaaactgatcccagccctgaggaacgggacaaaaagcctcaagaatcctag

SEQ ID NO: 116009 - DNA, 2646 bp, synthetic construct
  misc_feature 1..2646: note = Description of Artificial Sequence: Synthetic coding sequence
  source 1..2646: mol_type = other DNA
atgaccaccgagaccggtcctgatagcgaggtgaaaaaggcacaggaagaagcaccacagcagcctgaggctgccgctgcagttacaacacctgtgacccctgccggacacggacacccagaggccaacagcaatgaaaagcatccttctcagcaggatactcgacctgccgagcagtcccttgacatggaagagaaagattactctgaggccgatgggttgagcgagaggaccaccccctctaaagcacagaagtctccccaaaagatagccaaaaagtacaaaagtgctatctgtagggtgacattgttagatgcgtccgagtatgaatgcgaagtggaaaaacacgggcgaggacaagtcctgttcgacctcgtctgcgagcatctaaatctgctggaaaaggactactttggcttgaccttttgcgatgcggacagccaaaaaaactggcttgatccgagcaaagaaatcaaaaagcaaattaggagcagtccctggaacttcgcattcacagtaaagttttacccccccgatccggcccagttaaccgaagatattacacgatattacctgtgcctgcagcttagagccgatattattacgggacgccttccatgcagcttcgtgacacatgcattactgggatcttacgccgtgcaagccgaactcggcgattacgatgcagaagagcacgttggcaactatgtgtctgaactgagattcgctcccaatcaaacacgcgagctggaagagcgcataatggaactccataaaacatacagggggatgacacctggggaggccgagatccatttcctggaaaatgcaaaaaaactttccatgtacggcgtcgaccttcatcatgccaaggactcggaagggattgacattatgttgggagtgtgtgccaatgggctgcttatctaccgggaccggctgcggatcaatcggtttgcctggcctaagatactgaagatctcctataaaaggtccaatttctatatcaaaattagacccggagagtacgagcaatttgaatctaccattggatttaaattgcccaaccaccggtccgctaagcgactgtggaaagtgtgcatagaacatcacaccttctttagactcgtcagtccagagccccccccaaaagggttcctcgtgatgggaagcaagtttcgttactccggtaggacacaggctcagacacggcaggcctccgccttgatcgatcggcccgcacctttttttgagcggtcttcaagcaaaagatacactatgtcccggtcgcttgacggggccgaattttcccggcccgcaagtgtttcggagaatcatgatgcaggaccggacggggataagcgtgatgaggatggggaaagtgggggccagcggtccgaggctgaagagggcgaggttcgtacccctaccaagattaaggaactcaagcctgaacaagagacgaccccccgacacaagcaggagttcctggataaaccagaagacgtactcctgaagcaccaggcatctattaatgaacttaaacgcacgctgaaagagcccaattcgaagttgattcatcgagatagagactgggagagggaacgcagattaccaagcagccctgctagtccatccccgaaggggacccctgaaaaggcaaacgagcgtgccggcctccgcgaaggatcagaagaaaaagttaagcctccccgacctcgagcgcccgaaagcgacacaggagatgaggaccaggatcaggaaagagacaccgtctttctgaaagataatcacctggcgatagaaagaaaatgcagtagtatcactgtgtctagtacttcatcgcttgaagctgaggtagacttcaccgtgatcggtgattatcacgggtctgcatttgaagacttctctcgctccctgccagagctggatagagacaagagcgacagcgatactgagggactcttattttcccgcgatttaaacaagggcgcccctagccaagacgatgagtccggtgggattgaagatagccccgaccgcggagcatgctccacaccagatatgccccaattcgagcctgtgaagaccgagacgatgacagtgtcatctcttgcgatcaggaaaaagatcgaaccagaggctgttctgcagaccagagtgagcgctatggacaacacccagcaggtggacggatccgcgtctgtcggcagggaattcattgcaactacaccctcaatcaccaccgaaacgatatccacgaccatggagaatagccttaaaagcgggaaaggtgccgcagccatgatccccgggccacagacagtggccactgagatccggtcccttagcccgattatcgggaaagatgttctgacgagtacttacggggctaccgctgagaccctgtccacctcaacgaccactcatgtgactaagactgtgaaaggcggatttagcgagactcggatagaaaagcgtatcattattacaggagatgaggatgtggaccaggaccaggccttagccctagcaattaaggaagcaaaactgcagcatccagacatgctggtgaccaaggccgtcgtctaccgggagactgatccaagccccgaggagagggacaaaaagccacaggagagctag

SEQ ID NO: 116010 - DNA, 2877 bp, synthetic construct
  misc_feature 1..2877: note = Description of Artificial Sequence: Synthetic coding sequence
  source 1..2877: mol_type = other DNA
atgtcgagatcattggatggtgctgaattctcacggccagccagtgttagtgagaatcacgatgctgggcctgatggtgacaaaagagatgaggacggggagtccgggggccagcggtctgaggccgaggaaggagaagttcggacccctactaaaatcaaagagttgaaaccagaacaagagacaactccgcgccataagcaggaatttctggataagccagaggatgtgctgctgaaacatcaggcttcgataaatgagctcaagcgaacactgaaagaacccaatagcaagctgatccatcgcgacagagattgggaaagggagcgccggctccctagcagcccagcttccccttctccgaaggggacccccgagaaggctaacgaaagtcagagaacacaggatatctcgcagcgcgacctggtacccgagcccggggccgcggccgggttggaagtattcacacagaaatcccttgccgcaagccccgagggcagtgagcactgggtctttatcgaaagagaatacacacgacccgaagaactgggcttgcttaaagttacaacgatgcagcaggaggagaggcaggcaggcctggccggaatcttagctaacggccgtttatccaaggtggacgttttggtagataaattcaaagtagaagttgctaccgaggagatggtcggaaatcgaagggctaacacgcaacagcagggtaagatgatcgcctcacctgaggacttcgagtcagtaggtgaagagggaccgtggatcagggagtcacctgggggggcggccctggctagtggtagaacgctagccgaaaagttgctggaaggctctgaactgagggcggacacccgtgaagccactatacgaaacagatgcatgtctgatggccagcctgagggccaaaccgaactccgtaagggcctggaagaaccgcacacctgcgggaggcccaccgcacccggaacccgacccgctgaagtggacgtactgtctcctgctagcgacaagggagggctgcaatctttcctgctggatcctgcacatgccgaggcgcgcgcggagctgtccaacgagacagatacctccttcgccgagcgtagcttctatcttaactatgaggagaaagactctgaggaccaggttctgccaccccccctggaagagcgaaaggggagactggatgcacctcctggaggtgagcctcgccctacgctgaactctctcgacttgcgagtttctgccgcagctagcagccggtcaaaagacgaggcacatatgacctcccctaaggaaggggctggtacacccaaaaatcacgggggaccaggtgatctgaaaggatctcccgctggtcagacatttgctgagggctgggaagatgcacagtggggggtagaaggcgaatttcctcaccttacagctagtgccgcacgagaggaaggaacgccggtatccggagatctgttagggaaggctgaggagtctcccactgaagagctgaaaaagcatcctcctcacagaggtcaaggtgtccatcccgaccctcaagcctgtgctctgcccagggccatcccactcaacgtgcgaaaacccgtaaaaccggatcgcggtaactttccgccaaaagagcggggcgtggtccctacgcagaagggtggcgcagagctcaaagatcgagaggcttctgcttttctgcacatggaggtaattattccactgcccgcctcaccaggtcactcagaggatctcgcagcactggaggaggcatctcccagtcctacctctcatgggtctggggagccttccgagcttcgagaaccattcctaagacacgtgcacctgagcaaagccagcccagaacccaaagatcaggtgggcttcgtcgtgtcacccgccaccgggggagagcgccggcccccgcctatcacttcccggaagccccgtgtggttcccgaggaggccgaaggccggatcccacttggtttcggattcccctccggtaagcgcagagaaatgacaagcttccaggccggagaccaggaagggtccctagaggacatctcaaaaacctccgtggctaacaagatccgcatcttcgagacacacggggctgaaacccgcaggatgtcagaaggtgaagctcgcagcttgcccaacgacgtgtctagcgaggcacccgtgggccaagcggagcagcagcggtccacactgtctgaccttggtttcgcacaacttcagccaccaggggacttcgcctctcctaaggctacacactcaaccgtaatacctctcgcgacccggcattttagagaggacacaagtgcaagctaccaggaggctcataccgagctcgagcctgtttcaccaaattccgggtgtgaaaccacactggccgaggccacgggtactggcaacaaaagtggagatgcagtgagagaggagaagcggtccacaaacctcgccgcaaacacacccggcaaaggtgggcgccttagattcgcctcgccctccgggccacagcgggctggtctgcgggaaggaagtgaagagaaggtaaaacccccgcggcctcgcgcccctgaaagcgacaccggcgacgaagatcaagaccaagaacgcgatacagttttcttaaaggacaaccacctcgccatagagcgcaaatgtagcagcattactgtgagctccacctcaagtctcgaggctgaagtggatttcacagtgataggggactaccacggtagcgcgttcgaggacttcagccgttccctccctgagctagatagagataagagtgactcggacacagagggactgctgttcagccgcgatttaaacaagggcgccccaagccaggactag

SEQ ID NO: 116011 - DNA, 2643 bp, synthetic construct
  misc_feature 1..2643: note = Description of Artificial Sequence: Synthetic coding sequence
  source 1..2643: mol_type = other DNA
atgaccactgagacaggtcccgatagcgaggtgaagaaagcacaagaggaagcgcctcagcagccagaggctgcggccgccgtaactactcctgtcaccccagccggccacgggcatcctgaggctaatagcaatgagaagcacccatcgcagcaggatacgaggccggccgaacaatctctggatatggaggaaaaggactattctgaagcagacggcctctctgaaaggaccactccttctaaggctcagaagtctcctcagaagatagctaagaaatacaaaagcgcgatctgcagggtcactctcttagatgctagcgagtatgaatgtgaggtcgagaaacatggtagaggacaagtcttgttcgacctcgtgtgcgagcatttgaacctgctggagaaagactactttgggctgactttctgcgacgctgattcccagaaaaactggctggacccctccaaggagattaagaaacaaattagatcttccccatggaactttgccttcaccgttaagttctacccacccgatcccgcacagctgaccgaggatatcacacgatactatctgtgtctgcagctgcgggcagacattataaccggccgattgccttgcagctttgtcacccatgctttactcggatcctacgctgtgcaggccgaacttggcgactatgacgccgaggagcatgtcggaaactacgtctccgaactgaggttcgctcctaaccaaactagagagctagaagagcgcataatggagcttcacaagacgtatcgtggcatgacacccggcgaggcagagatccacttcctggaaaacgcgaagaaactaagcatgtacggggttgacttacaccatgcaaaggactcagagggcatagatataatgcttggagtgtgcgccaatggactattgatttaccgcgatcggcttcgaattaatcggttcgcgtggcctaagatcctgaagatttcttataagcggtccaacttttacattaaaatcagacccggcgagtatgagcagtttgagtccacaataggattcaagctgcccaatcatcgatctgccaagcgcttatggaaagtctgcatcgaacaccacaccttctttcgcctggtttcacctgagccccccccgaaaggcttcctcgtgatggggagtaaattcagatactctggacgcacccaggctcagacacgccaagccagcgctctcattgacagacccgcaccattctttgagagatctagtagcaaacggtatactatgtctaggtcccttgacggcgccgaattcagtcgccccgccagcgtctcagaaaaccacgatgctgggcccgacggggataaacgcgatgaagacggggagtctggtggtcagcgctctgaagccgaagaaggcgaggttcgcaccccaaccaaaatcaaagagcttaagcctgagcaggaaacaacacctaggcataaacaggaattccttgacaaaccggaggacgtgttgcttaagcaccaggccagcattaacgagctgaagcgcaccttgaaggaaccaaattcaaaactgatccacagagaccgggactgggagcgcgaacgtagactgccatctagtccggctagtccctcaccgaaggggacacccgaaaaggcaaatgaaagagccggcctgagggagggctcagaagagaaagtgaagccaccacgacccagagcaccggagtctgacacaggcgatgaagaccaggatcaggagcgggacaccgtattcttgaaagataatcacctggcaattgagcgcaaatgctcaagtatcactgtcagctccacctcttcactagaagctgaagtcgatttcacagtcatcggcgactatcacggcagcgcctttgaggacttctcgcggtcccttcctgagttggacagggacaaatccgacagcgacaccgaaggactactgtttagccgggatttgaataagggagctcctagtcaggatgatgagtctggaggtattgaagattctcccgatcgtggtgcctgctctactcccgacatgcctcaatttgaacctgtgaaaactgagactatgaccgtgtccagtttggctatcagaaaaaaaatcgagccagaggccgtgctccagacacgcgtctctgccatggataacacccaagtggatggaagtgcttctgtcgggcgggagtttatcgcaaccaccccctccattacaaccgagactatttcaacaactatggagaattcccttaagagcgggaagggcgctgccgccatgatccctggcccgcagaccgttgctacagaaatccggtcgctgtctccaatcatcggaaaagacgttctgacttcgacctatggggccacagctgaaactctgtccacttctaccaccacacacgtgaccaaaacagtcaaaggagggttttccgagacacggatcgagaagcgaattatcattacaggagacgaagatgtggaccaagaccaggccctggccctggctataaaagaggctaagctccaacatcctgacatgctcgttacaaaagctgtcgtttatcgcgagacagatccaagccctgaagagcgcgataagaaaccacaggaatcatag

SEQ ID NO: 116012 - DNA, 600 bp, synthetic construct
  misc_feature 1..600: note = Description of Artificial Sequence: Synthetic coding sequence
  source 1..600: mol_type = other DNA
atggaggaaaaagattatagtgaagctgatgggctatcagaacggacaacaccgagcaaggctcagaaatcaccacagaagatagctaagaagtataaatcagccatatgtcgtgtgacactgctggatgctagcgaatacgaatgcgaagttgaaaaacacgggcgcggacaggtactgtttgacctggtgtgtgagcacctgaacttactggagaaagactatttcggcttgacgttttgtgacgccgattcacagaagaactggttggacccatctaaagagataaagaagcagataaggtcctcaccctggaattttgctttcacagtgaagttctaccctccagaccccgctcagctaacagaggacatcactcgctattacctgtgtcttcagctgagagccgatatcataacagggagactgccctgtagtttcgtgacccatgcgctgctgggatcttacgccgtgcaggcagaactgggcgattatgacgccgaagaacacgtgggtaactatgtgagtgagctgcggttcgccccgaaccagaccagagaattagaggagagaattatggaactgcataaaacctactag

SEQ ID NO: 116013 - DNA, 2106 bp, synthetic construct
  misc_feature 1..2106: note = Description of Artificial Sequence: Synthetic coding sequence
  source 1..2106: mol_type = other DNA
atggttttcctaggacgaattaatgaggtagagcccgccaaaggactagcggaatctcttgcccctactgaacgctctgttaaatccctcgacatggaagagaaagattactccgaggcagatggactgagtgagagaacaacaccttccaaggctcagaaatccccccagaaaatcgccaagaagtataaatccgcaatctgtcgggtgacactgctagacgcttccgagtacgagtgcgaagtggaaaagcacggtagaggtcaagtgctgttcgacctggtgtgtgaacacctgaatctgctagagaaggactacttcggcctgacgttttgcgatgccgactcacagaaaaattggctggatccatcaaaggagatcaagaaacagatcagaagcagtccctggaatttcgcttttactgtcaagttttatcctcccgaccccgcccagctcaccgaggatataacacgatattacctgtgtctacaattgcgggccgatattattacgggcagactgccttgcagctttgtcactcacgcactcttgggctcatacgccgtgcaggctgagctgggagactacgacgcagaggaacacgtcggcaattacgtttccgaactcagatttgcgccaaatcagaccagggaattggaggagaggatcatggaattacataagacctacagggggatgacacccggagaggctgagatccacttcctcgaaaacgccaagaaactttcaatgtacggggtcgacctgcatcatgctaaggacagcgaaggaatcgacattatgcttggtgtctgcgccaacggactcctgatctatagagatagactccgaatcaatcggttcgcatggcccaagatccttaagattagttacaagaggagtaacttttatattaaaattcggcccggcgagtatgaacagtttgagagcaccatcggctttaagctgcctaaccaccgttctgctaagcggctgtggaaggtgtgtatagaacatcacacgttctttagactggtgtcacctgaaccacctccgaagggctttctggtgatgggctcaaagttccgatacagcgggagaacccaggcacagacacgacaggcctctgcactcatagaccggcccgcccccttctttgagaggagttcttccaaacggtatacaatgagtcggtccctcgacggcgcagaattcagcagacctgcgtctgtatccgaaaaccacgacgccggaccagatggggataaaagagacgaagacggcgagtccggcggccagcgcagtgaggcggaagaaggggaggtgagaacacctacaaagattaaggagctgaagtttcttgacaagcccgaagatgtcctgttgaaacaccaggcctcaattaatgagctgaagcggactctcaaggagcccaattctaagctgattcacagagaccgagactgggaacgtgagagacggctccccagttctcccgccagccctagccccaaggggacccccgagaaggctaatgaacccgtgaagacggagacaatgaccgtgtcctcattggctatccgcaaaaaaatcgaacctgaggccgtgctgcagactcgggtaagcgccatggataatacccaacaggtggatgggtctgcttctgtcggacgggaatttatagccacgaccccatccatcactaccgaaaccattagcacgactatggagaactccctgaaaagcggaaagggcgcagctgccatgattcccggcccccagactgtcgcgactgagattcgctctctgtcccctatcattggcaaagacgtcctgacttctacttacggtgcaaccgccgaaacactctccaccagtacaaccacacatgtcacgaaaaccgtgaaaggcggcttttcagagactagaattgaaaagaggattatcatcacgggcgacgaggacgtggatcaggatcaggcacttgccctggccatcaaggaggcaaagttgcagcatccagatatgctcgttactaaagctgtggtttaccgtgagactgatccatctcccgaggagagggacaagaagccacaggagtcatag

SEQ ID NO: 116014 - DNA, 2319 bp, synthetic construct
  misc_feature 1..2319: note = Description of Artificial Sequence: Synthetic coding sequence
  source 1..2319: mol_type = other DNA
atggaggagaaagactactctgaagcggacggcctgtccgagaggactactccttcaaaggctcaaaagtccccgcagaaaatcgccaagaagtataaaagtgccatttgcagggtcaccttactagacgcttccgagtacgaatgcgaagtggagaattggctcgatcctagtaaggagatcaagaagcagattaggtccagtccatggaatttcgccttcacggtgaaattctacccccccgatcccgcccaactcacggaggatatcaccaggtactatctgtgcctgcagctgcgggccgatatcatcactggaaggctcccttgttctttcgttacacacgcattgttgggatcatatgccgtccaggctgaactcggcgactacgatgccgaagagcatgttggcaactatgtcagcgaactccggttcgcccccaatcagacaagagagctggaagagagaataatggagttgcacaaaacctatcgcgggatgacaccaggggaggccgaaatacacttcctggagaatgctaaaaagctgagcatgtatggcgtggatcttcatcacgctaaggactcggagggcatcgatattatgctcggggtgtgcgccaatggtctcctcatttatagggaccgccttcgcattaatcgtttcgcctggccaaaaatcttgaaaattagctacaaacggagcaatttttacatcaaaatacgccctggagagtacgaacagtttgagtccactattggatttaagctccctaaccatagaagcgcgaagcgactgtggaaggtgtgtatcgagcaccacactttctttcgcctggtgagcccagaaccaccccctaagggctttctggtaatgggttccaagttccgctattcaggaaggactcaggcgcagacaagacaggcgtcagctctgattgaccggccagccccttttttcgagcggagcagctccaaacgatacacaatgagtagatcattggatggtgcagagtttagtcgtcctgcttccgtgtccgaaaaccacgatgcgggacccgacggcgataaacgggatgaagatggagaaagcggtgggcagaggagcgaggcagaagagggcgaggtgcgaacgccaacaaaaattaaagagctcaaattcttggacaaaccagaggacgtcctgctgaagcaccaggcttccattaatgagctcaaacgcaccctgaaggaacctaactccaagctcattcaccgtgatcgcgattgggaacgagagcgccgcctgcccagttcaccagcaagtccttctcccaaaggcacaccagagaaagctaacgagagggctggacttagagagggctcggaggaaaaagttaagccaccaaggccccgggctccagagtccgacacaggtgacgaggaccaggaccaggaacgcgacaccgtctttctgaaggataaccatctggccatagagcgtaaatgcagctctattaccgtgtcttccacttcctcccttgaggctgaagtggactttaccgtgattggagattaccacgggtcagccttcgaggacttcagccgctcactccctgagctggatcgggataaatccgactcagacactgaggggctcctcttctcccgcgatctcaataagggcgctcccagccaagatgatgagtccggcggcatcgaggatagccccgacagaggggcctgttcgactccagatatgcctcagtttgagcccgtcaaaaccgagacaatgaccgtgtctagccttgccatccgcaagaaaattgaacccgaggccgtgttgcagaccagggtgtctgcaatggataatacacagcaggtggacggtagcgccagcgtgggtcgggagttcatcgcaaccacaccttctatcacgaccgagaccatttctacaaccatggaaaatagcctgaagagcggtaagggggccgccgctatgatcccggggccccagactgtagcgaccgagatccggagcctcagcccaatcatcggcaaggacgtcctgacctcgacctatggcgctactgccgaaactctaagcacaagcacaaccacccacgttacaaaaacggtcaagggtgggttctcggagacccggatcgaaaagagaattattatcacgggggacgaggacgtcgatcaagaccaagcacttgccttggccatcaaggaggcgaagctccaacatcccgatatgctcgtcaccaaggcagtcgtgtatcgcgaaaccgatccttctcctgaggagcgagataagaagccgcaagaatcctag

SEQ ID NO: 116015 - DNA, 2319 bp, synthetic construct
  misc_feature 1..2319: note = Description of Artificial Sequence: Synthetic coding sequence
  source 1..2319: mol_type = other DNA
atggaagaaaaagactactcagaggcagacggtctaagtgaaaggaccacgcccagcaaagcccagaagagtccccagaagatcgcaaagaaatacaaatctgccatttgccgcgtcacactcctggatgcatctgagtacgagtgtgaagtggagaattggctggacccatccaaggagatcaagaagcaaatcagatcttccccttggaacttcgcctttactgtgaagttctatccgccagaccctgcccagctgaccgaggacattacccggtactacctttgtctccaacttagagccgatataattaccgggcgcctgccgtgttcttttgtaacccatgcgctcctggggtcctacgccgtgcaggccgaattaggcgactatgacgcggaagaacatgtgggaaactatgtgtctgagctgagattcgcaccaaatcaaacacgcgaattggaagagagaataatggagttacacaaaacatacagagggatgacaccaggcgaagctgagatccactttctggagaacgccaagaagttgtctatgtacggtgttgacctgcaccatgctaaagactccgagggcattgacataatgcttggcgtctgcgccaatggtctgctgatttacagggaccgactgagaattaatcggttcgcatggcctaagattcttaaaatttcctacaaacgcagtaatttctacataaagattagaccaggggagtatgaacagttcgagtcgaccatcggtttcaagctgccgaatcatcggtccgctaaacggctgtggaaagtctgcattgaacatcataccttctttcgacttgtgtctcctgagccgcctcccaagggctttctggtgatgggatcaaagttccggtactcaggtcggacacaggcgcagacgcgacaggcgtctgcactcatcgatagaccagcccctttttttgagcggagtagttcaaaacgctatacgatgtcgcggtcactggatggagccgagttctcacggccagccagtgtgagcgaaaaccacgacgcaggccccgatggtgacaagagggatgaggacggagagtctggggggcagcgtagtgaggctgaagaaggcgaggtgcggaccccaaccaagatcaaggagttaaaatttctcgataaacccgaggatgtgttgctcaaacatcaggcctcaataaatgaactgaaaaggactttgaaggaaccgaacagtaaactgattcatagagacagggactgggaacgagagcgacgcttgccgagcagccccgccagccccagccctaaaggaactcccgagaaggccaacgagcgagccgggctcagggaagggagtgaggagaaggtcaaacccccgcgaccgagggcacccgagtctgatacaggcgatgaagatcaggaccaggagcgtgatacagtgtttctgaaggataatcatcttgccatagaaagaaaatgctccagtattacagtttcttcaaccagcagcctagaagccgaggtcgactttacggtcattggtgactaccacggctctgccttcgaggacttctcccggtctcttcctgagctggaccgggacaagtctgactcagacacagaaggtcttctattttcacgagatttgaataaaggcgccccctcacaggacgatgaaagtgggggtattgaagactcccctgaccgcggcgcttgttcgaccccagatatgccccagttcgaaccagtgaagacagaaaccatgactgtgtcgtcactggccatcagaaagaaaatcgagccagaggctgtgctccagacacgggtatcggccatggacaatacccagcaggtggatgggtccgccagcgttggccgagaattcattgctactacaccatccattacaactgagaccatctccacaacaatggagaacagtttaaagagcggcaagggagccgctgccatgataccaggaccacagacagttgctacggaaattcgcagtctctcccctatcattggaaaggacgtgctgactagcacttatggagccacagccgaaaccctgagcacgtcaaccaccacacatgtcacgaagaccgttaaagggggattttctgaaaccaggattgaaaaaagaattattattaccggtgatgaagacgtggatcaggaccaggcgctcgccctcgccataaaagaagctaagctgcagcaccccgatatgctggttacaaaagctgtagtgtatcgggagaccgacccgtctcccgaagagcgggacaaaaaacctcaggagtcttag

SEQ ID NO: 116016 - DNA, 600 bp, synthetic construct
  misc_feature 1..600: note = Description of Artificial Sequence: Synthetic coding sequence
  source 1..600: mol_type = other DNA
atggaggaaaaggattactctgaagcagacggactgtccgagcgtactactccctctaaagcccagaagtctcctcagaaaatcgctaagaagtataaatccgctatatgtagagtgactctgctggatgcctcagagtacgagtgtgaagtggaaaagcatggtcgcggccaggtcctgttcgacctcgtgtgcgaacacctcaacttgctcgagaaggattattttgggctgaccttttgtgacgctgattcacagaagaactggctggaccccagtaaggagatcaagaagcagatacgatcgagtccctggaattttgcttttaccgttaaattctaccctcccgacccggcccagctcacagaggacatcacacgatactacctttgcctccaactgcgtgccgatatcattaccgggcgtttgccttgttcattcgtcacacatgctcttctgggatcctacgcagtccaggccgaactgggcgactatgatgccgaggagcacgtcggaaactatgtctcagagctacgcttcgctcctaaccagacaagagagctagaagaacggataatggagcttcataagacctattag

SEQ ID NO: 116017 - DNA, 2385 bp, synthetic construct
  misc_feature 1..2385: note = Description of Artificial Sequence: Synthetic coding sequence
  source 1..2385: mol_type = other DNA
atgacgactgaaactggccctgatagtgaagtgaagaaggcccaagaagaggccccccagcagcctgaggccgcagcggctgtgactaccccagtcacccctgcaggacatggccacccagaggctaacagcaatgagaaacaccccagccaacaggacacacgtcctgctgagcagtctctggacatggaagaaaaagactattcggaagcagacgggctgtccgagcgaaccaccccttccaaagctcagaagtctccacaaaagatcgcaaagaagtataaatccgccatatgtcgggttactctcctcgacgcctctgaatacgaatgtgaagtggaaaagcatggtcgggggcaggtcttgttcgacctggtgtgcgaacacctcaacctgctcgagaaagattactttggtctgacattttgtgatgcggactctcaaaaaaactggttggatccttccaaggagatcaagaaacaaatacgaagcagcccatggaatttcgcattcactgtaaaattttacccacccgaccctgcccaacttacggaagatattacacggtactacctgtgtctgcaattacgcgccgacatcatcactggccgcttgccctgttcttttgtgactcacgccctcctggggtcctacgctgtgcaggcagagttgggtgattacgacgccgaagagcacgtggggaactacgttagtgaattaaggtttgcccccaatcagactcgcgaactggaggaacgcatcatggagctgcacaagacgtacaggggaatgacgccaggagaagctgagatccattttttggagaatgcaaagaagctgagcatgtacggagtggatctgcaccacgctaaggactcagaaggcattgatatcatgttgggagtgtgtgccaatgggttgctaatataccgtgatcgccttaggatcaaccggtttgcttggccaaagattctaaaaatctcctataagcgctccaatttttacatcaagatccgacctggtgagtatgaacagttcgaaagcactataggctttaaactgcccaatcataggtcggctaagcggctgtggaaggtttgcattgaacaccatacctttttcaggcttgtaagccctgagcccccgccaaagggcttcctggttatgggaagcaagtttcggtattctggtcggactcaggctcaaacccggcaggccagcgcactgatcgatcgcccagctccattttttgagagatcatcctcaaagcgatacacaatgtcacgatccctggacggggccgagttcagccgcccagcctcagtcagcgagaaccatgacgctggaccagatggagacaagcgggacgaagacggtgagtcgggcggccagaggtccgaggccgaggagggcgaggtgaggacaccaaccaaaataaaggagctcaagcccgaacaggaaaccacccccagacataagcaggaattcctagacaaacccgaggacgtgttactgaagcaccaggcttccatcaatgaactcaagcggacactcaaggagcctaattcgaaactcatccacagggaccgagactgggagcgagaaaggagactaccatcgtcccccgcctcacctagtcctaaggggacccccgagaaagcaaacgagagggctggcctgcgcgagggaagcgaggaaaaggtgaagcctcctcggccacgagcccctgagagcgatacaggcgacgaggaccaagaccaggagagagacactgtattcctgaaggataatcatctggctatcgagaggaagtgctccagcataacagtctccagcacgtcctccctggaggctgaagttgatttcaccgttatcggagattatcacgggtcagccttcgaggatttttcccgatccctgccggagctggatcgggacaagagtgattctgacaccgagggcctgctgttctcccgggacctgaacaaaggggctccctcacaggacgacgaatctgggggtattgaggattcaccggatcggggagcctgcagtacaccagacatgccccagttcgagcccgtgaaaaccgagacgatgacggtcagctctctggccatccgcaaaaagatcgaacctgaagctgtccttcagaccagagtcagtgcaatggacaacacgcaagagaactcgctgaaaagcggaaagggagccgctgccatgatcccaggtccgcaaactgtggctaccgaaataagatccctgagcccttccgcagatcaccgggagagatgcccacatcagcaccttagaaggcattgtgggaatccgctcaatctgcaccaccacccctgtcaccagaattgtgaacggcgcgtgttctag

SEQ ID NO: 116018 - DNA, 507 bp, synthetic construct
  misc_feature 1..507: note = Description of Artificial Sequence: Synthetic coding sequence
  source 1..507: mol_type = other DNA
atgactactgaaacagggccagatagcgaagtcaaaaaggcgcaggaagaggctccccaacaacccgaggctgccgccgccgtcactaccccagtgacacctgcgggccacggccacccagaagctaacagcaatgagaaacaccccagccaacaggacactagacctgcagaacagtccctcgatatggaagaaaaagactatagtgaggccgacggcctgagtgaaagaacaacgcctagtaaagctcaaaagagcccacagaaaatcgcgaagaagtacaaatcagctatttgcagagtaacactactggacgcctccgagtatgaatgtgaggtagagaagcacggtagaggacaggtcttgtttgaccttgtctgtgaacatctgaatctgctcgagaaggactactttggacttaccttttgcgacgccgatagtcagaagaactggctggacccttccaaggagattaaaaaacaaatcagaagttccccctggaactag

SEQ ID NO: 116019 - DNA, 180 bp, synthetic construct
  misc_feature 1..180: note = Description of Artificial Sequence: Synthetic coding sequence
  source 1..180: mol_type = other DNA
atgactaccgaaacagggcccgacagcgaagtcaaaaaggcccaagaagaggctcctcagcagcctgaggctgccgctgccgtgactacgcctgtaaccccagcaggtcatggacatcccgaggctaattccaatgaaaaacaccctagtcagcaggacactagacccgcagagcagtag

SEQ ID NO: 116020 - DNA, 774 bp, synthetic construct
  misc_feature 1..774: note = Description of Artificial Sequence: Synthetic coding sequence
  source 1..774: mol_type = other DNA
atggaagaaaaagactacagcgaggcagacggcttgtccgagaggactacccccagtaaggcacaaaaatcgcctcaaaaaatagcaaagaagtataaatctgcaatctgccgggtgacccttctcgatgctagcgagtacgagtgtgaggttgagaagcacggaagggggcaggttctgtttgacctagtctgcgagcacttaaacctcctggagaaagattacttcgggttgactttctgtgatgccgatagtcagaaaaactggttggatccttccaaagagatcaagaagcagatccgaagctctccctggaatttcgcatttacagtgaagttttacccacctgaccccgcccagcttacagaggatattacccggtattacctttgcctccagttgagggctgatatcatcactggccggctgccatgcagtttcgtgacccacgccctactaggatcttacgcagtccaggctgaattgggtgattacgacgccgaagagcacgtgggcaactatgtgagcgaactaaggttcgcacccaaccagacgcgggaattggaagagcgcatcatggaactgcataaaacctaccgaggaatgacccccggggaggctgaaatccacttccttgaaaatgctaaaaagttgtctatgtacggggtagacctccaccacgccaaggacagcgaaggcatcgatatcatgctaggtgtctgtgcgaacggactgctaatctacagggatcggctgcgaataaacagattctag

SEQ ID NO: 116021 - DNA, 114 bp, synthetic construct
  misc_feature 1..114: note = Description of Artificial Sequence: Synthetic coding sequence
  source 1..114: mol_type = other DNA
atggaagagaaggattacagtgaagcagatggactctccgaaagaacaacaccaagcaaggcacagaaatctccccagaagatcgccaaaaagtacaaatcagccatctgctag

SEQ ID NO: 116022 - DNA, 360 bp, synthetic construct
  misc_feature 1..360: note = Description of Artificial Sequence: Synthetic coding sequence
  source 1..360: mol_type = other DNA
taaagcgtggggagagaatttattgccacgactcctagtataaccacagagacaatttccaccaccatgattattggcaaggacgtcctgacctctacctacggtgcgacagcagagaccctgagtacatcaaccacaactcatgtcaccaagactgtcaagggcggtttttctgaaacgcgcatagagaagcgcataatcatcacgggagacgaggatgtcgaccaggaccaggccctggcactggctattaaggaagctaaactgcagcatcctgacatgctggtgactaaggcagtggtctaccgcgagacggacccgtcccccgaggagcgcgacaaaaaaccccaggagtcttag

SEQ ID NO: 116023 - DNA, 2340 bp, synthetic construct
  misc_feature 1..2340: note = Description of Artificial Sequence: Synthetic coding sequence
  source 1..2340: mol_type = other DNA
atggaggagaaggattacagcgaagctgatgggctcagcgagaggaccacaccttctaaagctcagaagtctccccagaaaattgcaaaaaagtacaaatccgctatctgtagagtcactcttctggatgcaagcgagtacgaatgcgaggtcgaaaaacatggccgggggcaggtcctgtttgacctggtgtgcgaacacctcaaccttctggaaaaggactatttcggcctcactttttgcgacgcggactcccagaagaattggctggacccgtctaaggagatcaagaagcagatccgctcttccccctggaattttgccttcactgtgaagttctaccctcctgatcctgcccagttgactgaggacataacccgctactatctttgcctgcagctgcgcgccgatatcattaccggtcgtctgccatgttccttcgtgacccacgcattgctgggaagctatgccgtgcaggccgaactgggagattacgacgccgaagagcatgtgggcaactatgtaagcgaactgcgattcgctcccaatcagactagggaactggaagagcggatcatggagttacataaaacttaccgaggcatgacgcccggagaagctgagatacacttcttagagaatgcaaagaagttgtccatgtacggcgtggatctacaccatgcaaaggattctgagggtattgacatcatgctcggcgtgtgcgctaacggcctcttgatttaccgggaccgtctacgtataaatagattcgcatggccgaaaattctgaagatttcttacaaaaggtcgaatttctacatcaaaatccggccaggcgagtatgaacaattcgaatcaaccattggatttaaactgccaaaccatagaagtgccaagagactgtggaaagtctgcatcgaacatcacacattttttcgtctagtcagtcccgaaccaccgcctaagggatttctcgtcatgggcagcaaatttcgttatagtggtaggacccaggctcagacacgtcaggccagtgcactcatcgatcggccagccccttttttcgagcgctcatccagcaagaggtataccatgtctaggagcctcgatggcgctgagttcagcaggcccgccagtgtgagtgagaaccatgacgctggacctgacggcgacaaacgggatgaagacggagaaagtggtggtcagcgatctgaggccgaggagggggaggtaaggactcccactaagattaaggaactgaagtttctagacaaacccgaggacgtgcttttgaaacaccaagcctcaattaacgaattgaagcggacccttaaggagcctaatagcaaactgatccacagggacagagattgggaaagggagcggcggttaccttccagcccggcctccccatcccctaagggcacccccgagaaggctaacgaacgtgccggactacgagagggtagcgaagagaaagttaaacccccccgcccccgcgcaccagagagtgatacaggagacgaggaccaggaccaggaacgggacactgtcttcctgaaagataaccaccttgcgatcgaaagaaagtgtagcagtatcacagtctcatccacgtcgtctctggaagccgaagtggactttaccgtcattggagattaccacggttcagcctttgaagatttttcacgcagcctgcccgaactggatagagacaagagcgactccgacacagaaggtctcctgttctcccgggatctgaataagggagccccaagccaggatgatgagtctggcgggatcgaggactccccagatcgtggagcctgttcaacacccgacatgccacagtttgagcccgtaaagaccgagaccatgactgtgtcatcccttgcaatccggaaaaaaattgagcctgaggctgtcctgcaaacccgagtgtcagcaatggacaacacccaggagaactccctgaaaagcggaaaaggggccgccgctatgatccctggcccacagacagtcgcaacagaaattcggtctttgtccccaattattgggaaagatgtcttaaccagtacatacggcgccacggccgaaaccctttctactagcacgactacccacgtgacaaaaaccgtgaagggcgggttcagtgagacacgaatcgagaagcgtattatcatcaccggagatgaggacgtggaccaggaccaggctcttgcactggcaatcaaagaggcgaaactacagcatcccgatatgcttgtcaccaaggcagtggtgtaccgggagacagatcctagccccgaagaacgggataagaagccgcaagaatcctag

SEQ ID NO: 116024 - DNA, 345 bp, synthetic construct
  misc_feature 1..345: note = Description of Artificial Sequence: Synthetic coding sequence
  source 1..345: mol_type = other DNA
atgaccacagagaccggtcccgactctgaggtgaaaaaggctcaggaagaagccccccagcagcctgaggccgcagccgccgttaccacccctgtcacaccggcaggccacggccatccagaggcaaactctaacgaaaagcatccttcacaacaggacacacggcctgccgagcagtctctggatatggaagagaaagattattcggaggctgacggtctcagtgaacggaccacccctagcaaggcgcaaaaaagcccgcagaagatcgccaaaaaatacaagtccgccatctgcagagtgacactcttagacgcctcagaatatgaatgcgaagtggagtag

SEQ ID NO: 116025 - DNA, 567 bp, synthetic construct
  misc_feature 1..567: note = Description of Artificial Sequence: Synthetic coding sequence
  source 1..567: mol_type = other DNA
atgacgaccgaaactggccctgactctgaagtgaagaaggcacaggaagaggccccccaacagcctgaggccgccgcagcggttacaaccccggtcacccctgccgggcacggacacccggaggccaactccaacgagaagcacccctctcagcaagacaccaggccagcagagcagagtttagacatggaggaaaaggactactcagaggccgatggattatctgaacggaccacaccctcaaaagcacaaaagtccccacagaagatagctaaaaagtacaagtccgccatttgtcgagtgactctgctggatgcaagcgagtacgaatgtgaggttgagaagcacggaaggggccaggtgcttttcgatttggtctgcgagcacctgaatctactcgagaaagactattttggactgacattctgcgatgccgactctcaaaaaaactggttggatccaagcaaagagattaagaaacaaatccgtagcagtccctggaattttgccttcaccgttaaattctatccaccagaccccgcacagctcacagaggacattacctag

SEQ ID NO: 116026 - DNA, 705 bp, synthetic construct
  misc_feature 1..705: note = Description of Artificial Sequence: Synthetic coding sequence
  source 1..705: mol_type = other DNA
atggagtcgacacctgagccgaggcccaacgagtgggagaagcgcagaattacgccactctccttacagacccagggtagaaaaggggaccacctcttcaaggacatcctgagcgtaaaggaaaagtacctgatgccaactatatggacagtcgaggagaaagcgcaagaaactgataaaactcgcgcacccgagtctgaaggcccctgtaccggagctagggacgcggtgaagtctagccacgagacgctgaatattgtggaggagaaaaagcgcgctgaggtgggaaaggacgaacgggtcatcactgaggagatgaatgggaaggaaataagtcccggctctgggccaggggagattcggaaagtggagcctgtgacacagaaggattccactagcttgtcatcggagtcttccagctcttcatcagaatctgaggaagaggacgtgggagaataccgaccgcaccaccgagtcacagaggggactattcgggaagaacaggagtacgaggaggaggtggaagaagagccacggccagccgccaaagttgtagagcgcgaagaagcggtacccgaggctagccccgttacgcaagccggcgctagtgtaatcaccgtagaaactgtaatccaggagaacgttggtgcccagaaaattcctggcgaaaagagtgtacatgaaggagcactgaaacaggactag

SEQ ID NO: 116027 - DNA, 3018 bp, synthetic construct
  misc_feature 1..3018: note = Description of Artificial Sequence: Synthetic coding sequence
  source 1..3018: mol_type = other DNA
atgacaactgaggtcggctctgtgagcgaagtgaaaaaggattcatctcagttaggcacagatgcaaccaaggaaaagccgaaggaggtcgccgaaaatcagcaaaaccaaagcagtgaccccgaggaagaaaagggtagtcagcctccacccgcagccgaaagtcaatcaagcctcaggaggcagaagcgggagaaggagaccagtgagagccgcggcatttccaggtttattccaccgtggctgaagaaacagaagagttacaccctcgttgtagcaaaggatggaggcgacaaaaaagaacccacacaggccgtggtggaggaacaggtcttggataaagaggagcccctgcctgaagaacaacgacaggccaaaggcgatgccgaggaaatggcccagaaaaagcaggagatcaaagtcgaagtgaaagaagagaagcccagtgtctccaaggaagagaaaccatccgtaagtaaggtcgagatgcagcctacagaactggttagtaaggaaagagaagagaaggtaaaggaaacccaagaggacaaactggagggcggcgcggctaagagagaaactaaggaagttcagacaaacgagcttaaggccgagaaggcaagccagaaggtgacaaagaaaacaaagacagttcaatgtaaggtcaccctgctggatggaaccgagtattcgtgtgacctggagaaacatgccaaaggccaggtgctcttcgacaaagtctgtgaacacctgaacctgttggagaaagactatttcggcctgctttttcaggagtccccagagcagaaaaattggcttgaccccgccaaagagattaagagacagctcaggaacctcccatggctgttcacctttaatgtgaagttctatccgcctgatccctcgcagttgactgaagacattacgcgatactttctctgcctccagttgcggcaggatatcgctagtggcaggctgccctgctccttcgtgactcatgcactcctcggtagttataccctacaggctgagcttggggactatgatcccgaggagcacggtagcattgacctctccgagttccaattcgcaccaacccaaacgaaggagctggaagagaaagttgcggagcttcataagactcaccgaggcttgagtcccgcacaggccgactcccagtttctggaaaacgcaaaaaggctcagcatgtatggcgtggatctccaccacgccaaggatagtgagggagtggatatcaaactcggcgtgtgcgcaaacggattactgatatacaaagataggctgcgaattaaccgctttgcatggcccaaaattctgaagatctcatataaacgcagcaacttttatatcaaagtacgtcccgcagaactggagcagttcgagagtaccattgggtttaagctaccgaaccatcgcgccgcaaaaagactgtggaaggtttgtgtcgaacaccatactttttaccgccttgtgtcgcccgagcagcctccaaaggccaagttcctgacactgggcagtaagtttaggtactcgggtcgcactcaggctcagactcgacaggcatccactttgatagatcggcctgccccccactttgaacgaacctcatctaagagagtcagtaggagcctggatggagcgccaatcggcgtcatggaccagtcgctcatgaaagactttccgggagcggcaggggaaattagtgcctacggacctggcctcgtatccatagcagtggtccaagacggggatggacgaagagaggtaagatccccaacgaaggcaccacacctgcagctaatcgaagggaaaaagaatagccttcgggtggagggcgataatatctatgtgcgacattcaaatctgatgctagaagagctggacaaagcacaggaagacatcctaaagcaccaggccagtatatcagagttgaagagaaactttatggaatcaacccccgaaccgaggcctaatgaatgggagaaacggaggattacccccctatctttacaaacacaaggctccagtcacgagaccctgaatattgtcgaagagaagaaaagagctgaagtcgggaaggatgaaagagtcattaccgaggagatgaatggcaaagagatatcaccgggatccggtcctggggagatcagaaaagtggagcccgtgacccagaaagattccacctctctgagttctgagagctcctcatcgtccagcgagtccgaggaagaagatgttggggaataccgaccgcatcacagggtcaccgaagggactattagggaggaacaagagtatgaggaagaggtggaggaggagcccaggcccgcggctaaggtggtggagagggaggaagccgtgccggaggctagtcctgtcacacaggccggagcaagtgtcatcaccgttgaaaccgtcattcaggaaaacgtgggggcacagaagattcctggagagaagagcgtgcatgagggggcactgaaacaggatatgggtgaagaggctgaggaggaaccacagaaggttaatggtgaagtgtcacacgtcgacatagacgtgctgccacagattatctgctgcagcgagccccccgtcgttaaaactgaaatggttactatcagcgatgcctctcagcgtaccgagatctctactaaggaggttcccattgtccagaccgaaaccaaaactataacctatgaatcaccccagatcgatggaggggcgggaggagatagtgggactctcttaaccgcccagactattacctccgaatccgtatccaccacgaccactacgcacataaccaagaccgttaaaggggggatcagcgagacgaggattgaaaaaagaatcgttattacaggagacggcgatatcgaccacgaccaggctctggcccaagccatccgggaggcacgggagcagcatcccgacatgagtgtcacccgcgttgtggttcataaggaaactgagctggccgaggagggcgaggactag

SEQ ID NO: 116028 - DNA, 3018 bp, synthetic construct
  misc_feature 1..3018: note = Description of Artificial Sequence: Synthetic coding sequence
  source 1..3018: mol_type = other DNA
atgaccactgaagtagggtcagtttctgaagtgaaaaaagattccagccagctcgggacagatgccaccaaagagaaacctaaggaggttgccgagaaccagcaaaatcaaagcagcgaccctgaggaggagaaaggctctcagcccccccctgccgccgaatcgcagagtagtctgaggcgccagaagagagagaaagagacctctgagagccggggaatctctagattcatacccccctggctaaaaaagcagaagtcctacacacttgtggtagcaaaggacggcggcgataagaaggagcctactcaggctgtcgtggaggaacaggtgctggataaggaggagcccctgccagaggagcagaggcaggcgaagggggacgccgaggagatggcccaaaaaaagcaggaaatcaaggtggaggtgaaggaggagaaaccttcggttagtaaagaagaaaagcctagtgtctcgaaagtggaaatgcagccaaccgagctggtgagcaaagaacgtgaagagaaagtaaaagagactcaggaggacaaactcgagggcggagcagccaagcgggagaccaaggaagttcagacaaatgagcttaaagcagaaaaagcgtcccaaaaagtgactaagaaaacaaaaacagtgcagtgtaaagtcacactgctcgacgggacagaatattcttgcgacctcgaaaagcacgccaaaggacaggtcctgtttgataaagtgtgcgaacatctgaaccttttagaaaaagactactttggcctgctcttccaagagtcccccgagcaaaagaattggctggaccctgcaaaggaaatcaagcgccagttgaggaacctgccttggctgttcacctttaatgtgaagttctacccccccgacccttcacagctgactgaggacattacccgttatttcctgtgtctgcaactccggcaggatattgcctctggacgcctcccatgtagctttgttacccacgccttactcggaagctacacattacaggcagagctgggcgactatgatcctgaggagcacggatccatcgatctctccgaatttcagttcgctcccacccagacaaaagagctggaggaaaaagtggcggaactccacaagacccatcgtgggctgtcccctgcccaagcagacagtcaattcctcgaaaacgcaaagcgactcagtatgtatggggtagacttgcaccacgctaaggattctgaaggtgtggacatcaagctcggggtctgtgccaacggcctcctgatttataaagatagacttcgaataaatcggtttgcttggccaaaaatacttaagatttcctacaaacggtcaaatttttatattaaggtgcgcccagcagagttggaacagtttgaatcaaccatagggttcaagctgccgaatcatagggccgccaagagactgtggaaagtgtgcgtggagcaccacaccttctatcggctagtgtctcctgaacagccacctaaagcgaaatttttaaccctgggaagcaaattcaggtatagcggccggacccaggcccagacccgacaggcttctacactcattgaccggcccgcgccccacttcgagcgcacttcctccaaacgagtgagcagatcgctggatggcgcccctatcggggtgatggaccagtcactcatgaaggatttccctggcgccgcgggtgaaatctccgcatatgggccaggactggttagcatagcggtcgtgcaggacggtgatggaaggcgagaggtgaggtccccaacaaaagcccctcacttacagctgattgaggggaagaaaaactccttgcgggtcgagggggataatatatatgtgaggcattccaatttaatgttggaggaactggacaaagctcaggaggacatactcaagcaccaggcgagtattagcgaactcaaaagaaattttatggagtccacacctgaacccaggccaaatgagtgggagaaaaggagaatcacccctctctctctccaaactcaaggcagctctcatgaaacactgaacattgttgaagaaaaaaagagggcagaggtggggaaagacgagcgagtaatcaccgaagagatgaacggcaaggaaattagccccggcagcggccccggggagatacggaaagttgaaccagtaacgcagaaggattcgacttcactcagcagcgaatcaagttcctcaagcagtgagagtgaggaggaagacgtcggggagtaccggccccaccacagggtaacagaaggcactatccgcgaagagcaagagtatgaggaagaggtcgaagaagagccgcgccctgctgctaaagtggtcgagcgggaggaggcggttccagaggcctctccagtgacgcaggcgggagcctccgtcatcacagttgaaaccgttattcaggagaatgtgggggcccagaagattccaggagagaaatcagtccacgagggtgcactgaagcaggacatgggcgaggaagcagaggaggaaccgcagaaagtgaatggggaagtttcccatgtagatattgatgtcctgccccagattatttgctgctcggaaccccctgtggtgaagacagagatggtcacgattagcgacgcctctcaaaggaccgaaatatcaacgaaagaagtgcccatcgtacagacggaaaccaagacgattacatatgagagcccacagatcgacggaggagctggcggagacagtggaacactactgacagctcaaactattacttcagagagtgtgagtacaactacaacaactcacattactaaaaccgtcaaggggggaatttctgaaacccgcattgagaaaaggattgtcatcacaggagacggagacattgatcatgaccaggcactcgcccaggcaatccgggaggctagggaacagcacccagacatgtctgtgactcgggtagtcgtccacaaggaaactgagctggccgaggaaggcgaggattag

SEQ ID NO: 116029 - DNA, 2022 bp, synthetic construct
  misc_feature 1..2022: note = Description of Artificial Sequence: Synthetic coding sequence
  source 1..2022: mol_type = other DNA
atgaccaccgaggtgggaagcgtgagtgaagtcaaaaaagacagctctcagctaggaactgacgctacaaaggaaaagccaaaagaggtggccgagaaccagcaaaatcagagttccgatcctgaggaagagaaaggctcacaacccccccccgcagctgagagccagagttcattgagacgacagaaacgggagaaggagacatccgaatcccgaggaatatcacggttcattcccccctggctgaagaagcagaaatcctacacgctggtagtggcaaaagacgggggcgacaaaaaagaacccacacaggccgtggttgaggaacaggtgctcgataaggaggagcctcttcccgaagagcagaggcaggccaagggcgatgcagaggaaatggcccagaagaagcaggaaatcaaggtggaggtcaaggaggagaagccatcggttagcaaagaggagaagccttccgtgagcaaggtggagatgcagcccacggagcttgtgtccaaggagagagaagaaaaggtgaaagaaacacaggaagacaaactagaaggaggagcagccaaaagggagacaaaggaggttcagaccaacgaactaaaagccgagaaagcaagccagaaggttaccaagaagactaaaacagtccagtgcaaagtgacattattggacggaaccgaatactcctgtgatctcgagaaacacgctaagggccaggtgctctttgacaaggtctgtgaacacttgaacctcttggagaaggactattttggcctcctgtttcaggagtctccggagcagaagaactggttagatcccgccaaagagatcaaaaggcagttaaggaatctgccatggctttttaccttcaacgtgaaattttacccccccgatcctagtcagctgactgaggatattaccagatatttcttgtgtctgcagctgaggcaggatatagctagtgggcggctgccttgttccttcgtcacccatgctctgctgggatcctacacgctgcaggctgaactgggtgattacgatcccgaagaacatggctcaatcgatctgtctgagtttcagtttgcacctactcagaccaaagagctggaagagaaagtggctgaactgcacaaaactcaccgcggattaagccccgcccaggcagattcccagtttctcgagaacgctaaacgtctctccatgtatggcgtggatctgcaccatgccaaggatagcgagggagtagacattaaactgggcgtttgtgcaaatggactcttgatctacaaagatcgactcagaatcaatcgttttgcctggcctaaaattttgaaaatcagttataaacgctctaatttctatataaaggtgagaccagcagaactagagcagtttgagtcaactatcggattcaaacttccaaaccaccgcgccgccaaaaggttgtggaaagtatgcgtggagcatcatacattctatcggctggtgagccctgagcagccacctaaggctaaattcctaaccctgggaagcaagttccggtacagcggccgaacccaggctcagaccaggcaagcttcaactctgattgaccgaccagctccacacttcgaacggacttccagcaaacgcgtgagccgctccttggatggggcgcctattggtgtcatggatcaaagcctcatgaaggattttcctggtgccgctggggaaatttccgcttatggccctgggctcgtgtcaattgccgtggttcaagatggggacggacggcgggaggtccgctcacccaccaaagccccccacctgcagttgatcgagggcaaaaccgttaagggaggcatttctgaaaccaggattgaaaagcggattgtgattactggagatggggacatcgaccacgatcaagcgcttgcccaggcgattcgggaggcccgcgagcaacacccggacatgagtgtaactagggtggtggtgcacaaggagactgagcttgctgaagagggagaggattag

SEQ ID NO: 116030 - DNA, 1902 bp, synthetic construct
  misc_feature 1..1902: note = Description of Artificial Sequence: Synthetic coding sequence
  source 1..1902: mol_type = other DNA
atgaccactgaagtaggatctgtctccgaggtcaaaaaggattctagccagcttgggactgacgcaactaaagaaaagcccaaagaggtggccgagaaccagcagaatcagagttccgatcccgaagaagagaaagggtctcagccaccgccagcagctgaatctcagagctcccttcgtaggcagaagcgcgagaaggagacgtcggagtccagaggcatcagccggttcattcctccttggctgaaaaagcagaagagctatactctagtggtggctaaagacgggggcgacaagaaagagccaacacaggcggttgtcgaggaacaggtgcttgataaagaggaaccactccctgaagagcaacgccaggcaaaaggcgatgccgaggagatggcacagaagaaacaggaaataaaggttgaggtcaaagaggagaaaccctctgtctcgaaggaggagaagcccagcgtgtcgaaagtagagatgcagccgaccgagcttgtgtctaaggaacgggaggagaaggtgaaggagactcaggaggacaagttggagggaggggctgctaaacgcgagactaaggaagtacagacaaacgagttgaaggccgagaaggcttcccagaaagtcacgaaaaaaaccaagacggtccagtgcaaagtaaccctgctggacggcaccgagtattcgtgtgacctggagaaacatgccaaaggccaggttttattcgataaggtgtgcgaacaccttaatctgcttgaaaaggactactttgggcttctcttccaagaaagcccagagcaaaagaactggctggaccctgccaaggaaattaaacgccagttgaggaatctcccgtggttgtttacattcaatgtaaagttctacccacctgatccatcccagctgacagaggacataacgcggtatttcctttgtctgcagcttcgtcaggacattgcaagtggcaggctcccctgcagctttgtcacacacgctttgctgggcagctacacactgcaggccgagcttggcgactacgaccctgaagagcacggcagcattgacctctcagaattccaattcgctccaacccagactaaggagctggaggagaaggttgcagaactgcataagacccaccgagggttatccccagcccaagccgacagtcagttccttgaaaacgctaagcggctcagcatgtatggcgttgatttgcaccatgcaaaagacagcgaaggcgtagacattaagctcggtgtctgcgcaaatggtctgcttatttataaggaccgcctgcggatcaaccggtttgcctggccaaagattctaaagatcagctataaacggtctaatttttacattaaagtgaggcccgccgagttggagcaattcgagtctaccataggcttcaagctgcccaaccatagagccgccaagcgtttgtggaaggtgtgtgttgagcaccacacattctacagactagtgtccccagagcaacctccaaaagccaagtttctgacactggggtccaaattcagatactccgggcgtacgcaagcacagaccaggcaggcatctactctgattgatcgcccggcgcctcactttgagcggacatcaagcaaaagagtaagtaggagcctggatggagcgccaattggggtcatggaccagtccctgatgaaagatttccctggcgccgcaggcgagatcagcgcctatggaccgggcttggtttcaattgctgtcgtgcaggatggcgatggtcgccgcgaggtaagaagccccactaaggctccccacctccagctgattgaagggaaatctagtcatgaaactctcaatatcgtggaggagaagagcggacagcggctcggaaagactaaggagtag

SEQ ID NO: 116031 - DNA, 2244 bp, synthetic construct
  misc_feature 1..2244: note = Description of Artificial Sequence: Synthetic coding sequence
  source 1..2244: mol_type = other DNA
atgactactgaagttggcagtgtatcagaagtgaaaaaggattctagccagctcggcacagacgctaccaaggaaaagcccaaagaggtcgccgagaaccaacagaaccaatccagcgatccagaggaggagaaaggctcacagccgcccccggccgccgagtctcaatcgtctctgagaagacagaaaagggagaaggaaacgtccgagagcaggggtatttccagattcattccgccttggctgaaaaaacaaaagagttataccttagtggttgcaaaggatggcggagataagaaggagcctactcaggctgtggtggaggaacaggtgctcgacaaggaggaaccccttccagaggaacagcgacaggctaaaggcgatgccgaagaaatggcacagaagaagcaggaaatcaaggtggaagtcaaggaggagaagccttccgtgagcaaagaagaaaaaccctccgtgtcgaaggtggagatgcagccaaccgagctggtaagtaaagagcgggaggagaaggtcaaggaaactcaggaagacaagctcgaaggcggagcagctaagagagaaacgaaagaggttcagaccaatgagttaaaagcagagaaagcatctcagaaggttacgaagaaaactaagacagtgcagtgtaaggtaacattactggatggaaccgaatatagttgtgaccttgaaaaacatgccaaggggcaggtgctgttcgacaaagtctgtgagcatctgaatctccttgaaaaggactactttgggttgctgttccaggaaagtcctgaacaaaagaattggctggatccagcaaaggagatcaaacggcagctgcggaacctcccttggttgttcacctttaacgtgaagttttatcctcccgacccctcgcagctgacagaagacatcaccaggtacttcttatgcctgcaactcaggcaagacatcgctagcggcagactgccttgttccttcgtgacccacgcactgctgggaagctacaccctccaggcggagttgggcgactatgatccagaggagcacgggtcgatcgacctgtctgagttccagtttgcacctacacagaccaaagaactggaggaaaaagtggctgagctgcacaagacccaccgcggattatcccctgcccaagccgactctcagtttctggagaacgcgaagcgattgtcgatgtatggtgttgacctgcaccacgccaaagatagcgagggtgtggatataaagctcggagtgtgcgccaacgggctgctgatttataaggatcgactgcggatcaaccgcttcgcctggccaaagatcctcaagatatcttacaagagaagtaacttctacatcaaagtgcggccagctgagctggagcagttcgaatccaccattggctttaaactccccaaccaccgcgctgcaaaaaggctgtggaaagtctgcgtcgagcaccatactttttacaggctggtctccccagagcaacctccaaaagctaagttcctcaccttaggaagtaagttcaggtattccggcaggacccaagcccagaccagacaggcatccactctgattgacaggcccgctcctcattttgagcggacttcctccaaaagagtttcgcgatcactggatggagccccaatcggtgtcatggaccagtctctcatgaaggattttcctggcgctgccggcgaaatctcggcctacgggcctggtttagtgtctatcgcagtcgtacaggatggagacggacggagagaggtccggtcgcccaccaaagctccgcatttgcagctcatcgagggtaaaccccccgtggtaaagaccgaaatggtgaccatttccgatgcatcgcagagaaccgaaatttctaccaaggaagtgccaattgtccaaactgagactaagaccataacatacgaatcaccgcagatagatggtggggccgggggggattctggcactctcctcactgcccaaactatcacatctgaatcagtgtccaccaccacaactacccacattactaaaactgtgaagggaggcatttcagaaacacgcattgaaaagcgaatcgtgataaccggcgacggggacatcgaccacgaccaggcactggcccaggccatcagggaggcaagggagcagcaccctgacatgagtgtgactcgcgtcgtagtccataaagagacagaactggctgaggagggtgaggattag

SEQ ID NO: 116032 - DNA, 1143 bp, synthetic construct
  misc_feature 1..1143: note = Description of Artificial Sequence: Synthetic coding sequence
  source 1..1143: mol_type = other DNA
tgactggggtcaaaatttcgctactccggacggactcaggcgcagacgcggcaggctagtacactaatcgaccgtcccgctcctcacttcgagcggaccagctctaaacgggttagcagaagcctggacggggctcccatcggcgtcatggatcagtcgcttatgaaggacttcccgggggccgccggcgagataagcgcgtacggacccgggttagttagcatagccgtcgtccaggatggtgatggcaggcgagaagtgcgttcccccacgaaggctccccacctgcaactaatagagggcaagaagaactctctgcgagtcgagggcgataacatctatgtgaggcatagtaatcttatgctggaagagcttgacaaagcacaagaggatatcttaaagcaccaagcttctatctctgagttaaaacggaacttcatggaaagtacccctgaaccaagacctaacgaatgggaaaagaggaggattacaccactgtctcttcagacacagggccggaagggggaccatctctttaaggacattctgtctgtgaaagagaaatacctgatgcccaccatttggaccgttgaagaaaaagcacaggaaaccgataagacccgggctcccgagtcggaggggccgtgtaccggggcccgggatgcagtgaaaagtagtcacgagacacttaacattgtcgaggaaaagaaacgcgctgaagtgggcaaagacgaacgagtgatcaccgaggagatgaacggaaaagaaatttcaccagggtctggaccgggggagattcggaaggtggagccagtaacgcaaaaagatagcacaagcttgagtagtgaaagttcatcgagcagtagtgagagcgaagaggaggacgtgggggagtatagacctcaccatcgagtgactgaggggaccatccgggaggaacaggagtatgaagaggaagtggaggaggagcccagacctgccgctaaggtcgtagagagagaggaggccgtaccggaggcttctccagtgacacaagctggagctagcgttataaccgtcgaaaccgtaatccaggaaaacgttggggcacagaagatcccgggagagaagtcagtgcacgagggcgctctaaaacaagactag

SEQ ID NO: 116033 - DNA, 1152 bp, synthetic construct
  misc_feature 1..1152: note = Description of Artificial Sequence: Synthetic coding sequence
  source 1..1152: mol_type = other DNA
atggaagaagaggaaacacagcttgaagaggagctagacaaggcacaggaggacattctaaaacatcaggcatcaatatctgagctcaaacgaaactttatggagtcgactccggagccccggcctaatgaatgggaaaaacgccggattacccctctctcactccagacccaaggaagtagccatgaaactctcaatatcgtcgaagagaaaaagcgagctgaagtcggcaaggatgaacgtgtgataacagaggaaatgaacgggaaggagatatccccaggatcaggcccaggtgaaatccgcaaggtcgagcccgtgacacaaaaggattcaacttctctatcttcagagtcatcttcatcgagctcggagtccgaagaagaagatgtgggggagtatcggccccaccaccgagtcactgagggtaccattcgggaagagcaagagtatgaggaagaggtggaggaggaacctagaccagcagcaaaagtggtggagcgggaagaagcagtgcccgaggccagtcccgttacccaagcaggtgcaagcgtaatcacagttgaaacagtcatccaagagaacgtcggagcacagaagatcccaggagaaaagtctgtgcacgagggcgcactgaaacaggatatgggcgaggaagcggaagaggaaccacaaaaggtcaatggagaggtaagtcacgtggatatagacgttctcccacagattatttgctgtagtgagccacccgtggtcaagacggagatggtgacaattagcgacgcttcccagaggacagaaatctccacaaaggaagtgcccattgtacagacagaaactaagacaattacctacgagagcccccaaattgacggtggggctggcggtgattctggcacactgcttaccgcacagactatcacatctgaaagcgtatcgacaactacgaccactcatattacgaagactgtgaagggcggaatttccgagacccggatcgagaagcggattgtcattacaggagatggggatatagatcatgatcaggccttagcccaggccatccgcgaggcgagggagcagcatcctgacatgagtgtcactagggtggttgtgcacaaggaaacagaactggccgaggagggcgaggactag

SEQ ID NO: 116034 - DNA, 2022 bp, synthetic construct
  misc_feature 1..2022: note = Description of Artificial Sequence: Synthetic coding sequence
  source 1..2022: mol_type = other DNA
atgactacagaagttggctccgtgagcgaagtgaagaaagattctagtcaactgggtaccgacgctactaaagaaaaaccaaaggaggttgccgaaaaccagcagaatcagtcctccgatcctgaggaggagaaaggctcccaaccaccacccgccgcagaatcccaatcttctctccgccggcagaagcgagaaaaagagacatccgagagcagagggatttcgaggtttataccaccgtggctcaagaaacagaagtcttacaccttggtggtggcaaaggacgggggagataagaaggagccaacgcaggctgttgtggaagaacaagtgctggacaaagaggaaccgctgcctgaagaacaaaggcaggccaagggagacgcagaagagatggcccagaaaaaacaggagatcaaagtggaggtgaaagaagagaaaccaagcgtaagtaaggaagagaagccatctgtcagcaaggtggagatgcagcccacagaactggtctctaaagaaagagaggagaaagtcaaggagacacaagaggataaactggaagggggagcggcaaagagggagaccaaagaagtgcaaaccaatgaactcaaggccgagaaggccagccagaaagttactaaaaagaccaagactgtccagtgtaaggtcacattgctcgatggcactgagtactcgtgtgacttggagaagcacgctaaaggtcaggtgctgttcgacaaggtatgcgagcatctgaacttactcgaaaaggattacttcggtctactgtttcaggagtcccctgagcaaaaaaactggcttgatcccgcaaaggagataaagcgccagctccggaatctaccctggctgtttacattcaatgtaaagttttatcctcccgatcccagccagctcaccgaggacatcacccggtactttctgtgcctccaattacggcaggacattgcatcgggccgattgccatgtagctttgtgacacacgctctactgggctcctataccttgcaagccgagctaggggattacgaccctgaggaacatggctctattgacttatcagagtttcagttcgcccctacccagacgaaggagctggaggaaaaggtggccgagctgcacaagacccaccgtggtctgtccccagctcaggccgatagccagttcctggaaaatgccaaacggctgtcaatgtacggggtggacctgcaccatgcaaaggacagtgaaggtgtggatatcaagctgggcgtgtgcgccaatggtctgctcatctacaaagaccgactgcgaatcaaccggttcgcctggcccaaaatactcaagattagttataaacggtccaacttttatataaaagtgagaccagctgaactggagcagttcgaatcgacaatcggattcaaactccccaaccatcgtgcagctaaacgactttggaaagtatgcgtagaacaccacactttttatcgactggtttcccccgaacagccccccaaggcaaaatttcttaccctaggctccaagtttaggtattctggccgtacccaggcccagacgaggcaggcatctacacttattgatcggcccgctccccacttcgagcggacttcatccaagagggtctcccggtccctggacggggccccaattggcgtcatggaccaaagtctcatgaaggatttccctggcgcagctggggagataagcgcttatgggcctggccttgtgagcatcgccgtcgtccaagatggtgatggccgaagggaggtgaggtctccaaccaaagcccctcatctgcagctgatcgaggggaaaacagtgaagggaggaatctccgaaactcggatcgagaaaaggatcgtaatcactggcgatggagatattgaccatgaccaggcactagcccaggcaatccgagaggctagagagcaacatcccgatatgagtgtcactagggttgtggtccacaaggaaacggaacttgccgaggaaggcgaagattag

SEQ ID NO: 116035 - DNA, 462 bp, synthetic construct
  misc_feature 1..462: note = Description of Artificial Sequence: Synthetic coding sequence
  source 1..462: mol_type = other DNA
atgacaacagaggtggggagtgtctcagaggtgaagaaggattcgagccagctgggaaccgatgccacgaaggagaagcctaaggaagtggcggaaaaccagcagaaccagagttcagaccctgaggaagagaaaggaagtcaacctccacccgccgcagagtcccagtcctctctgagacgccagaagcgggagaaagaaacatcggagagccgcggcatttcacgtttcatccctccctggctgaagaagcagaaatcttatacgctggtggtcgcaaaagacgggggagacaaaaaggagccaacacaggctgtggtggaggagcaagtgctggacaaagaggagccactcccggaagagcagcggcaggccaaaggtgatgcagaagagatggcacagaaaaaacaggagataaaagtcgaggtgaaggaagagaagccctccgtctcaaaagagtag

SEQ ID NO: 116036 - DNA, 2244 bp, synthetic construct
  misc_feature 1..2244: note = Description of Artificial Sequence: Synthetic coding sequence
  source 1..2244: mol_type = other DNA
atgacgactgaagtgggctctgtgagcgaagtgaagaaggacagtagccaactagggaccgacgccaccaaagaaaagccaaaggaggtcgcggagaaccagcagaaccagtctagcgacccagaggaagagaaaggctcacagcccccccctgcagccgaatctcagtccagccttagacggcagaaacgggaaaaagaaacaagcgaatcgcggggcatctctcggtttatcccaccttggctgaaaaagcagaagtcctatactcttgtggtggctaaggatggcggcgataaaaaagagccaacacaggccgtggtcgaggagcaagtgttagataaggaagagccactcccagaagaacagcgccaggccaagggcgacgccgaagagatggcccagaagaaacaggagatcaaagtggaagttaaggaagagaagcctagcgtctctaaggaggaaaaacctagcgtgtctaaggtcgagatgcaacccaccgagctggtgtccaaggaacgggaagagaaggtcaaagaaacacaggaagataaactggaaggcggggcagcaaaaagagaaacaaaggaggtgcagaccaacgagctcaaggccgaaaaggcatcccagaaggtaaccaagaagactaagacagtgcagtgcaaggtgaccctgctggatggcacagagtattcttgtgatttagagaagcatgcgaaagggcaggtgctgtttgataaggtttgtgagcacttgaatcttctggaaaaggactacttcggcctgctcttccaggagtcacctgaacagaaaaattggctggacccagctaaggaaatcaaacgccagctgagaaacttgccttggttatttacctttaatgttaagttctatccgccagatccaagtcagctgacggaggatataacgcggtacttcctgtgcctccagttgcgccaggatatcgcttccggacgcctcccatgctcctttgtcacacacgcattgctgggaagctacacacttcaggccgaacttggagattatgaccctgaagaacacgggtctattgacttaagtgaattccagttcgcgccaacccaaacgaaggagcttgaagagaaagttgctgaattgcacaagacacacagggggctttcccccgcccaggctgattctcagttcctagagaatgctaaacggctcagcatgtatggagttgatcttcaccatgccaaggattcggaaggcgtggacataaagctaggcgtgtgcgcgaacggtttattgatttataaggaccgtctcaggatcaataggtttgcgtggccaaagatcctgaaaatttcttacaaaagaagtaacttttatatcaaagtgcgacccgccgaactggaacagttcgaaagtactatagggtttaagctgcctaatcaccgagcggcaaaacgtttgtggaaagtttgcgttgagcaccacacattctaccgcctggtttctccggagcagccaccaaaagcaaagttcctaaccctgggctccaaatttaggtatagtggacgaacacaagctcaaacaagacaggccagcacgctgattgaccggcctgcccctcatttcgaaaggactagtagcaaacgcgtatccaggtctctggacggggcaccaataggggtgatggaccaaagtctaatgaaggacttcccaggagctgccggtgagatctcagcatacggcccaggactggtttcaatcgccgtggttcaggatggcgatgggagaagggaagtaaggtcacctaccaaggctccccacctgcagctgatcgaaggcaagcctcccgtcgttaaaacggagatggtgacaatatccgacgcctcccagaggaccgagataagcaccaaagaagtaccaatagtccagacggagacaaaaactatcacctacgaatctccccagatcgacggcggcgctggcggagattctggcactttgctgacggctcagacaattacaagcgagagcgtgtccaccacaacaaccacgcatatcactaagaccgtgaaagggggtatctctgagacacgcattgagaaaagaatcgttattacaggggacggagacatagaccacgaccaggctctcgcgcaggccatcagagaggcccgggaacagcaccctgacatgtcagtcacccgggtcgtggtccataaagagactgagcttgctgaggagggtgaggactag

SEQ ID NO: 116037 - DNA, 540 bp, synthetic construct
  misc_feature 1..540: note = Description of Artificial Sequence: Synthetic coding sequence
  source 1..540: mol_type = other DNA
atgacaactgaggtgggctccgtctctgaagtgaaaaaggacagtagccagctgggcacggacgctacaaaggaaaagcctaaggaggtggccgagaaccagcagaatcagtcttcagaccccgaggaggaaaagggaagccagcctccacctgccgctgaatctcagtcctctcttaggcgccagaaacgtgaaaaggagacctctgaaagcaggggcatcagtcgcttcatccctccatggttgaaaaaacagaaatcttacaccctagtggtcgctaaagacggaggcgacaagaaagagccaacccaggcagtagtcgaagaacaggtgttggataaggaggaaccgctccccgaggagcaacgccaggcgaagggagacgcagaagaaatggcacagaaaaagcaagaaattaaagtggaagtcaaggaggagaagccctccgtctccaaagaggagaagcccagtgtgtccaaagtggaaatgcagcctacagagcttgtatctaaagaacgtgaagagaaagtgaaggaatag

SEQ ID NO: 116038 - DNA, 2559 bp, synthetic construct
  misc_feature 1..2559: note = Description of Artificial Sequence: Synthetic coding sequence
  source 1..2559: mol_type = other DNA
atgaccaccgaggtgggctctgtatctgaggtgaagaaggacagctcacagctgggaaccgacgctaccaaagagaaaccgaaagaggtggctgaaaaccagcagaaccaatctagcgacccagaggaagagaaggggagtcagccaccacctgcagccgaaagccagagttcactgcgcagacagaagagagagaaggaaacctccgaatccaggggcatcagtcgcttcattcctccctggcttaaaaaacaaaagtcgtacacattagtggtggccaaggatggaggggataaaaaggaacctacccaggccgtcgtggaggaacaggttctggataaagaggaaccactccccgaggagcaacgccaggcaaagggggacgcagaggaaatggctcagaaaaaacaggagatcaaagtggaggtgaaagaagagaaaccttcagtttcaaaggaagaaaaaccttctgtctccaaggtggaaatgcagcctacggagcttgtatcaaaggagcgtgaggaaaaggtgaaggagacgcaggaggataagctcgaggggggggccgctaaacgagagaccaaggaggtccagacaaacgaattgaaagccgaaaaagcctctcagaaggtgactaaaaagaccaagacagtgcagtgcaaggtcaccctgctcgatggaaccgaatactcatgtgatctagagaaacatgccaaggggcaagtgctgttcgataaggtgtgtgagcacctgaatctgctcgaaaaggactacttcggactcctgtttcaggaatcacccgaacaaaaaaactggcttgaccccgctaaagagattaaacgccagttgcgtaatctcccgtggctgtttactttcaacgttaagttctatccccccgacccaagtcagctcacagaagatattacaaggtatttcctgtgtctgcaactgagacaggatattgcaagcggccgcctgccatgctcattcgttacacatgccctgctaggttcttacaccctgcaagcggagttgggtgactatgacccagaagagcacggttccatcgatttatcagagttccagtttgcgccaacccaaacgaaggagctggaagagaaggtcgcagagctacacaaaacccatcgcggactgtcaccagcccaggccgacagccagttcttagagaatgccaagcgcctgtctatgtatggtgtggacctgcatcacgcaaaggattccgagggggttgacatcaagcttggagtctgtgctaatggcttactcatttacaaggatagactgcgtataaataggtttgcatggcctaagatcctgaaaattagttacaagcgctcaaacttctacatcaaagtaaggcctgcggaactggaacagttcgaaagtacaattggcttcaagctcccaaaccatcgcgcagccaaaaggctctggaaggtgtgcgtagagcatcatacattctataggctggtgtcaccagagcaaccacctaaagccaagtttctgacattaggctccaagtttaggtattccggaaggactcaggcacagacgagacaggcaagcaccctgatagacaggcctgcacctcactttgagagaacgtcatcaaagcgggtctcaaggagcctggatggcgctccaattggcgttatggatcaatctctcatgaaggacttccccggggccgcaggggagatctctgcttacggccccggtctggtaagcattgcagtagtccaggatggcgacggtagaagagaggttcgcagccctaccaaggcaccccatctccaactcattgaagggaaaagctcacacgagacattaaatattgtggaggagaagaagcgcgcagaagtggggaaagatgagagggtcatcaccgaagagatgaacgggaaggaaatctcccccggcagcggccctggagagatccggaaagtggaaccagtcactcagaaggactcaacaagcctgtcctctgagagctcctcatctagtagcgagtcagaagaagaggatgtgggagagtatagaccgcaccaccgcgtgactgaaggcactattcgggaggagcaggagtacgaggaggaggttgaggaggaacctcgtccagccgctaaaccacccgtcgtgaaaactgagatggtcaccatcagcgatgcatcccagagaacggagatttcaactaaagaggtcccaatcgtgcaaaccgaaacaaaaaccattacctacgaaagccctcagatcgatggcggagcaggcggcgattcaggaacactgctcaccgctcagaccatcacctcagaatcagtctcgacaacaactactacacacatcacaaagacagttaagggcggtatcagcgaaacgcgcattgaaaaacgaatcgtcattactggagacggggatatcgatcatgaccaagctctggcccaggccatcagagaggcaagagaacaacacccggacatgtcagttacccgagtggtggtacacaaagagaccgaattggccgaggagggggaggactag

SEQ ID NO: 116039 - DNA, 357 bp, synthetic construct
  misc_feature 1..357: note = Description of Artificial Sequence: Synthetic coding sequence
  source 1..357: mol_type = other DNA
atgaccacagaggtcgggtcagtgtctgaggtgaagaaggatagcagccagctggggaccgacgccactaaagaaaagcccaaagaggtggccgaaaaccaacagaaccaaagctccgaccccgaggaagagaagggaagtcagccgcctccggccgctgagtcccaatcgtcattacgtagacaaaaaagggaaaaggaaacttctgagagtcgtggcattagcagatttattcctccttggctgaaaaagcagaagagctacactttagtcgttgcgaaggatggaggcgacaaaaaagagcctacacaggccgtcgtcgaggaacaggtgctcgacaaggaggagccactctag

SEQ ID NO: 116040 - DNA, 606 bp, synthetic construct
  misc_feature 1..606: note = Description of Artificial Sequence: Synthetic coding sequence
  source 1..606: mol_type = other DNA
atggaggaagaggagacccaactggaggagaagaacagcctcagagtggaaggtgataatatttacgtgcgacattctaaccttatgttggaggagctcgacaaggcacaagaagacatccttaagcaccaggcttcaatcagtgaactgaagagaaactttatggagtccacacctgaaccccgcccaaatgaatgggagaagcgtaggatcactccactgagcctacagacacaggggaccagggcaccagaatccgaaggcccatgtaccggggcacgcgacgccgtgaagcccccggtggtgaagactgagatggtcaccatcagcgatgcaagccaacgcaccgaaatttctactaaggaggtccccatcgtgcagactgagacaaaaactatcacttacgaatctccacaaaccgtcaaaggaggcatcagcgagacccgcatagagaagaggattgtcatcactggagacggcgatattgaccatgatcaggctctggcccaggcgatccgggaagcacgcgagcagcaccccgacatgtcagttacgagggtagtggttcacaaggagacggaactggccgaagaaggggaggattag

SEQ ID NO: 116041 - DNA, 384 bp, synthetic construct
  misc_feature 1..384: note = Description of Artificial Sequence: Synthetic coding sequence
  source 1..384: mol_type = other DNA
atgacgaccgaggtgggatccgttagcgaggttaagaaggactcatcacagcttggaaccgacgcaactaaagagaagccaaaagaggtagccgaaaaccagcagaatcagagttcagatcccgaggaggaaaaaggatcgcagccacctcccgctgcagagtctcagtcttctttaagacgccaaaagcgcgagaaggagacttctgagtcccgcggaatttctaggtttatcccaccatggctcaaaaaacagaaaagctacaccttagtggtggcgaaggatggaggtgataagaaagaaccaacccaggctgtggtggaggagcaagtgctcgacaaagaggagcccctccctgaggaacaacgacaagcgaaggggtag

SEQ ID NO: 116042 - DNA, 489 bp, synthetic construct
  misc_feature 1..489: note = Description of Artificial Sequence: Synthetic coding sequence
  source 1..489: mol_type = other DNA
atgacaaccgaagttggcagcgttagcgaggtcaagaaagattcatcccagctggggactgatgcaacaaaagaaaaacccaaagaggtggcagaaaatcaacagaatcaaagtagtgacccagaggaggagaaaggatcacagcccccaccggctgctgaatcccaatccagcctgcgccgtcagaaacgcgagaaagaaacctctgaatcgcggggcatctctcgttttatacccccctggctgaaaaaacagaagtcctacacactggtcgttgcaaaggatggaggagataaaaaagagcccactcaagcagtggtcgaagaacaagtgctggacaaagaggaaccattgccagaagagcagcgtcaggctaaaggcgacgcagaggagatggcccagaaaaagcaggagattaaggtcgaagtcaaggaagaaaaacccagcgtatccaaagaggaaaagccctctgtgtccaaagtggaatag

SEQ ID NO: 116043 - DNA, 3264 bp, synthetic construct
  misc_feature 1..3264: note = Description of Artificial Sequence: Synthetic coding sequence
  source 1..3264: mol_type = other DNA
atgactaccgaatctggctcggattccgaatcgaaaccagaccaggaggcggaaccgcaagaggcagcgggagcccagggcagggctggggcgccagtcccggagcctcccaaggaggaacaacagcaggccctcgaacagttcgccgctgctgctgcccattcgacccccgttagacgggaggtgactgataaagaacaggaatttgcagcaagggctgccaagcaactcgaatatcagcagttagaagatgacaagctgagccagaagagctcatcctccaaactgtctcgttctcccctcaagattgtcaaaaagccaaagagcatgcaatgcaaggtaattcttctggatggctccgagtacacctgcgacgtggagaagcggtccaggggacaagtactttttgacaaggtatgtgagcacctcaacctgcttgagaaagactatttcggactgacttatagagacgccgaaaatcagaaaaattggctcgacccagccaaagaaatcaagaaacaggtgcgaagcggagcctggcactttagtttcaacgtgaagttttacccaccagacccagcgcagctcagcgaagacatcacacgctattatctatgtcttcaactgcgggatgacatcgtctccggtcgactgccctgcagcttcgtgactctcgccctcttggggtcctacactgtccagtccgagcttggggattatgatcctgatgagtgtggaagtgactacatctccgagttccgcttcgctccgaaccataccaaggagctagaagacaaggtcatcgaattgcacaagtctcaccgcggaatgacacctgccgaagctgaaatgcatttcttagagaacgccaagaagttaagtatgtatggcgttgacctgcaccatgctaaggattccgaaggggtggaaatcatgctcggcgtctgcgcttcaggtttactgatctacagggaccgcctcaggatcaacagattcgcctggcctaaagtgctgaagatcagctataagcgaaataacttttatattaagattcgtccaggggagttcgagcagtttgagtccaccattggtttcaaactgccaaaccacagagctgccaaacgactgtggaaggtttgtgtggagcatcacaccttcttccgcctgcttctgccggaggccccaccgaagaagttcctgaccctgggctctaagttcagatattctggccgtacccaggcccagactcggcgagccagcgcattaatagatcggccagctccttatttcgagaggagttcaagtaaaagatacactatgagtaggtcactagatggcgaggttggaaccggccagtacgctacaacaaaggggatttctcagaccaatctgattacaacagttacgccagagaaaaaggccgaggaggaaagagatgaagaagaggacaagagacgtaagggcgaagaagtgacgcctatttccgccatccgacatgaaggcaagagtcccggcttggggacagattcttgtcccttgtcccccccgtccacccactgtgctccaacaagccccacggagctgcgacgccgctgtaaggagaatgattgtaaattgcctgggtatgaaccctcgcgtgccgaacatctgcctggcgaacctgccctggactcagatggaccgggtcgcccttacttgggcgatcaggatgtggctttttcttaccgccagcagacaggtaagggcaccacactcttttctttttccttgcaattgcccgagtccttcccttcattgctggacgacgacggctaccttagctttcctaatctctccgagacaaacctgcttccccagagtttgcagcattatctcccaatcagaagcccgtccctcgttccatgctttctgtttatttttttcttcctcctttccgccagtttcagtgtgccctacgccctgacgctcagcttcccattggctctctgtctatgctacctggagcccaaagcagccagcctaagcgcgtccctggacaacgacccaagtgatagtagcgaggaggagaccgattcggaaagaactgataccgcagcagatggcgaaacgaccgcaaccgaatccgaccaagaggaggatgctgaacttaaagcacaagagctggagaaaacccaagacgatctcatgaagcaccagacaaacatttcagagctgaaacgtacattcctcgagacctccactgacacggccgtgacaaacgaatgggagaaacgactcagcactagcccggtccgcctggccgccaggcaagaagacgcccctatgatcgaacctctggtaccagaggagaccaagcagtcatcaggcgagaagctcatggacggctctgaaatcttctcattgcttgagtcggcaagaaaacctacagagtttataggcggggtcacgagcacctcccagtcctgggtgcagaaaatggaaaccaagacagagtcatccggcattgagaccgagcccaccgtgcaccatttgcctctgtccacggagaaggtggtgcaggagacggtgctggtggaggaaaggcgcgtggtgcatgcctcaggagatgcatcctactccgccggggacagtggtgacgccgctgctcagccggctttcaccggcattaaaggcaaggaaggcagcgcgttaacagaaggggccaaagaagaaggtggagaagaggtggccaaggccgttctcgaacaggaggagaccgcagccgccagccgcgagagacaagaagagcagagcgccgcaatacacataagcgagactttagagcaaaaaccccattttgagagtagcaccgtgaaaactgaaaccatctcttttggcagcgtttccccaggtggagtcaaacttgagatcagtaccaaggaggtgcccgtggttcatactgaaacaaagacaatcacatacgagtcaagtcaagtggatcctggaaccgacctagagccgggcgtgttgatgtcggcccaaacaataaccagcgagacaacaagcacaacaacaactacacacatcacaaagacagtcaagggtggaatcagtgaaacaagaattgagaagcgtatagttataaccggcgatgctgatatcgaccatgaccaggcactggcccaggccatcaaggaagctaaagaacagcacccggacatgagtgtgaccaaagtagtcgttcacaaggagacggagatcactccagaagatggtgaagactag

SEQ ID NO: 116044 - DNA, 3264 bp, synthetic construct
  misc_feature 1..3264: note = Description of Artificial Sequence: Synthetic coding sequence
  source 1..3264: mol_type = other DNA
atgacaactgaaagtggtagcgactccgagtcaaaacccgatcaggaggccgagcctcaagaggccgcaggtgcccagggaagagccggggcccctgtgccagagcctcccaaggaggagcagcagcaagctctggaacagttcgctgctgcagcagcacatagtactccagttaggcgagaggtcaccgataaagagcaggaatttgcggcgcgagcagccaagcagctggaataccagcaactggaggacgacaagctaagccagaagtccagctcaagcaaactctcgagaagcccacttaaaattgtgaaaaagcccaagtcaatgcagtgcaaggtgattctactggatggcagcgagtacacctgtgatgtcgagaaaagaagcaggggccaagtgctgttcgataaggtgtgtgagcacctgaatcttctggagaaggactactttgggctcacatacagagatgccgagaaccagaagaattggctggatcccgccaaggagattaagaaacaggttagatcgggggcttggcatttctcgttcaatgttaagttctaccctccagaccccgcacagctgagtgaagacattacacgctactacctttgtctccaactccgcgacgatatcgtgagtggtcggctgccttgttcttttgttaccctggccctgctcggtagttacacggttcaatccgaattgggcgactatgatccagatgagtgtggctctgactacattagcgagtttagatttgccccaaatcacaccaaagagttggaagacaaggtgattgaactgcataaaagccacaggggaatgacacctgccgaagcagaaatgcacttcttagaaaatgccaagaaactcagtatgtacggagttgacttacaccacgccaaggactctgaaggtgtcgaaattatgctaggcgtgtgcgcaagcggactcctgatatatcgcgatcgactccgcatcaaccggttcgcctggcccaaagttctgaaaatttcctacaagaggaacaacttttacatcaagattcgccccggagaattcgagcagttcgaatctaccatcggatttaaattgccaaaccacagagcggccaaacgcctgtggaaggtttgcgttgagcatcatacttttttcagattgctcctgcccgaagctccgccaaagaaatttctgacgctgggctccaaattcaggtactccgggagaacccaagcccaaactcgtcgcgcatctgcgctaattgatcgtcccgccccatatttcgaacggtctagtagtaaacgatacaccatgagcagatctctggatggggaggtgggaacaggccagtacgccactactaaaggcatcagccagaccaacctgattactactgtgaccccagaaaagaaagcagaggaggagagagacgaagaagaggacaagaggaggaagggcgaagaggtgacacccatcagtgctatcagacatgagggcaaaagccctggcttgggcaccgattcatgtcccctttcacccccaagtactcactgcgcccccacgtctcccaccgagctgagaagacgctgtaaggagaacgactgtaaactgcccggctatgagcccagtcgagctgagcacctgccaggcgaaccagcactagattcggacgggcccggtcgcccgtatttgggggatcaggatgttgctttttcctataggcagcaaacggggaaaggaacaacattgttttctttttctcttcagctccctgaatcgttcccatcgcttctcgatgacgatggatacctgtcctttccaaatctttctgagactaaccttctacctcagtcattgcagcactatttgccaattcgaagcccttccttagttccctgttttttgtttatcttcttctttcttctgagtgcaagtttcagcgtcccatatgcacttacactttcattccctctcgcactttgtctatgttacctcgagcccaaggcagcaagcttaagcgcgagcctggataatgaccctagtgattcttctgaggaggagaccgattctgaaaggacggacaccgccgccgacggggaaactaccgcaactgagtctgaccaggaagaggacgccgagctgaaagcccaggagttagagaaaacacaggatgacttgatgaaacatcagaccaatatctccgagctcaaacgaaccttcctggagacatccacagatacagccgtgacaaatgaatgggagaagcgtctcagcacgagtcctgttcggttggccgccaggcaagaggacgcccctatgatcgaacctctcgtcccagaggagaccaagcagtcttctggggagaagctgatggatgggagcgagatctttagtctgctcgagtcggcccgcaagcctactgagtttattggcggtgtgaccagcacgtctcagtcttgggtgcagaaaatggaaacaaaaaccgagtcttccggtatcgagacagaacccacggtgcaccacctaccgttgtctaccgagaaagtagtccaagagacagtgctggtggaagagcgcagagtcgtgcatgcgagtggtgatgccagctactccgccggtgattccggagacgcggcagcacagccggcatttacggggatcaagggtaaggagggtagcgcccttaccgaaggcgccaaagaggagggtggagaagaggtagcaaaggccgtactggaacaggaggagacagctgcagctagcagagagcgacaggaggagcagtctgcagccatccacattagcgagaccctggaacagaagcctcactttgaatccagcacagtgaaaactgagacaatatccttcggatcagtcagcccaggtggagtcaaactggagatcagtacaaaagaggtgcccgttgttcacaccgagaccaaaactatcacatatgagtcatcacaggtcgatcctggcaccgatctcgaaccaggagtgctgatgagtgcccaaactatcaccagcgagacaaccagtacaaccacgactactcacattacgaaaaccgttaagggcggaatttccgaaacccgcatcgagaaaaggattgtaataaccggagacgccgatatcgaccacgaccaggccctcgcgcaggccatcaaagaagcaaaagaacagcatccagatatgtctgtgactaaggtcgtggttcacaaggagactgagattacgcctgaggatggcgaagattag

SEQ ID NO: 116045 - DNA, 2598 bp, synthetic construct
  misc_feature 1..2598: note = Description of Artificial Sequence: Synthetic coding sequence
  source 1..2598: mol_type = other DNA
atgacgaccgagtccgggagtgattccgagagcaagccggaccaggaggctgagccccaagaggctgctggagctcagggcagggcaggcgcacctgtgccggagccccctaaagaagaacagcagcaggccctcgagcagttcgcagctgcagctgcacactctacacctgttcgtcgagaagtcactgacaaggagcaggagttcgcggctcgagctgccaagcagctggaataccagcagcttgaggacgacaagctgtcccagaagtcgtctagctccaagctgagtaggtctcccttgaaaatagtcaaaaagcctaagagcatgcagtgtaaagtgatcctattggatggctcggaatatacgtgcgacgttgagaaacggtcaagaggccaggtgctgtttgataaagtttgcgaacacctcaatctgctggagaaggattacttcggattgacttatcgggatgctgaaaaccagaagaactggctcgaccctgccaaggagatcaagaaacaggtgagatccggagcgtggcatttttcgttcaatgtgaaattctatccccctgacccggcacagctgtcggaagacatcactcgctattacctgtgtttgcagttgcgggacgatatcgtttctggccggctcccctgctccttcgtgaccctagccttattgggctcatacactgtgcaaagtgagttgggcgattatgatcccgatgaatgcgggtccgactacatttccgaatttagattcgctccgaatcatacaaaggagctcgaggataaagtgatcgagctgcacaagagtcacagaggcatgacccctgctgaagctgagatgcacttcctcgaaaacgcaaaaaagctaagtatgtacggagtggatctgcaccatgccaaggactctgagggggtcgaaatcatgctcggggtatgtgccagcggtcttctgatttatcgagaccgcctgcgcatcaaccgcttcgcttggccaaaagtgctcaaaatctcatataagcgtaataatttctacattaaaatcagacctggtgaatttgagcagttcgaatcaaccatcggatttaaactcccaaaccatcgagcagcgaagagactgtggaaggtttgcgttgaacaccacacgttcttccgactgctgttgccggaggcgcctcccaaaaagtttctgactctgggctcgaagttccggtattccggtagaacccaggctcagacaaggcgtgccagtgccctcatcgataggcctgcaccttattttgaaaggagcagctccaaacggtatactatgtcccggtcattggatggcgcttcagtgaacgagaaccacgaaatatacatgaaggacagcatgtccgccgctgaagtgggaacaggacagtacgccacaacaaagggaataagtcaaacgaatctgataactaccgttaccccggaaaaaaaggcagaggaggagagagacgaagaagaagacaagagacgtaaaggagaggaggtgacacccatctccgctattcggcatgaaggtaagaccgatagcgaacgcactgatactgccgctgatggagagaccacagcaaccgaggaactcgagaaaactcaggatgacctgatgaaacaccagaccaatattagcgaactgaaacgcaccttcttggagacctccacggatacagctgtcaccaacgagtgggaaaaaagactgtccacatcccctgtgcgtcttgccgcacgccaagaagacgccccaatgatcgagcctttggtgccagaggagaaaatggaaacgaaaaccgagagttcagggattgagacagaaccaaccgtccatcatctgcccctgagcacggaaaaagtggtgcaagaaactgtactggtcgaagaaagaagggtggtacatgccagtggcgacgcaagctatagtgcaggtgacagtggcgacgcagctgcccagcccgcatttacgggaataaaaggtaaggagggctccgcattgaccgagggggcaaaggaggaaggcggcgaggaagtggccaaggccgtgctggaacaggaagaaaccgccgccgccagccgcgaaagacaggaggaacagagcgccgcaatacacatctcagagactctagagcagaaaccccattttgagtcatcaactgtgaaaaccgaaaccatctcatttggatcggtctctcccgggggagtgaaactcgagatcagcactaaggaggtgcctgtggtgcacaccgaaaccaaaacgatcacgtacgagtcctcacaggtagacccaggcacagacttggagccaggtgtactgatgtccgcccagaccatcacaagcgagacaactagtacaactacgaccacacacattaccaagactgtgaagggaggcatatccgagaccagaatcgaaaaaaggatcgtcatcacaggcgatgcagatattgaccacgaccaagcacttgctcaggccatcaaagaagctaaagaacagcatcccgatatgagtgtcacgaaagttgtagtgcacaaagagactgaaatcacccctgaggatggcgaagactag

SEQ ID NO: 116046 - DNA, 1155 bp, synthetic construct
  misc_feature 1..1155: note = Description of Artificial Sequence: Synthetic coding sequence
  source 1..1155: mol_type = other DNA
atgaaacatcagactaacatttcggagttgaagcggacctttctggagacatcaaccgatactgccgttaccaacgaatgggagaagcgcctgagcacttccccggtacgactggcagcccgccaagaggatgcacccatgatcgagcctctggtgcccgaggagactaaggaagagaccgagatctctgaaaaagttatctttctccagcagggatctgctccctttctggagagtcagacgaagcaatcttcgggagaaaagttgatggatggatccgagatcttctcactgctagaatctgcacggaagccgaccgagttcataggcggagtgaccagcacttctcagagttgggtacagaaaatggagacaaagacggagagttcaggcatagagaccgagcctacagtgcatcatctaccattgagcacagaaaaagtggtacaggagaccgtgctcgtcgaggaaaggcgcgtggtgcacgccagcggcgacgcaagctatagcgctggggacagtggtgatgctgccgcccagcccgccttcaccggaattaaaggaaaggaaggcagcgccctgacagagggagcgaaagaagaaggcggagaggaagtggcaaaggctgttttagaacaagaggagaccgcagctgcctcacgagagcgtcaggaagaacagtccgcagccattcacatctccgagaccctcgagcagaagcctcatttcgagagttccacggtgaagaccgagaccatcagttttgggtcagtgagtcctgggggggttaagctggagatttccactaaggaagtgcccgtcgtccacacagaaacgaaaactataacgtatgagtcttctcaggtggaccccggcaccgatctcgagccaggtgtcctgatgtcggctcagaccatcacatcggaaacaacatctaccaccacaaccactcatattacaaaaactgtcaagggggggataagtgagacgagaatcgaaaaacgtatagtgatcactggagatgccgacattgatcacgaccaagccctggcccaggctataaaggaggccaaggagcagcaccccgatatgtccgttactaaggtcgttgtgcacaaagagaccgagataactccggaagacggagaggattag

SEQ ID NO: 116047 - DNA, 2271 bp, synthetic construct
  misc_feature 1..2271: note = Description of Artificial Sequence: Synthetic coding sequence
  source 1..2271: mol_type = other DNA
atgcaatgcaaagtgatccttttagatggttccgagtatacgtgcgatgtagaaaagcgatccaggggtcaggttctttttgataaggtatgtgagcacctgaacctgctggagaaagactactttggattaacgtaccgtgatgccgaaaatcagaaaaactggctggaccccgctaaggagattaagaaacaggttagaagcggcgcctggcactttagctttaatgtgaaattttatccacccgaccccgcacagttatcagaggatataacgcgatactatctgtgtcttcagctgagggatgacattgtaagtggaagactgccgtgttcatttgtgacgctggccctgttaggcagctataccgtgcagagcgagttaggagactatgatccagacgagtgtggctctgattatattagcgaattccggtttgctccaaatcacacaaaggaattggaagacaaagtgatcgaacttcataagagccaccgtggcatgacacccgcggaggcagaaatgcatttcctagagaatgccaagaagctgtctatgtatggcgtcgacctgcaccacgctaaggacagcgaaggggttgaaatcatgttaggtgtctgtgcctctggactgctgatttaccgggataggctgcggatcaaccggtttgcctggcctaaggtgttgaagatatcatacaagaggaataacttctacatcaaaataaggccaggagagttcgagcaattcgagagcactatagggtttaagcttcccaaccaccgggctgctaagcgattgtggaaggtgtgcgtggagcaccacactttctttaggctcctgcttcctgaagctccccctaagaaatttctgactttgggcagtaagttcagatattccgggcggactcaggctcagactcgccgtgcttcagctctgattgataggcctgccccatattttgagcggtccagtagcaaacggtatacaatgagccgttcactcgacggcgcgagtgtcaatgagaaccacgaaatctacatgaaagattccatgagtgcagccgaagtgggtactggtcagtacgctaccacaaaagggattagccagacaaatctcataacaaccgtcacacctgagaagaaggcagaggaggaaagggatgaggaggaggataaaaggagaaaaggcgaagaagtaacaccgatatcagccattcgtcatgagggtaaaaccgattcagaacgcaccgataccgccgcggacggcgagactacagcaactgaggaattagagaaaacccaagatgacctcatgaagcatcaaacaaatatcagcgagctgaaaagaacttttctggaaacgtctaccgacaccgctgtgaccaacgaatgggagaaacgcctgtctacttctcctgtgagactagcggcccggcaggaagatgcacccatgatcgagcctctggtacccgaggagaagatggaaactaagaccgagtctagcgggatcgaaaccgaacccacagtgcatcacctcccactgagcacagaaaaggtggtgcaggagaccgtcctagttgaagaacggcgcgtagtccacgcatccggggatgcttcttacagcgcaggagattcaggcgatgcagccgcccagcctgcttttaccggcattaagggcaaggaaggatccgccctcaccgaaggggctaaggaagagggtggagaggaagtggcgaaggcagtgttggagcaggaagagacagcagcagctagtagagagaggcaggaagaacagtccgcagccatacatatcagtgaaaccctcgagcagaaacctcactttgaaagctccactgtgaagactgagaccataagttttggctccgtgagccccggcggggtcaaactagaaatttcaacaaaggaagtgccagttgttcatactgaaaccaagacaatcacatacgagtcaagccaggtggaccccggcacagacttagaacctggtgtcttgatgagcgcccagacaatcacttcagaaactaccagcactactacgacaacccacattacaaagaccgtgaaggggggaatatcagagacacgaattgagaaaaggatagtcattacgggcgatgctgacattgatcacgaccaggcattagcacaggctatcaaagaagcaaaagagcagcatcccgacatgtcagtcacaaaggtcgtcgttcacaaggaaaccgagatcacaccagaagacggtgaagactag

SEQ ID NO: 116048 - DNA, 1179 bp, synthetic construct
  misc_feature 1..1179: note = Description of Artificial Sequence: Synthetic coding sequence
  source 1..1179: mol_type = other DNA
atgaaacatcagaccaacatatctgaactcaagcggaccttcctggaaacaagtactgataccgccgtgactaacgagtgggagaagcgcctgtctacatctcctgtgcgacttgcagcaagacaggaagatgcacctatgatagagcccctggtgcccgaagaacccagcgtgatcaaaaaaatgcaggagggagatagtgccgatagtgtggtgaccagccgccagattatcttccagaagaccgtgccttctactctggagacaaagcagtcctcaggtgaaaaactgatggatggtagtgaaatcttctcgctgctggaaagcgctagaaagccaacggagtttatcgggggagttacttccacatcacaaagttgggtgcagaagatggagacaaagacggaatccagcggaattgaaacagaaccgaccgtgcatcacctgcccctaagtaccgagaaagtcgtgcaggagacggtgttagtcgaggaacgtcgggttgtgcatgcttctggcgacgcgtcgtattctgccggagattccggcgacgcagctgcccagccagctttcactggaatcaaaggcaaggaaggatctgctctgaccgagggagccaaggaagagggcggggaagaggtggcaaaagctgtccttgaacaagaagagactgcagccgccagtagggagcggcaggaggagcagagtgccgctattcatatctcggagacactggagcaaaaaccacatttcgagtcatctacagtcaagacagagaccatttctttcggctctgtttcccctggcggcgtaaagctcgagattagcactaaggaagtgcctgtcgtgcatacagagaccaagactatcacctacgaaagttcccaggtggaccccggaacggatctggagcctggcgtgttaatgagtgcgcagacgatcacaagcgagacaaccagtaccacaacaacaacccatatcacgaaaactgtcaagggcggcattagcgagactagaattgagaaacggattgtaatcaccggtgatgccgacatcgaccacgaccaggcactcgcccaagctataaaagaggctaaagaacagcatccagatatgtccgtgacaaaagtagtggtgcataaggaaacagagattacccctgaggatggggaggattag

SEQ ID NO: 116049 - DNA, 936 bp, synthetic construct
  misc_feature 1..936: note = Description of Artificial Sequence: Synthetic coding sequence
  source 1..936: mol_type = other DNA
cgctggcagttgggcggcgcagcgactgctgccgctggcggagctcgggtctggcgaccactccccgcctcccgttcctcctttcctcccccttccccgagattggatcccggggagtttgaaggaaagtctccctgtggggggacctgtgaacagccttacctgtcgcttcccctccgctacttctttagcccaaggaaagtggttccagcaggctgcgaacaagcaccaggaggcgccccaaaagaagggttcggtgattcagattccgagtcgaagccggaccaggaggctgagcctcaggaagccgcgggcgcacaaggaagggccggtgcacctgtgcccgagccaccgaaggaggagcagcagcaagctcttgagcagtttgcagcagcggcagctcacagcactccggtccgccgcgaagttaccgataaagaacaggagttcgccgcgcgagccgcgaagcaactggaatatcagcagctggaggacgataagctgagccagaagtcatcatcctccaagctatctcgaagccctcttaaaatcgtgaaaaagcctaaaagtatgcagtgtaaggttattctgctggatgggagcgagtatacttgcgacgttgaaaaaaggagccgcggacaggtactgtttgataaagtgtgcgaacatctcaatctgctcgagaaagattactttggcctcacgtaccgcgatgcggagaatcagaagaactggctcgaccctgccaaagagataaaaaagcaggtgagaagcggggcttggcactttagtttcaatgtgaagttctatcctcctgacccagctcagttatctgaggacataacaagatattacctgtgcctgcagctacgcgatgatatcgtatcagggcggcttccctgctcattcgtcaccctggctctcctaggcagctag

SEQ ID NO: 116050 - DNA, 2652 bp, synthetic construct
  misc_feature 1..2652: note = Description of Artificial Sequence: Synthetic coding sequence
  source 1..2652: mol_type = other DNA
atgacaaccgagagcggaagcgatagcgagagtaagccagatcaagaggccgaacctcaggaggccgctggagctcaaggccgggccggcgcccccgtcccagaacccccaaaagaggaacagcaacaggctctggaacaattcgctgcagccgccgcacactctactcccgtgcgcagagaggtgacggacaaggaacaagagtttgcggccagagccgccaaacagctagagtatcagcagctagaagacgataaactgtcacagaagtcctcctcttctaaattgagtcgctcacccttaaagattgtcaaaaaaccaaagagcatgcaatgcaaggtgatcttgctggatggatctgaatatacatgtgatgtcgagaaaagaagccgcggccaggtgcttttcgataaagtgtgtgagcaccttaacttgttagagaaagactacttcggtctcacctatcgggacgcagagaatcagaaaaactggcttgatcccgctaaggagatcaaaaagcaggtgagaagtggcgcttggcacttcagcttcaacgttaagttctaccccccggatcccgcccagctctctgaggatattacaagatactacttatgcctgcagctgcgcgacgatatcgtttctgggaggctgccctgtagcttcgtcacactcgccctgctaggttcatacaccgtgcagagcgagctgggagactacgaccctgacgagtgtggaagtgactacattagcgaattccgttttgcgccaaaccacacgaaggagcttgaagacaaggtcatcgaattacacaaatcccatagggggatgacccccgcggaagccgagatgcatttcctggaaaacgccaaaaaactgtctatgtacggagttgacctgcatcacgctaaagatagcgagggggtcgagattatgctgggagtgtgtgcgtccggcttactgatctatcgagatcgcctcagaatcaaccgatttgcctggcccaaagtgttaaagatcagctacaaaaggaacaacttttatattaagattaggccaggggagttcgagcagtttgaaagcacaattggattcaaattgcctaatcatagagccgctaaacggctgtggaaagtgtgtgtggagcaccatactttcttcagactgctcctcccagaagctccaccgaagaagttcttgactctgggttccaagttccgctacagcggacgcactcaggcccagacaaggagagccagcgcgctcattgacaggccggcaccatacttcgaaaggtcttcttctaagcgatacactatgagccgatctctggacggagcatccgttaatgagaatcatgagatctacatgaaggactctatgtcggctgccgaggtgggaaccggtcaatacgcaacaaccaaagggataagtcagaccaacctaatcacaactgtgacgcccgagaagaaggcagaagaagagagggacgaggaagaggacaaaaggcgaaagggggaggaggtgacgcccatttcagcaattcgccatgagggaaaaacagattcagagcgcactgataccgctgctgatggggagaccacagctaccgagtcagatcaagaagaggacgccgagctgaaagcccaggaactggaaaagacgcaggacgacttgatgaaacaccagactaacatttctgaactgaagcggacttttctggaaacttctactgacaccgctgtgacaaacgagtgggagaaacggctctccacctcccccgtccggctagcagcgcgccaggaggatgcccctatgatagagcctctcgttcccgaggaaacaaagcagagctccggtgaaaaactgatggatggaagtgagatattcagtctccttgagtctgcacggaagccgacagagtttattggcggtgtcacctccacctctcagtcctgggttcagaagatggagactaagacagaaagttctggaattgagactgagcctaccgtgcaccacctacccctgagcacagaaaaggtggtgcaggaaactgtgttggtggaggaaagaagggtggtgcatgcatctggagatgcgagctactccgctggcgatagtggcgacgctgcggcacagccagcctttacaggcatcaaaggtaaggaaggcagcgcactcaccgaaggcgccaaggaggagggaggtgaagaggtggccaaggccgtcctggaacaggaggaaaccgccgccgctagtcgcgagcgtcaggaggagcaatctgccgctatacacattagcgagaccctggaacaaaagcctcatttcgagagcagcactgtgaagaccgagactattagcttcggtagcgttagtcccggaggtgttaagctcgaaatcagtactaaagaggtccctgtagtacacacagagactaaaaccattacatacgagtcttctcaggttgaccccggcactgatctcgaacctggtgtgctgatgtcggcccagacaattacatccgagacaactagcaccaccaccaccacacatattactaaaacagtaaaaggcggtatctctgaaacccgtattgaaaaaaggattgttattacaggagacgccgacatcgaccatgatcaggagtag

SEQ ID NO: 116051 - DNA, 2271 bp, synthetic construct
  misc_feature 1..2271: note = Description of Artificial Sequence: Synthetic coding sequence
  source 1..2271: mol_type = other DNA
atgcagtgcaaagttatactactggacggatccgaatatacctgtgatgtcgagaaacgaagccgcggtcaggtgttatttgacaaggtctgtgagcatcttaacctcctcgagaaagattattttggtctcacctaccgagacgcagaaaatcaaaaaaactggctggaccctgcaaaggagatcaagaaacaagtcagatctggagcatggcatttctccttcaacgttaagttttacccacctgacccagctcagctatcagaagacattactcgatactatctttgcctccaactgcgcgatgacatagtatcaggacgactgccctgctcattcgtgacgctcgcattgcttgggagctacactgtccaaagtgagctgggtgattacgacccggacgaatgcggttctgactacatttccgagttcagatttgctcccaatcacaccaaggaactggaagataaggtgatcgaactccacaagtcacaccgcggcatgaccccagctgaggcggaaatgcacttcctggaaaacgccaaaaaactgtccatgtatggcgtcgatctccatcatgccaaggacagcgagggtgtggaaattatgcttggcgtttgtgctagcggattactgatctaccgggacaggctcagaatcaatcgcttcgcctggcccaaagtgcttaaaatcagttataagaggaataacttctacattaaaatcagacccggagaattcgaacagttcgagtctaccattggattcaagctgcccaaccacagggcagcgaaacgactttggaaagtttgtgtggagcaccacacattttttagactgctactgccagaggcacctcctaagaagttcctgaccttgggaagcaaatttcgctactccggccgtactcaagctcagaccaggcgggcttcagccctgatcgatagaccagctccctactttgagagaagctctagcaagcgctacactatgagcagatccctcgatggagcttcagtgaacgaaaaccacgaaatttacatgaaagacagtatgagcgccgcagaagtggggactggacagtacgccacgaccaaaggcatcagtcagacgaacctcattaccaccgttacccctgaaaaaaaggctgaggaggagcgcgatgaggaggaggacaaaagaagaaagggcgaggaagttacccctattagcgctatccggcacgaggggaaaacagattcagagcgtaccgacacagccgcggatggggagacaacagccacggaagagctcgagaagactcaagacgatctgatgaaacaccagacaaatattagcgaactgaagcgcacattccttgagacttcaacggacaccgcggtcacgaacgagtgggagaagcgcctgagtacttcgccggtgcgactggccgcacgccaggaggatgcccctatgatcgagccgttggtgccagaagagaagatggaaacaaagaccgagagctcagggattgaaactgagcccacagtccaccacctgcccctgagcacggagaaagtggttcaagaaactgtgttagtggaagaaagaagagtcgttcacgcctccggcgatgcctcttacagtgccggtgactcaggcgatgccgctgcacagcccgcattcaccggcatcaaaggtaaagagggcagcgccttaacagaaggcgcaaaggaagaggggggggaggaagtggccaaagcagtcctggaacaagaggagaccgctgccgccagtcgggagaggcaggaagaacagtccgccgccatccacatctcagagaccctcgaacagaaacctcactttgagtcttcgaccgtcaaaacggagaccatcagcttcggatcagtttctccaggcggcgtgaaacttgaaatttccaccaaggaggtccccgtggtgcatacagagaccaaaacaataacctacgagtcctcacaggtcgatcccggaacagatctggaaccaggcgtcctgatgagcgcccagaccatcacaagtgaaacgacctctactacaaccacgacccatattactaaaacagttaagggaggaatcagcgaaacccgcattgaaaagcgtattgtgataactggtgatgctgacattgaccacgatcaagctctcgcccaggctatcaaggaagctaaggagcagcacccagatatgtccgtcacaaaagttgtggtacacaaagagacagaaatcactcctgaggatggagaggactag

SEQ ID NO: 116052 - DNA, 2166 bp, synthetic construct
  misc_feature 1..2166: note = Description of Artificial Sequence: Synthetic coding sequence
  source 1..2166: mol_type = other DNA
atgggccagggcgagccctcccagagatcgactgggttagctggcctttatgctgcacccgcggcatcacccgtatttattaaaggcagcgggatggatgctctgggtattaaaagttgcgacttccaggcagctcggaataacgaggaacaccacaccaaagccttatcatcccgcagattgtttgtgagaaggggccagcctttcactattattctgtactttagagcccctgtgagggcttttttacctgccctaaagaaagtggctcttaccgcacagacaggtgagcagccctccaagatcaatcgcacacaggctacattccctatcagcagtctgggtgatcgcaagtggtggtctgcagttgttgaggagagagatgcccagtcatggacaatctccgttactacccctgcagacgcagtgataggccactactctttgttactgcaggtgtctggaagaaagcaacttttgttgggccagttcactctgctgttcaatccatggaacagggaggatgcggtgtttctcaagaacgaggcccagcggatggagtacctcctgaaccaaaacgggctgatttatctggggaccgcagactgcattcaggccgaatcgtgggacttcgggcagttcgagggcgacgtgatcgacctgtctctgcgtcttttgtctaaagataaacaggtggagaagtggtcacagcctgttcatgttgcccgtgtcctgggcgcgttattgcactttctaaaggaacagagagtgctgccgaccccgcagacacaggcgacccaggaaggcgccttgctgaacaaaagaaggggcagtgtcccaattcttagacagtggctgaccggtcgcggcaggcccgtctatgacgggcaagcctgggtgctggcggctgtggcttgcacggtgctgaggtgtcttggaattcctgcacgcgtggtcaccacatttgcctccgcacaagggaccggaggccgcctgctgatcgacgagtactacaacgaggaagggctgcagaatggagagggtcagcgcggacggatttggatttttcagacatcaacagagtgctggatgacccggcctgctctgccacaggggtacgatggatggcagattctgcatcccagtgctccgaacggtggaggcgttctgggctcttgtgacctcgttccggtacgggcggtcaaggagggtacgttaggactgactccagccgtctcagatctgttcgccgcgattaacgcctcctgtgtggtctggaagtgctgtgaggatgggactttggaactgacagactccaacacaaagtacgttggcaacaacatcagcaccaaaggggttgggtctgatagatgcgaagacatcacgcagaattataagtaccctgaagggtcccttcaagaaaaagaagtcctggaaagggtagagaaggaaaagatggaacgggaaaaggacaacggaatccgtcctccaagcctggagaccgcatcgccactgtatctgctgctgaaagcccccagctctttgccactccgcggcgacgctcaaatctcagttaccctggtcaaccacagtgagcaagagaaagctgtccagctcgcgatcggcgtgcaggcagtgcactacaacggcgtgttagctgcgaaactctggaggaagaaactgcatctaactctgtccgctaacctcgagaaaattatcaccatcggcctgttctttagcaattttgagcgcaatcccccagaaaatacatttttgcggctgactgcaatggccactcacagcgagtccaacctgagctgttttgcacaggaggatattgctatatgtcgcccgcatctggccatcaaaatgccagagaaagcggagcagtaccagcctctgacagcctcagtttcccttcagaactcactggacgctcccatggaggattgcgtcatctctattctggggcggggcttaatccatagagagaggagttaccgttttaggagcgtttggccagagaacacaatgtgtgccaaattccagtttacacccactcacgtgggcctgcagaggctcacagtcgaagtcgactgtaacatgttccagaatttaaccaactacaagagcgtgactgtggtagctccggaattgtctgcctag

SEQ ID NO: 116053 - DNA, 1860 bp, synthetic construct
  misc_feature 1..1860: note = Description of Artificial Sequence: Synthetic coding sequence
  source 1..1860: mol_type = other DNA
atggggcaggcactagggattaagtcttgtgatttccaggctgcccggaataatgaagaacaccacaccaaagccttaagttctcgtcgtctgtttgtccggagaggccaacccttcaccatcatcctctacttccgggcacccgtaagagccttcttacccgctttgaagaaagtagcactgaccgcccagacaggagagcagccctctaaaatcaacagaacccaggccacatttccgatttcatcattgggggataggaagtggtggtcggccgtggtggaagagagagatgcacaaagctggacaatttccgtgacaacaccagccgatgcagtgatcggacactatagtctgctgctgcaggtgtccggtagaaagcagctgctactggggcaattcacactgctgttcaatccttggaaccgggaagacgccgttttcttgaagaacgaggcgcagcggatggagtatctgctgaatcaaaatggcctgatctacttggggactgccgattgtatccaggccgagtcgtgggatttcggtcagttcgagggtgatgttatcgacctttctttacgcctgctgtccaaggacaagcaggtggagaaatggagtcagcctgtgcatgttgctcgagtgctcggcgcactgctgcacttcctgaaagagcagagagttctgcccaccccccagacccaggctactcaggaaggagcgctcttgaacaagcgaagaggcagcgtgcctatcctgaggcagtggctaactgggcgaggtaggccggtgtacgatggtcaggcttgggtcctggctgcagtggcgtgtactgtccttaggtgccttggcatccccgcccgcgtggttaccactttcgcatctgctcaggggactggcggaaggcttctgatcgatgagtattacaacgaagagggcctccagaatggagagggacaacggggccggatctggaagtgctgcgaagatggcaccttagagctgaccgattctaataccaaatatgttggaaacaacatttccacgaagggtgtcgggagcgataggtgcgaggatatcactcagaactacaagtatccagagggctccctgcaagagaaggaggtgctggaacgtgtggaaaaagagaaaatggaacgcgagaaagataatggaatccggccgccttcactggagacagcctcccctctgtacctgttattgaaagctccatcatctcttccactaagaggggatgcacaaatttccgttacactggttaatcactctgagcaagaaaaggctgtccagcttgcaatcggagtgcaagctgtccactataatggcgtgctagccgcgaaactgtggaggaaaaagcttcacctgacactgtccgctaacctggaaaagattattaccataggcctctttttcagcaacttcgaacgcaatcctccagagaatacgttcctccggctgactgccatggcaacccattcagagtcaaatctctcatgttttgcccaggaagatatcgcaatctgcaggcctcacttagcaattaagatgccagagaaggccgaacagtatcagcccttgaccgcctctgtgtcacttcaaaactctctggatgcaccaatggaagattgcgtcattagcatccttggccggggtctcatccaccgcgaacgcagttacagatttaggtctgtgtggccagaaaacaccatgtgcgctaaattccagttcacacccacccacgtcggcctgcagcggctcaccgttgaagtggactgcaacatgttccaaaacttgacgaactacaaatcggtgaccgtggtggcccctgaattgagcgcctag

SEQ ID NO: 116054 - DNA, 2076 bp, synthetic construct
  misc_feature 1..2076: note = Description of Artificial Sequence: Synthetic coding sequence
  source 1..2076: mol_type = other DNA
atgggccaggctctgggaatcaaatcatgtgattttcaggcagctcgaaacaacgaagaacaccatactaaggctctgagcagccgcagactctttgtacgccgagggcagccattcactataatcctgtattttcgcgctcctgttagagcttttctccccgctctcaaaaaggttgctctgacggcccaaacaggagagcagcctagcaagatcaatcggacccaggcaacctttcccatttcatccctgggtgataggaagtggtggagcgctgtagtcgaagagagggacgcccagagttggaccattagcgtgaccacccccgctgatgcagtgataggtcactatagcctattactacaggtctctggtcgcaagcagctcctactgggtcaattcacccttttgttcaatccatggaatcgtgaagacgcagtgtttctgaagaacgaggctcagcggatggaatacctcttaaatcaaaacgggttgatctatctggggacggcagactgtatccaggccgaatcttgggattttggacagtttgaaggtgacgtaatagacctgtccctgcgcctgctctcaaaagacaaacaggtggagaaatggagtcagcctgtgcacgtggctagggtgcttggtgctctcctacactttctgaaagaacagagagtgctaccgaccccgcaaacgcaggccacccaggaaggagccctgctgaacaaacgccgagggtcagtcccaattttgagacaatggttaactggcaggggacgcccagtatatgacgggcaggcctgggtgctagccgccgtggcctgtactgttctgcggtgcctgggtatcccagctagagtagtgaccaccttcgcatctgcccagggaaccggtggacgactgcttattgacgagtattacaacgaggaggggctgcagaacggagaaggacagaggggaaggatatggatctttcagacaagtactgaatgttggatgacccgcccggcccttccacagggctacgacggctggcaaatactgcaccccagtgcccccaatggaggtggtgtgctcggatcctgtgacttagttccggtaagagctgtcaaggaaggaacgttgggtctaaccccagctgtatcggacctctttgctgccatcaatgccagttgcgtagtctggaagtgctgcgaagacggcacactagaactaactgattcaaacacgaagtatgtagggaataacattagtactaaaggcgtggggagcgatagatgtgaagacattacccagaactacaagtacccggaaggctcattgcaggagaaggaggtgctggaacgcgtcgagaaggaaaaaatggaaagggagaaggataacggcatcagaccgccctctttggaaacagcctcccctctatacttgctgctcaaggctccaagtagtctgccgctgaggggggacgcgcaaatcagtgtgactctcgtcaaccattctgagcaggagaaagctgttcaactggccattggtgtgcaggccgtacattataatggcgtcctcgccgccaagctgtggcgcaagaaactgcatttaactctgagcgccaatctggaaaagatcatcacgatagggttattcttcagcaacttcgagaggaatccaccagaaaacaccttcttaagactgacggcgatggccacccattccgagtctaatctgtcatgtttcgcacaagaggatattgcaatctgcaggcctcatctcgcaattaagatgccagagaaggccgagcagtatcagcccctgacggcctctgtcagcctccaaaacagcttggacgcaccgatggaagactgcgtgatttcgattctgggccgcggcctgattcaccgtgagaggtcgtataggttcagatctgtatggcccgaaaacactatgtgtgcaaaattccaattcaccccaacccatgtcggcctccaaagattaaccgtcgaggtagattgcaacatgtttcaaaaccttaccaactacaaatccgttacagtcgttgcccctgagctgtccgcttag

SEQ ID NO: 116055 - DNA, 1842 bp, synthetic construct
  misc_feature 1..1842: note = Description of Artificial Sequence: Synthetic coding sequence
  source 1..1842: mol_type = other DNA
atgggtcaggcactgggcatcaaatcttgtgactttcaggcggctcgaaacaacgaagaacatcataccaaggctctgtccagccgacgtctgtttgtgcgtcgtgggcagccttttactatcatcctgtatttccgcgcacctgtcagggcgttcctgccagccttgaaaaaggtggccctgacagctcagactgaagatgctgtgttcctgaagaatgaagctcaaaggatggaatatcttctcaaccagaacggcctgatctacctgggcacagccgattgtattcaggcagagtcctgggactttggacagtttgaaggagacgtcatcgacttgtcactcaggcttctttccaaagataaacaagtggagaagtggtcccagcccgttcatgtggctcgggttttaggggccctccttcacttcctcaaggaacagagagtcctgcccacaccacagacccaagcgacccaggaaggcgctctactcaataaaagacggggctcagtgccaattctgcgccaatggctgaccgggcgcgggcgtccggtgtacgacggtcaagcctgggtcttagctgctgtcgcctgtaccgtgttaaggtgcctcggaattcctgcacgggtggtgactacgtttgcctctgctcagggaacaggtggtagattactgatagacgaatactacaacgaggagggactgcaaaacggagaaggccaaaggggtagaatctggatttttcagacatccacagaatgttggatgacccgacccgctttaccgcaaggctatgacgggtggcaaatcttacacccaagtgccccaaatgggggcggggtcctcggctcttgtgaccttgtgccagtcagggccgtgaaggagggcacccttggactgacccccgctgtctccgatctctttgctgcaatcaatgctagttgtgttgtgtggaaatgctgcgaagatggcaccctggaactcaccgatagcaacacaaaatatgttggaaataacatttccacgaagggcgtgggatcggacaggtgcgaggatatcacacagaactataaatacccagagggatccctccaggagaaggaagtgctcgagagggttgaaaaggaaaagatggagcgcgaaaaggataatggcattaggcctccttcactggaaaccgccagcccactttacctcctgcttaaggccccttcttccctgcccctcaggggtgatgcccaaatttccgtaaccttagtgaatcatagcgagcaggaaaaagccgttcagctggcgatcggtgtgcaagccgtgcattacaacggtgtcctggcagctaagctttggcggaagaagctccacctgaccttgagcgctaacctggaaaaaattattactattggtctcttttttagcaatttcgaacgcaatcctccggaaaatacattcctcaggctgacggcaatggcaacacactcagagtccaacctgagctgcttcgcacaagaagatatagctatctgtcgccctcatttagccattaaaatgccagagaaggctgagcaatatcagccactcacagctagtgtgagcctccagaatagcctggacgcgccgatggaggactgcgttatatccattctgggccgggggcttatacatcgggagcggtcctaccgcttccgttcggtctggcctgaaaacaccatgtgtgcaaaattccagttcacacctactcacgtaggtcttcagcgcttgacagtagaggttgattgtaatatgttccaaaatttaacaaattataaatccgtgaccgtggtcgctccagaattgagtgcctag

SEQ ID NO: 116056 - DNA, 1218 bp, synthetic construct
  misc_feature 1..1218: note = Description of Artificial Sequence: Synthetic coding sequence
  source 1..1218: mol_type = other DNA
atggagcggctgcaaaaacagcctcttaccagtccaggctccgtatctccaagccgggactcaagtgtacctggctcgcctagctccatcgttgccaagatggataaccaggtcttgggttataaagacctcgcagccatcccaaaggataaagccattttagacatagaaagaccggaccttatgatctacgagccacacttcacttattccctgctcgagcatgtagagttgcctcggtcccgagaaaggtctctgagccctaaaagtaccagcccccctccgtctccagaggtttgggcggatagccgttcacctgggataatctcacaggccagcgcccctcgcaccacagggaccccgcggacatccttgccgcactttcaccaccccgaaacatctcgccccgattccaacatatacaagaagccccctatatacaagcagcgggaatcggtgggcggctccccccagactaagcaccttatcgaggatctgatcatagagtctagcaagttcccagccgcccagccacccgaccctaatcagccggccaaaatagagaccgactattggccttgcccaccatccctcgcagtggttgaaacggagtggcgcaagcgcaaggcatccaggcggggagccgaagaagaagaagaggaggaggacgatgatagcggcgaagaaatgaaagccctgagggaaaggcaaagagaagagttaagcaaggtgacaagcaatctgggtaagatgattctgaaagaagaaatggagaaatcgttgcccattaggagaaaaacaaggtcactgccagataggactccatttcatacaagcttgcatcagggcactagcaagagcagtagcttgcccgcatacgggagaacaaccctcagcagattgcagtcaactgagttttccccttccgggagtgaaactgggtcgccaggattgcagaatggggaggggcagagaggccgaatggaccgcggaaatagcctcccttgcgtattggaacagaaaatctatccctacgaaatgctggtggttactaacaagggccgtactaagctgcccccaggcgtggaccgtatgcgcctggagagacacctttctgccgaagacttttcccgcgtgttcgccatgagtcctgaggaatttgggaaactggccctgtggaaaaggaacgaactgaagaagaaagcctcactattttag

SEQ ID NO: 116057 - DNA, 1218 bp, synthetic construct
  misc_feature 1..1218: note = Description of Artificial Sequence: Synthetic coding sequence
  source 1..1218: mol_type = other DNA
atggagcggttgcaaaagcagccgctcacctctcctggttccgtatcccccagcagggatagctccgtgcccggtagtccgtcatccatcgttgccaaaatggataaccaggtcctggggtacaaagacctggctgcaattccaaaagacaaggccatactcgatatagaacggccagatttaatgatctacgagccccactttacctatagcctccttgaacacgtggagctcccacgctccagggaacgcagcctgagccctaagtcaacctctccccccccatcccctgaggtttgggctgatagccgcagtcctggcattatctctcaggcctcagctccccgcacaactggaactcccagaacaagtttgccacatttccaccatcctgagacatcccggcctgactccaatatctataagaagccacctatttacaaacagcgcgaatccgtgggcggatctccacaaactaaacacctgattgaagacctaattatcgaaagttccaagtttcctgcagcccagccgcccgaccctaaccagcctgccaaaattgaaactgattattggccatgccctccatctctcgccgttgtagagactgagtggagaaagcggaaggcaagtagacggggggctgaagaggaagaggaggaagaggatgacgattctggagaggagatgaaggcactgcgagagaggcagagggaagagctcagcaaggtgactagcaatctcggcaagatgattctcaaggaggagatggagaagtctctgccaatccggagaaagacaagatctctccccgaccgaacaccattccacacaagtcttcaccaaggtacttccaagagctcctccctgcccgcctacggccgcacgacgctgagtaggctgcagagcacagagttctctcccagcggtagcgagaccggatcgccaggcctgcagaacggagaaggacaacgggggagaatggaccggggcaattcactgccctgcgtgctcgaacagaaaatttatccttacgagatgctggtggttacaaacaagggcagaacaaagctgccacctggcgtggatcgcatgcgcctcgagagacacctgagtgccgaagatttttccagagtgtttgctatgagccccgaagagttcgggaaactggctctgtggaagcggaatgagctcaagaagaaggcttcactcttctag

SEQ ID NO: 116058 - DNA, 1626 bp, synthetic construct
  misc_feature 1..1626: note = Description of Artificial Sequence: Synthetic coding sequence
  source 1..1626: mol_type = other DNA
atgatttacgagccacacttcacttactcattgctggaacatgtggagttgcctaggtctcgcgagcggtcgttgtctccaaaatccacgagcccaccccctagccctgaagtctgggctgactctaggtcaccaggaataatctctcaggcttctgcccctagaacaactggaacgcctcggacttctctgccccacttccaccaccccgaaacaagccgtcctgattccaacatatacaaaaagccgcccatttacaagcagcgggagagtgtcggagggtcaccccagacaaagcacctgatcgaggacttgattattgagagcagcaaattccccgcagcgcaaccaccggatccaaaccagcctgctaaaattgaaaccgactactggccctgtcccccttcactagcagtcgtggagacagagtggagaaagcgtaaagcctccagacgaggcgcggaggaagaagaggaggaggaggacgacgactccggcgaggaaatgaaggccctcagggagcggcagcgagaggagttaagcaaagtgacatctaaccttgggaagatgattcttaaagaggaaatggagaaaagtctgccaatcaggagaaaaacccgatccctccccgataggacaccttttcatacgtccttgcatcaaggaacttccaaatcctcctctcttcctgcttacggccgaaccactcttagtcggttgcagtccacggaatttagtccatccggatcagaaactggaagtccaggcctgcaaaacggcgagggccagaggggtaggatggacagaggtaatagtctgccatgtgtgctggagcagaaaatttacccgtacgagatgcttgttgtcactaacaagggtagaaccaaattgccacccggagtcgacaggatgaggctggagaggcatctaagcgccgaggatttctccagagttttcgcaatgtctcctgaggagttcgggaagctggccctttggaagcgcaacgagctcaaaaagaaggcttctctgtttggggcactggtggtgcggccggtgggttgtctagaacagctcgaggggcgctgccgaggtggaaaacgacccgggcggaagagttctagactgctctgccgtccaccatctccccccattcttaccccagacagctttcctgctcttcagccccctgccccccttacgctagttggaaccggcccgagcagtgcttccggaagggaggtcactccaccacttcagctggctctgacaagtgctcgaaagccccgcgcctctaagccctttgcacccgctctcaggctgccacagaagccaggactgcgagttgaaatgcccccgactcacgatcctggacccccgccagctagcagacctaggaatggcaatagctcgaccaaacctggtacaggccagaaacttggcctgccgccaccactggatggagtaaaacggcccgggctggcccatttcggcgttagctggttacccgccctgacttatacacacgcaccccctcacaccctctgctcactgaaaaacgtcatatactggggccccccgtcctgctttccccacctccccttaccttacctcacccctccagcatag

SEQ ID NO: 116059 - DNA, 1152 bp, synthetic construct
  misc_feature 1..1152: note = Description of Artificial Sequence: Synthetic coding sequence
  source 1..1152: mol_type = other DNA
atggagaggctccagaaacaaccactgacaagtcctgggtccgtgtccccctcaagggactcgagcgtcccaggatcaccgtcttctatcgttgcaaagatggacaatcaggtgttaggttacaaagacctggctgccattcccaaggataaagcaatcctggacatcgagagacctgacctgatgatttatgaaccccattttacatacagcctgttggaacatgtcgagcttccacgcagtagggaaaggagtctgagtccaaagtctaccagcccaccaccatcacccgaggtgtgggccgacagcagatctccaggcatcatcagccaggcgagcgcgccaaggacaacgggcacaccccgaaccagcctgcctcattttcatcaccccgagacaagccgtcccgattcaaacatctacaagaagccacccatctacaagcaaagagagtccgtcggaggcagcccacaaacaaagcacctaatcgaggatcttattatcgaaagttcgaaatttccagcagcccaaccacctgatccaaatcagcctgcaaagatcgaaacagactactggccatgccccccctcactggccgttgtggagacagagtggaggaaaagaaaagcctctcgccggggtgccgaggaagaagaagaagaggaggatgacgactctggggaagagatgaaggctttgcgtgaaaggcagcgagaagaactctcaaaggtgactagtaacctgggcaaaatgattctcaaggaggagatggagaaatccctaccgattaggagaaaaacccggtcactgcctgacaggactccttttcatacaagtctgcatcaaggcacaagtaaaagctctagtttgccagcatatggcaggactaccctgagtaggttgcagagtaccgaattcagcccttcagggtcggagacgggatcgcctggcttgcagatctacccctacgagatgctcgtggtcacaaacaaggggcggacgaaactgccacccggagtggaccggatgaggctggaaagacatctgtctgctgaagacttcagtagagtcttcgccatgagcccagaggagttcggcaagctggctctgtggaaaagaaacgagctcaaaaagaaggccagcttgttctag

SEQ ID NO: 116060 - DNA, 1152 bp, synthetic construct
  misc_feature 1..1152: note = Description of Artificial Sequence: Synthetic coding sequence
  source 1..1152: mol_type = other DNA
atggagcggctgcaaaaacagcccctaacatcccccgggagtgtatccccttcaagagactcaagtgtcccgggttccccaagtagcattgtcgctaaaatggacaaccaggtcctggggtacaaggacttggctgcaattcctaaagacaaggcaatactcgacatagaacgccccgatctgatgatctatgagccccacttcacctacagcttgctggagcacgtcgaactacctcgatcacgggagcgatcgctgtccccgaagagcacctccccccctcccagccctgaagtatgggccgacagtcgctctccggggatcatctcacaggcctcggctccccgaacaacagggacaccccggacctccctcccccattttcaccacccagagacctctcggcccgactcaaatatatataaaaagccccctatttataagcagcgggagagtgtcggaggctcgccccaaacaaagcaccttatcgaagacttgatcatcgagtcaagtaaatttcccgccgctcagccacccgacccgaaccagccggctaagattgagacggactattggccatgtccccccagcttggcagtagtggaaaccgagtggagaaagaggaaagctagccgaagaggggcagaagaggaagaggaggaggaggatgatgatagcggagaggagatgaaggcgctgcgggaacgtcagagggaagaactgtccaaagtcacttctaatctggggaagatgattctgaaggaggagatggagaagagtttacctatccgccgaaaaacgagaagtttacctgaccggaccccgtttcacacttcgctccatcagggaactagtaaaagctcctcactcccggcttacggccggactacgttaagccgcctgcagagtaccgaattctctcccagtggaagtgagaccggcagcccagggctgcagatttatccctatgaaatgctcgtggttaccaataagggccgcaccaaactacctcctggggtggaccgcatgagacttgagagacatttgtccgcagaggacttcagccgggtgttcgcaatgagccccgaggagtttggaaaattggctctgtggaagaggaatgagcttaagaagaaggctagtctgttctag

SEQ ID NO: 116061 - DNA, 1218 bp, synthetic construct
  misc_feature 1..1218: note = Description of Artificial Sequence: Synthetic coding sequence
  source 1..1218: mol_type = other DNA
atggagaggttgcagaagcaacccctgacatcacctggtagcgttagtcctagccgggattcaagcgtcccagggagtccctcctccatcgtagcaaagatggacaatcaggttcttggctacaaagacctggctgccatccccaaggacaaggccatcctggacatcgaacggcctgacctaatgatttacgagccccactttacttacagcttactggaacacgtggaactgccccgcagccgcgaaaggagcctgagtccaaagtctacatctccacctccctcgcctgaggtctgggccgattccaggtcaccaggaatcattagtcaggctagcgcaccaagaaccactggaaccccccgcacctccttgccccacttccaccatcccgagacaagccggccggactctaacatatacaaaaaaccccctatttataagcaaagggaaagcgttggggggtctccacagactaaacacctgatcgaggatctaattattgaatccagcaagttccccgccgcccaacctcctgatcctaaccagcctgccaaaattgaaaccgattattggccctgtcccccgtctctcgccgttgtggagacagagtggcggaaacggaaagccagcagaaggggcgccgaggaagaagaggaagaagaagatgatgactccggagaagagatgaaagccctgcgggagagacagcgggaagagctgtccaaggttacgtcaaatcttgggaaaatgatcctgaaagaagagatggagaaaagcctcccgatacggcgcaagacccgctctctgcccgacagaacaccttttcatacctctttacaccaggggacatctaagtcaagctctctgcctgcctacgggagaacaaccctgtcacgactccagtctaccgagttctccccttcagggagcgagacaggttcgccaggactccagaatggagaggggcaacgcggacggatggatcgaggcaacagtctcccctgcgtgctggagcagaaaatctacccgtacgagatgctggtcgtcacaaataagggacggacaaaactgccaccaggtgttgacagaatgaggctcgaacgtcacttgtcagctgaagacttctctcgcgtgttcgctatgtccccagaagagtttgggaaactggctttatggaaaagaaatgagctgaagaaaaaagccagcctgttctag

SEQ ID NO: 116062 - DNA, 1077 bp, synthetic construct
  misc_feature 1..1077: note = Description of Artificial Sequence: Synthetic coding sequence
  source 1..1077: mol_type = other DNA
atggaacggttacagaaggctaagatggataaccaggtgttgggatataaagatctagccgcgattccgaaggacaaggcaatcctggatattgaaagacctgatctgatgatttatgagccgcacttcacctattcactcctggaacacgtagagttacctagaagcagagagaggagtctgtcaccaaaatcgactagtcctcccccctctccagaagtgtgggccgactcacggtcaccggggattatttcacaggctagcgcaccgagaaccaccggcaccccccgaacaagtctccctcacttccaccaccctgagaccagcaggccagatagcaatatttacaaaaagcctcccatctacaagcagagggagagcgtgggaggaagcccccagacaaaacatctgatagaggacctaatcatcgagagtagcaaattccccgctgctcagcctcccgatccaaaccagccagccaagattgagacagactactggccatgtcctccttccctagcagtggtggagacagagtggcgaaagagaaaggcatccagacgcggcgctgaggaagaggaggaagaggaggatgacgactccggcgaggagatgaaggccctgagagagcgacaacgtgaggaactctcaaaagtcacatctaatctgggtaaaatgatcctgaaagaggagatggagaagtctctcccgatccgcaggaaaacgaggtctctgcctgatcggactcccttccacacctccctgcatcagggcacatccaaaagctcttctctgcccgcgtacggtcgcaccacccttagcagacttcagtctaccgaattcagtcccagtggctcagagaccggctcaccaggactacagatctacccatatgagatgctcgtcgtcacgaacaaaggtcgcaccaagctgccccccggcgtggataggatgcgcctcgaaaggcatttgagtgctgaggatttctccagggtgtttgcaatgtcccccgaagagttcgggaaacttgccctctggaaacgaaacgaactcaaaaagaaggcatccttattctag

SEQ ID NO: 116063 - DNA, 1152 bp, synthetic construct
  misc_feature 1..1152: note = Description of Artificial Sequence: Synthetic coding sequence
  source 1..1152: mol_type = other DNA
atggagcgcctgcagaagcagcctctgacgtcacccggtagtgttagcccatcacgggattccagtgttcccggttctcctagttcgatcgtcgcgaagatggataaccaggtgctgggctataaggacctggcagccatccctaaggacaaggccatcctggacatcgagagaccggatttgatgatctacgagcctcacttcacgtactctctacttgagcatgtcgaattaccccgatctcgggagcgctcactatctcccaagtcgacatcaccacccccttctcccgaggtgtgggcagacagtcgatctcccggcattatcagccaggctagcgcgccacggacgaccggaactccgcggacgagcctgccccacttccatcatcccgagacctcacggcctgacagtaatatttacaagaagccacctatttacaagcagcgagagtccgtgggcggtagcccccagactaaacatctcatagaagaccttataattgaatcatccaagttccccgccgctcagcctccagatcccaatcaaccagctaagattgaaactgattactggccatgcccaccttcccttgccgtcgtggaaaccgaatggaggaagcgtaaggcctcacggcgcggcgctgaagaagaggaagaagaggaggatgacgactcaggggaggaaatgaaagccctcagggaaaggcaacgagaagagctgtcaaaggtcactagcaaccttggcaaaatgatacttaaagaagagatggaaaagtccttgccgatcagaagaaagacacggtctctgcccgatcggacacctttccacacaagcctgcaccagggcacttccaaaagctcaagtctgccagcctatggccgaaccacattgtctagactccagagtaccgagttttcacccagcggcagtgagactggtagcccaggattacagatctacccctatgagatgcttgtggtgacgaacaagggtcggacgaaactgcctcccggagtggaccgtatgaggctggaacgccacctctctgcggaggatttttcccgcgtgtttgccatgagccctgaggagttcgggaagttagccctgtggaagcgaaacgagctcaagaaaaaagcatctctgttttag

SEQ ID NO: 116064 - DNA, 1218 bp, synthetic construct
  misc_feature 1..1218: note = Description of Artificial Sequence: Synthetic coding sequence
  source 1..1218: mol_type = other DNA
atggagcggctgcagaagcagccacttacctcgccaggctccgtgtccccttccagggactctagcgtgcccggctccccctcaagtatcgtggccaaaatggataaccaggtcctgggatacaaggacctggcagccatccccaaggacaaagccatcctggacatagaacggcctgacctgatgatctatgaaccacacttcacatactcgctgctggagcatgtcgagctaccccggtcccgcgaacgctcactcagccccaaatccaccagccctccgcccagtccagaggtctgggcagactctagatcgcctggaatcatcagtcaggcttcagccccccggacgaccgggactccgcgcacctcgctcccccactttcatcaccccgagaccagtcggcctgactccaatatatacaaaaagcccccgatttacaaacagcgggagagcgtcgggggcagcccccagactaaacacctcatcgaagacctgattattgagtcttctaagtttcctgccgcgcagcccccagaccccaatcaaccggccaaaatcgagactgattactggccttgccctccttccctcgcagttgtggaaacggaatggaggaagcgaaaagcatccaggagaggggctgaggaagaagaagaggaggaggatgacgattctggagaggagatgaaggctctccgggagcgacaacgcgaggagctgtctaaggtgacatctaatctcggcaagatgatcctcaaagaggagatggagaagtcccttcccattagaaggaagaccaggagcctcccggaccgcacccctttccacacctcccttcatcaaggtacgtcaaaatccagttcactcccagcctacgggagaactacattgtccaggcttcagagtaccgaattctcacccagtgggtccgaaacgggcagtcccggactgcagaatggagagggccagcgtggccgcatggacagaggaaactctcttccctgtgttctggaacagaaaatctacccatacgagatgctggtggtaactaataagggcaggacaaaacttccacctggagttgacaggatgcgcttggaacgccacctgagcgcagaggattttagcagggtgttcgccatgagccctgaggaatttggcaagttggctctgtggaaaaggaatgaattgaaaaaaaaagcatcattgttttag

SEQ ID NO: 116065 - DNA, 1098 bp, synthetic construct
  misc_feature 1..1098: note = Description of Artificial Sequence: Synthetic coding sequence
  source 1..1098: mol_type = other DNA
atggagcgtttgcagaaggcaaaaatggataatcaggtgcttggctacaaggacctcgctgcgatacccaaggataaagctatactggatattgagagacctgatttgatgatatatgagccacatttcacttatagcttgctggagcatgtagagctaccgcggagtagggaggtctgggctgattcaagatcgcctgggataatcagccaagcaagtgcccctcgaacaaccggaacaccacgcacttctctgccacatttccaccaccctgagaccagccgaccagattctaatatatacaagaaaccgccaatctacaaacaaagagagtccgtgggtggcagcccacaaaccaagcatctgatcgaggatctcatcattgagtctagtaagttcccagcagcccaaccgcccgaccccaaccagccagccaagattgaaacggattattggccctgcccaccgagtcttgccgtcgtagagacagagtggaggaaaaggaaagccagcaggaggggtgctgaggaagaggaagaggaagaggatgatgacagcggggaggaaatgaaggcgctgcgggagcgtcaaagagaagaattatcaaaggtaacatctaatctggggaaaatgattctaaaagaggagatggagaaatcgctgcctatcaggcgaaagaccagaagcttgccagataggactccatttcacaccagtctgcaccaggggaccagcaagtcttctagcttgcccgcatacggccgtaccacactgtctcgattacagagtactgaattcagcccatctgggagcgaaaccgggtctccaggtcttcagaacggggaaggccagagggggagaatggacagggggaacagtctgccgtgtgtcctggagcagaagatctatccttacgagatgcttgtcgtgacaaataaggggcgaactaaactgcctcctggagtcgaccgtatgaggcttgagagacatcttagtgccgaagattttagtagggtctttgcgatgagccccgaagaatttggcaaactcgccctgtggaagaggaatgaactcaagaagaaggcatccctgttttag

SEQ ID NO: 116066 - DNA, 570 bp, synthetic construct
  misc_feature 1..570: note = Description of Artificial Sequence: Synthetic coding sequence
  source 1..570: mol_type = other DNA
atggacgcagtggacgcaaccatggagaagcttagagctcagtgcctcagccgcggggcatctggtatccaaggcctcgctcggtttttcaggcagctggacagggacggtagccggtccctggatgcggacgaattccgtcaaggccttgccaagttaggtctggtacttgatcaagccgaggctgagggggtgtgccggaaatgggatcgtaatggctctggaaccctggacttggaagaatttctcagagcactgaggccacctatgtcacaggctagggaagcggtcattgccgcagcatttgcaaagctcgatagaagtggtgatggcgtagtgacagtggatgacttacgcggggtgtactctggccgcgcccacccgaaagtgagatctggtgagtggacagaggatgaggttctgaggcgatttttggataatttcgacagcagtgagaaggacggtcaagtaacattggccgagttccaggattactattcaggagtgtctgcaagcatgaacacggacgaggagttcgtggcaatgatgacctccgcatggcagctttag

SEQ ID NO: 116067 - DNA, 2565 bp, synthetic construct
  misc_feature 1..2565: note = Description of Artificial Sequence: Synthetic coding sequence
  source 1..2565: mol_type = other DNA
atggccttggagcaggccctgcaagccgcacgccagggggagttagacgtgttacgcagcctccacgccgcaggtctcttgggcccttctcttcgtgacccattggatgcactgccagtgcaccatgccgccagggccggcaaactccactgcctccgctttttggtggaggaagcagcgcttcccgctgctgcacgagcgagaaacggcgccactcctgcccatgatgcatcggctaccggccatctcgcttgcctccaatggctgctttcacagggaggatgtcgcgtgcaggacaaagacaatagcggtgcaactgtcctgcacctggcagctcgctttggtcaccctgaggtagtcaattggctgctgcaccacggtggtggggatcctacagccgcaaccgacatgggcgccctacctatccactatgccgccgcgaagggtgactttccttcactccgactgctggtagagcattatccagagggagttaacgcgcaaacaaagaacggggctactccattatacctcgcttgccaagaggggcacctggaggtcacccagtatctagtgcaggagtgtggcgctgaccctcacgcccgggcccacgacggtatgacccccctgcatgctgccgcgcagatggggcacagccccgtgatcgtctggctggttagttgcaccgatgtgtcattgagcgagcaagataaggacggggccacggccatgcactttgccgccagccgagggcacacaaaggtcctcagctggctgctgttgcacgggggtgaaatctccgcagacctctggggtgggaccccacttcatgacgctgccgaaaacggggaactagagtgttgccagatattggtggtaaacggggccgaattagacgtccgggatcgcgatggctatacagcggcagatttgtcagattttaatgggcacagccattgcacacggtacctgcgtactgtggaaaatctgtctgtagagcatagagtattatctagagatccctccgctgagctcgaggcaaagcagcctgacagtggcatgtcttctccaaatactacagtgtccgtgcaacctcttaattttgatctctccagtcccacctcgacactgtccaactacgactcctgcagctccagccattctagcattaagggacaacaccctccctgcggcctttccagcgccagggctgccgacatacagtcatatatggacatgctgaatccagagttaggactcccaagggggacaatcggaaagcccacacctccccccccacccccctcatttcccccccctcccccaccacccggtacccagttacctccacctccacccgggtaccccgcgccaaaacctcccgtcggcccgcaagctgcagacatttatatgcaaaccaagaacaagctccgacatgtggagaccgaagcgctgaaaaaggaattgtcctcttgcgacgggcacgatggtctccgaaggcaggattcatctcgcaagccacgcgccttttctaaacagccatccactggtgactactaccgacagctgggaagatgcccaggcgaaacgctagctgctcgtcccggtatggcccacagtgaggaggtacgggcccggcaacctgcacgtgccggatgtccaaggctgggacctgcagctcggggctcccttgaaggaccctctgcacctccccaagctgctctattacctggcaatcatgttccaaacggctgtgctgcggaccccaaggccagtcgcgagcttcccccgccccccccgccgccaccaccccccctgccagaggcagcctctagccctcctcccgccccaccactgcctctagagagcgcaggtcccggatgcggtcagcggcgaagttcatccagcaccggctcgacgaaaagtttcaacatgatgagtcccactggggataattccgagttgctggctgagatcaaggctggcaaatccctcaaacctacgccacagagtaagggcctgactacagtctttagcggtattggccagcctgcatttcagcctgactcaccactccccagtgtttccccagccctaagccccgttcgatccccaacacctcccgcggctggcttccagccgctcctgaacggaagtttggtcccagtccctcctacaacacccgccccaggcgtgcagctggatgtagaggcactaatcccaacccatgacgagcagggacgccctatcccagagtggaaacgacaggtcatggttaggaaaatgcagctgaaaatgcaagaggaggaggagcagcggagaaaagaagaagaagaggaggctcggctcgcttccatgcccgcatggagacgggatctgttgcgtaaaaaactcgaggaagaaagggaacagaagcggaaagaagaagagaggcaaaagcaagaggaactgcgccgggagaaggagcaatccgaaaagctgaggacattgggctatgacgagtctaaactcgccccctggcagaggcaagtcattctgaagaagggagacattgcaaaatattag

SEQ ID NO: 116068 - DNA, 867 bp, synthetic construct
  misc_feature 1..867: note = Description of Artificial Sequence: Synthetic coding sequence
  source 1..867: mol_type = other DNA
atggcacactcagaagaggcggccttactcccaggcaatcatgttcctaatggctgcgcagccgaccctaaagcatccagggaattaccacctcctcctcctcccccaccccccccattacccgaggcggctagtagtcctcccccagctccgccactgcccctggaatcggctggccccgggtgtggacaaaggcgatcctcatcttctacagggtcaactaagagtttcaacatgatgtctcctaccggcgataattctgagctcctcgcggagataaaagcagggaaatccctgaagcccaccccccagagcaaaggattaactacagtattttctggcatagggcagccagcgttccagcccgattctcctctcccatcggtcagtcctgctttatcacctgtgaggtctcctaccccccctgctgctggatttcagcctttgctgaatggatccctggtgccggtaccccccaccaccccagcccccggagtccaattagacgtggaagcgctcattcccacgcacgacgaacagggaagacccatcccggaatggaaaagacaggtaatggtccgcaagatgcagttaaagatgcaggaggaggaggaacaaaggagaaaagaagaggaggaagaagcaaggcttgcgagcatgccagcttggcgccgggacctactgcggaagaagttggaggaggagcgggagcagaaacggaaagaagaagagagacaaaagcaagaggagctgcgacgcgaaaaagagcaatctgagaagctgcggacacttgggtacgacgagagtaagttggcgccttggcagagacaggttattctgaaaaagggggacatcgctaaatattag

SEQ ID NO: 116069 - DNA, 645 bp, synthetic construct
  misc_feature 1..645: note = Description of Artificial Sequence: Synthetic coding sequence
  source 1..645: mol_type = other DNA
gacgggatgactccattgcatgccgccgcacaaatgggtcactcccccgtgatcgtctggttggataaagacggggcaacagccatgcacttcgctgcgagccgaggccacaccaaggtactctcttggttactactgcatgggggcgaaattagcgccgacctttgggggggcacacctctgcacgacgctgccgagaatggcgagctggagtgctgccaaatcctggtggttaacggggctgagttggatgtgcgggatcgagacgggtataccgccgccgatttgagcgacttcaatggacatagccactgcacgaggtatttgagaaccgtagagaatctgagtgtggagcaccgggtcctgtccagagatccgtccgctgaactggaagctaaacagccggactctggcatgtcctctccaaatactaccgtgagcgtccagccccttaatttcgacctgtcatctcccaccagtaccctctctaattacgattcatgttccagctctcactcctccatcaagggccagcaccctccatgcggactgagcagtgcacgtgcagccgacatccagtcttatatggatatgttaaaccccgaactgggcctgccccggggtacgataggaaaacccacatag

SEQ ID NO: 116070 - DNA, 567 bp, synthetic construct
  misc_feature 1..567: note = Description of Artificial Sequence: Synthetic coding sequence
  source 1..567: mol_type = other DNA
tgagaaataaaagctggcaagtcgctgaaaccaaccccccagagcaaggggttgactactgtgttttctggaatcgggcagcctgccttccagcctgattccccgttaccctccgtttcaccagccctgagccccgtcaggtcccctacaccacccgcagctggttttcagcctttgttgaatggttccctggtaccagtgccccccacaacccccgctcctggtgtccagctggacgtcgaggctctcattccaacccacgatgagcaaggacgccctatacctgagtggaagcgccaagtgatggtgcgcaaaatgcagctgaagatgcaagaggaggaggaacagcggcgcaaggaggaggaagaggaggccagactcgcctcaatgcctgcttggagacgagacctcctgagaaagaaactggaggaggaaagggagcaaaagcggaaagaagaggagaggcagaaacaggaggaactgcggcgggagaaggaacagagcgagaaactcagaaccctcggctacgatgagagtaagcttgccccatggcagcgacagatttag

SEQ ID NO: 116071 - DNA, 1335 bp, synthetic construct
  misc_feature 1..1335: note = Description of Artificial Sequence: Synthetic coding sequence
  source 1..1335: mol_type = other DNA
atggctcgagtcggtcccggccgagcaggcgtcagttgccagggaagaggccgtggtcgtggtggctctggacagagaagaccacctacgtgggaaatttcagattccgacgcagaggattccgctggcagtgaggccgccgcccgggcccgggatccggcaggcgaacggagagcagctgcagaggctctgcgcctcctgcggcctgagcaggtcttgaagcggttggccgtgtgtgtggatacggctattctggaggatgcaggggccgatgtgcttatggaagccctggaggctctggggtgcgagtgtcgtatcgaacctcaaaggccagccaggagtctgcggtggaccagggctagtccagacccttgcccgcggtccctgccccccgaggtttgggcagccggagaacaggaactactgctccttttagagcccgaagaattcctccagggagtggccactctgacacagatcagtgggcctactcactgggttccttggatcagtccagaaacaactgccagacctcacctcgcagtgatcggactggatgcttatctgtggtatcggtccttgtcatgtcctcagcaaggatggctcggccggggttttcgcgggggaggcctgtggcagcgacctagctccgggagggccgggcccatggggtccggagaagagtggtctcccctcttacggtcacgtcagcacgtgagcagaggcacccagcaacctgagtcccctaaggtggccggcgcggaggttgcggtgtcatggcccgaagttgaggaggtgagggcttgcctgagctgggctctggtgctgttgcagctgtgggccaacttagatgtgctgctggtggcctcctggcaggaactttcccgccatgtttgcgctgtaacaaaagcgctcgcccagtatcctctcaagtgtgtgatgccaaggctgaaggggggacgcattactagtcgacagtatagagagagccaggcatttagtttctgcactgctgggagatgggccgccggagagcccgttgccagagatggtgctgggttacaggccgcatggaggagacagatacgccagttttccagggtctcacccgcagtcgccgacgctgtggtcactgcctttccctcaccaaggctcctgcagcaggccctagaggcttgctcgactgagcgcgagcggatgggcctgttggctgacctgcctgttcccccaagcgagggggggcggcctagaagggtcggtccagacctatctcgccgaatttgccttttcctgaccaccgctaatcccgatctgttgctcgatctaggctcctag

SEQ ID NO: 116072 - DNA, 1161 bp, synthetic construct
  misc_feature 1..1161: note = Description of Artificial Sequence: Synthetic coding sequence
  source 1..1161: mol_type = other DNA
atggctagggttggcccaggcagggcaggcgtttcttgtcaggggcgaggaagaggtaggggtgggagtggacagagacgcccgccgacctgggaaatctcagacagcgacgctgaggattccgcggggagcgaagctgccgcccgggcccgggatccggccggagagcgaagagcagccgccgaagcactgagactgctgcgcccagagcaggttctgaagcggctcgcagtgtgcgtggacaccgccattcttgaggatgctggtgctgatgtgctgatggaggcactcgaggccctaggttgcgagtgccgaatcgagcctcagcgtccagctcgctctctcaggtggacccgcgctagccctgacccatgtccccggtccctgccccctgaggtctgggccgctggcgagcaagaattactcctgctcttagagccagaggagttccttcagggagtcgcgaccctgacacaaatctctggaccgactcactgggtgccatggatctcaccagagactaccgccagaccccacctcgccgtgattgggctggacgcttacctctggagtcgccagcatgtgagcagaggcactcaacagcctgagtcacctaaggtagctggcgcagaggtggcagtcagctggccggaagtcgaggaggtcagggcctgcctctcttgggcgctggtgctcctccagctctgggctaatttagatgtcctgttggtggcttcctggcaggagctgtcccggcacgtgtgtgccgtgaccaaggccctagcacaatatccactgaagtgtgtgatgccaaggttgaagggtggtagaattacttcccgtcagtacagggaaagccaggccttcagtttctgcacggctggccgatgggccgcaggtgagccagttgcccgcgacggagcaggtcttcaggcagcgtggagacgacagatccggcagttctcaagggtgagccctgcggtggctgatgcagtggtgactgctttcccttccccaaggctgctgcagcaggccctggaagcctgtagcacagagcgcgaaaggatgggactgctcgctgttggccctgacttgtctcgtagaatttgcttgtttctgaccaccgctaacccagaccttttgctcgatctgggatcctag

SEQ ID NO: 116073 - DNA, 2523 bp, synthetic construct
  misc_feature 1..2523: note = Description of Artificial Sequence: Synthetic coding sequence
  source 1..2523: mol_type = other DNA
atgatgagcattcaggaaaagagcaaggaaaatagttctaaggtgacgaagaaaagcgatgataaaaattctgagactgagatccaagacagccagaaaaacttggccaaaaaatcaggtccaaaagaaactataaaatcccaggcgaagtcgtctagtgagagtaagataaatcagccagagctcgaaaccaggatgagtacaaggtctagtaaagccgctagtaacgataaggctacaaagtctatcaacaagaatacagttacagtccgcggatattcccaagaatcaaccaaaaagaaactgtcccaaaaaaaactagtgcacgaaaatccaaaggccaatgaacaactgaatcgcaggtcacaacgcctgcagcagctgaccgaggtgagcaggagatcactgcgcagtcgagagatccagggacaggtgcaggccgttaagcagagcctcccgcctaccaagaaggagcagtgcagctcgacgcaatccaaatccaacaaaacgtcccaaaagcacgtaaagcgaaaggtgttggaggttaaatctgacagcaaggaagatgaaaatttagtgattaatgaagttatcaactcccccaagggtaagaaaagaaaagtagagcaccagaccgcctgcgcatgtagtagccagtgtactcaagggtccgagaagtgtccacaaaaaaccacacgcagagatgagacaaagccggtgcccgtaacttctgaggtgaaaaggtcaaagatggcaacgagtgtggtaccgaagaagaacgagatgaagaagtccgttcatacccaggtcaacacaaatacaaccctccccaaaagcccccagcctagtgttcccgagcaatctgacaacgagctggaacaagcaggtaaatcaaagaggggcagcatcctgcagctctgcgaggagatcgcaggggaaattgagagcgacaatgtcgaggtcaagaaggagtcttctcagatggagtctgtgaaggaggagaagcctaccgagatcaagctcgaggaaacctcggtagagcgccagatcctccaccagaaagagactaatcaggatgtccaatgcaatcgctttttcccctcccgaaagaccaagcctgtgaaatgtatcctcaacggaatcaattcttccgcaaagaaaaactcgaattggacaaagataaagttatccaaatttaatagcgtacagcacaacaagcttgactctcaggtgagtccaaagcttggtctgctgagaacctcattctcccctcccgccttagagatgcatcaccctgtgacacagagtacttttttagggacaaagctccatgatcgtaacattacatgccaacaggaaaaaatgaaggagatcaattccgaggaggtgaaaatcaatgatattaccgttgagattaacaaaacgacagagcgcgcccccgagaattgccacttggcaaacgagattaagccatctgatccgcctttggacaaccagatgaagcactcatttgacagcgcctccaataagaatttttcccagtgcttggaatctaagctcgaaaattcccctgtcgaaaatgtgactgcagctagcactttgttgtctcaggcgaaaatcgacacgggcgagaataagttccctggatctgccccccagcaacactcaattctgagtaatcagacttcaaaatcatctgataatcgggagacaccaaggaatcactcactccccaaatgcaacagtcatctggagattacaatccccaaggatttgaaactgaaagaggcggagaaaacagacgagaaacagctcattattgatgcgggccagaaacgatttggcgctgtaagttgcaacgtttgcggtatgctgtatacagcctccaatcctgaagacgagacccaacatttgctgttccataaccagttcatctccgctgtcaagtatgtcggctggaagaaagagagaattttggcggagtaccctgacgggagaatcatcatggtcttgccggaggaccccaagtatgcccttaagaaggtggatgagatccgggaaatggtggacaatgatctgggctttcaacaggcacctctgatgtgttactctaggacaaagactttgctgtttatctcgaatgacaaaaaggtcgtagggtgcttgattgccgagcatatccagtgggggtacagagtcatcgaggagaaacttccagtgatccgatccgaagaagagaaggtgaggttcgaaaggcaaaaggcttggtgttgttctactctgccagaacctgcaatctgcggtattagtagaatctgggtattttcaatgatgagaagaaaaaagatagcctcccgcatgattgagtgtctgaggagtaacttcatctacggtagctaccttagcaaagaggaaatcgccttctcagacccaactccagacggaaagttgttcgccacacagtactgtggcacagggcagtttctggtatataattttatcaacggccagaacagtacctag

SEQ ID NO: 116074 - DNA, 2106 bp, synthetic construct
  misc_feature 1..2106: note = Description of Artificial Sequence: Synthetic coding sequence
  source 1..2106: mol_type = other DNA
atgatgtccatacaagagaaatctaaggaaaactcaagcaaagtgaccaaaaaaagcgacgacaagaactctgagacagagatccaggactctcaaaagaacctggcaaagaagtctgggcctaaagaaactattaagtctcaagctaaaagtagttccgaatccaagataaaccaacctgagttggagacgcgaatgagtacacggtcaagcaaagctgcgagcaacgacaaggccactaagtccatcaataagaataccgtcacagtgaggggttattctcaggagagtaccaaaaagaaactgtctcaaaagaaactcgtgcacgagaatccaaaagcgaatgagcagctgaacaggcgcagccagaggttacagcaactgacagaggttagccgccgaagcctgcggagtcgtgaaattcaaggccaggtccaagctgtcaaacagtcgctacctcccactaagaaagaacagtgtagtagcacccagtccaaaagcaacaagacatctcagaaacatgtgaagcgcaaggtcctcgaagtgaagtcagattcaaaggaagacgagaatctagtcatcaacgaggtcataaactcccctaagggcaagaaacggaaagtggagcatcagaccgcatgtgcgtgttctagtcaatgcacccagggatctgaaaagtgcccgcagaaaacaacacggcgggacgaaactaaaccagttccagtgacatccgaggtgaagagaagcaagatggccacctctgtggtgccaaagaaaaacgagatgaagaagagtgtgcatacccaagtcaatacaaacaccacgttaccaaaatctccacagccgagtgtgcctgaacagtcagacaatgaattggagcaggcagggaagtcgaaaagaggatctatccttcagttatgcgaggagattgcaggagaaattgaatctgacaacgtggaggtgaaaaaggaaagcagtcagatggaatctgtgaaggaggagaagccaaccgagatcaaattagaggaaacatctgtggaaaggcagatcctacaccagaaggagaccaatcaggatgtccagtgtaaccggttcttccccagccggaagactaagcccgtgaaatgcatcctgaatggaatcaattcttccgccaaaaaaaacagcaattggaccaagattaaactgtcaaagttcaattcagttcaacataacaagctggactcccaggtgagcccgaaactaggcttgctgagaacgtctttttcaccgcctgccttggaaatgcaccacccagtgacccaatccactttcctgggaaccaaattgcacgatagaaatatcacctgtcagcaggaaaaaatgaaggaaatcaatagcgaggaggtcaagatcaacgacatcacagtcgagatcaataaaactaccgaaagagccccggagaactgtcacttggctaacgagatcaagccttcagatccgccacttgataatcaaatgaaacacagctttgactccgcgtccaacaaaaatttttcccagtgtcttgagagcaagttagagaactcaccagtggaaaatgttaccgccgcctccacattactgagtcaggccaagattgataccggtgagaacaagttccccggctcggctcctcaacagcacagcatactgagtaaccagacatcaaaaagctccgacaatcgcgagacacctcgtaatcactccttgcctaagtgcaactcacacctggagatcaccattccaaaggacctaaagctgaaggaagctgaaaaaaccgatgaaaagcaattgatcatcgatgccggccagaagaggttcggcgccgtatcctgcaatgtatgtgggatgctgtataccgcctctaatcctgaagatgaaacccagcacctactttttcacaaccaatttattagcgcagtgaaatatgtggtcctgctgattaatcaccatgaatgtgggagtgaggaggagtttattacaagtctgtttctgagcatgttcaattttaggtatacccagcggtctttttccttcccaattaggtttcttgaaggtctggaagagcggaagaattctggctag

SEQ ID NO: 116075 - DNA, 1806 bp, synthetic construct
  misc_feature 1..1806: note = Description of Artificial Sequence: Synthetic coding sequence
  source 1..1806: mol_type = other DNA
atggctgccctgacaccacggaagcggaaacaagattctctcaaatgtgatagtctcctccacttcacggagaacctatttcccagccctaacaaaaagcattgtttttaccagaactcggataagaatgaagaaaacttgcattgttcacagcaagaacactttgtcctaagcgcacttaaaacaaccgagataaaccgtttgccctccgcaaaccagggttcccctttcaaatcggcactaagtactgtgagcttttacaaccagaacaaatggtacctgaatccccttgaacgtaaattaatcaaggagtcacggagcacctgtttgaaaaccaacgacgaggataagtcattcccaatcgttactgaaaaaatgcagggaaagccggtgtgttccaagaaaaacaacaagaagcctcagaagtctttaacagcaaagtatcagcccaagtatcggcacattaagccagtgagccggaattcccgaaatagcaagcagaaccgagttatctataagccaatcgtcgagaaagagaataactgtcacagcgccgaaaacaactcaaacgctcccagagtgctctcgcaaaagattaagccccaggttaccttgcagggaggggctgctttctttgttcgcaagaaaagctctctccgaaaaagttccctcgaaaacgagccttccctgggaaggacccagaaaagcaagtccgaggtcattgaagattctgatgtcgagacagtgagcgaaaaaaaaacttttgcaaccaggcaggtacccaaatgccttgtgttggaggaaaaactcaaaataggcctgctctcagcttcatcgaaaaacaaagaaaagctcataaaagactctagcgacgaccgggtgagttcaaaggaacacaaagtggataaaaatgaagccttctcgtcagaggatagcctaggggagaataaaacaatcagcccaaaatccaccgtgtaccctatcttctctgcctcgtcagtgaactctaagcgtagtcttggagaggagcagttctctgtgggctccgttaatttcatgaagcagaccaatatccaaaaaaatacaaatacgcgggatacttccaaaaaaacaaaggatcagctcataattgatgccgggcagaaacattttggggccaccgtatgtaagagctgtggcatgatctacacagcaagcaacccagaggacgagatgcagcatgttcagcatcaccaccgctttttggaggggattaagtacgtcggctggaagaaggagagggttgttgcagaattttgggacggcaaaatcgtgctggtgttgccgcatgacccctcttttgccattaagaaagtggaggacgtgcaggaactcgtggacaacgagctgggcttccaacaagtggtgccaaagtgcccaaacaaaatcaaaacgttcctgttcatcagcgatgagaaacgggtcgtcggatgcttaatcgctgagcctattaaacaggcattccgtgtcctgtcagagcccataggtcctgaatccccctcttccactgagtgtcctcgggcctggcagtgttcagacgtaccagaacctgcagtttgcggcatctctagaatttgggtgtttcgactgaaaaggaggaaacgcatcgcgcggagactcgtggacaccctgcgaaactgtttcatgttcggatgttttctctccacagatgagatcgcgttcagtgacccgacgcctgatggaaaactgttcgccaccaaatactgcaatacccccaattttctggtgtacaattttaattcctag

SEQ ID NO: 116076 - DNA, 720 bp, synthetic construct
  misc_feature 1..720: note = Description of Artificial Sequence: Synthetic coding sequence
  source 1..720: mol_type = other DNA
atgaagcagacaaacatacaaaagaacacaaatactagagatacctccaagaagactaaagatcagctaatcatcgatgctggacagaaacacttcggagctacagtgtgtaagagctgcggaatgatatacacagcctctaacccggaagatgaaatgcagcacgtacagcaccaccaccgattcctcgaaggcattaagtacgtggggtggaagaaggagagagtggtggcagaattctgggacggcaaaatcgttctggtgcttcctcacgacccttctttcgctattaagaaggtagaagacgtgcaggaacttgtcgataacgaattgggtttccagcaggtggtccccaaatgcccaaataagatcaagactttcttgttcattagcgatgaaaagcgcgtggttggatgcctcatagcagagccgattaaacaggccttcagagtcttgtctgagcccatcggtcccgaaagcccctcatcaactgagtgtccacgagcttggcagtgcagcgatgtccctgaacccgcggtttgtggaataagtaggatatgggtgtttcgactgaagagacgcaagcggattgctagaaggctggtcgataccctcagaaattgttttatgtttggctgcttcttgagtacggatgagatcgcgtttagtgatcccacgcccgatgattgtagacgcttgaatagatatcaggagacgtag

SEQ ID NO: 116077 - DNA, 849 bp, synthetic construct
  misc_feature 1..849: note = Description of Artificial Sequence: Synthetic coding sequence
  source 1..849: mol_type = other DNA
atggcactgaaacagatctcatcaaataagtgctttggcggcctgcagaaagtctttgagcacgacagcgtggagctgaactgcaagatgaagttcgctgtgtaccttcctcccaaggccgaaactggtaaatgccccgccttgtactggctgtctgggcttacctgtactgagcaaaactttatctcaaaatctggataccaccagagtgccagtgaacacggcctcgtcgttattgcaccggacacatccccacgtgggtgcaacattaaaggggaggacgaaagctgggatttcggaacgggagcaggattctacgtggatgccaccgaggacccttggaaaacaaattataggatgtatagctacgtgaccgaggagcttccacagttaattaatgcaaacttcccggtagatccacaacgcatgtctatatttggacacagcatgggggggcacggggctctcatctgtgccctgaagaatcccggtaaatacaaaagcgtttcagccttcgctcccatatgtaatcccgtgttgtgcccatggggtaaaaaggccttcagtggatacttgggtaccgaccagagtaagtggaaagcgtacgacgccactcatctcgtgaagtcataccctgggagtcaattggacatccttatcgatcaaggaaaggatgaccagtttctattggacggacagctgctgcctgacaatttcatcgccgcgtgtaccgaaaagaagatcccagtggtcttccggctacaggagggatatgaccactcttattactttatagccactttcattaccgatcacattagacaccacgctaagtacctgaacgcttag

SEQ ID NO: 116078 - DNA, 642 bp, synthetic construct
  misc_feature 1..642: note = Description of Artificial Sequence: Synthetic coding sequence
  source 1..642: mol_type = other DNA
atggccattactcagttcagacttttcaagttctgtacatgcttagccactgtctttagctttctcaaacgcctgatttgccgttctggccgggggcggaagttgtccggagaccagattaccctacccaccaccgtcgactactcctcagtgccgaagcaaacggatgttgaggaatggacctcatgggacgaagatgcaccaacttctgtgaaaattgaaggcgggaatgggaatgtagccacacaacagaactcgttggagcagcttgagcccgattattttaaggatatgaccccaacaatcagaaagacgcagaaaatcgtgattaagaaacgggagcctttgaatttcggtattcccgacgggtccaccggattctctagtcgccttgctgccacacaagacctgccattcatacaccagtccagcgagctcggagacttagacacctggcaggaaaacactaacgcgtgggaggaagaggaagacgcagcctggcaggctgaggaagtcctgcgtcagcagaagcttgctgatcgcgaaaagagggcagccgagcagcagagaaagaagatggaaaaggaagcacagagacttatgaaaaaggagcagaacaaaatcggggtcaagctctcatag

SEQ ID NO: 116079 - DNA, 642 bp, synthetic construct
  misc_feature 1..642: note = Description of Artificial Sequence: Synthetic coding sequence
  source 1..642: mol_type = other DNA
atggctattacacaatttcgtctgttcaagttctgcacatgcctcgctactgtgttcagtttcctgaaacggctcatttgccggagcggcaggggacgcaaactgagtggtgaccagatcaccctgcccacaacagtggactacagcagcgtgcctaaacagacagacgttgaggaatggacgagttgggacgaagacgctccaacatccgtaaagatcgaaggcggcaacggaaatgtagccactcagcagaatagtctggaacagctggaacccgactatttcaaggacatgacccccactattagaaagacacagaaaattgtcataaagaagcgggaacctctgaattttgggataccggacggatctaccggcttctccagccgactggctgccactcaagacctcccgttcattcatcagagttccgaactcggcgatttggacacctggcaggagaacacaaatgcctgggaagaagaggaggatgccgcctggcaagctgaagaggtgctcaggcagcagaaattggccgacagagagaaaagggcggcggagcagcaaaggaaaaagatggaaaaagaagcccaacgcctgatgaaaaaagaacaaaataagatcggggtgaaattatcatag

SEQ ID NO: 116080 - DNA, 594 bp, synthetic construct
  misc_feature 1..594: note = Description of Artificial Sequence: Synthetic coding sequence
  source 1..594: mol_type = other DNA
atggccattacccagtttcggttatttaaattctgcacatgcctggcaaccgtgtttagtttcttgaagcggctgatttgcagatcagggcgtggccggaagctctcaggggatcagatcaccctccccactaccgtggattactcttctgttcccaagcaaactgatgtggaagaatggacaagctgggatgaggacgccccaacatcagtgaagatcgagggcggcaatggtaatgtggcaacgcagcaaaattctcttgagcagcttgagcccgactacttcaaggacatgacccctaccatcagaaaaacacaaaaaatcgttatcaaaaagcgggagcctttaaatttcggcattcctgacggtagcaccgggttcagctcaagactggccgcgactcaagatctgcctttcattcatcaaagttcggagctgggagacctggatacttggcaggaaaatactaatgcatgggaagaagaggaggatgctgcctggcaggccgaggaggttctccgtcaacagaaacttgcagaccgcgaaaagcgggctgctgagcaacagaggaaaaagatggagaaggaggcctag

SEQ ID NO: 116081 - DNA, 777 bp, synthetic construct
  misc_feature 1..777: note = Description of Artificial Sequence: Synthetic coding sequence
  source 1..777: mol_type = other DNA
atggctatcactcaattccgcctcttcaaattttgcacctgcctcgccacagtcttctctttcttgaagcggctgatttgccgctctggacggggcaggaagctgagcggcgaccagataacccttcctaccactgtggactattccagcgtccctaagcaaactgacgtcgaagagtggacaagctgggatgaagatgcccccacttccgttaaaattgaaggaggcaacggtaatgtcgcaacgcaacagaacagtctcgagcaacttgaacccgactatttcaaagacatgaccccaactattcgaaaaacccagaaaatcgttatcaagaagagggagcctttgaatttcggcattcctgacggctccactggcttctcctccagattagcggccacccaggacctgccttttatccatcagtcctctgaattgggtgacctggacacttggcaggaaaatacaaatgcctgggaagaagaggaggacgcagcatggcaggccgaggaagttctgcgctcacgcaccaatgtttgtcttctgtgctcactgctattccatcatccaacacctacctcaacaccttacattaatcagagcgtgaaaattgagcgggtgtctcttggtcagtggagctacgggaagtccaaggagcagcagaagcttgccgatagagaaaagcgggctgccgaacagcaacgaaagaagatggaaaaggaggcacagaggcttatgaaaaaggagcagaataagattggcgtgaagctttcctag

SEQ ID NO: 116082 - DNA, 237 bp, synthetic construct
  misc_feature 1..237: note = Description of Artificial Sequence: Synthetic coding sequence
  source 1..237: mol_type = other DNA
atggctatcacccagttccggctgtttaagttttgcacttgtcttgccactgtattctcatttctcaagaggctgatatgcagaagcggtcgagggaggaaattgagcggcgatcagatcaccctgccaaccaccgtcgactactcatcagtgccaaaacagactgatgtcgaagaatggacaagctgggacgaggacgcccccacttccgtgaaaattgaaggggggaatgggtag

SEQ ID NO: 116083 - DNA, 1272 bp, synthetic construct
  misc_feature 1..1272: note = Description of Artificial Sequence: Synthetic coding sequence
  source 1..1272: mol_type = other DNA
atgtcatctcaggttgtgggcatcgaaccactgtatatcaaggccgaacccgcgagcccagatagccctaaaggatcttccgaaactgagactgaaccacctgtagccttggcccccgggccagctcctactaggtgccttccaggacataaagaggaagaagacggagagggtgccggcccaggggaacagggcggagggaaacttgttttgagtagcctgcctaaaaggctgtgcctggtttgcggcgatgttgcttctggttaccattacggagtggctagctgcgaggcctgcaaagccttctttaagcgcacaatccagggttccatcgaatacagttgtcccgccagtaacgaatgcgaaattacaaagaggcgcaggaaggcatgccaggcatgccgcttcaccaagtgcctgagagtgggcatgcttaaggagggtgtgcggcttgatcgggttcgggggggcagacagaagtacaaaagacgcccggaggtggatccgcttccttttccaggtcccttccctgcgggccctctggcggtcgccgggggacccagaaagactgctgcccccgtcaacgccttagtgagccacctacttgtagtagagcctgaaaagctctatgctatgcctgatccagctggccccgatgggcatctcccagctgtggctaccctttgtgatcttttcgatagagagatcgtcgttacgatttcctgggccaaaagcatcccaggcttcagtagtctctctttatccgaccagatgtccgtcctccagtcagtttggatggaggttctcgttcttggcgttgcacaacgttccctaccactccaggacgaattagcctttgccgaagatttggttcttgacgaagagggggcaagggccgctggactgggtgagctcggagctgctctgctccaactggtaaggcggctccaagctctgagactggaacgagaggaatatgtgttactaaaggcactggccctggcgaactcagattccgtgcacatcgaagatgccgaagccgtagagcagctccgggaagcactgcacgaggccttgctcgagtacgaggcgggaagagccggacctggtggaggggctgagcggaggcgggcgggaagactcttactaacacttccgttacttaggcagacagctggaaaggtactcgctcatttctatggagtgaaactcgagggaaaggtgcctatgcataaactgtttcttgaaatgttagaggctatgatggactag

SEQ ID NO: 116084 - DNA, 1272 bp, synthetic construct
  misc_feature 1..1272: note = Description of Artificial Sequence: Synthetic coding sequence
  source 1..1272: mol_type = other DNA
atgtcaagccaggtagtcggaatcgagcctctatatatcaaggccgagcccgctagccctgacagcccaaagggttcaagcgagacagagacagaaccgccagtcgccctggctcccggccctgcaccaacacggtgtctgccaggccataaagaggaagaagatggcgagggcgccggtcccggcgaacagggcggtggtaaactcgttctgagttctctgcccaagcggctgtgcctggtgtgcggcgatgtcgcatctggatatcactacggggttgctagttgtgaagcctgcaaagccttcttcaagcgcaccatccaaggctccattgaatattcgtgcccagcctccaatgaatgtgaaataactaagcggagaaggaaggcgtgtcaggcttgccggttcaccaaatgtctgcgggtgggcatgctaaaggagggggtacggctggatagggtacgcgggggtaggcagaaatataaaagaagaccagaggtcgacccactcccctttccgggaccattcccagcgggacccctggcagtggcgggaggcccccgtaagactgccgcgcccgttaatgctctggtctcacacctcttagtggtagaaccagaaaagctttacgcaatgcccgacccagccggtcctgacggacatctgcccgctgtggcgaccttatgtgatctcttcgacagagaaatagtcgtgactatcagctgggccaaatctattcctggctttagtagcttgtcgttatcagatcagatgtcagttctgcaaagcgtctggatggaagtcctggtcctaggggtcgcccagcggagcctgccgctccaggatgagctggctttcgctgaggaccttgtgttggacgaggagggggcaagggccgccgggttgggggaactgggtgcagccttgctgcagctcgtccggcgcctacaagccctacgactcgaacgagaagagtacgtacttctgaaggctctggctctggctaacagcgatagcgtccacattgaagacgccgaagcggtggagcaattaagagaagcattacacgaggccctcctggagtatgaagccggacgcgcaggaccaggcggtggagccgaacgcagacgagcaggacgtctcctcttaacccttcccttgctgaggcagaccgccggaaaggttctcgcgcacttttatggagtgaaactcgagggcaaagtcccgatgcacaagctgtttctcgaaatgcttgaagcaatgatggattag

SEQ ID NO: 116085 - DNA, 1269 bp, synthetic construct
  misc_feature 1..1269: note = Description of Artificial Sequence: Synthetic coding sequence
  source 1..1269: mol_type = other DNA
atgagttcccaggtggtcggcatcgaacctctatacataaaagctgagccggcttcacccgacagtccaaaaggctcttctgagactgaaaccgagccgcccgtggctctcgctccagggccagccccaacacgatgcttaccaggccataaggaggaggaggatggcgagggtgccggcccaggtgaacagggcggcggcaagctggtcttgtcatctctgcctaagaggctgtgcctggtttgtggggacgtggcatccggatatcactatggtgttgcttcttgcgaagcctgcaaggccttcttcaaacgtaccatccagggtagcattgaatactcttgtccagcgtctaacgagtgtgaaattaccaagcgccgaagaaaagcttgccaggcttgcagattcaccaagtgtttgcgagtgggtatgttaaaagaaggtgtcagactggatcgcgtgagaggggggcgccagaaatacaagagacgtcctgaggtggatcctctgccgtttcctgggcctttcccggccggcccactggcagtggctgggggcccgagaaagactgcaccggttaacgccctggtgtcccatttgcttgtggtggagcccgagaaattgtatgccatgcccgatcctgctggaccagatggccatctgcccgctgttgcaactctgtgcgacctctttgatcgagaaatagtggtcacaatctcttgggctaagtcaatcccaggattttctagcttatcgttgtcagaccagatgtccgtcctgcaaagtgtgtggatggaagttttggtgttgggggtggcccagaggtctttaccactccaagatgaactcgcctttgccgaagatctggtgttagacgaagaaggagcccgggcggccgggctgggcgaactcggagccgccctgttgcagttggtgcggcgattacaggctctccgcctggaacgcgaggaatacgttctcctcaaggctctcgcattagccaacagcgattcggtgcacattgaggatgccgaagcagtagagcagctgagggaagcattacacgaggcacttctcgaatacgaggccggacgggccggacccgggggaggtgccgaacgcagacgcgccgggcgtttactcctgaccctgccgttactcaggcagacagccggaaaggttctggcccatttctatggcgtcaagctggaggggaaggtgcctatgcacaagctcttcttagagatgctcgaggctatgatggattag

SEQ ID NO: 116086 - DNA, 330 bp, synthetic construct
  misc_feature 1..330: note = Description of Artificial Sequence: Synthetic coding sequence
  source 1..330: mol_type = other DNA
atgtccagccaagtggtcggaatagaacccctctacataaaggctgagccggcctccccggactcgccgaaaggtagttccgaaactgaaactgagccaccggtggctctggcccccggacccgcaccaacacgctgtttgcctggtcacaaggaagaagaggacggagaaggggcaggccccggcgaacagggaggcgggaagctagtgctaagcagcttgcccaagcgcctatgtctggtttgtggcgacgtggcaagcggataccactacggagttgccagctgcgaggcatgtaaagcattcttcaagcggaccatacaaggctag

SEQ ID NO: 116087 - DNA, 1503 bp, synthetic construct
  misc_feature 1..1503: note = Description of Artificial Sequence: Synthetic coding sequence
  source 1..1503: mol_type = other DNA
atgtccagcgatgacagacacctgggctccagctgtggaagcttcatcaaaacagagccatcaagtccatccagtgggattgacgccctgagtcaccactcaccaagcggttcgagcgacgccagtggaggttttggattagccctgggcacccatgccaacggcctggacagcccacctatgtttgccggagccggcctgggcgggactccttgtcgaaaatcctacgaggactgtgccagcgggataatggaagacagcgctattaagtgcgagtatatgctgaacgcaatacccaaacgcctttgtcttgtgtgcggggacatcgcctccggatatcattacggcgtcgcctcttgtgaggcttgcaaagccttttttaagagaaccatccagggaaacatcgaatactcttgcccagcaactaacgagtgcgaaatcaccaaacgccgacgtaaaagctgccaggcctgtcgctttatgaagtgccttaaggttgggatgcttaaggaaggcgtaaggctcgatagagttcgcggggggcggcagaaatataagcggcggctcgattccgagtcttctccatatttgtcgttacagatctctccacctgccaagaaacccctcactaagatagtgtcttacctgctggtagctgaacccgacaagctgtacgctatgccccctccagggatgcctgagggtgatatcaaagctctgactactctttgtgaccttgccgatagagagcttgtcgtgatcattggctgggccaaacacattcccggcttttccagccttagtctgggcgatcagatgagcctactccagtctgcctggatggagatcctgattctcggaatcgtctatcggtccctgccctatgatgacaaactggtctatgcagaggactatatcatggatgaagagcacagccgtctggccggactcctagagctctatcgagcaatcctgcagcttgtgcgaagatataaaaagctgaaggtcgaaaaggaagagttcgtcaccctgaaagccctggcactcgcaaacagtgactccatgtatattgaagatcttgaggctgttcagaagctgcaagatttgctgcatgaggcgctccaggactacgaattatcccagaggcacgaagaaccctggaggacgggaaaattactgctcacgctcccgctcctccgacagaccgcggctaaggccgttcaacatttctatagcgtaaagctacaggggaaagtcccaatgcacaagctgtttctcgagatgctggaagctaaggcgtgggcccgcgccgactctctccaggaatggaggccactggaacaagtcccatctcctctgcacagggccacaaaacgccaacacgtacattttttgacccccttaccaccccctccctcagttgcatgggtggggactgcacaggccgggtatcatctggaagtgttcctgccgcagcgagccggatggcctcgagccgcctag

SEQ ID NO: 116088 - DNA, 1527 bp, synthetic construct
  misc_feature 1..1527: note = Description of Artificial Sequence: Synthetic coding sequence
  source 1..1527: mol_type = other DNA
atgtctagtgatgacaggcatctgggcagttcctgcggaagtttcattaagactgaaccttcatcaccttccagcggcatagatgccctttcacaccacagtccgagcgggagcagtgacgccagtgggggatttgggctcgctctgggaacacacgcaaacgggctggatagtcccccgatgttcgcaggggctggacttggcggaacaccctgcaggaagtcatatgaagattgcgcatctgggattatggaagattctgctatcaaatgcgagtacatgctgaatgctatccccaaaagactgtgtctggtgtgcggggatatagcaagcggataccattatggcgtggcatcttgcgaagcctgtaaggcgttttttaagcgcacaattcagggaaatattgaatatagttgccccgcgaccaatgaatgcgagattaccaaaaggcgcagaaaatcttgccaggcatgtcgtttcatgaaatgtctgaaagtgggaatgttgaaagagggagtgcgactggatcgagtgagaggggggagacagaagtataagcgccgacttgactcagagtcatccccatatctttcactgcagatctcaccccccgctaagaaacccctgaccaaaatcgtcagttacctcctagtcgctgagccagataaactatatgccatgcccccccccggaatgcctgaaggagatattaaagccctcacaaccctttgtgaccttgccgaccgcgaattagtggtgattatcggatgggctaagcatatccctggtttctcgagcctctccctgggagatcagatgtccctcttgcagtccgcttggatggaaatcctcatattaggcatcgtttatcgaagtctcccatacgacgataaattggtatatgcggaagactatattatggacgaggagcactctagattggccggattactggagctgtacagggcgatcttgcagttagtgagaagatataaaaagctgaaggttgaaaaagaggagtttgtaacactcaaggccctggctctggccaacagtgacagcatgtacattgaagatttggaggcagtgcagaaactccaggacctactgcacgaggccttgcaagattatgagttgtctcagcgacacgaggagccttggcgcaccggcaaactgctgctcacactgcccctcttacggcagaccgccgcaaaagccgtgcagcacttctattcagtgaagttgcagggtaaagtgccaatgcacaagctatttctggagatgctggaggcaaaagtggggcaggagcaactgcggggtagtccaaaggatgagaggatgagctcacatgacgggaagtgcccatttcagagcgctgcttttacctcccgtgaccagagtaacagcccgggaatcccaaatccgaggccctcaagtccgacaccactaaacgagcgagggaggcagatttcacctagtactaggaccccaggaggccaaggcaagcacctgtggctgacaatgtag

SEQ ID NO: 116089 - DNA, 1503 bp, synthetic construct
  misc_feature 1..1503: note = Description of Artificial Sequence: Synthetic coding sequence
  source 1..1503: mol_type = other DNA
atgtcttctgatgaccggcatctaggctcatcctgcggatcttttattaagacagagccctcttctccctcttccgggatcgatgccctgagtcaccactctccctccggaagttccgatgcttccggcggattcgggttggcgcttggaactcatgctaatggcctggacagcccgcccatgttcgccggagccgggttgggaggaaccccgtgcagaaagtcatatgaggattgcgcctccgggattatggaggattctgccattaaatgtgagtatatgctgaacgctatcccaaaaaggctgtgtcttgtgtgtggggacatagcatcgggttaccattatggtgtagcgtcgtgcgaagcatgcaaagccttctttaagcggaccatccaagggaacatagaatactcctgcccggctacaaatgaatgcgaaataacaaagaggaggcgtaagtcctgccaagcgtgtaggtttatgaagtgtcttaaagtgggaatgctgaaagaaggcgtgcggcttgacagagtgagagggggccgtcaaaagtataagaggcgccttgattctgagagcagtccgtacctgagtctgcagatcagcccgccagccaagaaacccctcactaagattgtctcctacttgcttgtggcagagcctgataaactgtacgctatgcctcctcctggaatgcctgaaggagatattaaagcactgacaactctgtgtgacttggcggatcgcgaactggtggtgattatcggctgggctaaacacatccccggcttctcttcattgtctctgggcgaccagatgtccctgctgcagtctgcttggatggagatcctaattctcgggatagtgtatcgctccttgccctacgacgataagctggtgtacgccgaggactacatcatggacgaagagcattcacgactggcgggtcttctagagttgtaccgggctatactgcagttagtgcgtaggtacaagaagctaaaggtcgagaaggaagagtttgtgacactgaaagcgctcgccctcgccaatagcgatagtatgtatatcgaagatctggaggccgtccaaaaattgcaagatcttttacacgaagcgctgcaagattatgagctcagccaaaggcacgaggagccttggcggaccggaaagctcctgctgactctgcctttactacgacaaaccgcggccaaagctgtgcagcatttttattcggtcaagcttcaggggaaagttcccatgcacaaactgttcctcgagatgttggaggcgaaggcatgggcgcgggccgattccctgcaggagtggcgaccacttgagcaagttccctcacctctccacagagctaccaaaagacagcacgtccactttctgactccactgcccccccctcctagcgtcgcctgggtgggcacggcccaggcaggataccatctggaagtcttcctgcctcagagggccggctggccaagggctgcatag

SEQ ID NO: 116090 - DNA, 1527 bp, synthetic construct
  misc_feature 1..1527: note = Description of Artificial Sequence: Synthetic coding sequence
  source 1..1527: mol_type = other DNA
atgtcctccgatgataggcacttgggcagctcctgcggcagctttataaagacagagccctctagcccgtcttctggcatagacgccttgtcacatcactctccaagcggctccagcgatgcatccggaggatttggtctggccctgggtactcacgccaacgggcttgactccccgcctatgttcgctggtgccggattggggggaacaccttgcaggaagtcatatgaggattgcgcgtctggcattatggaagactccgccataaaatgcgagtacatgctcaatgcaatcccgaagcgtctctgcttagtctgcggtgacattgcctccggataccactacggtgtggcatcctgcgaggcttgtaaggctttcttcaagcgcacgattcagggcaacatagaatactcctgtcctgctaccaacgagtgcgagattacaaaaagacgccggaagagttgccaagcctgtcggttcatgaaatgcctaaaagtgggtatgctaaaggaaggcgttcgattagatcgtgtccgcgggggacgccagaaatataagcgaagactggactctgaaagctcaccctatctttccctccagatatcaccgcccgcaaagaaaccactcactaaaattgtttcataccttttggtggcggagccggataaactctatgccatgcctcctcctggtatgcccgaaggcgacatcaaggccctcacaaccttatgcgaccttgcggatcgtgagctagtggtaattatcggttgggccaaacacataccagggttttccagcttgagcctgggagatcagatgagcttacttcagtctgcatggatggagattttaatcctaggcatcgtctaccggagcctaccatatgatgataagctggtttacgcagaggactacataatggatgaagaacacagtcggttagctggcctgctggagctctacagagccatactgcagctggttcgccgctacaaaaaactgaaagtcgagaaggaggagttcgtgaccctcaaagcactggctttggcaaattcagactcgatgtatattgaggatctggaagccgtgcagaagctgcaggacttactgcatgaggctttgcaggattatgagttgtcacagcggcatgaggaaccctggcggactggcaagctcctcctcacacttcccctgctgcgccagacagcagccaaggcagtccaacatttctactctgtaaagcttcaggggaaggttccaatgcataagctgttcttggaaatgttagaggcaaaggtggggcaggaacagcttagaggctcccccaaggatgagcgcatgtcaagtcatgatggcaaatgcccatttcagagcgccgcattcacgagccgcgaccagagtaactctcccggcataccaaaccccaggccctcctctccaaccccactgaacgagcgtggacggcagatttctccctctacccgcacgccgggcggacagggaaaacacctgtggcttacaatgtag

SEQ ID NO: 116091 - DNA, 1527 bp, synthetic construct
  misc_feature 1..1527: note = Description of Artificial Sequence: Synthetic coding sequence
  source 1..1527: mol_type = other DNA
atgctcctcaacaggatgagttcagacgacagacacctgggcagtagttgtggatcgtttattaagaccgaaccaagctcaccttcatccggcattgatgctctgagtcaccattctccgtctggtagctctgacgcttctggcggttttggacttgcattgggaacccacgccaacggcctggacagcccacccatgtttgctggcgccggcctggggggcaccccttgccggaagagttacgaggactgtgcctcgggtataatggaggactccgcgatcaagtgcgaatacatgctcaacgcaatcccaaagaggctgtgcttggtgtgcggcgatatcgcctccggttaccactacggcgtagcttcttgtgaagcctgcaaggcttttttcaagagaaccattcagggtaacatcgagtactcttgcccggctaccaacgagtgcgagataaccaagcggcggcgaaagagttgtcaagcctgccggttcatgaagtgtttgaaagttgggatgctaaaggagggggttcgactggaccgggttcgaggagggaggcagaagtataaaaggagactcgatagcgaatcttctccctatttgagtttgcagattagtcctcccgctaagaagcccttaaccaagatcgtctcgtacctcctggtcgccgagcccgataagctgtacgctatgccccctcctggtatgcctgaaggggatattaaggcattaacaactctgtgcgacttagcggatagggagctcgtggtgattattgggtgggctaagcatattccaggattctccagcttgtccctgggagatcaaatgagcctgcttcagagcgcttggatggagatcctcatcctcggaattgtctataggagtttgccttacgatgacaagcttgtgtatgccgaggactacatcatggatgaagaacactccaggctggcagggttactggagttatatcgtgctattcttcaactcgtgcgcagatataagaagttaaaggttgaaaaggaggaattcgtcaccctaaaggcgctagcgctcgcaaacagcgattcaatgtacatagaggatttggaggccgtgcagaagctccaagacctgcttcacgaggctctccaagattatgagctttcgcagaggcacgaagagccctggcggactggcaaactgctacttaccctgccgttgctaaggcagaccgctgcaaaggcagtgcaacatttctactctgttaagctccaaggtaaagtaccaatgcacaagctcttcctcgagatgctggaagcaaaggtcggacaagaacagcttagaggttcaccaaaggatgagagaatgtctagccatgatggaaagtgcccctttcagagtgccgcttttacctctcgggatcaaagtaactcgcccggcatccccaatcctagacccagctctccgacccccctgaacgagaggggacgccagatcagcccctccacgcggacacccggaggacagggtaagcactag

SEQ ID NO: 116092 - DNA, 1302 bp, synthetic construct
  misc_feature 1..1302: note = Description of Artificial Sequence: Synthetic coding sequence
  source 1..1302: mol_type = other DNA
atgagctctgatgatcgacacctcggctcaagttgcggctctttcattaagacagagccttcttctccatcctctggcatagacgcgctctctcatcacagcccatccggatcaagcgacgccagtggcggcttcgggttggcccttggcacccacgctaatgggctggatagccctcctatgtttgcgggggccggactggggggcaccccctgtcgcaagtcgtatgaggactgcgccagcggcattatggaagactcagctataaaatgcgagtacatgctaaatgccatccccaaacgtctatgcctcgtttgcggcgacattgcgagtgggtaccactatggggtcgctagctgtgaggcgtgcaaagctttttttaagcggactatccaggggaatattgagtattcttgcccggccaccaacgagtgcgagattaccaaacgtagaaggaaaagttgtcaggcttgccgctttatgaaatgccttaaggtcggaatgctgaaggaaggggttcgcctggacagggtgcgcggaggacgtcagaagtataagaggcgccttgacagtgagtcgtccccgtaccttagcttgcaaatcagccccccagcgaagaagccccttaccaaaattgtaagctacttgctggtcgcagagccggacaaattgtacgcaatgccgccacccggcatgcccgaaggagatattaaggcgctgacgaccctgtgtgatctcgccgacagagagctcgtggttatcattgggtgggccaaacacatcccaggattctcatccctgagtcttggtgaccagatgagcctcctgcagtcagcctggatggaaatattaattttgggcatcgtctaccgaagcctcccttacgacgacaagctggtgtatgcagaggattacattatggacgaagaacatagtcggttggcgggtctcctagaactgtaccgcgccatcctccaattagttcgaaggtataaaaagcttaaagttgaaaaagaggagtttgttactcttaaggctctggccctagctaattctgactctatgtatattgaagatctagaagccgtccagaagctgcaggatctattgcatgaagctctccaggattacgagctgagtcaacgacacgaagaaccctggcgcactggtaaactcctgcttacattaccattgttaagacaaaccgcggccaaagccgtgcagcacttctattcggtgaaactacaggggaaggtgccaatgcacaaactttttcttgaaatgttagaggccaaggtgtag

SEQ ID NO: 116093 - DNA, 1311 bp, synthetic construct
  misc_feature 1..1311: note = Description of Artificial Sequence: Synthetic coding sequence
  source 1..1311: mol_type = other DNA
atgagcaacaaagaccgacacatcgacagttcatgctctagctttatcaagaccgagcctagttctcccgcatccctgaccgactcagtcaatcatcatagccctggaggctcttctgacgccagcgggtcctacagctccacaatgaacggacaccagaatggcttggactcacctccactgtaccccagcgccccaatcttaggaggctcaggtcccgtgcggaaattgtacgacgactgttccagcactatcgtggaggatcctcagactaaatgcgaatatatgctcaattccatgccaaagcggttatgtctcgtttgcggcgatatagccagcggttaccattatggcgtcgcctcctgcgaggcctgcaaagcatttttcaagaggaccattcaagggaatatcgaatattcatgcccagccacgaatgaatgcgagatcacgaagagaaggagaaagtcttgccaggcctgtcggttcatgaaatgtctcaaggtgggaatgcttaaggagggtgtgcgcctcgaccgggtcagaggcggtcgccaaaaatacaagaggcgaattgacgcagaaaacagtccctatctgaaccctcagctggtgcagcccgcgaaaaagccctacaacaaaattgtgtcccacctgctcgtcgcagagcccgagaaaatctacgcaatgcccgatcctactgtccccgactcagacatcaaggctctgaccacactatgtgatctggcagatagagagctggtggtcatcattggttgggccaagcacatccctggtttcagtacactaagtctcgctgaccaaatgtccttgcttcagtcagcatggatggaaatcctgatcttaggggtggtgtaccggtcactgtcattcgaggatgagctcgtttacgctgacgactatataatggacgaggaccagagtaagctcgctgggctgcttgatcttaacaatgctatcctccagctcgtgaagaagtataaatctatgaagctcgaaaaggaggagttcgtgactctgaaggccatcgctcttgctaactccgattcgatgcatatagaggacgttgaggcggtccagaagctccaggatgttctgcacgaggcgctgcaagattacgaggctggacaacacatggaggacccaagacgggccggcaagatgctgatgacccttcccctgctgcgacagaccagtactaaggccgttcagcatttttacaatataaagctggaggggaaggtgcccatgcacaaactctttttggaaatgctggaagcaaaggtctgctag

SEQ ID NO: 116094 - DNA, 1308 bp, synthetic construct
  misc_feature 1..1308: note = Description of Artificial Sequence: Synthetic coding sequence
  source 1..1308: mol_type = other DNA
atgtcaaataaagaccggcacatagatagctcatgcagcagcttcataaagactgagccttcctcacccgccagccttaccgattctgtaaaccaccattctcccggcggctcgtcagatgcatctggcagttatagttctaccatgaacggacatcagaacggactagatagtccacctctgtacccctcggcaccaatcctgggaggcagtgggccagttagaaagctgtacgacgattgcagctctaccatcgtcgaagatccccagactaagtgcgaatacatgctgaactccatgcctaaacggctgtgtctggtttgtggcgacatagcatctgggtatcactatggggtggccagctgcgaagcatgtaaggcctttttcaagcgcacaattcaagggaatattgaatacagttgccctgcaaccaacgagtgcgaaattacaaagcgcagaagaaagagttgccaggcttgccgattcatgaaatgtttgaaagtggggatgcttaaagagggcgtgcgactcgatcgggttaggggaggtaggcagaaatataaaagacggatcgatgccgaaaactcaccctacctcaatccacagcttgtgcaacccgccaaaaaaccatacaacaagattgtttcccacctcctcgttgccgaaccagagaaaatttatgccatgccagatccaactgtccctgatagcgatatcaaggctctcacaaccctgtgtgatctggctgatagagagcttgtggtaattataggatgggctaagcacataccggggttctctaccctgtcattagctgatcagatgtctctgctacaatccgcctggatggaaatcttgatcttgggcgtcgtctaccggtccctcagcttcgaggacgagctggtctacgcagacgactatatcatggatgaggatcagagtaagcttgcaggcctgttggaccttaacaatgctattctacaactagtaaaaaagtataaaagcatgaaattggagaaggaagagtttgtgaccctgaaagctattgccctcgccaattcagactccatgcacatcgaagacgtggaagctgtgcagaaactgcaagatgtcctgcacgaggcgctgcaggattacgaggccggacaacacatggaggatccacgtagagctggtaaaatgttgatgactcttcccttgttgcgtcaaacctcaacgaaagctgtccagcatttctacaatatcaagctggaaggcaaagttccaatgcataagctgtttctggagatgctcgaggccaaggtgtag

SEQ ID NO: 116095 - DNA, 1308 bp, synthetic construct
  misc_feature 1..1308: note = Description of Artificial Sequence: Synthetic coding sequence
  source 1..1308: mol_type = other DNA
atgtccaacaaggatcggcacattgacagcagctgctcttcctttatcaaaaccgaaccaagtagcccagcttccctgaccgactctgtgaaccaccattcacccggcggatctagtgacgcatctgggtcttactcttccactatgaatggacaccagaacggcctggacagcccccccctgtacccgagcgcacctatcctgggaggctccggccctgtgaggaagttgtacgatgactgttcgtctacaattgtggaagaccctcaaactaagtgtgaatatatgctcaactcgatgcccaaacggctgtgcctcgtgtgtggcgacattgcaagcgggtaccactatggcgttgcctcttgcgaagcctgtaaggcattctttaagcggacaattcaggggaacattgaatattcatgtcctgcaactaacgagtgcgagataacaaagcggcgtaggaagagttgccaggcctgccggttcatgaaatgtctgaaagtgggaatgcttaaggagggggtaaggctggatcgggttagaggtgggcgtcagaaatataagaggcgcatcgatgcggagaactccccttacctgaatccgcagttggtgcagccagcgaaaaagccctacaataagattgtgagccacctcttagtcgcagaacctgaaaaaatctacgcgatgcccgatcctaccgttccagactcagatataaaagctttgacgaccttatgcgatctcgccgatcgggagctggtggtgataataggttgggctaaacacatcccagggttcagcactctcagtctcgctgatcaaatgagcctattgcagtcagcctggatggaaatcctgatattgggcgtggtataccggagtctgtcgttcgaggatgagctcgtctatgctgacgattatatcatggatgaagaccagtccaaacttgctgggttgctcgatctgaacaatgccattctgcagcttgtgaagaagtacaagtctatgaagctggaaaaagaggaatttgtgaccctgaaagccattgccctcgctaacagtgattccatgcacatagaagacgttgaagcggttcaaaagctccaagacgttctacacgaagctttacaagactacgaggccggacagcacatggaggacccgcgtcgcgcgggaaagatgctcatgaccttacccttactgcggcagacctccacaaaggccgtccaacacttttacaacatcaagctggaaggcaaggtaccaatgcacaaactattcttggaaatgctggaggccaaggtttag

SEQ ID NO: 116096 - DNA, 1308 bp, synthetic construct
  misc_feature 1..1308: note = Description of Artificial Sequence: Synthetic coding sequence
  source 1..1308: mol_type = other DNA
atgtcaaacaaggatagacacatcgactcgtcctgttccagctttattaagactgaaccatcctctcctgcatctcttacagacagtgtgaatcaccatagccctgggggaagttctgacgcctctggaagctattcctcaacaatgaatggtcatcagaatgggctcgactctccacccctgtatcctagcgctcccatcttaggcggaagcggtcctgtgcggaagctgtacgatgattgctcttctactatagtggaggatccgcaaactaagtgcgagtacatgctcaatagcatgccgaagcgactttgtctggtgtgtggcgatatagccagtggctaccattacggagtggccagttgtgaggcctgtaaggccttttttaagaggaccattcagggaaatatcgaatatagttgtcccgccactaatgagtgtgaaatcactaaaagaagaagaaagtcatgccaggcatgcaggtttatgaagtgcctgaaggtggggatgctgaaagagggcgttcgccttgacagggtacgcgggggcaggcagaaatacaaacggagaatcgacgctgagaacagtccttacttgaatccacagcttgtgcaaccagccaaaaagccctataacaagatcgtgtcacacttactggtcgctgagcctgagaagatctacgctatgcccgaccccacagtccctgattcagacatcaaagctctgacaaccctttgcgaccttgcggaccgcgaattagtggtgattattggctgggcgaagcatataccgggcttcagtaccctctctcttgctgaccagatgtctctgctgcaatcggcctggatggaaattctaatactgggggtggtctacagatcgctgtcctttgaggacgagctcgtctacgctgatgactatatcatggacgaggaccagagtaagttggcggggctactcgatctgaacaatgcaatccttcaactggttaaaaagtacaaatcaatgaagctggaaaaggaggagtttgtgactctaaaagccatcgctctggcaaattccgacagtatgcacattgaggacgtggaggcagtgcagaagctccaggacgtgctccacgaggctcttcaggactacgaggccggccaacatatggaggacccgagaagggcaggcaaaatgctgatgactctacccctgctgcgccagacctctacgaaggccgtgcaacatttctacaatattaagctggaaggtaaggtacctatgcataagctattcctggaaatgcttgaggccaaggtgtag

SEQ ID NO: 116097 - DNA, 1308 bp, synthetic construct
  misc_feature 1..1308: note = Description of Artificial Sequence: Synthetic coding sequence
  source 1..1308: mol_type = other DNA
atgtccaacaaagaccggcacattgacagcagctgttctagtttcattaaaaccgagccctcgtctcccgctagtctgacagattccgtgaaccatcactccccagggggcagctccgatgcatctggctcttattctagcaccatgaacgggcaccaaaacggcctcgatagcccaccactatacccttccgcgcccatcttggggggctctggaccggtgcgcaagttgtatgacgactgcagctccacaatcgtggaggacccacagacaaagtgtgagtacatgttgaacagtatgcctaagcggctctgtctggtttgcggggacattgctagcggctatcattacggcgtggcttcctgcgaagcttgcaaggcctttttcaaacgaactattcagggtaatatcgagtattcgtgtccggccactaacgaatgtgaaattaccaagaggaggagaaagagttgtcaggcatgtcggttcatgaagtgtcttaaggtcggcatgctcaaggaaggagtccgactggatagggttcggggcgggcgtcagaaatataagagacggatagatgccgagaatagcccgtatttgaacccgcagctcgttcagcctgcaaagaagccctacaataagattgtttcacacttgctggtggcagagcctgagaaaatatatgccatgccagacccaacggtgccggattccgacatcaaagctctaacgacactctgcgatctcgctgatcgtgaactggttgtcattattggctgggcaaaacacattcctggattttctacgctgtctctcgctgaccagatgtctttgctgcagtcggcctggatggaaattctgatactgggagtcgtgtaccggagtctatccttcgaagacgagctcgtctacgcagacgactatataatggatgaggatcagtccaagttggccggacttctcgacttaaacaacgcgatcttgcagcttgtcaagaagtacaagtcaatgaaactggagaaagaggagttcgtgacactgaaggctatagccctcgctaactctgactcgatgcacatcgaggacgtagaggctgtgcagaagctgcaggacgtcctacatgaggcactgcaggactacgaggccggccagcacatggaggatcctaggcgggctggcaagatgctaatgactctgccattactacggcagacctctaccaaggccgtacagcatttctacaatatcaaactcgagggaaaggtgcctatgcacaaactttttttggaaatgctcgaggccaaggtgtag

SEQ ID NO: 116098 - DNA, 1308 bp, synthetic construct
  misc_feature 1..1308: note = Description of Artificial Sequence: Synthetic coding sequence
  source 1..1308: mol_type = other DNA
atgagcaacaaagatagacatatcgacagcagctgctcctcatttatcaagacagaacctagttcaccagcatccttgaccgacagtgtgaaccaccacagtcccggtgggtctagtgacgcctccggctcctattcatcaaccatgaacggacaccagaacggcctggattccccccctttgtatcccagtgctcctatccttggaggaagtggacccgtgaggaaactctatgatgattgttcctctacaattgtagaggacccccaaacaaagtgtgaatacatgctcaactcgatgcctaagcggttgtgtctggtctgtggcgacatcgccagtggctatcactacggggtcgcaagctgtgaggcctgcaaggctttcttcaaaagaaccatccaggggaatattgagtatagctgccccgctactaacgaatgtgaaatcaccaaacgtagacggaagagctgccaggcgtgtcgtttcatgaagtgcctcaaagtcggtatgctcaaagaaggtgtgaggctggacagggtcagaggagggcgacagaagtataagaggcgtattgacgcagagaattccccttacctgaatccacaactggtccagcctgccaaaaaaccatacaacaaaattgtttcacacctgctcgttgcagaaccggagaaaatttatgcaatgccagatccgacagtgccagactcagatataaaagccctaacaacgctctgtgacctggccgaccgggaattggttgtaatcattggctgggccaagcatatcccagggtttagcaccttgtccctcgcagatcagatgagcctcctgcagtcagcgtggatggaaatcctgattctcggcgtggtgtaccggtcattaagctttgaggacgagctcgtgtatgcggatgattatataatggatgaagaccagtccaagctggctggactgctggacttaaacaatgcgatccttcaactggtcaagaagtacaaatctatgaagctggaaaaagaggaatttgtgactttgaaggccatcgccttagccaactctgattctatgcatatcgaagatgttgaagccgttcaaaagcttcaagatgtactgcacgaggcactgcaggattacgaggctggccaacacatggaggacccaagaagggctgggaagatgttgatgacccttccacttttgagacagacgtcaacaaaggcagtgcagcacttctacaacatcaaacttgaaggtaaagtccctatgcataaattgttcctggagatgctcgaagcaaaagtgtag

SEQ ID NO: 116099 - DNA, 1308 bp, synthetic construct
  misc_feature 1..1308: note = Description of Artificial Sequence: Synthetic coding sequence
  source 1..1308: mol_type = other DNA
atgagcaataaagaccgacacatcgacagcagttgctcatcatttattaaaaccgagccgtcttcaccagcttcccttaccgattctgtaaatcaccactctccaggtgggagctcagacgcatctggcagctattcatctaccatgaatgggcaccagaacggtctcgactcaccgccgctgtacccgtccgctcctatcttaggcgggtctgggcccgtccgtaagctgtatgacgattgctccagcaccatcgtggaggacccccagaccaagtgtgaatatatgctcaactcaatgccgaaacgactgtgcctcgtttgcggggatatcgcctctggttaccattatggggtcgcctcttgtgaggcgtgcaaggccttctttaagcgaaccatacagggcaacatagagtattcctgtcccgccacgaatgagtgtgaaattaccaaaagacggcggaagtcctgccaggcctgtaggtttatgaagtgcttaaaggtaggcatgcttaaagaaggggtgaggctggatagggttcgtggcgggcggcaaaaatacaaacggaggatcgacgcagaaaattccccttatctcaacccccagctggtgcagccagcgaagaagccttataataaaatcgtctctcacctgttggttgccgagcccgagaagatctacgctatgcctgatcccactgtgccagactccgatatcaaagcactgacaactctttgtgaccttgcggatagggagcttgtggtaatcataggctgggccaagcacatccctggtttctccacgctgtctctggcggatcagatgtccctgcttcagtccgcctggatggaaatcctaattttaggagtggtatacaggagcctctcttttgaggacgagttagtgtacgccgatgactacataatggacgaggaccagagcaagctcgccgggctcctggatctaaacaatgctattttgcagctggtgaagaaatataaaagtatgaaactggaaaaagaggagtttgtgacactgaaagctattgctctcgccaacagtgattcaatgcacatcgaagacgtggaagctgtgcagaagcttcaggacgtgctgcacgaggctctacaggactatgaggcgggacagcacatggaagaccctcgaagagccgggaaaatgctcatgacactgccactcctgcggcagacctccacgaaagcagtgcaacatttttacaacattaagctggaaggcaaagtaccaatgcacaaattatttctggaaatgttggaggccaaggtgtag

SEQ ID NO: 116100 - DNA, 1329 bp, synthetic construct
  misc_feature 1..1329: note = Description of Artificial Sequence: Synthetic coding sequence
  source 1..1329: mol_type = other DNA
atgtccaacaaggacaggcacattgacagttcttgctcttcctttatcaaaaccgaaccaagctccccagcaagtttaacagattccgtgaatcaccactccccgggtgggtctagcgatgcttctggctcatatagttccacaatgaacggccaccaaaacggcctggacagccccccactgtacccatctgccccaatcctgggtggtagtggcccagtacgaaagctgtatgacgactgctcctccactatcgtggaggacccacagactaagtgcgaatacatgctaaactccatgcctaaaaggctgtgcctcgtctgcggcgacatcgcttctggttaccactatggcgttgcatcctgtgaagcctgcaaagcgttcttcaaaaggaccatccaggggaatatagagtactcgtgtccagctactaatgaatgcgagattacgaaaaggcgaaggaaaagctgccaagcttgcaggtttatgaaatgcctgaaggtaggcatgctgaaagagggggtgcgtctggacagggtgagaggtgggcggcagaagtacaagcgccgtatcgacgcagaaaactcaccttacctgaatcctcagctggtccagccagcaaaaaagcctctcctctggagcgaccctgcggacaacaaaatcgtttcacacctactggtggctgagccagagaagatttatgccatgcctgaccccaccgtgcccgacagtgacattaaagccctgacaacgctttgtgacctggccgaccgcgagctggtggtcataattggctgggccaaacatataccaggtttctccactctcagcttggccgaccagatgtcattgctgcagagtgcatggatggagatcctaatccttggggtcgtgtataggtccttgtctttcgaagatgaactggtgtacgctgatgattacattatggacgaagatcagtccaagctcgccgggctcctggacctgaacaatgccatcctgcagctggttaagaagtacaagtcaatgaagctggaaaaagaagagtttgtcaccttaaaagctattgctttggctaatagcgactccatgcacatcgaggatgtggaagccgtccagaaactgcaggatgttttacacgaagctctgcaggattacgaggccgggcaacacatggaagacccaaggagagccgggaaaatgttgatgacactgcctctcctacggcaaacaagcacaaaagcagtccagcacttttataacatcaaacttgagggaaaggtccctatgcacaaactttttctcgaaatgctggaggctaaagtctag

SEQ ID NO: 116101 - DNA, 1377 bp, synthetic construct
  misc_feature 1..1377: note = Description of Artificial Sequence: Synthetic coding sequence
  source 1..1377: mol_type = other DNA
atggattcggtagagttgtgcctcccagaatctttcagtctgcattatgaggaagaattactgtgcaggatgtccaataaggataggcatatagactcatcatgctcaagttttattaaaaccgaacctagtagccccgcttctctaactgacagtgtcaatcaccactcacctggcgggtcttctgacgcgagcggcagctactccagtacaatgaacgggcaccagaatgggctggatagcccacccttatatccttcagcccccattttaggaggaagtggtcccgtcagaaagctctatgatgattgcagctcgactattgtggaggaccctcagactaagtgcgagtacatgctgaacagcatgccgaaacgcctttgtctggtttgtggggacattgcctccggctatcactatggtgtggctagctgcgaggcatgcaaggctttttttaagagaaccattcaggggaatatcgaatattcctgcccagccactaacgaatgcgaaatcaccaagagaagacggaagagttgtcaggcatgccgattcatgaagtgtctcaaagttggcatgctcaaagagggtgtccgcctggacagggtgagaggtggccggcagaaatataagcggcgcattgacgcagagaactctccatatctcaatccccagctggtccaacccgctaaaaagccctacaataagatcgtctcccaccttctcgtggccgagccggagaagatttatgccatgcccgaccctactgtgcccgatagtgatattaaggcactgacgactttgtgcgacctggctgacagagaactggtggtgatcataggatgggccaaacacattccaggattctccaccttgtccctggctgatcagatgagcctcttacaatctgcgtggatggagatcctgatcctaggcgtggtgtatcggagtctgtccttcgaggatgaactggtctacgcagacgattatattatggatgaagaccagtctaagctggccggactcctagacctcaacaatgctatcctccagctggtgaagaaatataaatccatgaagctcgagaaagaagagttcgtgaccctgaaagccatagcactcgccaatagtgatagcatgcacattgaggatgtggaagctgttcaaaagttacaggacgtgcttcacgaagccctgcaggattacgaggctggtcagcacatggaagacccccgtcgcgcagggaaaatgttgatgaccttacccctcctgcggcagaccagcacgaaggcggtgcagcatttttataatatcaaacttgaagggaaagtgcctatgcataagctttttctcgagatgctcgaagcgaaagtatag

SEQ ID NO: 116102 - DNA, 171 bp, synthetic construct
  misc_feature 1..171: note = Description of Artificial Sequence: Synthetic coding sequence
  source 1..171: mol_type = other DNA
atgagcaacaaggacaggcatattgactcaagctgctcatccttcattaaaaccgaaccctcgtctcctgcatctttaactgatagcgtaaaccatcattctcccggcgggagctctgatgcctctggaagttactcatccaccatgaacggtcatcagaacggtttgtag

SEQ ID NO: 116103 - DNA, 279 bp, synthetic construct
  misc_feature 1..279: note = Description of Artificial Sequence: Synthetic coding sequence
  source 1..279: mol_type = other DNA
atgagtaacaaagaccggcacattgacagtagctgctctagttttataaagacagagccttcaagtccagcctctctgactgattctgttaaccatcactccccaggcggcagcagtgacgcctcaggctcatattcgagtaccatgaatgggcaccagaatgggctggattcccctccattgtaccctagcgccccaatcctgggcgggagcggacctgtgaggaagctgtatgacgactgttcttccacaattgtcgaggatccacagaccaagtag

SEQ ID NO: 116104 - DNA, 1065 bp, synthetic construct
  misc_feature 1..1065: note = Description of Artificial Sequence: Synthetic coding sequence
  source 1..1065: mol_type = other DNA
atgagcaataaggacaggcatattgattcttcttgttcatccttcatcaagactgaaccttctagcccagcctccctgacagattctgtcaaccaccactcccccggtggctctagcgacgcaagcggttcctattcctcgactatgaatggacaccagaacggtctggattctcctccactgtacccctccgcaccaatcttgggtggcagtgggccagtgcggaaactgtacgacgactgttcatcaactattgtagaggatcctcaaactaaatgtgagtatatgctcaactcaatgcccaagagattgtgccttgtatgcggtgacattgccagtgggtaccactacggggtggctagctgcgaagcatgcaaagcattctttaaacgcaccattcaggggaatattgaatactcttgtcccgccaccaatgagtgcgagattacaaagcggcgaaggaagtcctgccaggcttgtagatttatgaaatgcctgaaggtggggatgctgaaggaaggcgtgcgactcgatcgcgtgcgaggcggcaggcagaaatataagcgacgaattgacgcagagaattcgccgtacttgaacccacaactggtccaaccagctaaaaaaccatataataaaattgtttcgcatctgctggtggccgaaccagaaaaaatttatgccatgcctgaccctaccgttccagattctgatataaaagctctgaccactctgtgcgacctcgccgatagggagttggtagttattatcggatgggctaagcacatccctggtttcagtacattgtccctcgctgaccaaatgagcctcttgcagagcgcttggatggagattctcattctgggcgtcgtctatcgtagcctatcatttgaagacgagctggtgtatgcagatgattatatcatggacgaggaccaatccaagctggctggcttgctggatcttaataacgccattctgcagctggtcaaaaaatacaagtccatgaaactcgagaaggaagagtttgtgaccctaaaagcaatcgcattggcaaactcttag

SEQ ID NO: 116105 - DNA, 153 bp, synthetic construct
  misc_feature 1..153: note = Description of Artificial Sequence: Synthetic coding sequence
  source 1..153: mol_type = other DNA
atgtccaacaaggaccggcacatcgacagttcctgctctagcttcattaagacagaaccttctagccccgcaagtctgaccgattctgtgaatcaccactccccggggggctcatccgacgcatccgggtcctacagttctactatgaactag

SEQ ID NO: 116106 - DNA, 1308 bp, synthetic construct
  misc_feature 1..1308: note = Description of Artificial Sequence: Synthetic coding sequence
  source 1..1308: mol_type = other DNA
atgtcgaacaaggatcgtcacatcgatagttcgtgtagctccttcataaaaactgagccttcaagccctgcctcacttaccgactcagtcaaccatcactctcctgggggttcgagcgatgccagcggtagctacagttccacaatgaatgggcaccagaatgggctggactctcctcccttgtacccttctgccccaatcctgggcgggagcggacctgtgagaaagctgtatgacgactgttctagtactattgtcgaggacccccagacaaaatgtgaatatatgctcaattctatgcctaagagattgtgcctggtctgtggagatatagcgagtggttatcactacggggtcgcgagttgtgaggcctgtaaagctttttttaagcggacaatccagggaaatatcgagtattcatgccctgccaccaacgagtgcgagatcacgaagcggcggagaaaaagttgtcaggcgtgcaggtttatgaaatgcctgaaggtgggaatgttaaaggaaggtgtaaggttagatcgcgttcgtggcggccggcaaaagtacaagcggcgcattgacgctgagaactccccatacctgaacccgcagctggtccagccggcaaagaagccgtacaacaagatagtttcacatctgctcgtagcggaacctgaaaagatatacgccatgcccgacccaactgtgcctgactccgacataaaagctcttaccaccctttgtgatttagcagatcgtgagctggtcgtgatcatcgggtgggctaaacatattcctggatttagcacactctccctggcagatcagatgtcactgctccagagcgcatggatggagattctgattctgggtgtggtctacagaagcctgtcatttgaagatgaactcgtgtacgcggatgactacatcatggacgaggaccagtcgaagcttgccggtctactggacctgaacaacgctattttacaattggtgaagaaatacaaatccatgaaactggaaaaagaggagttcgttacgctgaaagcaatcgcgctggccaactccgactcaatgcacatcgaagatgtagaggcagtgcaaaaactgcaggacgtactgcacgaggcgttacaggattatgaagccgggcagcatatggaagatccaaggcgcgctggaaagatgctcatgaccctgcccctcctgaggcagacctccaccaaggctgttcagcatttttataatatcaagctcgaggggaaggtacccatgcacaaactcttcctggagatgctggaggcgaaagtgtag

SEQ ID NO: 116107 - DNA, 1308 bp, synthetic construct
  misc_feature 1..1308: note = Description of Artificial Sequence: Synthetic coding sequence
  source 1..1308: mol_type = other DNA
atgagcaataaggacaggcacattgatagcagctgcagttctttcattaaaactgaacccagttcgcccgcatcgctgactgatagtgtgaaccatcatagtccggggggctctagcgatgccagcgggtcatactcctccacaatgaatgggcaccagaatgggctggactctccccctctgtacccaagcgctccaattttagggggatccggccctgtacgcaaactgtatgacgattgtagtagtacaatcgtggaagacccccagacgaagtgtgagtatatgcttaactcaatgcctaaacgcctctgtctggtctgcggtgacatcgcatcagggtaccattacggcgtcgcctcttgcgaggcttgcaaagctttctttaaacgcacgatccagggtaacatcgaatactcatgccctgctacaaacgagtgtgaaatcactaagcgtaggcgaaaatcttgccaggcgtgcagatttatgaaatgcctgaaggttggtatgctcaaagaaggagttcggcttgacagagttagggggggtagacagaaatacaagagacggatagatgctgagaattcaccttatctcaacccccagctcgttcagccagcgaagaaaccatacaacaaaattgtgtcccatctgctggtcgccgagcccgagaaaatctacgcaatgccggaccctaccgtccccgacagcgacatcaaggccctgaccacgctttgcgatctggcagaccgagaactcgtggtgatcatcgggtgggctaagcacatcccaggattcagcacgctatcactggccgatcagatgagcttattgcaatccgcctggatggagatccttatcctgggcgtcgtgtatcgaagcctcagttttgaagacgaactagtgtatgccgacgattacattatggatgaggaccagagtaaactcgccggactcctcgacttaaataacgccattttgcaactagtaaagaaatataaaagcatgaaacttgagaaggaggaattcgtcacacttaaagcaatcgctctggcgaatagtgattcaatgcacatcgaagacgtcgaggcggtgcaaaagttgcaggatgtgctccacgaagccctgcaggattacgaagccggtcaacacatggaagatcccaggcgcgctggaaaaatgctcatgacactgccattgttgaggcagacctctaccaaagcagtccaacacttctataacatcaagttggaaggtaaagtgcctatgcacaagctcttcctggagatgctggaggctaaggtgtag

SEQ ID NO: 116108 - DNA, 1308 bp, synthetic construct
  misc_feature 1..1308: note = Description of Artificial Sequence: Synthetic coding sequence
  source 1..1308: mol_type = other DNA
atgtcaaataaggatcgacatattgacagcagttgttcatctttcataaaaactgagccaagtagtccagccagccttacagactcagtgaaccatcattcacccggcggcagttccgacgcaagcggatcctattctagtaccatgaatggacatcaaaacggattagacagcccaccactgtatccctctgccccgatccttggaggtagtgggcccgtgaggaaactctatgacgactgctctagcactatcgtagaagatcctcagactaagtgcgaatacatgctgaatagcatgccgaaacgcctctgcctggtgtgtggggatattgcctccggctaccactacggcgtcgcaagctgcgaggcctgcaaagcctttttcaaacgcactatccagggcaacatcgagtactcctgccccgctacgaacgagtgtgagattactaagagacggcgaaagtcctgccaggcttgccgattcatgaagtgtctaaaggttggcatgcttaaggagggagtgcgtctggacagggttagaggcggtaggcagaagtacaaaaggagaatagacgccgaaaatagtccatacctcaatccacagcttgtacagcccgctaagaagccctataacaagatcgtatctcacctgctcgttgcggaacccgaaaagatttacgcgatgcctgacccaaccgtaccagactcagatattaaggctttaaccacgctctgtgacctggctgaccgcgagctggtggtaattataggttgggcgaagcacatccccggcttctccactctgagcctcgccgaccagatgtctctcttacagtccgcttggatggagatattgatcctcggagtggtgtaccggagtctgagttttgaagacgagttagtttacgccgacgactacatcatggacgaggaccaatccaagctcgcaggactgctagacctgaacaatgcgatattgcaactcgtcaagaaatacaagagtatgaagctggagaaggaggagtttgtgactctgaaagccatcgcattagctaactcagattccatgcatattgaggacgtggaagccgttcagaagttgcaggatgtcctgcatgaggcactgcaggactacgaagcaggccagcacatggaagaccccaggcgagccggaaaaatgctgatgacccttccacttctgaggcagacctcgaccaaagcagttcagcacttctacaacatcaaactggaggggaaggtgccaatgcataagctgtttttagagatgctggaggccaaggtctag

SEQ ID NO: 116109 - DNA, 1413 bp, synthetic construct
  misc_feature 1..1413: note = Description of Artificial Sequence: Synthetic coding sequence
  source 1..1413: mol_type = other DNA
atgtggagagagtgcgattggggtctcggcgcggttaagtcagatctcgcatgtgtgccatcagccaaacggcttctatgccgaatgagtaataaagatagacacatcgactcctcctgcagcagttttatcaagaccgaacccagctccccagcatcccttaccgatagcgtgaatcaccacagtcctggtggtagttcggacgcctcaggcagctattcatccacgatgaatggccaccagaatggactcgactccccaccactttatccttcagctccaattttgggcggtagcggtccagtccgcaagctgtacgacgactgttcatccaccatcgtggaagatccacagacaaaatgtgaatacatgctgaatagcatgcccaagagactgtgcctggtatgcggtgatatcgcctccgggtatcactacggggtcgcttcctgcgaggcctgcaaggcttttttcaagcgcacaatccagggcaacattgagtactcttgcccggctactaacgagtgcgaaataacgaaaaggcgacgcaaatcctgtcaggcgtgccggttcatgaagtgcttgaaggtgggcatgctgaaggagggagtccgcctcgatcgcgtacgtggcgggagacaaaaatataaacggagaattgatgccgaaaactcaccgtacctgaatccacaattagttcagcctgcgaagaagccattgctgtggagcgaccccgccgataataagatcgtcagccacttgcttgtcgcagaacccgaaaagatctatgccatgcctgatcctacagtacccgatagcgacatcaaggccctaacaaccctatgcgatttggccgaccgggagctggtggtcatcatcgggtgggcaaagcacattcccggtttcagcacgctctctcttgctgaccagatgagcctgctccagtcggcttggatggagatactcattttaggcgtggtttacagaagtctgtccttcgaggatgaactggtatatgcggatgactatatcatggacgaagatcagtcaaaacttgcgggtttattggatctcaacaatgctattctgcaactggttaagaaatataaatccatgaagctcgaaaaggaggaatttgttacactgaaagcaatcgccctggccaattccgactcaatgcatatagaagatgtcgaggcggtccagaagcttcaggacgtgcttcacgaagcattgcaggattatgaggctggccaacatatggaagatcctcggcgagcaggcaagatgcttatgaccctccccctcctcaggcagacgagcacaaaggccgtgcagcacttttacaacatcaagctagagggtaaggtgccgatgcacaagttatttcttgagatgttggaggctaaggtctag

SEQ ID NO: 116110 - DNA, 1359 bp, synthetic construct
  misc_feature 1..1359: note = Description of Artificial Sequence: Synthetic coding sequence
  source 1..1359: mol_type = other DNA
atgctctgtggccggcccaggagttcctcagacaataggaactttctgcgagaaagagccggtctcagctctgctgcagtccagacccggatagggaactccgcagcctctcggaggtcccccgcggcccgtcccccagtgccagcgccccctgcccttcctcggggtcgcccgggaactgaaggaagcacttcacttagcgcccctgccgtcctggttgtcgctgtagcagtcgtggtcgttgtggtgagcgctgtggcatgggctatggccaactacatccacgtgccacccggatccccagaggtgcccaaactgaatgtgactgttcaagaccaggaagagcatcgatgtcgcgaaggcgccctgtcattattgcagcatctacgccctcattgggatccgcaggaggtgactttacagctgtttacagatggaattaccaacaagttgattggttgttacgttggtaatactatggaagacgtcgttctcgttaggatatatggtaacaagaccgaactcctggtagaccgagacgaagaggtgaagtcattccgagtactgcaggcccatggctgcgctccgcagctgtactgtacgtttaacaacggactgtgttatgagttcatccagggcgaagctttagatccaaagcatgtctgcaatcctgcaatctttagactaattgcccgtcaactggctaaaatccacgctattcacgcccacaatggttggatccccaagtctaacctctggctcaagatggggaagtatttctccctgatccccaccgggtttgcagacgaggatattaacaagcgtttcctaagcgacatcccttctagccagatactacaggaagagatgacgtggatgaaagagatcctgtcgaacctgggatctccagtcgtgctatgccacaatgacctgttgtgtaagaatataatttataacgagaaacagggtgatgtgcaatttattgattacgagtacagcgggtacaattatctggcgtacgatataggaaaccacttcaatgagtttgcgggggtctccgacgtggactatagtctttatcctgacagggagctgcagagccagtggctccgggcgtacctggaggcctacaaggaattcaaagggttcgggaccgaggttaccgagaaagaagtggagatcctcttcattcaggtgaatcagttcgccctggcatcacattttttctggggactgtgggctctcatccaagcaaagtactcaaccatcgagttcgattttctgggatatgctattgtgcgattcaaccagtacttcaagatgaagcccgaggtgaccgctcttaaggtgcccgaatag

SEQ ID NO: 116111 - DNA, 777 bp, synthetic construct
  misc_feature 1..777: note = Description of Artificial Sequence: Synthetic coding sequence
  source 1..777: mol_type = other DNA
atgctctgtggacggcctagatcctcatctgataaccgcaatttcctgcgtgaacgcgccggtttgtccagcgccgccgtgcagacccgtatcggaaacagcgcagcttcccgaagaagccccgccgctagaccacccgtgcccgctcctcccgctcttccacggggaaggccgggaacggagggcagtacgagtttgtccgcccccgccgttcttgtggttgcagtcgctgtcgtcgtggtggttgtctcagccgtcgcttgggccatggccaattacatccatgttccacctggatcaccggaagtgccaaagcttaatgttacggtgcaggaccaggaggagcacaggtgcagagagggtgctctgagcctcttgcaacacctgagaccacactgggacccacaggaagtaaccttgcagctgttcacagatggaatcactaataagctgattggttgttacgtggggaacaccatggaggatgtagtcctcgtgcgtatctatggtaacaagacggaactattggtggacagagatgaagaggtcaaatctttccgggtgctgcaggcacacggatgcgcccctcagctgtactgcacttttaacaatgggctatgctacgagtttatccagggagaagctctggatccaaagcacgtgtgcaacccggccattttcagtcttagcagcttgacactgtgcaaaggcaagacaactcggtgcttcggtctgactggttgccggggctcacggttactcctctccttcttctag

SEQ ID NO: 116112 - DNA, 1305 bp, synthetic construct
  misc_feature 1..1305: note = Description of Artificial Sequence: Synthetic coding sequence
  source 1..1305: mol_type = other DNA
atgctgtgtggccgcccccgctcttcaagcgataaccggaacttcctccgggagcgcgccggtctgtcctctgctgcagtgcaaactcggataggcaattctgccgctagccgccggagccctgccgctcggccccctgtgcccgccccacctgcgctgcccagaggtcggcctgggacagagggaagcaccagtctgagcgcacccgccgtactcgtagtcgcagtcgccgtcgtggtggttgtcgtgtccgccgttgcctgggccatggccaattatatacacgtgccacctgggagtcccgaggtacccaaacttaatgtaaccgtccaggaccaagaggagcaccgctgcagagaaggtgccctgtccctgctacagcacctgagacctcattgggatccccaggaggtcaccctgcaactttttaccgacgggatcaccaataaacttattggatgttatgtggggaacacaatggaagacgtcgtcctggtcagaatttacggcaacaaaaccgaactcctggtcgatagagacgaggaggtgaagtcattcagggtcttgcaagcacatggttgcgccccgcagctctattgcaccttcaacaatggactctgctacgagtttatccagggcgaagccttggatcccaaacatgtgtgtaatcctgccatcttccgcctgatcgctagacagctggccaaaatccacgcaatacacgcgcacaacggctggatccctaagtccaacttgtggctgaaaatgggaaagtatttctcattaatcccgaccggatttgctgacgaggatatcaataagcgttttctatctgacataccctctagccaaattctgcaggaggaaatgacctggatgaaagaaattctgtccaatttagggtctcccgtggtgctttgccataatgacttgctttgcaagaacataatctacaatgagaaacagggcgacgtccagtttatagattatgaatactccggctacaactatctagcatacgacatcggcaatcatttcaacgaatttgccggtgtgtccgacgtggattatagcctttacccagatagggaattacagtcccaatggctgcgagcctacctggaggcttataaagaatttaaaggcttcggaacggaggtgactgagaaggaagtcgagatactatttattcaggttaatcagtttgcactgggcgaaaaccttaattttataataggaaacaagtactgccagctcttttctctaaagtggcttctgattagttttggcgattgcggactctag

SEQ ID NO: 116113 - DNA, 627 bp, synthetic construct
  misc_feature 1..627: note = Description of Artificial Sequence: Synthetic coding sequence
  source 1..627: mol_type = other DNA
atggcaaaaattcacacaatccacgctaacggatcactgcccaagcctatcctttggcataagatgcacaattactttactcttgtcaagaacgaaattaatccatcactctctgcagatgtccccaaagtcgaggttttggagagagagctggcctggctgaaagaacatcttagtcagctggaatctccggtggtgttctgccataacgatctgctttgcaagaacattatatatgatagcataaagggacacgttagattcatcgattatgaatatgccggctacaattaccaggcgttcgacatcggaaaccatttcaatgaatttgccggggtaaacgaagtggactactgcctctacccggccagagaaacacagttgcaatggctccattattatcttcaggcgcagaaggggatggccgtgacccccagagaggtgcagcggctttatgtgcaggttaataagttcgctctcgcatctcacttcttttgggcactttgggccctgatccaaaatcaatattccacaatcgattttgacttcctcaggtatgctgtgattaggtttaaccagtacttcaaggtgaagccccaggccagtgctctggagatgccaaagtag

SEQ ID NO: 116114 - DNA, 954 bp, synthetic construct
  misc_feature 1..954: note = Description of Artificial Sequence: Synthetic coding sequence
  source 1..954: mol_type = other DNA
atggaagaaaaggcagccgccagcgcttcatgtagggagcccccaggaccgcctcgggcagccgcagtggcctacttcgggatctcagtagaccccgatgacattctcccgggcgcattaaggctgatacaggagttgcggccccattggaagcctgagcaagtgcgtacaaaaaggttcaccgacggcatcactaacaagcttgtggcctgctatgttgaagaagacatgcaggattgcgtccttgtgcgggtctacggcgaacgcactgagctcctcgtagatagggaaaatgaggtgcgaaattttcagctacttcgggctcattcctgcgcaccaaaactatattgtacgttccagaacgggctttgttacgaatacatgcagggggtcgcactggaacccgagcatatacgggagcctcggctatttagcttatccgctgatgtccccaaagtggaggtgctcgagcgcgaactcgcctggctgaaggagcacctgtcgcagctcgagagccctgtggtattctgtcataatgacctgctctgcaaaaatatcatctatgattccatcaagggtcatgtgcgttttatcgactacgagtatgctgggtacaactaccaggccttcgacatcggcaatcatttcaacgaatttgctggggtgaacgaggtagattactgcctgtaccctgctcgagagacacagctgcagtggctgcactactatcttcaggctcaaaaagggatggcagtgacccctagggaagtccagagactttacgtgcaggtgaacaagttcgcgttggcctcccactttttttgggctctttgggccctcattcagaaccagtacagtacaatcgatttcgatttcctgcgatatgctgtgattagattcaaccagtacttcaaagtcaaaccacaggcctctgccctcgagatgccgaaatag

SEQ ID NO: 116115 - DNA, 1185 bp, synthetic construct
  misc_feature 1..1185: note = Description of Artificial Sequence: Synthetic coding sequence
  source 1..1185: mol_type = other DNA
atggcagtccctccttccgccccacagcccagagccagcttccacctgcgacgccatacgccctgcccacaatgtagttgggggatggaggaaaaggccgccgcatccgcttcctgcagagagcccccaggcccaccaagggcagcagccgtggcctactttggcatttctgtggaccccgacgacattctgcctggcgcgctgcgtctgatacaggagcttagaccacactggaagccagagcaagtgcggacaaagaggttcaccgatggaattacgaataaactagtggcttgctacgtggaagaagacatgcaggattgtgtgctggtgagggtgtatggtgagaggactgagctcttagttgaccgcgaaaatgaggtgcggaactttcagttgttacgggcccactcctgcgcccccaagctttactgtacctttcagaacggcttatgttatgaatacatgcagggcgtggccctggagcctgaacatatacgggagccaaggcttttccggctgatagccttggagatggcgaagatccatactatacatgccaatggctctttgcccaagccaattctgtggcacaagatgcacaattatttcaccctggtcaagaacgaaatcaatccctccctctccgcagacgtccccaaggtggaagtgctggaaagggaactcgcttggttaaaggagcatctttcccagctggagtcccccgttgtcttttgccataacgacctgctgtgcaagaacatcatttatgatagcataaaaggccacgtccgctttatagactacgaatacgccggatacaattatcaagcgttcgacataggaaatcacttcaatgagtttgctggggtcaatgaggtggactactgcctgtatcctgctagagaaacccagctccagtggctgcactactatctgcaagctcagaaaggcatggccgtgacaccgcgagaagtccagcgactgtatgtccaagtcaataagttcgcattaggaccaagttgtgtctcgagcactatgaccgcgtcactccaatgctgtcgggttggtaatagacacggggagatagcccgtctcactctgtcaggactctttccaggtgtctcgctgttactgggcagcctcggaccccatccagagccggtactgcatcaccggctgtag

SEQ ID NO: 116116 - DNA, 1161 bp, synthetic construct
  misc_feature 1..1161: note = Description of Artificial Sequence: Synthetic coding sequence
  source 1..1161: mol_type = other DNA
atggccgtaccccctagtgccccccaaccccgagctagctttcatttgcgaaggcacacaccatgcccccagtgctcatggggaatggaagaaaaagctgccgcttctgcctcctgtcgagaacccccaggacccccccgggcggccgcagtcgcctactttggcattagcgttgacccagatgatatcctgcccggcgccctgcgccttattcaagaactgaggccccattggaaacccgaacaggtgcggaccaagcggtttactgacgggatcaccaacaagctggttgcttgttacgtagaggaggatatgcaagactgtgtgctcgttagggtatatggcgaacgaacggagctgcttgtggatcgtgagaacgaagtcagaaacttccaactcttgcgggcacacagctgtgcgcctaaactgtactgcacctttcagaacggcctgtgctacgagtatatgcagggtgtggcccttgagcctgagcacattcgcgaaccaagactgtttcggctcattgcactcgaaatggccaaaatccacaccatacacgcaaacggctctttacctaagcccattctgtggcacaaaatgcacaactacttcacacttgtgaagaacgaaatcaacccatccctgtcagctgacgtgcctaaggttgaggtactggaacgggagttagcctggctgaaagaacatctgtcccaactggagtcacccgttgtcttttgtcacaacgacttactgtgtaagaacatcatctatgattccatcaaaggtcacgtgagattcatcgactatgaatatgccggctacaactatcaagcttttgacattgggaaccattttaacgaatttgccggcgtgaatgaagtcgactattgcctttatcccgccagggaaacccagctgcaatggcttcactattacctacaggcccagaagggtatggctgtcactccgcgggaagtgcagcgcttgtacgttcaggtgaataaattcgccttagccagtcactttttctgggccctgtgggcactgattcagaatcagtacagcacaatcgatttcgacttccttagatatgcggtgatccgattcaaccagtacttcaaagtcaaaccccaggcgtccgcactggaaatgccaaaatag

SEQ ID NO: 116117 - DNA, 759 bp, synthetic construct
  misc_feature 1..759: note = Description of Artificial Sequence: Synthetic coding sequence
  source 1..759: mol_type = other DNA
cgccggttgggtgggggaaccgctgaagggaaaacggggcggggattagggggtccatcttgggatactgggccgagagcaatgggatcactcagtagaccttctttttccgatcggcttattgcactggaaatggctaagatacacaccattcatgcgaacggctctctgccaaagccaatattatggcataaaatgcacaactactttaccttggtgaaaaacgaaatcaatccttcgcttagcgctgatgtgccaaaagtggaagttcttgaacgagagcttgcatggctgaaggagcacctttcacagctcgaatctccggttgttttctgccacaatgaccttctgtgcaaaaacattatctatgattcaataaaggggcacgtgcgatttatcgactatgagtacgcggggtataattaccaggctttcgatattggcaatcattttaatgaatttgccggagtgaacgaggtggattattgcctgtatcctgccagggagacccagttgcaatggctgcactactacctacaagcgcagaaaggtatggctgtgactcctcgcgaggtgcagagactctatgtgcaggttaacaaatttgccctggccagccatttcttctgggcactatgggccttgatccagaaccagtactccacaattgactttgattttctcagatacgccgtcatacgcttcaatcagtactttaaagtgaagccacaggcaagtgctctcgagatgcctaagtag

SEQ ID NO: 116118 - DNA, 765 bp, synthetic construct
  misc_feature 1..765: note = Description of Artificial Sequence: Synthetic coding sequence
  source 1..765: mol_type = other DNA
atggccgaagctgtgttgcgagtggctcggagacagttgtcccagagaggtgggagcggcgcacctatcctcctgcggcaaatgtttgagccggtcagttgcactttcacctatctgctcggtgacagagagtcaagggaggccgtgctgatcgacccagtgctcgagacggctcctcgagacgcacagctgataaaggagctgggattgcgcctgttatatgccgtgaacacacactgtcacgccgaccacataacaggaagtggtttgctgaggtccctgctgcccggatgtcagagtgtgattagcaggctgtcgggcgcccaggctgacctgcatatagaggacggagacagcattcgatttgggcgctttgccttggagactcgagccagccccggacatacccctgggtgtgtgactttcgtgttgaatgatcattcgatggcatttacaggagacgccctcctaatccgtggttgcggacggaccgactttcaacagggctgtgcaaagacactgtatcactcagtccacgagaaaatatttactctgccaggtgactgtctaatttaccctgcccacgattaccatggttttacagtgtccacggtggaagaggaacgcacactcaacccacgtctgacactttcgtgcgaagagttcgtgaaaatcatgggaaaccttaatctccccaaaccgcagcagattgacttcgccgttcccgccaatatgaggtgcggagtccaaacccctacagcctag

SEQ ID NO: 116119 - DNA, 1020 bp, synthetic construct
  misc_feature 1..1020: note = Description of Artificial Sequence: Synthetic coding sequence
  source 1..1020: mol_type = other DNA
atggcagattcagtgaaaacctttctgcaggatctggcccgtggcataaaagattccatttggggtatctgcacaatatccaaactagacgcccggatccagcagaaacgagaagaacagagaagaaggagggcgtcctccgtcctggcacagcgtcgggctcagagtattgaaagaaagcaagagtctgaacccagaatagtgtctagaattttccaatgctgtgcctggaatggaggcgtgttctggttcagcctccttctcttctatagggtgtttatacctgtgttgcaatccgttaccgctagaatcatcggtgaccccagccttcacggggacgtgtggagctggctggagttcttcctgacctccatcttctctgcgctatgggttctgccgctgttcgtgctctcgaaagtggtcaatgccatatggtttcaggacattgctgaccttgccttcgaggtctccggacgaaagccacaccccttccctagtgtttccaaaatcattgcggatatgctcttcaacctattgcttcaggcactctttctcattcaaggcatgttcgtgagcctgtttcccatccatctggtaggacagctggtgtcccttctgcatatgagtctgctgtactctctttattgttttgaatatcggtggttcaataaagggattgaaatgcatcagcgtctctctaacattgaacgcaactggccttactacttcggattcgggctgcccctggcgtttctgacagccatgcagtccagctatataatctcaggatgcctcttcagtatactatttcccctcttcatcatatcagcgaatgaggcaaagccgggtaaagcttacctgtttcagttgaggctattctctctcgtggtttttctgtctaacaggctctttcataagaccgtgtacctgcagtcagccctttccagctcgacatcagcagaaaagttcccatcccctcacccatctccagccaaactaaaagccaccgccggacactag

SEQ ID NO: 116120 - DNA, 786 bp, synthetic construct
  misc_feature 1..786: note = Description of Artificial Sequence: Synthetic coding sequence
  source 1..786: mol_type = other DNA
atggctgattccgtgaaaacgtttttacaggacctggccagaggtatcaaagacagtatttgggggatttgcaccatctccaagctggacgccaggattcaacagaaacgcgaggagcaacgccggaggcgggctagttccgttctcgctcagcgtagagctcagtcaatcgaacgtaagcaggagagtgagcctcggattgtgtctcggatcttccagtgttgtgcttggaacggcggagtgttctggttcagcctgcttctgttctacagggtgttcataccagtgctccagtctgtgacagcccgcattatcggtgatccttccttgcacggtgatgtctggtcctggttggagtttttcctgaccagcatatttagcgctctgtgggtccttcccctgtttgtactctcaaaggtagtgaacgcaatttggttccaagatatcgcagatctcgcgttcgaggtgtcaggacggaaacctcacccttttccttcggtcagtaagattattgccgatatgttgtttaacctgctgctgcaggcactgttccttatccaagggatgtttgtctcactctttccaatccacctcgttggccaattagtgtctcttctgcacatgtcccttttgtattctttgtactgtttcgagtatcgttggtttaacaaggtggccgcctttagtctcagcagttttttgtacagtttatctgccccaatgaagcagagacctgctaagcatatcagctcaagctgtgctagtagcccatggtggtcaagttag

SEQ ID NO: 116121 - DNA, 903 bp, synthetic construct
  misc_feature 1..903: note = Description of Artificial Sequence: Synthetic coding sequence
  source 1..903: mol_type = other DNA
atgatcctggagggaggcggagtcatgaaccttaaccccgggaataatcttctccaccagccccctgcgtggacggacagctattcgacatgtaacgtgtcaagtggcttcttcggaggtcaatggcatgagatccaccctcagtattggactaagtatcaagtgtgggagtggctgcaacacctgctggacaccaatcagctggatgcaaattgtattccgttccaggagttcgacattaatggggagcatctttgctctatgtccttacaggagttcacaagagcagccggcactgccggacaactgttgtacagcaatttgcagcatctcaagtggaatggccagtgttccagcgatctgttccaatccacacataatgtgattgtgaagaccgagcaaaccgaacctagtatcatgaatacctggaaggatgagaattacctgtatgataccaactacggctccacagtggacctgctcgactctaagacattttgcagggcacagataagcatgaccacaacaagccacttgcctgtggctgaaagtcctgacatgaaaaaggagcaggatccccctgccaaatgtcacactaaaaagcacaacccacgtggaactcatctctgggaatttatcagggacatactactcaatccggacaagaatccaggcctcatcaaatgggaggacagatcagaaggcgtgtttagattcctcaaatccgaagctgtggcccagctctggggaaagaaaaagaataatagtagtatgacatacgaaaagctgagcagggcaatgcgctactactacaaacgcgagattctcgaacgcgtggacggccgcagactggtttataagtttggtaagaatgcaagagggtggagggagaatgaaaattag

SEQ ID NO: 116122 - DNA, 903 bp, synthetic construct
  misc_feature 1..903: note = Description of Artificial Sequence: Synthetic coding sequence
  source 1..903: mol_type = other DNA
atgatcctcgagggggggggcgtgatgaatctgaaccctggaaataacctcttgcatcaaccccctgcatggactgactcttatagcacgtgcaacgtatcttccgggttctttggaggacagtggcatgaaattcatcctcagtactggactaagtatcaggtgtgggagtggcttcaacacctgcttgacactaaccagctggacgcaaattgtatcccttttcaggagttcgacataaatggcgaacacctgtgctcaatgtcactgcaggaattcacacgggcagccggtaccgctgggcagctgctctactccaatctgcagcacttgaagtggaatggccagtgtagctccgacctgttccaaagtactcacaacgtcatcgtcaaaacagagcagaccgagccgagcataatgaacacctggaaggatgaaaactatctgtacgataccaactatggcagcacggttgacctgctcgattccaaaacgttctgtcgggcccagatttccatgacaaccacttcacacttgcctgtggcggagtctcccgacatgaagaaggagcaggacccccctgctaagtgtcatacaaaaaaacacaatcccagggggacgcatctatgggagtttattagagacatcctgctgaatccagataaaaatcccggcttgattaagtgggaggacaggagcgaaggagtgttccggttcctgaaaagcgaggccgtggcacagctgtggggcaaaaagaagaacaatagcagtatgacatacgaaaaactgtcccgtgctatgcggtactattacaagcgcgagatcctggaacgcgtggacggtcgacgactggtgtacaaatttggcaaaaatgcccggggttggagagaaaacgaaaattag

SEQ ID NO: 116123 - DNA, 969 bp, synthetic construct
  misc_feature 1..969: note = Description of Artificial Sequence: Synthetic coding sequence
  source 1..969: mol_type = other DNA
atgggtttgcccgagcgtcggggtctcgttctcttgttgtccctggcagagatactgttcaagattatgatcctggaaggaggcggcgtaatgaatctgaatccaggcaataatctgttgcaccagccaccagcctggaccgactcctattcaacatgcaatgtgagctcgggattttttggtgggcagtggcacgaaatccatccccagtactggacgaagtatcaagtctgggagtggctgcagcacctattagacaccaaccagctggatgctaattgcatcccatttcaggagtttgacattaacggggagcacctgtgtagcatgtcgctgcaggaattcacccgggccgcgggaaccgcgggacaactcttgtactccaacctgcagcatctgaagtggaatggacagtgttccagcgatctattccagtctactcacaacgtgatcgtgaaaacagagcaaacggagccaagcattatgaatacttggaaggacgagaattatctttacgacaccaactacgggtccactgtggatcttctcgatagcaaaacattctgtagggcacagattagcatgactacgactagtcacttgccagtggctgagagccctgatatgaaaaaagagcaggatcctccagctaagtgccacaccaagaagcataatccccgggggacccacctctgggagttcatcagggatattctgcttaacccagacaagaatcctggactgattaagtgggaagatcggagcgaaggagtgttccgttttctgaagtcagaggcggtggctcagctgtggggtaagaagaagaataattcaagcatgacttacgagaagttatcgagagccatgagatattactacaaacgggagatccttgaacgggtcgatggacgtcgcctcgtgtataagttcggcaagaatgccaggggatggagagagaacgagaattag

SEQ ID NO: 116124 - DNA, 903 bp, synthetic construct
  misc_feature 1..903: note = Description of Artificial Sequence: Synthetic coding sequence
  source 1..903: mol_type = other DNA
atgatcctggagggcggtggcgttatgaatctgaatccagggaacaatctcttgcatcaacctcctgcctggaccgattcttactccacctgtaacgtttcgtccggattctttggcggacagtggcatgaaatccatccgcagtactggaccaaataccaggtgtgggaatggctgcagcaccttctggatacgaatcagttggacgccaactgtatccctttccaggaatttgacatcaacggcgagcacctgtgtagcatgtcattgcaggaatttacgcgtgcggctggtaccgccggacaacttctatactctaatttgcaacaccttaaatggaacggtcagtgctcctccgatttgttccaaagcacacacaacgtaatagtgaagacagaacaaaccgaaccttctatcatgaacacatggaaggacgagaactatctgtacgataccaactatggtagtaccgttgacttgttggattctaagacattctgtagggcacagattagcatgacaacaacgagtcacctgcccgtagctgagagtcccgacatgaagaaggagcaagatccccccgccaaatgtcataccaaaaagcataatcctcgtggaacgcacctgtgggagttcattagggatattctgctgaatcctgataagaatccaggcttaatcaagtgggaagatcgttccgagggggtctttcggttcctgaagtcagaagccgtcgctcaactgtggggaaaaaagaaaaacaatagtagtatgacctacgaaaagctgagccgggcaatgcgatattattacaaaagagagatcctggaacgcgtcgatgggaggcggctggtgtacaagtttgggaaaaacgcccgtggatggcgcgaaaatgagaactag

SEQ ID NO: 116125 - DNA, 834 bp, synthetic construct
  misc_feature 1..834: note = Description of Artificial Sequence: Synthetic coding sequence
  source 1..834: mol_type = other DNA
atgatccttgaggggggcggcgttatgaatctgaacccaggaaataatctgcttcatcaacctcctgcttggacagactcctacagcacctgtaatgtgagttctggtttctttggtggacaatggcacgaaattcacccccagtactggacaaagtatcaggtgtgggaatggctccaacacttgcttgatacaaaccagttagatgcaaattgtatcccattccaggagtttgacatcaatggagaacacctgtgctccatgtccctccaagagttcaccagggctgctggcacagcaggccagctgctttattcaaacctgcagcatctaaaatggaacggacagtgctctagtgatctctttcagtccacacataatgtgatagtgaagactgaacagaccgaaccctcaataatgaatacatggaaagatgagaactatctgtacgacaccaattacggctccaccgtggcagagagcccggatatgaaaaaggaacaggatcccccggccaagtgccacacaaaaaaacataatcctaggggaacccatctttgggaattcatccgggatatcctattgaatcccgacaagaacccaggcttaatcaagtgggaggatagatcagaaggagtgttccgctttttaaagagcgaggccgttgcgcagttatggggtaaaaagaagaacaacagttctatgacttatgagaaactgtctcgagccatgcgctactactataagagagaaattctggaaagggtcgacggtaggcggcttgtgtacaaattcgggaaaaatgcacgcgggtggagggaaaatgaaaattag

SEQ ID NO: 116126 - DNA, 555 bp, synthetic construct
  misc_feature 1..555: note = Description of Artificial Sequence: Synthetic coding sequence
  source 1..555: mol_type = other DNA
atggacctgtggaactgggatgaggctagcccacaggaggtgcccccgggtaacaagctagccggattggagggggcgaagttggggttttgcttcccagacttggcgctgcaaggggacacccccacagcaactgccgaaacttgctggaaagggacctcgagttccttggcatccttcccccagttggattgggggagcgccctcctacatcctgaagtgccctggggtgcagaacccgacagtcaggccctaccctggagtggagattggacggatatggcctgcacagcttgggacagctggtccggagctagtcagactttaggacccgcacccctgggaccgggtcccatacctgcggctgggtcggagggtgccgcgggacagaattgctctccgccggcccccggactctaccacttgctggagccaggcgcggcttgtgggtggcaccatctctttgaggctgtccctgagctctcttcacacaggctgctcaggacagagcctgcagttggaccgtgccagttcggcagcatgccccaaaactag

SEQ ID NO: 116127 - DNA, 468 bp, synthetic construct
  misc_feature 1..468: note = Description of Artificial Sequence: Synthetic coding sequence
  source 1..468: mol_type = other DNA
atggatctatggaattgggacgaggcatcaccccaggaagtgccccctggtaataaattggccgggctagagggcgcgaaacttggcttttgtttccctgacctggcactacagggggatacacctactgccacagccgagacatgctggaagggcccgatacagttgtggcagtttctcctagaactgctgcacgatggggctagaagtagttgcattaggtggaccggtaattcacgggaatttcaactatgtgaccctaaggaggtggctcgtctgtggggagagcgtaaaaggaagccaggcatgaattacgaaaaattatcacgaggcctgcgatattattaccgcagagacatcgtccgtaagagcggaggcaggaagtatacttaccggtttggcggcagagtaccttccctggcatatcccgactgcgccggcggaggccgaggggctgaaacacagtag

SEQ ID NO: 116128 - DNA, 1029 bp, synthetic construct
  misc_feature 1..1029: note = Description of Artificial Sequence: Synthetic coding sequence
  source 1..1029: mol_type = other DNA
atggacctgtggaattgggacgaggcatcaccacaggaggttccccccgggaacaaactcgcaggactggaaggtgcaaagctggggttttgcttcccagatctggctctgcagggcgacactcctaccgctacagccgagacttgctggaaaggaacatcttcgagcctagcatcgttccctcagttggattggggttctgcactcctgcatccagaagtaccatggggcgccgagcctgacagccaggccctaccctggagcggcgactggaccgacatggcatgcactgcctgggattcctggtctggtgcaagccagaccttgggcccagctccactaggtcctggcccgattccagcagcagggagcgagggggccgccggtcagaactgcgtgccagtcgccggggaggcgaccagctggtctagggctcaggccgccgggagtaacacttcgtgggattgtagcgtcggacccgacggtgacacctactggggtagcggactcggaggggagccacgaaccgactgtacgattagctggggtggccccgccggtcccgactgcaccacatcttggaacccgggattacatgctggcggtacgaccagtctcaaaaggtaccaatcctctgccctgacagtatgcagcgaacctagtccacagagcgacagagcttctcttgctcgatgtccaaaaaccaaccacagaggaccaatccaactctggcagttcctgctcgagctacttcacgatggcgcacggagcagctgcattcgatggactggcaatagcagagagttccagctctgcgaccccaaggaggtggcacggttgtggggggagcggaagagaaaacccggcatgaattacgagaagctgtccagaggcctacgctactactacaggcgtgatattgtgcgcaaatccgggggccgaaagtacacgtatcgcttcggggggagagtgccttcgctggcatatcccgactgcgcaggcggcggccggggggcggagacgcagtag

SEQ ID NO: 116129 - DNA, 1029 bp, synthetic construct
  misc_feature 1..1029: note = Description of Artificial Sequence: Synthetic coding sequence
  source 1..1029: mol_type = other DNA
atggacctgtggaattgggatgaggcttctccacaggaggtgcctcctggaaataagctggctgggctggaaggtgcgaagcttggtttttgctttcccgaccttgccctgcagggcgatacacccaccgcaacagccgagacctgttggaaagggactagctcttctcttgccagctttccacagctggactgggggtcggccctgctgcaccctgaggtaccatggggggcagagcctgactcacaggcactaccctggtccggcgactggacagatatggcctgcacggcttgggactcctggtccggggctagtcaaaccctgggacccgccccgttggggcccggacctataccagccgccgggagcgagggtgccgccggacagaactgtgtcccggtggcaggagaggctacttcctggtctcgagcccaggccgcaggtagcaatacctcttgggattgttcagttggtccagacggcgatacctactgggggagcggactcggtggggaaccccgtactgactgcactatctcatggggcgggccggctgggccagactgtaccaccagctggaatcctggcctgcacgctgggggcacgaccagcctgaagcggtaccagtcgagtgcccttaccgtgtgcagtgagcctagcccccaatcagatagagcctctctggcccgatgtcccaagactaatcatcgcggtccaattcagttatggcagttcttgctggagctcctccacgacggggctcggagcagctgcatccgctggactgggaacagtagggagttccagttgtgcgacccaaaggaggtggcccgcttatggggcgagcggaagcggaagcctggtatgaattatgaaaagttaagtcgaggattaaggtactattatagaagagacattgtcaggaaatctggagggcgcaagtacacatacaggttcggcggacgggtgccctcgctggcatacccagattgcgccgggggcggtagaggggcagagactcagtag

SEQ ID NO: 116130 - DNA, 432 bp, synthetic construct
  misc_feature 1..432: note = Description of Artificial Sequence: Synthetic coding sequence
  source 1..432: mol_type = other DNA
atgaaggccggctgcagtatcgtggagaagccagagggcggcggcgggtatcagtttccagactgggcttataagaccgaatccagtccaggaagccggcaaatacagctttggcattttattctggagctgctacagaaggaagaattccggcacgttatcgcttggcagcagggtgagtacggtgaattcgtgattaaggaccctgacgaggtggccaggttgtggggaaggcgcaaatgcaagccacagatgaactatgataaattgtctagagccctgcggtattactataataaacgtatactgcacaagacaaagggtaaacgctttacatataagttcaatttcaacaagctggttatgccaaactatccgtttattaatatcagaagctcaggaaagatccagactttgctggtcggtaactag

SEQ ID NO: 116131 - DNA, 1539 bp, synthetic construct
  misc_feature 1..1539: note = Description of Artificial Sequence: Synthetic coding sequence
  source 1..1539: mol_type = other DNA
atgaaggcaggatgttccattgtagagaagccagaggggggcggcggctaccagttcccagattgggcctataagactgagagctccccaggcagcaggcagattcaactgtggcacttcatcctggagctcctgcagaaggaagagtttcgtcacgtgatcgcttggcaacagggggagtatggcgagttcgtcatcaaagaccccgacgaggttgcgcgcctttggggcagaaggaagtgcaagcctcagatgaattacgataaactatccagagcccttagatactattacaataaacgcattcttcacaaaacgaagggcaagaggtttacttacaagttcaatttcaacaaactggtgatgccgaactatccttttattaatattcggagctctggcgttgttcctcagagcgcacctccggtccctaccgcctcatcccggttccactttcccccactcgatactcatagtcctactaacgacgtgcaacctggtcgtttcagtgcctcgagtttgactgcttccggacaggagtcatcaaacggaactgataggaaaacggagctgagcgaacttgaggatggaagcgccgcagattggagacggggcgtggacccagtcagcagcaggaatgccatcggaggcggcggtatcgggcaccagaaaagaaagcccgatattatgctgcctctgttcgccaggccgggaatgtacccggatccacactctccatttgccgttagtcctatccccgggcgaggtggggtactcaacgtccctatttcccccgccctgtcattgacgcctaccattttctcctattcaccatcacccggtctgagtccttttacgagctcttcctgcttctcttttaacccagaggagatgaagcactacctgcacagccaggcctgctctgtgtttaattaccacctctcaccaaggacttttcctagataccccgggctgatggtcccccctctccagtgtcagatgcacccagaagagagcacgcagttctccatcaagctccaaccaccacctgtgggcaggaagaatcgcgaaagggtcgaatcttcagaagaatcggctccagtgaccacacctacgatggcctccatccctccgcgtatcaaagtggaaccagcctccgaaaaagacccagaatcgctgcgccagtcagccagagagaaggaagagcacactcaagaagagggcacggtcccatcccggacaatcgaagaggaaaaaggcactatcttcgcccgccccgcagcccccccaatatggccctccgtgccaatctccactccctccggcgagccactcgaggttaccgaggattctgaagacagacccgggaaggaaccttcagccccggagaaaaaagaggacgcacttatgcccccgaagctgcggctcaagcggagatggaacgacgatccagaggcacgtgagctttcaaagtccggaaaattcctctggaacggctcaggccctcagggtcttgccactgccgccgcagacgcatag

SEQ ID NO: 116132 - DNA, 1533 bp, synthetic construct
  misc_feature 1..1533: note = Description of Artificial Sequence: Synthetic coding sequence
  source 1..1533: mol_type = other DNA
atggatggtttttacgatcaacaagttccttttatggtgccaggtaagtcgaggtctgaagaatgtcgaggtcggcctgtcattgacaggaagcggaaattcctggacacggacttggcccacgacagtgaagaactctttcaagacttatcacagttacaggaggcctggcttgcagaggcgcaggtcccggacgatgagcagttcgttccagactttcagtcagataacctcgtcctgcacgcgcctccacccactaagatcaaacgcgaattgcactcgccctcaagcgagctttcaagctgctcacacgagcaggctctgggggcaaactatggtgagaagtgcctttacaactattgtgcatacgatcggaagcctcccagcggcttcaaaccccttacccccccaactacgcccctatccccaacacatcagaacccactgtttccgccaccacaggcaacactgcccacttccggccatgccccagccgcaggtccagtgcagggagtcgggcctgccccagcccctcacagcctgcccgaaccaggcccacaacagcagactttcgccgtacctaggccccctcatcagcccctgcagatgccaaaaatgatgccagaaaaccagtacccatcagaacaacggttccagagacagctctccgaaccttgccacccgttcccacctcagccaggcgtgcctggtgacaacagaccctcatatcatcgtcagatgtccgagcccatagtccccgcagcccctccccccccccaggggttcaaacaagaataccacgaccccctgtacgagcacggagttcccgggatgccagggccacctgcacatgggttccagtctccaatgggtatcaagcaggaaccccgggattactgcgtggacagtgaggtcccaaactgtcagtcctcctacatgcgcggtggttatttttccagcagccacgagggcttcagctacgagaaagaccctcggctatattttgatgacacttgcgttgtacccgaaagactagaggggaaagtgaagcaggagcctacaatgtacagggaaggacctccttaccagcgacgcggttcgctgcagctatggcagtttctggtcacactcctcgacgaccccgccaacgcacattttatcgcctggaccgggcgtggtatggagtttaaacttatcgagcctgaggaagtcgctagaagatgggggatccagaaaaatagacctgccatgaactacgataaactctccagatcactacgttactactatgaaaagggaattatgcaaaaggtcgccggggaacgatatgtgtataagtttgtatgcgacccagatgctctcttctctatggcttttcctgacaaccagcggcccttccttaaagcggagtcagagtgccacctgtccgaagaggacaccttgcccctgacccactttgaagactcccccgcctatttgctagacatggaccgttgtagctcgctgccctatgccgagggtttcgcatactag

SEQ ID NO: 116133 - DNA, 399 bp, synthetic construct
  misc_feature 1..399: note = Description of Artificial Sequence: Synthetic coding sequence
  source 1..399: mol_type = other DNA
atggacggcttttatgatcagcaggtccctttcatggtgcccgggaagtcccgcagtgaagagtgcagaggtcgccctgttattgatagaaaacgtaaattcctcgacaccgacttagcccacgacagtgaggagctgttccaagatctgagtcagttgcaggaggcttggttagctgaagcccaggtaccggacgacgagcaatttgtgcctgacttccagagcgacaacttggttcttcatgcaccacccccaaccaaaattaagcgggagctgcatagccccagcagcgagcttagcagttgtagccatgagcaagcactcggggcaaactacggtgaaaagtgcctgtacaactattgcgcctatgatcgaaagcctccctcaggcttcaagtag

SEQ ID NO: 116134 - DNA, 423 bp, synthetic construct
  misc_feature 1..423: note = Description of Artificial Sequence: Synthetic coding sequence
  source 1..423: mol_type = other DNA
atggacggcttctatgaccagcaagtgccctttatggtgcctggcaaaagcaggtcagaggagtgccgcggacgccctgtgattgatcgtaagagaaaattcctcgacacagatctggcccatgatagtgaggaactgtttcaagatctatctcagctccaggaagcctggctggcggaggcgcaggtcccggatgacgagcagtttgtaccagacttccagtctgataatctggtactgcacgccccaccgcccaccaagataaaacgggagctacacagtccgagttccgaattgtcatcatgctcccacgagcaggctctcggtgccaattacggggaaaaatgtctgtataactattgcgcatacgatagaaaaccgccatctggatttaagccactgacacctcccaccacgccctag

SEQ ID NO: 116135 - DNA, 1533 bp, synthetic construct
  misc_feature 1..1533: note = Description of Artificial Sequence: Synthetic coding sequence
  source 1..1533: mol_type = other DNA
atggacggattttacgaccaacaggtacccttcatggtgccgggcaagagtcgaagcgaggagtgcagggggcggcccgtgatcgacagaaaaagaaagttccttgacaccgatctggcacacgatagtgaagagctctttcaagatcttagccagctgcaggaagcctggctagccgaagcccaggtgcccgatgacgagcaattcgtgcctgattttcagtctgacaatcttgtccttcacgccccaccccctacaaagatcaagcgcgaactccattcaccatcctccgagctcagctcctgtagccatgagcaagcgctcggggctaactacggtgaaaagtgtctgtataactattgtgcttatgacagaaaacccccaagtggattcaagcctttaacaccaccaacgacccccctttcccccacacatcagaaccctctgtttcctccaccgcaggccacactcccgacatcagggcacgcacctgcagcagggcctgtgcagggcgtcggaccggcacccgccccccactcgttaccggagcctgggccacagcagcaaacgttcgccgtgcctagacctccacaccaaccgcttcaaatgccaaaaatgatgcctgaaaaccagtatcccagcgagcagagattccaacgacaattatcagaaccatgccatccttttcccccccagccaggggtcccaggcgataaccggccctcctaccaccggcagatgtcagagccaatcgtgccagcagccccccccccccctcagggtttcaagcaggaatatcacgacccactctatgagcatggagtgcccggcatgccaggcccccctgcgcacggtttccagtccccaatgggtatcaaacaggaaccgcgagattattgtgtcgacagcgaagttcctaactgccagagtagttatatgcgcggggggtatttctcaagttctcacgaggggtttagttatgagaaggaccctagactgtactttgatgacacgtgtgttgtaccagagagactggagggcaaagttaagcaggaaccgacaatgtatagagaaggtccgccctaccagaggagaggcagcctgcagttgtggcagtttctagtgactctgcttgatgatcccgccaatgcccattttattgcctggactggacgcgggatggaattcaagctcatcgagccagaagaggttgcaagacgatggggaatccagaaaaaccgacctgcgatgaactacgacaagctgagccgttccctgagatattattatgagaagggcattatgcagaaggtcgctggtgagcgatacgtctataagtttgtttgcgacccagatgctcttttcagcatggcattccccgataatcaacgcccgttcttaaaggcggagtctgagtgccatctgtccgaagaggatacgcttccactgactcactttgaagattcccccgcctatttactcgatatggaccgatgctccagcctgccttacgcggagggatttgcctattag

SEQ ID NO: 116136 - DNA, 453 bp, synthetic construct
  misc_feature 1..453: note = Description of Artificial Sequence: Synthetic coding sequence
  source 1..453: mol_type = other DNA
atggatggattctacgatcaacaggttccgttcatggtgcccggcaagagccgctcggaggagtgcagagggaggcccgtcatcgacagaaaacgcaagttcctggacacagacctagcccacgattccgaggaacttttccaagacctgtctcagctgcaggaggcttggctggccgaagcgcaggtgcccgacgacgagcaatttgttccagactttcagagcgataacctcgtgctgcacgctcccccccccacaaagattaagcgcgagctacattccccttcatcagagttgagtagctgctctcatgagcaggccctcggcgccaattatggagagaagtgtttgtacaactattgtgcttacgatagaaaaccccccagcgggttcaaaccgctcactcccccaacaacacctctctccccaactcaccagaacccgcttttctag

SEQ ID NO: 116137 - DNA, 1659 bp, synthetic construct
  misc_feature 1..1659: note = Description of Artificial Sequence: Synthetic coding sequence
  source 1..1659: mol_type = other DNA
atgagcgagcgccgctgtccacctgaacatagggagggagtcaatgatacaggggggtccctcttccctcagaagctcctgaacgctgaaacgagtcagtcaggcattcgggacgcagagagtaccatggacgggttctacgatcaacaggtgccgttcatggtgcctgggaaaagcagatcagaggaatgcagggggcggcccgtgatagatcgtaagaggaagttcctagacactgacctggcccacgatagtgaggaactgttccaagacctcagccagctgcaggaagcatggctagcagaggcccaggtccctgatgacgaacagtttgtaccggactttcaaagtgataatctcgtactccatgcacctccccccactaaaattaaacgcgagctccatagtccttcctccgagctttctagctgctctcatgaacaggcccttggggcaaattatggagaaaagtgtctctacaattactgtgcctacgaccgcaagccaccatccgggttcaaaccacttaccccaccaacaacccccttatccccgacgcatcaaaacccactgtttcctcctcctcaggcaacactgccaacatcggggcatgcacccgccgccgggccagtgcagggtgtggggccagccccagcaccgcattccctccctgagccaggcccccagcagcagacatttgccgtcccccgccccccccatcaacccctgcaaatgccaaaaatgatgccagagaaccagtatccttcagagcagcggttccagcggcagctaagcgaaccatgccacccattcccgcctcagccgggcgtgcccggagataatcgaccctcctatcatcggcaaatgtccgagccgatcgttcccgcagcccccccgcccccgcaggggttcaaacaggagtatcatgacccactctatgagcatggggtccctggcatgcctggacctcccgcccatggcttccagtcgcctatgggcatcaaacaggaaccccgagactattgtgtcgactcagaggtgcccaattgccagtcaagttacatgaggggaggatacttcagtagcagccacgagggctttagctacgagaaggaccctaggctgtactttgatgatacatgtgttgtccctgaacgcctcgagggaaaggtcaagcaggagcctacaatgtatcgggaaggccctccataccagaggcgtggaagcctgcagctgtggcaattcctggtgactctgctggacgaccctgccaatgctcacttcattgcctggacgggtagaggcatggaattcaaactgatcgaaccagaggaggtcgcccgccgttgggggattcaaaaaaacagacctgccatgaactatgataagttgtctcgctcattacgttattactacgaaaagggaattatgcagaaggtggctggggaacgctacgtgtataaatttgtgtgcgaccctgacgctctcttctcaatggcctttcctgataaccagcgacctttcctcaaagccgagagcgagtgccatctctccgaggaagacaccctgcccttgacccactttgaagactcaccggcgtacttactggacatggatcgttgttcgagccttccatatgctgagggctttgcttactag

SEQ ID NO: 116138 - DNA, 1359 bp, synthetic construct
  misc_feature 1..1359: note = Description of Artificial Sequence: Synthetic coding sequence
  source 1..1359: mol_type = other DNA
atgtctgagaccccagcacagtgtagtataaagcaggagaggattagctatacgccaccagagtctcctgtaccatcctacgcctccagcacacctctccatgtgccagtacctagggcccttaggatggaggaggacagcattcgcctccctgctcacctcaggcttcaacctatttactggagccgggacgatgtcgcacagtggcttaagtgggccgagaacgagttcagtctccgcccaatagacagtaatacctttgaaatgaacggcaaagccctgctgctgctgaccaaggaggacttccggtatagaagtccacactcgggcgacgtgctctacgagctcctgcagcacatccttaaacaacgtaagccacggatcctttttagcccatttttccacccaggaaacagtatccacacacagcctgaggtgatcctgcaccagaaccacgaggaggataattgcgtccaaaggacaccacgtcctagcgtggacaacgttcaccacaaccccccaacgattgagctgctacaccgctcacgcagcccaatcacaactaatcatagaccctccccagatcctgagcaacgaccgctgcgctccccccttgataacatgattcgacggctgtctcccgcagaaagggcacagggcccccgtcctcaccaggagaacaaccaccaggagtcttacccactgtcagtgtctcctatggagaataaccactgtcctgcatcctccgagtcacacccgaagccttcctcccccaggcaagaaagtactagggtcatccaacttatgcccagtccgatcatgcacccattgatccttaaccctcgccattctgttgactttaaacaatcccgcctgtcagaggatgggctccatagggagggtaagcccatcaacttatcccaccgggaagatctcgcgtatatgaatcacatcatggtgtcagtctccccgccggaggagcatgccatgcctatcggaaggatcgctgactgcaggcttctgtgggactatgtgtatcaactcctgtctgacagtcgatatgagaatttcatcaggtgggaagataaagagtcaaagatatttcggatcgtcgatcctaacggactagcccgactttggggcaaccacaagaatcggactaatatgacttacgaaaagatgagccgggcgctgcgccactactataaacttaatatcatccgcaaggaaccaggtcagcggttgctgtttagatttatgaaaactccagatgaaataatgtcaggtcggacggatcgcctcgaacatctggaaagccaggagttggacgaacagatctatcaggaggatgagtgttag

SEQ ID NO: 116139 - DNA, 954 bp, synthetic construct
  misc_feature 1..954: note = Description of Artificial Sequence: Synthetic coding sequence
  source 1..954: mol_type = other DNA
atgcaggaaggcgagctagccattagcccaatcagccccgtggctgccatgccacccctcggtacacacgttcaagctcggtgcgaggcgcagattaaccttctgggcgagggaggcatctgcaagttgccagggaggctgcgcattcagcccgctttatggagcagggaggatgtactccattggctacggtgggccgagcaggaatactcgctgccttgcaccgcagagcacggcttcgagatgaacgggagggctctctgcattttaaccaaagacgacttcagacaccgagcaccttcaagcggtgacgttctctacgaacttctgcaatacatcaagacccagcgtagagcgctggtgtgtgggccattttttggcggaatctttcgcctcaaaacacctacacaacactctccagtccccccggaggaggtgaccggcccctcccagatggacacccgcagaggccatctcctccaaccccccgatcccgggctgacaagtaattttggtcacctcgacgatcccggtttggctcgctggaccccaggaaaagaggagagcctcaacctgtgtcactgcgcagaactggggtgccggacccaaggtgtatgcagttttcccgctatgccccaggctccaattgacggtcggatagcggactgtcgtctcttgtgggattacgtctaccagctgctgttagacactaggtacgagccatatattaagtgggaagataaggacgctaagatcttccgggttgtcgacccaaatggattggctcgactgtggggcaaccataagaatcgggtgaacatgacttatgagaagatgagccgagcgttaagacactattacaaactgaacatcattaaaaaagagcctggccaaaagctactctttcggaacggacttcagctgattttcatctttatttggtcctttcagtag

SEQ ID NO: 116140 - DNA, 1026 bp, synthetic construct
  misc_feature 1..1026: note = Description of Artificial Sequence: Synthetic coding sequence
  source 1..1026: mol_type = other DNA
atgcaagagggcgagctggccatctcccccatcagtccagtcgcagcgatgcctccgttgggaacccacgtgcaggcaagatgtgaagcgcagatcaatttactgggggagggcgggatttgtaagttgcctgggagactgcgaatacagcccgccctgtggtctcgggaagacgtgctgcattggctgcggtgggctgaacaggagtatagtctgccatgcacagccgagcacggcttcgagatgaatggccgggccctctgcattctgaccaaggatgacttcagacacagggccccctcctcaggtgacgtgttgtatgagctgttgcagtatatcaagacccagagacgggccctggtttgtggccctttcttcggtggcattttccgtctcaaaacccccactcaacattctcccgtaccccctgaagaggttactggacctagccagatggacacccgtagagggcatctcctgcaaccacctgatccaggtctgaccagcaatttcgggcatcttgacgacccaggtttagcccgctggacccctggaaaagaggagtcattaaacctgtgtcattgcgctgagctaggctgcagaactcaaggagtgtgttccttccctgcaatgccccaggcaccaattgacggcagaatcgctgactgtagactgctgtgggactacgtgtaccagttactgctcgatacgagatacgagccctacatcaaatgggaagacaaagatgctaagatcttcagggtggttgatccgaatggattagcacggctttggggcaatcataagaaccgggtgaacatgacatatgagaagatgtccagagctctccgccactactacaagctcaacattattaaaaaggaaccagggcagaaactcttgtttcgttttctaaaaactccaggaaagatggtgcaggacaagcacagccatttggagccgctcgagagccaggagcaggatagaatcgaattcaaggacaagcgtcccgagatttctccttag

SEQ ID NO: 116141 - DNA, 795 bp, synthetic construct
  misc_feature 1..795: note = Description of Artificial Sequence: Synthetic coding sequence
  source 1..795: mol_type = other DNA
atgcaggagggcgagctggcaatttctccaatctcaccagtggcagctatgccaccactaggaacccacgtgcaagccaggtgtgaagcccagattaacttactgggagaagggggcatctgtaagctgcccggtaggttaaggatccagcccgcgctttggagtagggaagacgtgttgcactggcttcgttgggccgagcaggagtacagtttaccatgtacagcagaacacggctttgagatgaacgggcgggccctctgcatattgaccaaggacgacttccgccacagggctcctagctccggcgatgtgctgtatgagctgcttcagtacatcaaaacacagcgcagagctctcgtctgtgggccattcttcggaggaatcttccgcctcaagactcctacccagcacagcccagtgccacccgaagattgtcggctgctttgggattatgtctaccagctgttactagatacgcgctatgaaccatatattaagtgggaggataaagacgctaagatcttccgtgttgtcgacccaaacggattagccagactgtgggggaatcacaaaaacagagtgaacatgacttacgagaagatgagtcgagccctccgacattactataagcttaatatcatcaagaaggaacctgggcagaaacttctgttcagatttctaaaaacacctggtaaaatggtccaggacaagcactcccatctggagcctctggaatcccaggaacaggaccggattgagtttaaagataagagacctgaaatttcgccttag

SEQ ID NO: 116142 - DNA, 861 bp, synthetic construct
  misc_feature 1..861: note = Description of Artificial Sequence: Synthetic coding sequence
  source 1..861: mol_type = other DNA
atgcaggagggtgagttagccatatcacctattagtccagtggctgctatgccccccctcggtactcatgtgcaggccaggtgcgaagcccaaataaatctgctgggggagggtggcatttgcaagttgcctggaaggctcagagatgtcctgtatgaattattgcagtacataaaaacccagaggagagccctggtttgcgggcccttcttcggggggatcttccgacttaagaccccaacccaacacagtcctgtgcctccagaggaagtgaccggcccatcccaaatggatacaagaagaggacatctcctgcagccaccggatcccggattaaccagtaattttggccacttagatgatccaggactcgcccggtggacccccggtaaggaagaatccttgaatctgtgccattgtgcagagctgggctgcaggacgcagggggtgtgttctttcccagcgatgccccaggccccgattgacggtcgtattgcggattgtcggctgttatgggattacgtgtaccagctgctgctcgatactcgctatgagccctacatcaagtgggaggacaaggacgccaagatcttcagggtagttgatcccaacgggcttgcccgactttggggtaaccacaagaaccgcgtgaacatgacttatgaaaagatgagccgggcactgaggcactattacaaactgaatattataaaaaaggaacctggacaaaagcttcttttccgttttttaaagacccctggaaagatggtccaggacaaacattctcatctcgagcctctcgaatctcaggagcaagatcggatcgagtttaaggataaacgccctgaaatctcaccttag

SEQ ID NO: 116143 - DNA, 573 bp, synthetic construct
  misc_feature 1..573: note = Description of Artificial Sequence: Synthetic coding sequence
  source 1..573: mol_type = other DNA
atggacaccaggagaggccatctgctacagcctccagatcctggtctgacttccaacttcgggcacctcgacgacccggggttagccagatggaccccaggcaaggaagagagtctgaatctttgccactgcgccgaactgggatgccgaacacagggggtgtgttccttccccgccatgccgcaggcgcctatagatggaagaattgccgattgcagattgctatgggattatgtatatcagttgttgctcgacactcgctatgaaccatacatcaagtgggaggacaaagatgccaagatcttccgcgttgtcgaccctaacggactcgcaaggctatggggcaatcataagaacagagttaacatgacttacgaaaaaatgagtcgtgccttacgtcactactacaagctgaatatcatcaaaaaggagccaggccagaaactccttttccgtttcctgaaaacacctggcaaaatggtgcaggataagcacagccatctggaaccgctggagtctcaggagcaggataggatagaatttaaggacaaaaggcctgagatctcaccgtag

SEQ ID NO: 116144 - DNA, 1242 bp, synthetic construct
  misc_feature 1..1242: note = Description of Artificial Sequence: Synthetic coding sequence
  source 1..1242: mol_type = other DNA
atggccagctgtgcagaaccttctgaaccatcggcccccctgcctgcaggggttcctcctctcgaagactttgaagtgttagacggtgtcgaagatgccgagggggaagaggaggaagaggaagaggaggaggaggaggacgatctgtctgagctccctccattggaggacatgggtcagccgccagcggaagaagccgagcagcccggcgcactcgcccgagaatttcttgcggccatggagccagagccagcacccgcacccgcacccgaagaatggctggatattctcggcaacgggctgcttaggaaaaagacccttgtacccggaccaccggggagctccagacccgtcaaagggcaagttgtgactgtccacctgcagacgtcactcgaaaacggaacacgggtgcaggaagagcccgaactggtgtttaccctgggtgattgcgatgtgattcaggcgctcgatttatccgtcccgctcatggatgtgggtgaaactgctatggtgactgctgattccaagtactgttacggcccacaaggctctcgtagcccctacattcccccgcacgcagcgctgtgtctcgaggtcaccctcaagacggcagtcgatggcccggatctagaaatgctgaccggtcaggaaagagtggcgctggcaaacagaaaaagagagtgtgggaacgcccactaccagcgcgctgattttgtgttggctgccaacagttatgatttggccataaaagctatcacctcatcagcaaaggttgacatgaccttcgaggaagaagcgcagctgctgcagctgaaggtgaagtgtctgaataacctggcggcctcccaattaaagctggaccattaccgcgccgctctaagatcgtgctcgttggtgctcgagcaccagccagacaatatcaaggccctgttccgaaaaggcaaggtgcttgcgcagcagggcgaatactctgaagctattcccatcctcagagccgctctgaaactggaaccatcaaacaagaccatccatgctgaactatccaaactcgtcaagaagcacgccgcacagcgctccaccgagacagcactgtatcgcaagatgcttggaaatccaagtcgattacctgccaagtgtcctggcaagggggcatggagtataccctggaagtggctattcggagcgactgctgtggcgttgggaggcgtggcactctctgttgttatcgctgcacggaactag

SEQ ID NO: 116145 - DNA, 1422 bp, synthetic construct
  misc_feature 1..1422: note = Description of Artificial Sequence: Synthetic coding sequence
  source 1..1422: mol_type = other DNA
atgaattatgataagctgagccgcgccctcagatattactacaataagagaatcctgcacaagactaaggggaagagatttacctacaagtttaattttaataagcttgtgctcgtcaactatcccttcattgacgtggggcttgcggggggagccgtgccccagtcagctccccccgtcccttccgggggttctcatttccggttccctccttccaccccaagcgaggtgctgtctccaactgaggacccacgcagccctccagcatgttcctcttctagctccagcttgttctctgccgtggttgcacgtaggttgggacgaggctcagtcagcgactgttcggacggaacaagcgagttggaagagccacttggagaggatcctagagctaggccgcctggtccccccgacctcggggctttccgcgggccgccactcgccagacttcctcatgacccgggcgtgttccgcgtttatcctaggccacggggtggccccgaaccccttagtcccttccccgtcagccccctggcagggcctgggtccttgttgccaccacagctatctccggctttgccaatgaccccaacacaccttgcctatacaccaagtccaacactgtcccccatgtacccatccggcggcggcggcccctcagggtctggcgggggctcccatttttccttttctcctgaggacatgaaaagatacctgcaggcccacacacagagtgtatataactaccacctgtcccctagggccttccttcattacccagggttggtcgtgccacaaccacagcggccagacaagtgcccgttaccccctatggctcccgagacacctcctgtcccatcctcagcaagctcatccagcagttcatccagtagcccctttaagttcaagttgcagccaccccccctgggtcgtcgacagagagccgctggggagaaggccgtggcgggcgccgacaagagtggagggagtgccggaggcttggccgagggtgcaggcgcactcgctccaccaccgccaccacctcagattaaggtcgagcccattagcgaaggtgagagcgaagaagtcgaggtcaccgacatttccgacgaggatgaagaggacggtgaagtctttaaaactccaagggctccacctgctcctcctaaacctgaacctggggaggcaccaggcgcctctcaatgcatgcccctaaagctgcgattcaaaagaaggtggtccgaagactgtagactggagggcggggggggcccggcaggggggttcgaagacgagggcgaagacaagaaagtgcgaggcgaagggcccggcgaggccggggggcccttaactccgaggagggtctcgagcgatttgcagcatgccaccgcacagttatcgctggagcaccgggactcgtag

SEQ ID NO: 116146 - DNA, 2478 bp, synthetic construct
  misc_feature 1..2478: note = Description of Artificial Sequence: Synthetic coding sequence
  source 1..2478: mol_type = other DNA
atggcggccgatgagggaagcgctgagaagcaggccggcgaggctcacatggcagcggatggtgagaccaacggtagctgcgaaaattctgatgcctcttcccatgctaatgcggctaagcatacacaggactccgctcgggtcaacccccaagatggtaccaacaccctcactagaatcgccgaaaacggggtctcagagcgcgattccgaagccgcaaagcagaaccacgttacggccgacgattttgttcaaacatctgtcataggttcaaatggttatatcctcaacaagcctgcccttcaagcccagcctctcagaaccaccagcaccctcgccagttccttgccggggcacgccgctaagaccttgcccggcggcgcgggaaaggggaggaccccctcggcctttccgcagactcctgccgcccccccagcaacactgggcgaaggaagcgccgataccgaggaccgcaagcttccagcacctggggcggatgtcaaggtacatcgcgcgaggaaaaccatgcccaaaagcgtggtgggactccatgctgcttcaaaggatcctagggaggtgagagaggctcgcgatcataaagaaccgaaggaagagatcaacaagaacattagtgacttcgggaggcagcagctcctgcccccctttccgagtctacatcagtcactcccccagaaccagtgctatatggccactaccaagtcccagacagcttgtttgccttttgtgctggctgcagcggtgagcaggaagaagaagagacggatggggacttacagtctagttccaaagaaaaaaaccaaagtgctgaagcagcggaccgtgattgaaatgtttaaaagcataacccacagcaccgtgggctccaagggggagaaggacctgggggcctctagtctgcatgtaaatggcgagagcttagagatggattccgatgaagacgacagcgaggaactcgaggaggacgatggtcacggggctgagcaagctgcagcctttccaacagaagattctaggacaagcaaggaatctatgagcgaggcagacagggcacaaaagatggatggggagagtgaagaggagcaagagtctgtggatacaggcgaggaagaagaaggaggtgacgaatccgatctgtctagtgaatccagcatcaagaagaagttcctgaagaggaagggaaaaacggacagcccatggattaaaccggcaagaaagcggcgccggcgctcaaggaaaaagccatcgggggctctagggtctgaatcctataaatcatccgcagggtccgcggagcagaccgctccgggcgatagtaccggctatatggaagtatctctagattccctggaccttcgagtcaaggggatcctttcctcccaggcagaaggacttgctaacgggccggacgtactggagacagacgggctgcaggaggtaccattgtgtagctgccgaatggagacccctaagtctagagagatcaccactctcgctaataatcagtgtatggctacagaatcggtggaccacgaattgggacgttgcacaaatagcgtggtcaaatacgagctgatgcggccttctaataaagcccccctgctcgtactctgcgaggaccaccgtggcaggatggtcaaacatcaatgctgccctgggtgtggctacttttgcactgccggcaattttatggaatgccagcccgagtccagcatctcacacagatttcataaggactgcgcttcgagggtgaacaacgccagttactgccctcattgcggagaggagagttccaaggctaaggaggtgacaatcgccaaggctgatacaacgagcacagtcactcctgtgcccggccaggagaaaggctctgcactggagggccgtgctgacactaccaccgggtccgccgccggaccccccttatcggaagatgacaagctgcaaggcgccgctagccacgtgccggagggtttcgatcctaccgggcccgccggactcggacgccccactcctggcttgtcacaggggcctggcaaggagaccctcgaaagcgcgttgattgcgctggactccgaaaagcccaagaagttgcgatttcatccaaagcagctttattttagtgcacgccagggagagctgcagaaggtgttgctcatgttagttgacggcattgatccaaatttcaagatggaacatcagaacaagcggagcccgctgcacgctgccgccgaggccgggcacgtagacatctgccatatgctggtccaggcaggcgctaacatagatacatgttccgaggaccagagaacgcccctgatggaagctgctgaaaacaatcacttggaagcagtgaaatatctcatcaaagccggggccttagtcgatccaaagattcaaaaaacaagcaaagtatacacggaatcacaggagacccagagatctcagacgattctctag

SEQ ID NO: 116147 - DNA, 3462 bp, synthetic construct
  misc_feature 1..3462: note = Description of Artificial Sequence: Synthetic coding sequence
  source 1..3462: mol_type = other DNA
atggcggcggatgagggttcggcagagaagcaggccggagaagcacatatggccgctgatggagagactaacggcagttgtgaaaacagtgatgcctcctcccatgctaatgcggcgaaacatacccaggactctgctcgcgtcaacccacaagatggaaccaatactctcacccgaattgccgagaatggcgtgtcagaacgtgatagtgaggcagcgaaacagaaccatgtgactgccgatgatttcgtgcagacctccgtcattggaagtaatgggtacattttaaacaagccggccctacaggctcaacccctgagaacgactagtacactagcctcttccttacccggacatgccgccaaaactttgccagggggcgccgggaagggtaggacccctagtgctttcccgcaaacaccagctgctccgccagctacactaggagaagggagtgctgacaccgaagacaggaagctgccagccccaggcgcggacgtgaaagtccacagagctcgcaagaccatgcctaagtctgtggtgggcctacatgctgcatcaaaagaccctagagaagtaagagaagcaagggatcacaaagagccaaaggaggaaattaacaagaacatcagcgacttcggtcggcagcagcttctgccgccgtttccaagtctccaccagtccctgccacagaaccagtgctatatggctaccactaaatctcagacagcttgtctgcccttcgttctagccgccgctgtgagccggaagaagaaacggcggatgggtacatacagtctggtcccaaaaaaaaagaccaaagtcctaaagcagcgcacggttatcgagatgttcaagagcatcacccatagcactgtgggtagcaagggtgagaaggacctgggtgcgagctcactccacgtgaacggagaaagtctggagatggactccgatgaggacgacagtgaagagctagaggaagacgatggccacggggcggagcaggcagcagcctttccaacggaggattctcggaccagcaaagagtccatgagcgaagctgatcgggctcagaaaatggacggcgaatcggaagaagaacaggagtcagtggacactggtgaagaagaggagggcggcgacgagtctgacttatctagcgagtcaagcataaagaaaaaatttttaaaacgtaaagggaagacagactccccttggataaaacccgcaaggaaacgtagacgcagaagtcgtaaaaaaccaagcggtgccctgggttctgaatcttacaagagttcagcgggctccgctgagcagacagccccaggggattccacgggatatatggaggtgtcactggacagcctggacttgagagtgaaaggcattctctcatcccaagccgagggactcgcgaacgggcctgacgtactggagaccgacggcctccaggaggtcccattatgtagttgccgaatggaaacaccgaagtccagagaaatcacaactctagctaacaatcagtgtatggctaccgaatctgtcgaccatgaactggggcgctgtacaaattccgtggtgaaatacgagctgatgcgccctagtaacaaggccccactgctagtgctttgcgaggaccatcggggcaggatggtaaagcaccaatgctgtccaggctgtggttacttttgtaccgccggtaattttatggagtgccagcctgagtccagcatcagccaccgattccataaagattgcgcatctagggtcaataatgcctcctattgccctcactgcggggaggaatctagtaaagctaaagaggtgacgattgccaaagccgacactactagcaccgtcacacctgttccggggcaagaaaagggcagtgccttggagggaagggcagacactaccacaggatccgctgcaggcccaccattgtcggaggacgataaactgcagggggcagcctcacacgtaccggaaggctttgatcccactgggccagctggcttggggcgcccaacccccgggctgagtcaaggccctggaaaggaaactcttgagtcagccctcatcgctctggacagtgagaaaccaaagaagcttcgatttcaccccaaacagctgtattttagtgctcgccagggtgaactacagaaagtcttacttatgctagtggatggcatagaccctaattttaagatggagcaccagaataagcgatcgcctcttcatgcagcggcggaagcaggacatgtggatatctgtcacatgctggtgcaggctggcgcaaacatagatacctgttccgaggaccaaaggacgccactgatggaggccgctgaaaataaccatttagaggccgtcaagtaccttataaaggctggggcgctagtggaccctaaagatgctgaggggagtacatgtctccatttagctgcgaagaagggccactatgaggtcgtccagtatctcctaagtaatgggcagatggacgtcaattgtcaggatgatggaggctggacacctatgatatgggctaccgaatataagcacgtggacctggtgaagctactcctctccaagggatccgacatcaatattcgggacaatgaagaaaacatctgcctgcactgggcagccttttctggctgcgtggatatcgctgagatcttactggcagctaagtgtgatctgcacgccgttaatatccatggggattctcctttacatattgccgcccgcgagaaccgttacgactgcgtcgtcctgttcctgtctcgagattcagatgtaactctgaagaacaaagagggggagacccctctgcaatgcgccagcctgaattcccaggtctggagtgcactacaaatgtcaaaggctctccaagactccgcccccgatcgaccatctcccgtcgagcgcatcgtttcacgagacattgcccgcggctatgagcgcatcccaatcccatgtgtgaatgccgtcgactccgagccatgtcccagcaattacaagtacgtgtcccagaattgcgtcacgtcacccatgaatattgatcggaacatcactcatctccagtactgcgtctgtatcgacgactgttcttcttctaactgcatgtgcggccagctgagcatgcgttgttggtacgacaaagatggccgactcctccccgaatttaatatggccgagccaccactgatcttcgaatgcaatcacgcatgttcctgctggcggaattgccgcaacagggtcgtccagaatgggttgcgggcgcgtttacagctgtatcggacaagggacatgggctggggagtacgaagcttgcaggatattccaccaggcacctttgtctgcgagtacgtgggcgagttgattagtgattccgaggcagacgtgagagaggaggattcatatctgttcgatctggataataaggttattagcgcatag

SEQ ID NO: 116148 - DNA, 3897 bp, synthetic construct
  misc_feature 1..3897: note = Description of Artificial Sequence: Synthetic coding sequence
  source 1..3897: mol_type = other DNA
atggctgcagcagacgcagaagctgtgcccgcaaggggggaacctcagcaggattgttgtgtgaaaactgagcttctaggagaagaaactcccatggctgctgacgaagggtccgctgagaagcaggccggagaagctcacatggcagctgatggagagaccaacggctcttgtgaaaactcagatgcctctagtcacgctaatgctgctaaacatacccaggacagcgccagagtgaatccgcaggatggtaccaatactctgacccgcattgctgaaaacggggtgtctgaaagggactcggaagcagcgaagcagaatcacgtcactgcagatgactttgtccaaacatccgtgatcggatccaatggctacattctaaataagccggcactgcaagcacagcctttacggaccacatctacactggcgtcaagcctcccagggcatgccgcaaagaccctgcctggaggggctgggaaggggcggactccatccgcctttccacagacaccggcggctccccccgctacactgggtgagggctccgctgacaccgaggatcgcaagttacccgcacccggcgctgatgtgaaagttcatagggctcgcaagactatgccaaagtctgtcgtcggactgcacgccgccagcaaggatcctagagaagttagagaggccagggaccataaggaacccaaggaagagatcaacaagaatatctctgattttggccggcagcagctgctgcctcctttcccttcgctgcaccagtcgcttccacagaaccagtgctacatggctacaacaaagtcccagaccgcttgtctgcccttcgtgctggctgcagcagtgagccggaaaaaaaagcgacgtatgggcacgtatagcttggtgccaaagaagaagaccaaggtgctcaaacagaggacagttattgagatgtttaaatccattacacatagcactgttggttctaagggagaaaaggatctcggagcctcatcactgcatgttaacggggaaagcctagaaatggattcagatgaggatgactccgaggagttagaggaggacgacggacacggcgccgaacaggctgcagccttcccaaccgaagacagtaggactagcaaggaatcaatgtccgaagccgatagggcccagaagatggacggtgagtcagaagaggagcaggagagtgtggatactggcgaagaggaagaagggggcgatgagtccgacttgagctccgagagttctattaaaaaaaagttcctgaaaaggaagggtaaaacagactctccatggatcaaaccggctaggaagcgcagacggaggtcccgcaagaagccctcgggggcgttaggtagcgagtcctacaaaagctcagccgggtcagcagaacagacagctcccggagattctacaggctacatggaagttagcctcgacagtctggatctacgagtgaaaggcatcctttctagccaggccgaggggctagcgaacgggccagatgttctcgagactgatggactacaggaggtgcctttgtgttcgtgccggatggaaacgccaaagtccagggagattactactctcgccaataatcagtgcatggctacggagtcagtggatcacgagcttggtcggtgcactaatagtgttgtgaagtatgagctgatgcgccctagcaataaagcacctcttctggttttatgtgaggaccaccggggcagaatggtgaagcaccagtgctgtcctgggtgtggctatttctgtacagccggcaactttatggagtgtcagcccgagtcatcaatttcccatcgttttcacaaagactgtgcaagtagggttaacaatgcatcttactgtccccactgcggggaggagagctctaaggctaaagaagttaccattgctaaggccgatacaactagtaccgtgactcctgtgccaggacaggagaagggctctgccctcgagggaagggctgacaccacaaccgggtctgctgctgggccccctctcagcgaagacgacaaattacaaggagccgcatcccatgttcctgaggggttcgaccccacaggacccgctggtctggggagaccgactcctgggttgtctcaaggccccggcaaggagaccctggaatccgcgttaattgcactcgactcagagaagccaaagaaactgcgcttccacccaaagcagctttactttagcgccaggcaaggcgagctgcagaaagtgctgctgatgctcgtggatggaattgatcctaattttaagatggaacatcagaataagcggagccctctccatgccgccgcagaggccggccacgtggacatatgtcacatgctagtgcaggccggtgctaacatcgatacttgctcagaggaccaaaggacgcctctgatggaggctgccgagaacaatcatctggaagcagtgaaatacctcataaaagccggcgctctggtcgaccccaaggacgccgagggaagtacttgcctccatctagccgcaaaaaagggtcactatgaagtcgtgcagtatttgttgtccaatggccagatggatgtcaactgtcaagacgacggaggctggacaccaatgatatgggctacagagtataaacacgtcgatctggtgaagcttctactctcaaaaggctcggatatcaatatcagagacaacgaggagaatatttgtctccattgggcggcgttcagcgggtgcgtggacatcgcagaaatacttctggccgcaaagtgcgacctgcatgcggtgaatattcacggagatagcccccttcacatagccgcccgtgaaaacagatatgattgcgtggtcctgtttctgtcccgggatagcgatgtgacgctcaagaataaagaaggagagactcccctccagtgtgccagcttgaatagtcaggtctggtctgccctgcagatgtccaaagcgctccaagactcggctccggataggccatcccccgtggagcgtattgtgagccgagacattgcacgcggatacgagcggattcctatcccctgcgtgaatgcagtggacagcgagccatgccccagcaattataagtatgtgagccagaactgcgtgacatcacccatgaatattgataggaatatcacccacttgcagtactgcgtgtgcatcgatgactgcagctcctccaactgcatgtgtgggcagctgtcaatgaggtgctggtacgataaagatggccgtttactgccggaatttaacatggctgagcctcccttgatattcgaatgcaaccacgcatgctcctgctggagaaactgccgtaatagagtggttcagaacgggctacgtgcccgcttgcagctctatcggacgagagatatgggatggggagtgaggtctctgcaggacattccccctggcacattcgtgtgtgaatacgtgggggagctgatctcagactcagaagccgacgtcagagaggaggacagttacctgtttgacctggataacaaggacggggaggtttactgcatcgacgctcgtttctacgggaatgttagcaggtttataaatcatcactgtgaaccgaacctggttccagtcagggtattcatggcccaccaggacctaagatttccacggattgctttctttagcacccggctcatcgaggccggggaacaactgggctttgactacggtgagaggttctgggacatcaagggcaaactgttcagctgtcgctgtgggtctccaaagtgtcggcattcgtctgccgcccttgcccagcggcaggcttctgctgcccaggaagcgcaagaggacggactgccggacactagctctgcagccgccgcagatcccctctag

SEQ ID NO: 116149 - DNA, 2427 bp, synthetic construct
  misc_feature 1..2427: note = Description of Artificial Sequence: Synthetic coding sequence
  source 1..2427: mol_type = other DNA
atggctgctgccgatgctgaggccgttcccgccaggggggagccccagcaggactgttgtgtcaaaactgagctgctgggcgaggagaccccaatggccgccgacgagggcagcgcagagaaacaagccggggaggcccacatggccgccgatggagagacaaacggctcttgtgaaaattctgatgcctcttcgcatgccaatgctgccaaacatacacaggattcagcccgtgtgaacccccaagatggcaccaatacccttacgaggatcgccgaaaacggggttagcgagcgcgattcggaggccgcgaaacagaatcatgtgactgccgatgatttcgtgcagaccagtgtgattggctccaatggctacatcctgaataaacccgctctacaggcccagcctttgaggacgacttccacacttgcgtctagtctcccaggccacgccgccaaaactctaccagggggagctggcaaagggagaacccctagcgcttttccacagactcccgctgcaccgcctgccacgctaggagaggggagcgctgacacggaagacagaaagctccccgctcccggggccgatgtcaaagtgcaccgcgcaagaaaaacgatgcccaagtcggtcgtgggccttcatgccgcctcaaaagatccacgagaagtgagagaagcaagagatcataaggagcccaaggaagagatcaataaaaatatctcagacttcggtcggcaacaattactcccaccattcccatcgctccaccagtcactccctcagaaccaatgttacatggccactacgaaatcccagacagcctgcctacctttcgtgctggctgccgcggtgtcacgaaagaaaaaaagaaggatgggcacctactcccttgtgcctaagaaaaagaccaaagtgctgaaacaacgaacagtgatcgagatgttcaaatccatcactcacagtacagtgggcagcaagggggaaaaagatctaggggcatccagcctgcatgtgaatggtgaatcactggagatggacagcgatgaagacgattccgaggagctggaagaagatgatggacacggcgctgagcaggctgccgcctttccgactgaggacagccgtacttctaaagaatccatgagtgaggctgaccgcgcacaaaagatggacggagagtctgaggaggaacaagagtctgtcgatacaggagaggaggaagagggaggcgacgaatccgacctatcttccgagtccagcattaaaaagaagtttctgaagaggaagggtaaaacagattccccgtggattaagccagcaagaaagcggcggcgtcgcagtcgaaaaaaacccagcggagcattgggctctgaaagctacaagagttccgccgggtctgctgagcaaacagcacccggcgacagcactggatatatggaggtcagcttggattctctggacttgcgcgtcaaggggatcctcagcagccaggctgaagggttggccaatggtcctgatgtgctcgagacagacggcctgcaagaggtgcctctgtgcagctgccgcatggagacgcccaaaagtcgcgagatcacgacactggctaacaaccagtgtatggccacagagtcagtggatcatgaactcggcagatgcactaacagcgtggtgaaatacgaactcatgagaccatctaataaagcccccttgttagtgttgtgtgaggatcaccggggcaggatggtgaaacaccagtgctgcccaggatgcggatacttttgtacggccgggaattttatggagtgtcaaccagagtccagtatcagccatcgatttcataaggattgcgcatctagagttaacaacgctagctattgtccccactgcggcgaagagtcttctaaggccaaggaggttactatagccaaggccgatactacaagcacggttacccccgtccccggccaagaaaagggatctgctctggagggtagggctgacactaccacaggctccgctgcggggccgccgctttccgaagatgacaagcttcagggggcagcttctcatgtgccggagggatttgatccaactggcccggccgggctcggacggccgacccctgggctgtcccagggtccggggaaagagaccctcgagtccgccctgattgccctagattcagagaagcctaagaagttaaggttccacccaaagcaactttacttttccgcccgtcagggggagttacagaaagtgctgttgatgctcgtggacggtatcgatccaaacttcaagatggaacaccagaacaagagatctcccctccatgcagctgccgaggccggccatgtcgacatctgtcacatgctagtgcagttttgcagacttggatctcctaggtctagagggtgtctttggtag

SEQ ID NO: 116150 - DNA, 3702 bp, synthetic construct
  misc_feature 1..3702: note = Description of Artificial Sequence: Synthetic coding sequence
  source 1..3702: mol_type = other DNA
atgcgcgggcttcctcgaggacgcggtctcatgcgggcccgggggaggggacgagctgcgccacccggttcaagagggcgtggtagaggaggacctcaccgggggcgagggcgcccccgatctctgctgtcattgcctcgcgcccaggcctcttggacaccccaattgtctacaggcctcactagcccccctgtgccttgtctgccttcacagggagaggcacccgccgaaatgggagcactgctgctggaaaaggaaaccaggggggctaccgagagggttcatggaagcctaggagacacacctcggagcgaggaaactctgcctaaggcaactcccgattcgctcgaaccagccggcccttcaagtccggctagtgtgactgttacagttggtgacgaaggagccgacacccccgtcggagccacccctctcattggcgacgaaagtgaaaatctcgagggagatggtgaccttagaggaggccgcattctgctcgggcatgcaacaaagagtttcccatcgtccccatcaaaaggcgggtcttgtccttcccgagccaagatgagcatgacaggcgccggcaaatctccccccagcgtgcagtccctggcaatgaggttgctctctatgcctggagctcagggagctgctgccgccggttccgaaccacctccggcaacaacttcacccgagggacaacccaaagtccatagagcaaggaaaacaatgtcaaaaccggggaatggccagccgcctgtacctgagaagagaccacctgaaatccagcattttagaatgtccgacgacgtgcacagcctcggtaaagtgacaagtgacctcgccaagcggcggaagctaaattctggcggcggtctgtcagaagagctaggatcggctcgtagatcaggagaagtcacacttaccaaaggagatcctggatccctggaggagtgggagacagtcgtcggagatgatttctccctatattatgacagctactccgttgatgagcgcgttgactcagactctaagagcgaagtggaagcgcttactgagcaactgtccgaggaagaggaggaagaggaggaggaagaggaagaagaggaagaagaggaggaggaggaggaagaggaggaagacgaggaatcggggaaccagtccgatagatccgggagctcaggacgtcggaaggccaagaagaaatggaggaaagattccccctgggtaaaaccgagccggaagcgaagaaaacgggaaccaccaagagccaaagagccccggggagttagcaacgacacatcctcccttgaaactgagcgcgggtttgaggaactgcccctgtgtagttgcagaatggaggcccctaaaattgatcggatttctgagcgagccggccataaatgtatggccacggagtcagtggacggggagttgagcgggtgtaatgctgcaattctcaaacgtgagactatgaggccgtccagtcgagtggccctcatggttctctgcgagacacatcgcgctcggatggttaaacatcactgctgtcccggctgcggttatttttgtaccgcaggcacttttctcgagtgtcatcctgatttccgagtggcgcaccgtttccacaaagcatgtgtatctcagctgaatggtatggtattctgcccgcattgcggagaggatgcctctgaggctcaggaggtgacaattcctagaggagacggtgtcactccgccagcaggaaccgccgcacccgctcccccgccgctgtcccaggatgtgccgggaagggccgacacatcccagcccagcgctaggatgaggggccacggcgaaccccgacggcctccttgtgaccccctagccgatacgatcgactctagtggtccgtctcttacgctgccaaatggcggttgcctgtccgccgttgggttgccactaggccccggcagagaggcactcgaaaaagccctggttatacaggaatccgagcgcaggaagaagctaagattccatccccggcaactctacctctctgttaagcagggagaactccaaaaggtgattctaatgcttctggacaacctagaccccaacttccaatctgatcagcagagcaagagaacacccctgcatgccgccgcacaaaagggttctgttgaaatttgtcacgttttgctacaggccggagccaacattaacgctgtcgacaaacaacagcgcaccccccttatggaggctgtggtcaataaccacctggaagttgcgaggtacatggtgcaacgaggaggatgtgtgtattccaaagaagaagacggctcgacgtgtctgcatcacgcagccaagatcggcaatctggaaatggtatccctgctactgtcaacaggccaggtagatgtcaacgctcaggattctggaggatggaccccaattatttgggcagccgaacacaagcatatcgaagtaattcggatgctgctaacacgcggagccgatgtcacactgactgataatgaggaaaacatctgtcttcattgggctagctttacgggttctgcagccatcgccgaggtgctgctcaatgctcggtgcgacctccacgctgtcaattatcacggcgatacaccgctccacatagccgcaagagagtcataccacgactgtgttcttctgttcctgagccgcggggccaacccagaactgagaaataaggagggcgacacagcatgggatctgacaccagaacggtcggatgtgtggttcgccctgcaactgaaccgcaaactaaggttaggtgtaggcaaccgcgccatccggaccgagaaaattatctgtcgcgatgtggcccgggggtatgagaatgtaccaatcccgtgtgtgaatggcgtggatggggaaccatgtcccgaggactataagtacatttccgaaaactgtgagactagcactatgaacattgacaggaatataacccatttgcaacactgcacttgtgtggacgattgctcctcctctaattgtctgtgtggacagcttagtatcagatgctggtacgacaaggacggtcggcttttacaggaatttaacaaaatcgagcctccattgattttcgagtgcaatcaggcttgctcttgctggcggaattgcaagaacagggtggttcagagtggcatcaaagtgcggctgcagttgtatcgcacggccaaaatgggatggggcgttcgcgcattgcaaacaatcccacaggggactttcatttgcgagtatgtgggagagctgatctccgacgccgaggccgatgttagagaggatgattcttacctcttcgatctggacaataaagatggggaggtgtattgcattgatgcccgatattatggcaacatttcccgattcattaatcacctgtgcgatccaaatattatcccggtgcgggtgttcatgctgcatcaagacctcagatttccaagaattgccttctttagttctcgggacattaggactggagaagagcttggttttgactatggcgacaggttctgggacataaagagcaaatacttcacgtgccagtgcggatccgaaaagtgtaaacactctgcagaggccattgccctggaacaatcgaggttagcacggctggatcctcacccagaactattaccagaattaggcagtctgccacccgtcaacacatag

SEQ ID NO: 116151 - DNA, 3531 bp, synthetic construct
  misc_feature 1..3531: note = Description of Artificial Sequence: Synthetic coding sequence
  source 1..3531: mol_type = other DNA
atggcagccgctgcaggtgcagcagcagctgcggctgcggagggagaggcacccgcggaaatgggcgctctattgctggaaaaagagacacgtggcgctaccgagcgcgtacacggatctctaggcgacactcctagatctgaggagacccttcccaaggctaccccagacagccttgagcctgccggcccttcttccccagcctctgttaccgtgaccgtgggcgacgagggcgctgacacccctgttggcgcaactccactgatcggagacgaaagcgagaatctggaaggagacggggatctaagaggcggtaggattctactgggccatgccacaaagtctttccccagctctccatctaagggggggtcttgccccagtagagctaaaatgagtatgactggagctggaaaatcgccccccagcgtacaaagcctggcaatgaggcttctatcaatgccgggcgctcagggcgcggccgccgccggatccgaacccccgccggcaaccacctcgcctgagggccaaccgaaggtgcaccgtgcccgcaagaccatgagtaagccaggcaacggacagccacccgtgcccgaaaaacgtccgcccgagatacagcattttagaatgtcggacgacgtccatagtttagggaaagtcacgtcagacctagcaaagcgaaggaaactcaactcaggcggaggcctctcagaggaattggggagcgccagaagatccggagaagtgaccctgacaaaaggagaccccggatctctggaagagtgggaaacagtcgtgggcgacgatttttccctgtactacgattcttattccgtggatgagcgcgtggattccgactccaagtccgaggtggaagccctaacagaacagttatctgaggaagaagaagaggaagaagaagaagaagaagaggaagaggaagaagaagaagaagaggaagaagaggaagatgaggagagcggcaaccagagtgatcggtccggatccagcggtcggaggaaagccaaaaaaaaatggcgaaaagactccccatgggtgaagccctcaagaaagagaagaaagcgggagcctcccagagcaaaagagcctcgaggagtgtccaatgatacgtcctctctagagacagaaagaggcttcgaggagctaccgctgtgcagctgtcgcatggaagcacccaagattgaccgaatctccgaaagagcgggccataagtgcatggccacggaatctgtggacggggaattaagcggctgcaatgcagctattcttaaacgggagactatgagaccaagttcgcgggtggctctgatggttctgtgcgaaactcacagagcacgtatggtgaaacaccattgctgcccagggtgtgggtatttctgtacagctggcacgtttctcgagtgtcacccggatttccgcgtagcacaccggtttcataaagcctgtgtaagccaattgaacggaatggtgttttgcccccactgcggtgaggacgcgtctgaggcccaggaggtaaccatccctcgtggagacggcgtgactccaccggcgggaacagccgcccctgcgcccccaccactctctcaggacgtccccggccgtgccgatacctcccaaccatccgcacgcatgcgaggacatggggagcctcgccggcctccatgcgatccattggccgataccatcgacagctcaggcccgagtctgactttaccaaacggtggctgcctgtctgcagttggtcttccactaggtcctggccgagaggctctggagaaggctcttgtcatccaggagtcagagcggagaaaaaagcttcgattccacccacgtcaactgtacctgagcgtgaaacaaggagaactgcagaaggtcattctgatgctgctggataatctcgatcctaacttccagagcgatcagcagtccaaacgaaccccattgcatgccgccgcccagaaggggagcgtggaaatctgccatgttctgctgcaagccggcgctaatatcaatgccgtggacaagcagcagcgaacccctctgatggaggcagttgtcaataatcacctcgaagttgcccgatatatggtgcagagaggcggctgtgtgtattcaaaggaggaggatggctccacgtgtctgcaccacgctgccaagatcggaaacctggagatggtatcgcttttgctgtcaacgggccaagtagacgtcaatgctcaagattcaggtgggtggactccaattatatgggcagctgagcataagcacattgaggtgattagaatgcttctgacccgtggtgcagacgtcactctgacagataatgaggagaatatatgcctccactgggcctcattcaccggcagcgctgctattgccgaagtcctcctgaacgctcgctgtgaccttcatgccgtaaattatcacggggacactcccctgcatatagccgcaagagagagttatcatgattgtgtgctgctgtttcttagccgcggcgccaaccctgagcttcgcaataaggaaggggacacggcttgggatctgactcctgaacgctctgacgtctggttcgcgctgcaactgaatcgcaagctgcgcctgggcgtgggcaaccgggctatccgaactgagaaaatcatctgtagggacgttgcccggggctacgagaacgtgcctattccttgcgtgaatggagtggatggtgagccttgccccgaggattacaagtatatatctgagaattgcgaaacatccacaatgaatatcgatcgcaatatcacacacctgcaacactgtacatgtgttgacgactgtagctccagcaattgcctgtgtggacagttatccatccgttgctggtacgataaggacggccgcctcctgcaggagttcaataaaattgagccacccttaatttttgagtgtaaccaggcttgtagctgctggaggaactgtaagaaccgggtcgtgcagtcaggtattaaggtccgactgcagctctaccgtaccgccaaaatgggctggggcgtgagggcgctccagacgataccgcaggggacgttcatctgcgagtatgtaggagagctaatcagcgacgctgaagctgacgtacgggaggacgattcttacctgtttgacctggataataaagatggtgaagtatactgcattgatgcgcgctattatggcaatattagcagattcatcaaccatctgtgtgacccaaacataattccagttcgagtgttcatgctgcaccaagatctgcgcttcccgcggattgccttcttttcatcacgcgacatccgaactggggaagaactaggcttcgattatggcgatcgattctgggacatcaagtccaaatatttcacttgtcagtgcggaagtgagaagtgtaagcactccgccgaggcaattgcgcttgagcagtccagactcgcccgtctggatccgcaccccgagttgcttccagagttgggctcattaccacctgtgaacacgtag

SEQ ID NO: 116152 - DNA, 3633 bp, synthetic construct
  misc_feature 1..3633: note = Description of Artificial Sequence: Synthetic coding sequence
  source 1..3633: mol_type = other DNA
atggccgcggccgccggcgccgcagcagctgctgcggctgagggagaagcccctgcagaaatgggggcactcctgctcgaaaaagagactcgcggcgcaacggagagggtgcacggtagtcttggagacacaccccggagtgaggagactctacccaaagctacccctgatagcctggaacctgctggaccgagcagccctgcgagcgtgaccgttaccgtgggcgatgagggggctgataccccggtgggagcaacccccctgatcggagatgaatctgagaacctggagggcgatggggacctgcgaggcggccgcattttgctgggccatgctactaaatctttcccaagcagccctagtaagggggggagttgcccctctagagctaagatgtccatgacaggtgcaggcaagtcacccccctcagtgcagtcgcttgccatgagactgttgagtatgcccggagctcagggagccgctgctgccggctcggaacctccgcctgcaactacctctcctgaaggccagccgaaagtccatagagcaaggaaaactatgagcaagcccggaaatggccagcccccagtgcctgagaagcgaccaccagagattcagcatttcagaatgagcgatgacgtgcacagtcttgggaaagtgacgagtgatctggccaaacggaggaaactgaactcgggaggcggactcagtgaggaactagggtccgcccggcgttcaggtgaggtgactctgaccaagggtgaccctggtagcctggaggagtgggaaactgtagtgggggacgacttttccctgtattatgatagttattccgtggacgaaagagtggactctgattctaaaagcgaagtggaagcactgaccgaacaactgagcgaggaggaagaagaggaagaagaagaggaggaagaggaagaggaggaggaagaagaagaggaagaggaagaggatgaggaatccggaaatcagagcgataggagtggtagttctgggagacggaaagctaagaaaaaatggcgcaaggactccccatgggttaaacctagccgaaaaaggcggaaaagggagccaccccgagcaaaggaacctaggggagttaacggtgttggctcatccggaccctccgagtacatggaggtgcccctgggctccctggaactgccttcggagggtacattgtctccaaaccacgccggcgtctcaaacgacacctcctctctggaaaccgaacgggggtttgaagaattgcctctgtgcagttgtcgcatggaagcgcccaagattgacaggatttcggagcgcgcggggcacaaatgcatggccacagagtctgtggacggcgaattgtctggctgtaatgccgcaatccttaagagagaaacgatgagaccctcatccagggtggctctgatggtgctgtgcgagactcatagggcaaggatggttaagcatcattgttgtcccggctgcggctatttttgcacagctggtacattcctcgaatgtcatcctgatttccgggtggcccaccgatttcataaggcctgtgtctcgcagctgaatgggatggtgttctgcccccattgcggtgaagatgcttctgaggcccaagaggtgaccatccctagaggagacggggtcacgccacccgccggaacagccgcccccgccccccccccactgtcacaagacgttcccggccgcgcggatacatcacagcctagtgcccgtatgagaggccacggagaaccacgccgccccccctgtgacccattggccgacacgattgattccagtggaccctctcttactctgcccaatggcggctgccttagcgcggtagggttacctctgggaccgggaagggaggcgttggagaaggccttagtaattcaagaaagtgagagacgaaagaagctccgtttccatcccaggcagctctatctctccgtgaaacaaggggagctccagaaggttatcctaatgctcctagacaatctcgatcccaattttcagtctgatcagcagtccaaacgcacccctctgcatgccgctgcgcagaagggctcggtcgaaatatgtcatgttctcttgcaagcaggcgcgaacataaacgcggtggataagcagcagcggacacccctgatggaggcagttgtcaacaatcacctcgaggtggctagatatatggtgcagcgcggaggatgcgtgtacagtaaggaggaagatgggtccacctgcctacatcatgcagccaagataggaaatctcgaaatggtctcattgctgttgtcaaccgggcaggtcgacgttaatgcccaggacagtggcggatggaccccaataatttgggcggcagagcacaaacacattgaagtgatccgcatgctgctcacgcgaggtgcagatgtgaccctgacggacaatgaggagaacatctgcctacactgggccagcttcactgggtcagctgccatcgcagaagtccttctgaatgcccgatgtgatctccatgctgttaactatcacggcgatactccccttcacatagctgcacgtgaatcctaccatgattgcgtgctcctattcctctcccgtggcgcaaatcccgaactcagaaataaggagggggataccgcatgggacttgactccagagcggagtgacgtgtggttcgcccttcagttgaaccgcaaactgaggctgggcgtgggaaatagagccattaggactgaaaagatcatatgccgagatgtggcacgcgggtacgagaacgtccccattccttgtgtcaacggcgttgacggcgagccatgtcccgaggactacaagtacatcagcgagaattgcgagacttccacaatgaacatcgaccgtaatatcacccatctgcaacactgcacctgtgtggacgactgcagctcgtccaattgcctgtgcggacagctgtcaattagatgttggtacgacaaggatggcagactgttgcaggagttcaataaaattgaacctcccctcatctttgaatgcaaccaggcctgctcatgttggcggaactgtaagaaccgagtagtgcagagcgggataaaagtgcgcctccagctctatagaacggctaagatggggtggggcgtgcgcgctctgcagactataccacagggcaccttcatttgtgagtacgtcggggaactgattagcgacgctgaagccgacgtgagagaggatgactcttatcttttcgacctggataataaagatggcgaagtatactgcattgatgcacgctactatggcaacatctcccgttttatcaatcatctgtgcgatccgaatattattccggtgcgggtgtttatgctgcatcaggacctacggtttccacgcatcgcgttcttcagcagccgtgatatccggactggggaggagcttggcttcgattacggagatcggttttgggatattaaaagcaaatatttcacgtgccagtgcggatcggaaaaatgcaaacactccgctgaagccatagctctggaacagtcgagactggccaggctggacccccaccctgagctccttcccgagctgggctcgctccccccagtgaatacgtag

SEQ ID NO: 116153 - DNA, 3531 bp, synthetic construct
  misc_feature 1..3531: note = Description of Artificial Sequence: Synthetic coding sequence
  source 1..3531: mol_type = other DNA
atggcagctgccgcaggcgctgccgccgctgctgcagcagaaggggaagcccctgcagagatgggagcccttcttcttgaaaaggagactcggggggctacagaacgggtccacgggagcctgggagatacccccagaagcgaagagaccctgccgaaggccacacccgactcccttgaacccgccggacctagtagccctgctagcgtgaccgtcactgtgggcgatgaaggcgccgatacccctgtgggagcaactcccctgataggggacgagagcgagaacttggagggtgacggggatcttaggggcggacgcatacttttgggacacgccaccaaaagttttcctagttcacctagcaaaggaggaagctgtccatcacgtgcaaagatgtcaatgactggggctgggaagagccccccatccgtccagtcgctggccatgagactcctcagtatgcccggggctcagggcgcggctgcggccgggagtgagccaccacctgccaccacaagccccgagggccaacccaaagtacatagggcgcggaaaactatgtccaaaccgggcaatgggcagcccccagtgccggagaagcgccccccagagattcagcacttcaggatgtctgacgacgttcactccctcggaaaagtgacgtcagacctggccaagcgtcggaagctcaattcgggggggggcctgagcgaggagctggggagtgccagacgttccggagaagtaactctcactaagggcgaccccgggtcactggaggaatgggaaacagtggttggtgacgacttctcgttgtactacgatagctactccgtggatgagcgggtggactcagatagtaaaagcgaggttgaggcattaactgagcagctgagtgaagaggaggaagaggaagaggaggaggaggaggaagaggaggaggaggaagaagaggaggaggaagaagaggacgaggagtccggcaatcagagtgatagatcggggagctcaggcagacgcaaggccaagaaaaaatggcgaaaggactcaccttgggtgaagccaagccgcaagcgaaggaagagggagccccctagggctaaagaaccgcgtggtgtgtccaatgatactagctcactcgagacggagcgcggcttcgaagaactgcccctctgttcatgccgcatggaggcgcctaagatcgataggatcagcgaaagggctggtcacaagtgtatggctactgaatccgtggatggcgagctgagcggctgcaacgcagcaatcctcaaaagggaaaccatgagaccttcttcacgcgtcgcacttatggtcctgtgcgagactcaccgcgccagaatggtgaaacaccattgttgccctgggtgcgggtacttttgtactgccggtacttttctggaatgccatccagacttccgggtggctcaccggtttcataaagcctgcgtgtcacagttgaatggtatggtgttctgcccgcactgcggagaagatgctagcgaggcccaggaggtcaccatcccaaggggtgatggcgtgacaccaccagcaggcaccgccgccccagcccctcctcctctgagtcaagatgtacccggacgagctgacacctctcagccttccgcccgtatgcgcggccatggagaacctagaaggcccccctgcgaccccctcgctgacactatcgactctagcggacctagtcttacgttgcctaacggtgggtgcttgagtgctgtgggtttgccgcttggacccggacgtgaggcactcgaaaaagcattagtcatccaggaatctgagcgacggaagaagttgaggtttcacccacgccagctgtatttgagtgtgaagcaaggcgaactccaaaaagttattctgatgttactcgataatctggaccccaactttcagtctgatcagcagagcaagagaaccccactccatgcagcagcacagaaaggcagcgtcgagatttgtcacgtgctgctccaggccggtgctaacatcaatgcagtggacaaacagcaaagaactcccctcatggaggctgtggtcaacaatcacctcgaagtggcccgatacatggtccaacgtgggggctgtgtctatagcaaagaagaggatggttcgacctgccttcatcacgctgccaagatcggcaatctggagatggtgtcccttctcctgagcacagggcaggtggatgtgaatgcgcaggatagcggcgggtggacgcccattatctgggccgctgaacacaagcacatagaggtgatccgcatgcttctgacaaggggcgcggacgtgacactgactgataatgaagagaacatctgccttcactgggccagtttcaccggttcagcagcaattgcagaggtgctcctaaatgcccgatgcgatttacatgccgtgaactaccacggggacactccactgcatatcgccgcccgtgagtcttaccatgattgcgtccttctgttcttgtcccggggggccaatcctgagctgaggaacaaagaaggggatacagcttgggacctaactcctgagagaagcgacgtatggtttgcactgcagctgaaccggaagttgcgcctcggagttgggaaccgggcaatccggaccgaaaaaataatatgcagggacgtagcccgtggctatgagaacgtgccaatcccgtgtgtaaacggcgtggatggcgagccctgtcccgaggattacaaatacatttctgaaaactgcgagacgagtaccatgaatattgatcgtaacataacccacctgcagcactgtacttgtgtggatgattgtagttcatccaactgtctatgcggtcaattgtccatacgatgttggtatgacaaggatggccgcctcttgcaagaattcaacaagatcgagccccccctcatatttgaatgcaatcaagcctgtagctgttggcgtaattgcaagaatcgggtggtgcagtccggaatcaaggtgcgcctgcagttatatcggacagcaaagatgggctggggggtgagggcactgcagacgatcccccagggcaccttcatctgcgaatatgtgggggaacttatatccgatgccgaggcagacgtgcgcgaggatgatagctacctcttcgacctggacaacaaagacggagaggtatactgcatcgacgctagatactacggaaatatctcccggtttattaatcatttgtgcgaccctaacattattcctgtcagggtgttcatgctgcatcaagatttacgtttccccaggatcgcctttttctcgagtagggatatcaggactggtgaggagctcggctttgactacggcgatcgcttctgggatattaaaagcaagtattttacatgtcagtgtgggtctgaaaagtgcaagcactcagcggaggccatcgccttggagcagtctcgactcgcacggctagacccacaccctgaactactgcccgagctgggctccctgcctccagtcaatacatag

SEQ ID NO: 116154 - DNA, 3633 bp, synthetic construct
  misc_feature 1..3633: note = Description of Artificial Sequence: Synthetic coding sequence
  source 1..3633: mol_type = other DNA
atggccgcagccgctggcgcggccgccgccgccgccgctgagggagaagctcctgctgaaatgggcgccctccttttagaaaaggaaaccaggggagcgacagagcgggtacacggttcacttggtgacacccccaggtccgaggagacgctgccgaaggctacccctgacagtctcgagcctgcagggccctcctctcctgctagcgtcactgtcacagtgggagatgaaggtgcggacacccccgtaggggcgactcccctgattggcgacgaaagcgaaaacctcgaaggcgacggcgacctgcggggcggcagaatcctattaggacacgccaccaagtcttttccttcctcaccatccaaagggggttcatgcccttccagagctaagatgtccatgacgggcgcaggcaagtcaccccccagcgtgcagtctctggccatgaggctgctctccatgccgggcgcccagggcgccgccgctgcgggcagtgagcccccccccgcaactaccagtcctgagggacagcccaaagtccaccgcgctcggaagactatgagcaaacctggaaatggacagcccccagtgccggagaagcgacctccagagatccaacatttcaggatgagcgatgacgttcatagtctgggcaaagtgaccagcgatttggcaaagagacgaaagctaaatagcggcggcggcctgtctgaagagcttggctccgctagaagaagcggggaggtaacgttaaccaaaggagatccagggtctctggaggagtgggaaacagtagtaggcgatgatttcagcctgtactatgactcgtattccgtggatgagagagttgattctgactccaaatccgaagtcgaggcgctgacggagcagttgtccgaggaagaggaggaagaagaagaggaagaggaggaggaagaggaagaagaggaagaagaggaggaagaagaggatgaagaaagcgggaaccagtcagatcgctctggatcctctggtaggcggaaggccaagaaaaaatggcgaaaggactccccttgggtcaagccctcccggaaacgccgaaagcgcgagccacctagagcaaaagagccgcgtggagtgaacggagtgggaagcagcggaccctccgaatacatggaggtcccactgggcagtctagaactgccttctgaaggtactttatctccaaatcacgcaggcgtgagtaatgatacatcttccctggagacagaacggggattcgaagaactaccattgtgttcctgcaggatggaggcccctaaaatcgaccgcatctcggaacgggcaggacacaaatgcatggcgacagaaagcgtagacggggaactgagcggttgcaacgcggctattctgaagagggagactatgcggccaagcagccgagtggcactgatggtgttgtgcgagacccaccgcgccaggatggtgaagcaccactgttgtccaggatgtggttacttctgtactgctggtacattcctggaatgccaccccgatttccgggtcgcccaccgatttcataaagcttgtgtttcacagctgaatgggatggtgttctgcccacactgcggagaggacgcttctgaggctcaggaagtgacgataccacgtggggatggcgttacgcccccagcaggtacagctgcgcctgccccaccccctttgagccaggacgtgcccgggagagcagacacatcacagccgtccgcccgaatgcgcggccacggggaacctaggaggccaccatgtgacccactggcagatacaatcgacagcagcggcccctctctcactctccctaatggaggatgtctgagtgcagtgggccttcctctcggcccaggtagagaggctctcgaaaaagctcttgtcattcaggaatccgagcgtcgtaagaagttgcgatttcatccacggcaactttatctatctgtgaagcaaggagagctgcaaaaggttattctgatgcttcttgacaatctggacccgaactttcagagcgaccaacagtcaaagagaacaccactgcatgcagctgctcagaaaggctcagtggaaatatgtcacgtactgcttcaggccggtgcaaatatcaatgcagtggataagcagcagcgtacaccgctgatggaggccgtcgtgaataaccacttagaagtggctcgatatatggttcagcggggagggtgcgtatattctaaggaagaggacggatccacctgcctgcaccacgccgccaaaattggtaatctggagatggtttcattgctgttatctactgggcaggtggatgtcaacgcccaggacagcgggggatggactccaatcatctgggctgctgagcataaacacatcgaagtcattaggatgcttctcacacggggcgctgacgttacattgaccgacaacgaagagaatatctgccttcactgggcatcctttacaggctctgctgcaattgccgaagtcctgttaaatgctcgttgcgatctccatgccgttaactaccatggcgatacccccttacacatagcggcacgcgagagctaccatgattgtgtcctgctgtttttgagtagaggagccaatcccgaactcagaaacaaagaaggtgacacagcgtgggatctcacacctgagagatccgacgtttggttcgcgcttcaactcaatcggaagctgaggcttggggtcgggaatcgggccatccggacagaaaagataatctgtcgcgacgtagcgcgtggctacgagaacgtccctattccctgtgtaaacggggttgatggggagccgtgccctgaggactacaaatatatctctgagaactgcgagacttccacgatgaacatcgataggaatattacccacttacagcactgcacatgtgtggacgattgttcctccagcaactgcctctgtgggcagctctccattcgttgttggtatgataaagacggaaggttattacaggagttcaacaagatcgaacctcctcttattttcgaatgcaatcaagcttgcagttgctggcgaaattgcaagaaccgtgttgtacagtctggaattaaggtgcgactacagctttatcgaactgcgaaaatggggtggggcgttcgagcgttgcagaccattcctcagggcacattcatatgcgagtatgttggggaactcataagcgacgccgaagctgatgtgagagaggacgacagttatctgttcgatctcgacaataaggatggcgaggtgtactgtatagacgctcgctactatgggaatatctcaaggttcatcaaccacttatgtgatcccaacatcattcccgttagggtttttatgcttcaccaggatttgcgatttccccggatagccttcttcagctcccgcgatattcggaccggggaggagttaggcttcgactatggagatcggttttgggatatcaagagtaaatactttacctgccagtgtggaagcgaaaagtgtaagcattcggccgaggccattgccttagaacaatctcgcctcgctcgcttagaccctcatcccgagctgcttccagagctcggatccctcccgcctgttaatacctag

SEQ ID NO: 116155 - DNA, 3804 bp, synthetic construct
  misc_feature 1..3804: note = Description of Artificial Sequence: Synthetic coding sequence
  source 1..3804: mol_type = other DNA
atgcggggccttccacgcgggagaggactgatgcgcgcgcggggcagaggacgagccgctcctcccgggtctcgggggaggggacggggcgggccacacagggggaggggaagaccacgcagcctgctgagtctgccaagagcccaagcctcttggacgcctcagctatctaccgggcttacatccccacctgttccctgcttgcctagtcagggggaggcgcctgccgagatgggggcgctcctgctcgaaaaagaaactcgcggtgctaccgaacgggttcacggttccctgggcgatacgccccggtccgaggagaccttgcctaaggctacccctgacagcctggagccagctggcccgagctctcccgccagcgtgacagtcaccgtgggagatgaaggggccgacacaccagttggggcaacaccccttatcggggacgagtccgagaatttggagggagatggagatctgagaggtggcagaatattgctgggccatgccaccaaatctttccctagtagcccatctaagggtggctcatgccctagcagagcgaaaatgagtatgacaggggcggggaagagtccacccagcgtccagtcactggctatgaggcttctgagtatgccgggagcccagggtgccgccgctgctgggtccgagcctccaccagctaccacaagtcccgagggacagccgaaggtccatcgagcgcgcaagacgatgtcgaaacctgggaacggacagccccctgtccccgagaagcggccccccgaaatccagcactttcggatgagtgatgacgttcattctctgggcaaagtgacctccgatctcgctaaacgtcggaagctcaacagcggcggagggctgtcagaagaactaggcagcgcaaggaggtccggagaggtgaccctgacaaaaggtgacccaggctccttggaagagtgggagaccgtggtcggtgatgatttcagcctgtattacgattcttactctgtggatgagcgagtggatagcgatagcaaatcggaggttgaggcgcttacagagcagctgagcgaggaggaggaagaagaggaagaagaggaagaagaagaggaggaggaggaagaggaagaagaggaggaggaagacgaggagtcaggaaatcagtcagaccgatcagggtcatctgggagacggaaggctaagaaaaagtggaggaaggactccccctgggtcaagcctagccgaaagcggcggaagcgtgaaccaccccgggccaaagagccaaggggcgtgaatggcgtcggctcatctggcccatcagagtatatggaggtcccattaggaagcctagagctgccatccgaggggaccctgtcccctaaccacgcaggcgtaagtaacgatacgagcagtctagaaactgaaagggggttcgaggagctgccattatgctcctgccggatggaagcaccaaagatcgacagaattagcgagagagccgggcataagtgcatggcaacagagtcagttgatggagagttatccggctgcaatgcagccattttgaaacgcgagactatgcggccttcaagtcgagtggcattgatggtcttatgcgagacacacagagcccgaatggtgaaacaccattgttgcccagggtgtggctatttctgcaccgccggtacctttttggagtgtcatccagactttcgtgtagctcacaggttccacaaggcttgcgtgagccagcttaacggcatggtcttttgcccacattgcggcgaggatgccagcgaagcgcaggaagtgaccatacctcgcggagacggcgtgactcccccagccggcacagccgcccccgctccccctcctctgagccaggatgtgcccggccgagctgatacaagccagccctccgctcgaatgagggggcatggcgaaccgagacgcccaccctgcgatccactggctgacactattgacagctcaggacctagtctcacactgcctaatggtggctgtttatcggccgtgggcctccctttaggccctggaagagaggctctggaaaaggccctggtcattcaggaatcggaacgacggaagaagctgagattccacccccggcaattgtatctgtcggtgaagcagggcgagctacaaaaggttatccttatgctcctggacaatctggatccaaactttcaatctgatcaacagtccaagcgtacacccctgcacgctgccgcccagaaaggatccgtggagatctgtcacgtcttactgcaggctggggctaatatcaatgctgtggacaaacagcagcgcactccattgatggaggccgtggttaacaatcacctggaagtggccagatacatggtccagaggggcggctgtgtatactcgaaagaggaggatggctctacttgcttacaccatgctgctaaaataggaaatcttgagatggtttctctgttgttgtctactggacaagtggacgtgaacgcacaggattcgggtggctggaccccaattatctgggccgccgagcacaagcatattgaggtgatcagaatgcttcttacccggggcgcagatgtaacccttactgacaatgaggaaaatatatgtttgcattgggcttctttcacggggtcggcagccattgcagaggtgctactgaacgctaggtgtgatcttcacgctgtgaactatcacggggatactcctctccacatcgcagctcgagagtcttatcacgactgcgtgttattattcctgtcccgtggagccaaccccgaactgaggaataaggagggagacactgcctgggaccttaccccagagaggtctgacgtttggttcgcactccagctgaatcgtaagcttaggctcggagtagggaacagagctatacggaccgaaaagatcatttgcagggacgtggcacgggggtacgaaaacgttcccatcccctgcgttaatggtgtggatggggaaccctgcccagaggactacaaatatattagtgagaactgtgaaacatccacaatgaatatcgatcgaaacatcacccacctccagcactgtacttgtgtggacgattgcagttcttctaactgcctctgcggccaactgtccattcgttgctggtacgacaaagatggccggttgctgcaggagtttaacaaaatagagcctcctctcatcttcgaatgtaatcaggcatgttcttgttggagaaattgtaagaaccgagtggttcagagcggcattaaggtgcggctccaactctatcgcacagctaagatgggatggggtgtcagggctctccagacgatcccacaagggacattcatatgcgaatacgtaggtgaacttatctcagacgcggaagctgacgtgcgcgaggacgacagttatttgtttgacctcgataataaagacggtgaagtttactgtattgatgcaagatattacggcaacatctcgcggttcattaatcacctctgcgatcccaacatcatccctgtgagggtattcatgcttcaccaggacttgcgatttcctcggatcgccttctttagttctagagatatccgaactggcgaggaactgggatttgactacggggatcgcttctgggacatcaaatccaaatactttacttgtcagtgcggttctgagaagtgtaaacatagtgccgaggccatcgcactggaacagagccgcctcgcccgtctggacccccatcccgagctgttgcctgagctaggctcactgcccccagttaacacttag

SEQ ID NO: 116156 - DNA, 3804 bp, synthetic construct
  misc_feature 1..3804: note = Description of Artificial Sequence: Synthetic coding sequence
  source 1..3804: mol_type = other DNA
atgagggggttgccccgagggcgtgggctcatgagggctaggggacgtggacgggcagccccacccggttcacgcggacgaggccggggcggaccacacagaggtagaggcaggcccaggtccctcctaagcctccctagagcccaggccagttggaccccacaactctccacagggcttacctcccccccggtaccatgcttaccttcacagggtgaggcccccgccgagatgggagccctgttgcttgagaaagaaacgagaggagcaacggaacgcgtgcacggctcgttgggcgacacgccccgaagcgaggagactctgccaaaggcaacccccgacagcctagagcctgcaggaccatcaagccctgcctcagttaccgtgacagtgggtgacgagggggccgacacgcccgtgggcgcaactccgttgattggggatgagagcgagaatctcgagggagacggcgatttgcgtggagggagaatactcctgggccatgccaccaaatcattcccgtcctccccatcaaaaggcggatcatgtccaagtcgagccaagatgtcaatgacaggtgcaggcaagtctcctccttccgtgcaatcacttgctatgcggttactaagtatgccgggggctcaaggggccgctgcggctggctcggaaccacccccagccacgacttctcccgaggggcagccaaaggtacacagagctcgtaaaactatgtccaaacccggaaatggccagccaccagtacccgagaagcgcccccctgagattcagcactttcgtatgtcggacgacgtccactcactgggaaaggttacctccgacctggccaagagacggaaactgaattccgggggcggattgagtgaggagttggggtccgcaagacgctccggcgaggttaccctcaccaagggagatccaggcagccttgaggaatgggagacggttgtcggggatgactttagcctttactatgacagttactccgttgatgaaagggtagattcagatagcaagagcgaggtagaggcactgaccgagcagctatctgaagaggaggaagaggaagaagaagaggaagaagaggaggaggaggaagaggaggaggaagaggaagaagaggacgaggagtcaggaaatcagtctgaccgaagcggtagctctggtcgacgcaaagcaaaaaaaaaatggagaaaggactctccatgggtcaagccctcacgaaaaagacgcaagagggaacctccacgggccaaagagccccgtggcgtgaacggagtaggttcatcaggacctagcgagtacatggaagtcccattagggagcctcgagctacccagcgaaggaacgctgagtccaaatcacgctggggtttctaacgatacttcttcactggagacagaaaggggctttgaggagctgccactgtgctcttgcaggatggaagccccaaagattgacaggatatcggagcgggccggccacaagtgtatggctactgaaagcgttgatggggaactgtcgggctgcaacgccgctattcttaagcgcgagaccatgcgtccctcatcccgggtggccttgatggtgctttgtgaaactcacagggcacggatggtaaaacaccattgctgcccgggatgcggctacttttgcacggcagggacctttctcgaatgccatcctgattttcgcgtggcacataggttccacaaggcttgcgtgtcccagctgaacgggatggtgttttgcccgcattgcggcgaggacgcgtccgaggctcaggaagtgaccatcccgagaggagacggagtgacaccccctgctggaaccgccgcaccagcacccccaccgctgtcacaagatgttcccggacgtgccgatacctcccagcctagcgcccgcatgcggggacatggcgaacccaggcgtcccccatgtgaccccttggccgacactatcgactcctccggcccgagcctgaccctgcctaacggcggctgcctctctgctgtgggcctgccccttggccctggtcgcgaagcgctagaaaaggcactggtgattcaggagagcgagaggaggaagaagctgcggttccacccacggcaactttacctgagtgtcaaacagggagagcttcagaaagtaatactgatgctcctagacaatcttgatcctaactttcagagtgaccaacagtctaagcgaacgccactccatgccgcagcccagaaaggaagtgtggagatttgccacgtcctgttgcaggcaggggcaaacattaatgctgtggacaagcagcaacggactccactgatggaagcagtagttaacaaccacctggaagtcgcccgctacatggtgcaacgcgggggatgtgtgtattcaaaggaggaggacgggagtacatgtcttcaccacgcagctaaaatcggaaatcttgaaatggtgtctctgctgcttagcacagggcaggtggacgtgaatgctcaggacagtgggggctggacacctatcatttgggctgccgagcacaagcacatcgaagtcatcagaatgttactcacccgcggagctgacgtgaccctaaccgacaacgaggagaacatctgcctgcactgggcctccttcactggatcagccgctatcgcggaagttcttctgaatgctaggtgcgatttgcacgcagtcaattatcacggcgacacccctctccacatcgctgctagagagagttatcatgactgcgtcctcctttttttgtccaggggcgccaaccctgaactgaggaacaaagagggagacacggcctgggacctgaccccggagcgcagcgacgtctggttcgccttacaactcaacaggaaactgcgcctcggcgttggcaatagagccataagaacagaaaagataatctgtcgcgacgtggcacgcgggtacgagaacgtgcccatcccctgtgtgaatggcgttgacggggaaccgtgtccagaggactataaatacattagcgagaactgtgaaactagtactatgaatatagatcggaatatcacccatttgcagcattgcacatgtgtggatgactgctcctcaagcaattgtctctgcggtcagctcagtatacggtgctggtacgacaaagacggtagactgctccaggagtttaacaagattgaaccaccgttgatatttgagtgcaatcaggcgtgcagctgttggcgcaattgtaaaaaccgggtggtccaatccggtatcaaggtgcgcctgcagctgtatcggacagctaagatggggtggggagtgcgcgcccttcagactattccccagggcacctttatctgtgagtacgttggggaactgatatcagatgccgaggccgatgtcagggaggatgactcttatctgtttgatctggataataaggacggggaagtctattgtatcgatgccaggtactacggcaacatctcccgctttatcaaccacctctgtgaccccaatattattccagtgcgcgtgttcatgctgcaccaggacctgagatttccccgcattgcattcttctcttcaagggacatcagaacaggagaagagctcggatttgattacggggacaggttttgggatataaaatcaaaatacttcacctgccagtgtggctccgagaagtgtaagcacagtgctgaggccattgctttggagcagtcgcggctcgcccgactcgacccacaccccgaattactgccggaactcggatccctcccccccgttaacacttag

SEQ ID NO: 116157 - DNA, 3702 bp, synthetic construct
  misc_feature 1..3702: note = Description of Artificial Sequence: Synthetic coding sequence
  source 1..3702: mol_type = other DNA
atgcggggactaccgcgtggacggggattaatgagggctcgtggcagagggcgcgcagcgccaccagggtctcgaggtcgaggccgcggcggaccgcacagaggccgtggccgcccacggagcctgttaagccttccgcgtgcccaggcctcgtggactccacagctgagcacaggcctcacatcgcctccagtcccctgtctgcccagccagggggaagccccggctgaaatgggcgcattgttgctggaaaaggagacacgaggcgcaacagagcgtgtgcacgggtcccttggggatacacctcggtccgaggagaccctgccgaaggcaaccccggacagcttggagcctgccggtcccagctcacctgcatctgtgacggtgactgtgggcgatgaaggggcggatacaccagtcggtgcaacaccattgatcggtgacgaatccgaaaacctagagggcgacggagaccttcgcggaggcagaattttactcggccacgcgacaaaatccttcccatcatcaccttctaagggcggatcatgtccttcacgggctaagatgagcatgaccggcgccggtaagtccccaccctcagtgcaaagtctcgctatgcgcctcctcagcatgcccggagcacaaggtgccgcggcagcaggctccgaaccacccccagctacaacatccccagaaggccagccaaaggtacatcgagcccgcaagactatgtcgaaaccgggcaacggccagcctcccgtgcctgagaaacgaccacctgaaattcaacacttcaggatgtccgatgacgtccattcactggggaaggtgacatcagacctggcaaaaagaagaaaactgaattctggaggcggcctgagtgaagaactgggctccgcccggagaagcggggaagtcactctgaccaagggggaccctggatccttggaggagtgggagactgtggtaggggatgatttttccttgtactatgactcgtattccgtggatgagcgtgttgattcagacagtaagagcgaggtcgaagccctcacggaacagctgagcgaggaggaagaagaggaggaggaggaggaagaagaagaagaagaagaagaggaggaggaggaggaggaggaagacgaggaaagcggcaatcaatctgacagaagtgggtccagcgggcgtagaaaggccaagaagaagtggcgcaaagacagtccctgggtgaagccgtccaggaagcggcgtaaaagagagcctcctcgcgcgaaagagcctagaggggtgtccaatgatacatctagtttggaaaccgaacgcggcttcgaagagctgccgctgtgtagctgccgcatggaagctccaaaaattgacagaatatcagaacgagctggacacaagtgcatggcaacggagtccgtggacggtgaattgagcgggtgcaacgctgctattctgaagagggaaaccatgagaccttcctctcgcgttgcactaatggtgttgtgcgagacccacagggcccgcatggtgaagcaccactgctgccctggttgcggttacttctgcaccgctggcactttcctggagtgtcaccctgactttagagtcgctcacagatttcacaaagcctgcgtcagccagttgaacggcatggtgttttgcccgcactgtggggaagatgcctctgaggcacaagaagtcactatccctcggggggatggtgttacccctcccgccggaacagcagcgcccgcgccccccccactgagtcaggacgtgcccggcagggctgataccagtcaacctagcgccaggatgcgggggcacggagaaccacggcggcccccctgtgatcccctggctgatactatagactccagcggtcctagcctcactctgccaaatgggggctgcctgtctgccgttggacttccactggggccaggaagagaggctttggaaaaggcgctggtgatccaggaatcagagcgccggaagaagttacggttccatcctaggcaactgtatctgtcagttaaacaaggcgaactgcagaaagtgatcctgatgctcttggataatttggacccaaacttccaaagcgatcagcaaagcaagaggacaccactgcacgctgccgctcaaaaaggtagcgtagaaatctgccatgtgctgctgcaggcaggggcaaacataaatgccgttgacaaacaacagcggacccctcttatggaagctgtggtgaataatcatctggaggtggcgcgctatatggtgcagaggggcggctgtgtctactcaaaagaggaagacggcagcacatgcctccatcacgccgccaagatcgggaatctcgagatggtctcgttgctcctttctaccgggcaggtggacgtcaatgctcaggatagcgggggatggacacctatcatctgggctgccgaacataaacacattgaggttattagaatgctgctcactcgtggtgctgatgtcacacttacagataacgaagagaacatttgtctgcactgggcgtctttcacaggatccgcagccatagccgaggtgttgctgaatgcgcgctgcgatctccacgcagtaaactatcacggcgacacccctctccatatagcagcaagagaaagttatcacgattgcgtgttgctcttcctaagcagaggtgccaacccagagctgcggaataaggaaggggacaccgcatgggacctgactcccgagcgctcagatgtgtggttcgcactgcaactcaatcggaagctgcggctcggagtcggcaaccgagccattaggaccgaaaaaataatctgcagagatgtagcacgggggtacgaaaatgtccctatcccatgcgtaaacggtgtcgacggtgaaccttgcccggaggattacaaatatatttctgagaactgtgagactagcactatgaacatagatcggaacattactcatctgcagcattgtacctgcgtcgatgactgtagcagctccaactgtctgtgcggccaactgtctattcggtgctggtacgacaaggacggaaggcttctgcaggagttcaataagatcgaacctcctctcatctttgaatgtaatcaggcctgcagctgctggcgcaattgcaagaacagggtagtgcagtcaggcattaaggtccgtctccagctgtacaggacagcaaaaatgggatggggcgtgcgggcgctgcaaacgattccccaaggcacttttatctgcgagtacgttggggaactgatcagcgatgccgaggcggacgtccgcgaggatgatagttatttgtttgatctggataacaaagatggggaggtctattgcattgatgccagatattatggcaatatctcgagattcatcaaccacctgtgcgaccccaacataatcccagttcgggtgttcatgttgcaccaagatcttaggtttccacggatagcttttttctcgagtcgggacatccgtacgggagaagaattaggattcgactatggagatcgcttctgggacattaagtctaaatacttcacttgccagtgcggctccgaaaagtgcaagcattcagcggaggccattgccctcgaacagtcccggctggccaggcttgatcctcatccagagctactgcctgagttagggagcctgccacccgtcaacacctag

SEQ ID NO: 116158 - DNA, 3804 bp, synthetic construct
  misc_feature 1..3804: note = Description of Artificial Sequence: Synthetic coding sequence
  source 1..3804: mol_type = other DNA
atgcgagggctcccgcggggcaggggcttgatgcgagcccgaggaagaggtcgcgcggccccgcccggcagcagagggagaggtcgaggtgggccccaccggggcaggggtcggcctcgctcattactgtctcttccccgggctcaagcgtcctggactcctcaactaagtacaggccttactagtccaccggtgccttgcctcccatcacagggggaggccccagcagagatgggagcattgctgctcgagaaagaaactcgcggcgccaccgagcgagtgcatgggtctctgggcgacacccctcggtcagaggaaacactcccaaaagccaacccggacagtctggagccagctgggccctctagccccgctagcgtcaccgtcacggtgggcgacgagggggctgatacaccagtgggcgcgacccctctcataggcgatgaaagtgagaacctggaaggagatggcgatctacgtggaggccgcattctcctgggccacgccaccaagagcttcccatcctcacccagcaaaggcgggtcttgtccatcacgggccaagatgtcgatgacaggagcaggtaagtctcctccatccgtccaatccctggccatgcggctcctgagtatgcccggggctcaaggagccgcagctgctggctccgagccgcctcccgccacaacttcccccgaaggccagcctaaagtgcaccgcgctaggaaaaccatgtcaaagccaggcaacggccagcctccagtgcccgaaaagagaccgccggagatccagcacttcaggatgagtgacgacgtacacagcttaggaaaggtgacaagcgatctggcaaagcgcagaaaattaaattccggaggaggcttgtccgaagaactgggatctgcccggcgcagtggggaagttacactgaccaagggagatccaggctcactggaagagtgggagacagtagtaggtgatgatttctctctgtattacgactcatattctgtcgatgagcgggtcgactcagacagcaagtccgaagtggaggccctcacggagcagctttcggaggaggaggaggaggaagaggaagaagaggaagaggaagaggaagaggaagaagaagaggaagaagaagaggatgaggaaagcggcaatcagagcgacagaagtggatccagtgggagacggaaagccaaaaagaagtggcggaaagattccccttgggtcaaacccagtagaaaaaggagaaaacgcgagccacctagagccaaggaaccaaggggtgtgaacggcgttggttccagcggccctagcgagtacatggaagtgccattaggtagtcttgagcttccctccgagggtactctctccccgaaccacgcaggcgtgagcaatgatacaagcagcctagagactgaaagagggtttgaggagttgcctctgtgctcgtgcagaatggaagcacccaaaattgaccggattagcgaacgcgctggacacaagtgtatggccaccgagagtgtagatggggagctcagtggctgcaacgccgccatcttgaaacgcgaaaccatgaggccaagttccagggtagccctaatggtcctgtgtgagacccaccgggcacgaatggtcaaacatcactgctgtcccgggtgcggctatttttgtaccgccgggacctttttagaatgtcaccccgactttcgcgtggcccaccggtttcacaaggcttgcgtttctcagctcaatggcatggtgttttgcccacattgtggcgaggatgcatcagaggcccaggaagtaaccatcccaagaggcgatggagtgacgccacctgccggaaccgcagctcctgctccccctcccctatctcaggacgtgccagggcgggccgatacaagtcagccgagcgcccggatgcggggccacggcgagcccaggcggcccccctgtgatcccctggccgacacaatcgattcctctggccccagtttgactctcccaaacggcgggtgtctgagtgctgttggcctcccactagggccaggccgcgaggcactggagaaggctctagtgattcaggagtccgaacggcgaaagaagctccgctttcacccaagacagctgtacctgtctgtgaagcagggcgaattgcagaaggtcatcctcatgctgctggacaatctggacccgaatttccaatccgaccagcagagcaagcggactcctctgcatgccgctgcacagaaggggtccgtcgaaatctgccatgtgctgctgcaagccggggcaaatatcaatgcagtggacaaacagcaacgcacacctctcatggaggctgtggtgaataaccatcttgaggtggctcgatacatggtccagcgaggcggctgtgtctactccaaagaagaagacggcagtacttgcctgcaccacgctgcaaagataggcaatctggaaatggtgtcacttttgctttccacagggcaggtcgacgtcaacgcccaggatagcgggggctggacacctatcatttgggcagccgagcacaagcatatagaagttatcagaatgcttctcacacgtggggccgacgttactctgacagacaacgaggagaatatttgcctgcattgggcatccttcaccggaagcgctgctatcgccgaggtcctgctcaacgcacggtgtgatttgcacgccgttaattaccacggagatacaccactacacatagctgcacgggagtcataccatgactgtgtgctcctgttcctcagccgaggcgcaaatcctgagctaaggaataaggaaggggacaccgcttgggacttgacaccggaacgctctgatgtttggtttgccctgcagttgaaccggaaattgcgattaggagttgggaatcgtgctatccgtacagagaaaataatctgcagggatgttgccagaggctatgagaacgtcccaattccctgcgtgaatggtgtagacggagaaccctgtcccgaggactacaagtatattagcgagaattgcgaaacctcaacgatgaacattgaccggaacatcacccatctgcagcactgcacatgtgtggatgactgctcgagcagcaattgcttatgtggtcaactgtctattcgttgttggtacgacaaggatggtagactactgcaagaattcaacaagatcgagcctccacttatattcgagtgtaatcaggcctgttcttgttggagaaactgtaaaaatagggtcgttcaatctggaattaaagtacggctccagctctataggactgccaagatgggctggggtgtgcgggccttgcagacaattcctcagggaacatttatttgcgagtacgttggcgagcttatctcagacgccgaagcagatgtgcgcgaggacgatagctacctttttgatctagacaacaaggacggggaggtatactgcattgatgcgagatactatgggaacatcagccgtttcataaaccatctgtgtgatcctaacatcatcccagtacgggtgttcatgctacaccaggatttgcgattcccccgcatcgcattcttctctagccgggatataaggaccggagaggagctgggattcgattatggggaccggttttgggatattaaatccaagtatttcacgtgccaatgcggatcggagaaatgtaaacacagcgccgaggccattgcactggaacagagccggctcgctagactggatcctcacccagaactgttacctgaactgggctcactgcctcccgtaaacacttag

SEQ ID NO: 116159 - DNA, 897 bp, synthetic construct
  misc_feature 1..897: note = Description of Artificial Sequence: Synthetic coding sequence
  source 1..897: mol_type = other DNA
tgaagtaagagaacacctctgcatgcagcagcgcagaaggggtcagtagagatctgtcatgtcctgctgcaggccggcgctaatattaatgcagttgataagcagcaacgaaccccccttatggaggccgttgttaataaccacctggaagtggcccggtacatggtccaacggggtggctgcgtgtactctaaagaagaagacggtagcacctgcttacaccatgcagccaaaatcggaaatttagaaatggtctcactgttattgtcaactggccaggtggatgtaaacgcacagggccagctcccccccccctccctgccatctcatccacaggatagcggtggctggaccccgattatatgggccgctgagcataaacatattgaagtgatcagaatgctgctcacacgtggcgcagacgtcactctaacagataacgaggagaatatttgtctgcattgggcatcctttaccgggtccgccgccattgccgaagttctattgaacgcccgatgcgatctccacgctgtcaactaccatggggatactccacttcacatagcagcccgtgagtcataccacgattgcgtccttttatttctcagcagaggagcaaaccccgaattaaggaacaaagagggcgataccgcctgggacctcactcccgagcgtagtgatgtctggtttgcactccagttaaaccgcaagctgcgtctcggggtgggcaacagagcaatacgtaccgaaaagattatttgtagggacgtggccaggggttatgaaaacgttcctatcccctgtgtgaacggcgtggatggggaaccttgccctgaggactataagtacatctccgagaactgtgaaacaagcacaatgaacatcgaccgcaattag

SEQ ID NO: 116160 - DNA, 3633 bp, synthetic construct
  misc_feature 1..3633: note = Description of Artificial Sequence: Synthetic coding sequence
  source 1..3633: mol_type = other DNA
atggcagctgccgccggtgctgctgccgcagccgcagccgagggggaagcccctgccgagatgggggctctgctgctcgaaaaagagactaggggagccactgaaagagttcacggctccttaggggacaccccacgctcagaagagacactgccgaaggcaaaccctgattcccttgaacccgccgggccttcaagcccagcctcagtgactgtcaccgtaggagatgagggcgcagacactcccgtgggggccaccccattgatcggagatgagtccgagaatctcgagggtgatggtgacttgcgtggcggccggatcctgttgggacacgctactaaaagtttcccatcctctccaagtaaggggggcagttgccccagcagggctaaaatgtcaatgaccggggcaggcaaatcccccccgagtgtccagtctttggccatgagactgttaagtatgcccggcgcccagggagcggctgcagcaggaagcgaacctcctcccgccactaccagcccagagggccagcctaaggtgcacagggcaagaaagaccatgtccaaacccggcaacgggcagccccctgtgccggagaagaggccgcccgaaattcagcacttccgcatgtccgatgatgtccactccttgggtaaggtaaccagcgacctagctaagcgccgaaaattaaacagcggtggcggactttctgaagaactcggaagcgctagacgctcgggagaggtgactttgaccaagggggaccccgggtctctcgaggaatgggagacagtagtaggtgatgattttagtctgtactacgactcatacagcgttgacgaaagggttgattcagactccaagagcgaagtggaggccctgacagagcagctctccgaagaggaggaggaggaagaagaggaagaggaagaagaagaggaggaggaggaggaggaggaagaggaagaggacgaggagagtggaaatcaatctgatagaagtgggtcgagcggccggcgcaaggccaaaaagaagtggaggaaggacagcccgtgggttaaacccagcagaaagcgccgtaaacgggaaccgccaagagcaaaggagccgaggggagtgaacggggtcggctctagtggacccagcgagtatatggaggtgccactcggcagtttagaactcccaagtgaggggacgcttagccctaatcacgctggggtttccaacgacacaagctccctggaaacagagcggggctttgaagaactgcccctttgctcgtgccgcatggaggcacccaaaatagatcgtatcagcgaaagggccggccacaagtgcatggcaacggaatcggttgatggcgagctgtctggctgcaatgccgcaattctgaagcgcgagacaatgaggccaagctcccgggtggcactcatggtgctgtgcgagacacatagggcccgtatggttaagcatcactgctgtccagggtgtggttacttctgtactgctggcacgtttctggagtgccaccccgacttcagggttgcccatcgttttcacaaagcctgtgtatcccagctcaacggtatggtattttgcccacactgtggtgaggacgccagcgaggcacaggaggtaacaatacctcgcggagacggggtgacacctcctgctggcactgccgcccccgcaccacctcccctgagccaggatgtgccaggccgagcagatacgtcacagccatccgcaaggatgagggggcacggtgaaccacggaggcccccttgcgatcccttggccgatacaatcgatagctccggtcctagcctgaccttgccgaacggcggatgtctctcagccgttgggctgcccctgggccccggacgcgaagctctcgaaaaagctcttgtgatccaggagagcgaacggcgaaagaaactccgttttcaccccaggcagctttacctctctgtcaaacaaggtgaacttcagaaggtgattcttatgttgctggataatttggatcccaatttccaaagtgaccagcaatccaaacggacaccccttcatgctgctgcacagaaaggtagtgtcgaaatctgtcacgttctgctgcaggccggggcaaatatcaatgctgtggataaacagcagcgaacccccctgatggaagcggtcgtgaataatcatctagaagtcgcccgttacatggttcagcggggaggatgtgtgtattccaaagaagaggacggctcaacatgtctgcaccacgctgcgaagataggaaatctagaaatggtgagtctcctgctgtcgaccgggcaggtcgacgtgaatgcccaggactccggcggctggaccccaatcatctgggccgcagaacacaagcacattgaggtcatacgtatgcttctgaccagaggagctgatgttaccctgaccgacaatgaagaaaatatttgtctgcactgggctagcttcaccggcagcgccgccattgccgaggttctgctcaacgctagatgcgacttacatgcagtgaactatcacggtgatacacctttgcatatcgctgccagagagtcttaccatgactgcgtcttgctgtttctcagccggggagcgaaccccgaactgagaaacaaagagggagacaccgcctgggacctcacccccgagagatcagatgtgtggttcgcgctgcagttgaaccgcaagctgaggctaggtgtcgggaaccgcgcaatccgaaccgaaaagataatctgccgcgatgtcgctaggggttatgaaaatgttcctatcccgtgcgtgaacggcgttgacggagagccctgtccagaggattacaaatatatctcggagaattgcgagaccagtactatgaacatcgaccggaatatcactcacctgcagcactgcacatgtgttgacgactgttcttcctccaattgtctgtgcggccagctcagtattaggtgctggtatgacaaggacgggagattgttacaggagttcaataaaattgaaccacctttgatatttgagtgcaaccaggcttgcagctgttggaggaattgtaaaaacagagtggtgcagtctggaattaaggtccgcttgcagctttatcgaactgccaaaatgggatggggcgtgcgtgccctacagaccattccacagggcacctttatctgtgaatacgttggcgaactgatttcagacgcggaggccgacgtgcgtgaggacgattcctacttattcgatttggacaacaaggacggcgaggtatattgtattgatgccaggtattatggaaacatcagtaggtttattaaccatttgtgcgacccaaatatcatccccgtacgagtgttcatgttgcaccaggacctacgctttcctcggatagcattcttctcttctcgtgacattcgaaccggcgaggagctgggctttgactacggtgataggttttgggatataaaatctaaatacttcacctgtcagtgtggttctgagaagtgtaaacatagtgcggaggccattgccctggaacagagccggctggcccggttggaccctcaccccgagctccttcctgagcttggcagcctccctcctgtgaacacctag

SEQ ID NO: 116161 - DNA, 897 bp, synthetic construct
  misc_feature 1..897: note = Description of Artificial Sequence: Synthetic coding sequence
  source 1..897: mol_type = other DNA
tagagcaagaggacacccttgcacgccgcagcccaaaaaggatccgtggaaatttgtcatgttctcctacaggctggggcaaatatcaacgcagtggataagcagcagagaaccccgctgatggaggccgtcgtgaataatcacttggaagttgcaaggtatatggtgcaaaggggaggctgcgtctactccaaagaggaggacgggtctacatgtctgcaccacgcggcaaagataggtaacctcgaaatggtctcattgctgttgtcaaccggtcaggtggacgtgaacgcccaaggtcagttgccccctccgtctctcccatcacatccccaagactctggtggttggactcctatcatttgggccgctgaacacaagcacattgaagtaatcagaatgctgcttacccggggcgccgacgtgacacttaccgacaatgaggagaacatctgcttacactgggcctcattcacaggctcggccgctattgctgaagtactgctgaacgcccggtgtgatttgcatgccgtaaactaccatggagacacacctctgcatatcgccgcccgcgagagctaccacgattgtgtgctactgttcctgagtagaggcgccaaccccgagctccgtaacaaagagggcgacactgcgtgggacctgacaccagagcggtcggacgtgtggttcgcccttcagctcaacaggaagctgagactaggcgtagggaatagagccattcgcaccgagaagatcatctgcagggacgtcgcgcgaggctatgagaatgtaccaataccttgtgtcaacggtgtggatggagagccgtgccctgaggattacaaatacatttccgagaactgcgagacctcaacaatgaacatcgacagaaactag

SEQ ID NO: 116162 - DNA, 3531 bp, synthetic construct
  misc_feature 1..3531: note = Description of Artificial Sequence: Synthetic coding sequence
  source 1..3531: mol_type = other DNA
atggccgctgctgcaggagcagccgctgcagccgcagccgagggagaggcgccagccgagatgggggccttgctgcttgaaaaagaaacacggggggcaaccgaaagggtgcacggaagcctgggcgacaccccaagatctgaagaaactttaccaaaagccacacctgacagtctggaaccagccggcccctccagtcccgcttccgtgacagtaactgttggcgacgaaggagccgatacacctgtgggggccacccctctgataggagatgagtccgagaacctcgagggggacggcgacctgagaggcgggaggatcctgcttggccacgccacaaagtcattcccttcctcccccagtaaggggggcagttgtccaagcagagccaaaatgagtatgacaggggccggcaaaagccctccaagtgtgcagtcactggctatgaggctcctatccatgcctggtgcccaaggcgccgcggctgctgggagtgagcctcctcctgctaccacttcacccgaggggcagccaaaagtccaccgtgccaggaaaaccatgtccaaaccaggtaacggacagccgccagtacctgagaagcgaccacccgagatccaacactttcgaatgagcgacgacgttcacagtctgggaaaggtcactagcgacttggcaaaaaggcggaagttaaactccggggggggattgtctgaggagctagggtctgcacgcagaagcggcgaggttacactaactaagggggatcctggcagtctggaggagtgggagaccgtggtgggtgacgacttctctctgtattatgatagctacagtgtggatgaaagagtcgatagtgactcaaaatccgaagtggaagctctaaccgaacaactgagtgaggaggaagaagaggaggaagaggaagaagaagaagaggaggaagaagaggaggaagaagaagaagaggaggacgaggaaagcggcaaccagtcagacaggtctggatcttctggccgcaggaaggcgaagaagaagtggcggaaagattctccatgggtaaagccaagtcgcaagaggagaaagcgcgaaccgccacgcgcaaaagaacctagaggtgtttctaacgacactagctcactagagacagaacgagggttcgaagagttgccactgtgcagttgccggatggaggcccccaagatcgatcgaatctctgagagggccggacataaatgcatggccaccgagtccgtagacggggaattatccggatgcaacgcagcaatactgaagcgtgagactatgagaccatcctctagagtcgctctgatggtgttgtgtgaaacacatcgcgccagaatggtgaaacatcactgttgtcctggctgtggctacttctgcaccgcagggacgtttctggaatgccatccagatttcagggtggctcacaggttccataaggcttgcgtttctcagctcaacggcatggtgttttgcccccactgcggagaggacgcttccgaggcgcaggaagtcactattccaagaggagatggagtcacccccccagctggcacagccgctcctgcccctcctcccctgtcccaggatgtgccaggccgggcagatacctctcagccaagcgctcggatgaggggccatggggagcctaggcggcccccttgtgacccgcttgcggacaccatagacagttctgggccttcgctgactctcccaaatgggggttgcctgtctgcggtgggtttaccgctggggcccggcagggaggccctcgagaaagctctggttatccaggagtcagaacgtagaaaaaaactgagatttcacccaaggcaattatacctgagcgtcaaacagggcgagctgcaaaaggtcattttgatgctgttggacaacctcgatcccaatttccagtcagatcagcagtctaaaagaaccccactgcacgccgccgctcagaaggggagtgtagaaatctgtcatgtgctccttcaagctggggcaaatattaacgccgtggacaagcagcaaaggacccccttgatggaggctgtggtgaataatcatctggaggtggccaggtacatggtgcaacgcgggggctgtgtctactctaaagaagaggatggtagtacatgcttgcaccatgccgccaagattggtaacctggaaatggtgagcttactgttatctacaggacaggtggatgttaacgcccaggattccggaggttggactcccattatctgggctgccgaacataagcatatcgaggtcatccgcatgctgctgacgcgcggggccgatgtcacactgactgataatgaggagaacatttgcctgcattgggctagctttacaggatctgcagcaattgcagaggtattattgaacgccaggtgtgacctgcatgcagtcaactaccacggcgacacgccactgcatatagccgccagagagtcctatcacgactgtgtcctactgtttcttagcaggggggccaacccagaactgcgcaataaagagggagacactgcatgggatttaactcccgaaaggtctgatgtgtggttcgctctgcaacttaaccgaaagctgcgcctgggggttggaaatcgggcgatccggacagagaagatcatctgccgggatgtggcccgtggctacgagaatgtcccaattccatgtgtcaacggcgttgacggggagccttgccctgaggattacaagtacatatcggagaactgtgagactagtaccatgaacattgatcggaacatcacccaccttcagcattgtacttgcgtcgacgattgctcctcctctaattgtctctgcggacaactatcaattagatgctggtacgacaaggatggccgacttctgcaggagtttaataaaatcgagccaccattaattttcgaatgtaatcaggcttgctcctgttggcggaactgcaagaaccgggtggtccagagtggaatcaaggtgcgactgcagttataccgaaccgctaagatgggatggggggtgcgggccctgcagacgattcctcaagggacgtttatctgcgaatatgtgggcgaactgatcagtgatgctgaagcggacgtgcgggaggatgactcttatttgttcgacctggacaataaagacggggaggtgtattgcattgacgcccgttactacggcaacattagtaggtttattaaccacctgtgtgatcctaacatcatccccgtaagagttttcatgctgcatcaagatctcagatttccaaggatcgcctttttcagcagcagggacatccgaaccggtgaagaactgggcttcgattacggagatcgcttttgggatattaagagcaagtattttacgtgtcagtgcgggtccgaaaaatgcaagcactcagctgaggctatcgcccttgaacaaagcaggcttgctcgactggacccacacccagaactgctgcctgaactggggagcctcccacccgtgaatacctag

SEQ ID NO: 116163 - DNA, 3804 bp, synthetic construct
  misc_feature 1..3804: note = Description of Artificial Sequence: Synthetic coding sequence
  source 1..3804: mol_type = other DNA
atgcggggtctgccacgggggcgaggcctcatgcgcgcccggggcagaggaagggccgcccctccggggtctaggggccgtggccggggcggaccccaccggggtaggggcaggcccagaagtctcctgagtctgccccgcgcccaggcttcatggacaccacagcttagcaccggtctcaccagtcctcccgtaccttgtctcccatctcagggagaggctcccgcagagatgggggccttgctgctggaaaaggagactaggggggcgaccgagcgtgtacatgggtccctgggcgataccccacggtcagaagagactttacctaaggctacccctgactccttggagcccgctggcccatcctctccggcaagtgtcaccgtgaccgtgggcgacgagggcgcggacacccccgtgggcgctaccccactgataggcgatgagtccgaaaacctggaaggtgatggcgatttaaggggcggccgcattctcctgggccatgcaacaaagtcatttccctctagcccctcgaaaggcggaagctgtccgagtcgcgctaagatgtctatgacaggagctgggaaaagccctccttcggttcagtctcttgctatgagacttctgagcatgcccggcgcacagggtgcagcagctgctggaagtgagcccccacccgctactacgtccccagaggggcagccaaaagtccacagggcacggaagactatgagcaagccaggcaacgggcaaccacctgtgcctgaaaaacgccctcccgagatccaacactttcgcatgtctgacgacgtgcacagtctcgggaaggtgacatctgatttagccaagcgtagaaaactgaattctggtggtggcctgtctgaagagttggggagtgcacgacgaagcggtgaggtgaccctgacgaagggcgacccagggagcctggaggaatgggagaccgttgtgggcgatgacttttctctttattatgattcgtattctgtggacgagcgggtggacagcgactcaaaatctgaggtcgaggccctgacagaacagttgtctgaggaggaagaagaggaagaggaagaagaggaagaggaggaggaggaggaggaggaggaggaagaagaggaggacgaagaaagtgggaaccagtccgatagaagtggctcgtccggccgtcgcaaagccaaaaaaaaatggcgtaaggatagcccttgggtgaagccctcccgaaagcgtcgaaagagggagcccccccgcgctaaagagcctcgaggcgtcaacggggtggggtcaagtggcccgtccgaatatatggaagtgccgctggggagcttggagctgccatctgaaggcactctgtcccccaaccacgccggggtgagtaacgatactagtagtctggagacggagaggggctttgaagaacttcccctgtgctcgtgccgcatggaggcacctaagatcgatcgaatcagcgaacgagcaggacataagtgtatggcaacagagtcagttgacggggaactaagcggttgcaacgccgctatactgaagcgcgagaccatgcgcccttcgagccgtgttgcactaatggtattgtgtgaaacacacagggctcggatggttaagcatcattgttgccctggctgtggttacttttgtaccgccggcacatttctggagtgccaccctgattttagagtcgcacacagatttcacaaggcctgtgtcagccaacttaacggaatggttttctgcccccactgtggagaggatgcttctgaggcccaagaggttacaattccaaggggagatggcgtcacccccccagcggggactgctgcaccagctccacctcctctgagccaggatgtcccaggaagggctgataccagccaaccgagcgctaggatgagggggcacggggagccccggcgaccgccatgcgatccgctggcagatacaattgactccagtggcccttccctcacactgcctaacggcggttgcctgagtgccgtgggcctgccgttgggtcccggacgggaggcccttgaaaaggctctcgtgatccaggagtccgaaagaaggaaaaagcttcgatttcaccctcgtcagctttatctgagcgttaagcagggagaactgcagaaagtgattcttatgctcttggataaccttgatcccaacttccaatcagaccagcagtcaaagcgaacccccctgcatgccgccgcccagaagggttctgtagagatttgccacgtgctgctccaggctggtgcgaacatcaatgccgtcgataagcagcagcgtaccccacttatggaggccgtggtgaacaaccacctcgaggtagcacgctacatggtacaacgtggtgggtgtgtctattctaaagaggaggatggttcaacctgtctccatcatgctgcgaaaatcggcaatctcgaaatggtctctctgctgctgtccacaggccaagtagacgtgaatgcacaggacagtggagggtggactccaattatatgggctgccgagcataagcatatcgaggtgatacgaatgctgttgacaagaggggccgatgtgactctgacagataacgaagagaacatatgtcttcattgggcctccttcacgggatccgctgcgattgcggaggtgctcctcaacgctagatgtgatttgcatgccgtaaactaccacggcgacacccctctacatatcgccgccagagagtcttatcacgattgcgtgttgttgtttctgtcccgaggcgcaaacccggaactcaggaataaagagggggacacagcctgggatctgacccccgagcgcagtgatgtctggtttgctctacaactcaacaggaagcttcgccttggggtcggaaaccgtgctatccggaccgaaaagatcatctgccgagatgtggcccggggttacgagaatgtcccaataccctgcgtgaatggagttgacggcgaaccttgccccgaagattacaaatacatctctgaaaattgtgagacctctactatgaacattgaccgaaatataacacacctccagcattgcacatgcgtggacgattgctccagtagtaattgcttgtgtgggcaactaagtattcgttgctggtacgataaagacggcaggctgctgcaggaatttaacaagatcgagccgcccctgatttttgagtgcaaccaggcttgtagctgctggcgcaattgtaagaaccgggttgtgcagagtgggatcaaagtacgtctccaactgtaccgcacagctaaaatggggtggggcgtgcgagccctgcaaacaattcctcagggaactttcatttgcgagtatgttggagaattaatttctgacgcagaggccgatgtgcgcgaagatgatagttacctcttcgatctagataataaggatggtgaagtctactgtattgacgcgagatattatggaaatatatcacgcttcataaatcacctctgcgatcccaacattattcctgttagagtcttcatgcttcaccaggacctgaggttcccgcgcatagcgttcttttcttcccgggacattcgtactggcgaggagctcgggtttgattatggagacaggttttgggacatcaaatccaagtactttacatgtcaatgtggctctgagaaatgcaagcacagtgctgaggcgattgccttggaacagtccaggctggcaaggcttgatcctcatcccgagttgctgcccgaacttggcagcctaccacccgtgaatacctag

SEQ ID NO: 116164 - DNA, 3633 bp, synthetic construct
  misc_feature 1..3633: note = Description of Artificial Sequence: Synthetic coding sequence
  source 1..3633: mol_type = other DNA
atggccgctgctgctggcgctgccgccgccgcggcagcagagggagaagcaccagctgagatgggagctctgctgctagaaaaggagacgcgaggagctacggagcgagtccatggttcattgggtgacactccccggagcgaggaaacactgccaaaggctaatcccgactccttggagcctgccggcccatcttcccccgctagtgtgactgtgaccgtgggggacgagggagccgatacacctgttggagccacccctctgatcggagatgagagcgagaatctggaaggagacggtgacctgcgcgggggccgcatactcttgggtcacgctacaaagtcattcccttccagtcctagcaaaggtggcagctgtccaagcagggctaaaatgtccatgaccggtgcaggaaagtctccgccctctgttcagagcttagctatgcgtctactgtccatgcccggagctcagggagcagccgctgccggttcagaacctccacccgccaccaccagccctgagggccagcctaaggtccatcgagcccggaagaccatgtctaaacctggcaacggccagccacctgttccagaaaaaagaccgcccgaaatccagcactttaggatgtcagatgatgtgcactctctcgggaaagtgacctctgatctggctaagaggcgtaagctcaactcgggtgggggcctgtcagaagaactggggagtgcacgaaggagcggggaggtaactctgaccaaaggagatcccggctccctggaggagtgggagacagtagtgggcgatgacttctctctttattacgattcgtacagtgtggatgagagagtagactcagattctaaatccgaggtagaggcgctgacggagcagctcagtgaggaggaggaggaggaggaagaggaggaagaggaggaagaagaggaggaagaggaagaggaggaagaggaagatgaagagtcaggaaaccaaagcgaccgctctggtagctccgggcgacggaaggccaagaaaaaatggcgcaaagacagcccatgggtgaagccaagcaggaagcggaggaagcgagagccacctagggcgaaggagccaagaggggtgaatggggtcggctccagtgggcccagcgaatatatggaggtacccctcggctcacttgaactgcctagtgaaggaaccctctcccctaaccatgcaggagtgtctaatgacacaagtagtctggagactgagcggggcttcgaggagttgccactctgctcatgcagaatggaagcccccaagatcgatcgcatctcggaacgcgcaggccataagtgcatggccacagaaagtgtcgacggcgagctgtcaggctgtaatgctgctatccttaaacgtgagacaatgagaccttcaagcagagtcgcactgatggtgctctgcgagacccacagggctcgaatggtcaagcatcactgctgtccaggctgcggatacttttgcacagccgggacgttcctggaatgtcatccagactttagagtggctcatcggtttcacaaggcctgcgtttctcaacttaatggaatggtattttgcccacattgcggagaagacgcctccgaagcgcaggaggtgacaatccctagaggagatggtgtaacgcctcctgccgggacggccgccccagccccacctcctctgtctcaggacgtacccggtagggcagacacctctcagcctagcgcccgcatgagaggacacggcgaaccacggagaccgccgtgcgaccctctagctgataccatcgacagtagtggcccatctttgacactgcctaatggcggatgcctgagcgccgtgggtctaccgctgggtccgggccgagaagcgttggaaaaggcactcgtcatccaggagtccgaacgaagaaagaaacttcgattccacccaagacagctgtatctgtctgtgaaacagggggaattgcaaaaagtgatacttatgctcttggataatctggaccccaactttcagagtgaccaacaatcgaagaggacccctcttcacgccgcagcccagaaaggcagcgtcgagatctgtcacgtgttactgcaggcaggcgccaatataaatgccgtggataagcagcagaggacccctctcatggaagctgtcgtgaataatcacctcgaggtggctagatacatggtccaacggggcggatgtgtctattccaaagaggaagatggctccacatgtctccaccatgctgcgaagatcggcaacctagagatggtctctctgctgttgtcaacaggacaggtagatgtgaacgctcaggattctggtgggtggacgcccattatttgggcagccgagcacaaacacattgaggtgattcggatgttgctcacacggggggctgatgtgacactgaccgacaacgaggaaaacatctgtcttcactgggcatcatttaccggctccgctgccatcgcggaggtcctgctgaacgcgaggtgcgaccttcatgcagtgaattaccatggcgatacacccctgcatattgctgcaagggagagctatcacgactgtgtgctgctgtttctgtcacgcggtgcaaatcccgagcttaggaataaggagggcgacaccgcctgggacctaacaccggagagatcagatgtttggtttgcgttacaactcaatcgaaagctgcgtctgggggttgggaatagagccatccgcacagaaaagatcatatgcagggatgtcgcccgcgggtatgagaacgtacccataccatgtgtcaatggtgttgatggcgagccatgtcccgaggactataagtacatcagcgaaaactgtgaaacttcaacaatgaacatagaccggaacatcacccacctccaacactgtacctgtgtagatgactgttcctcatccaactgcctatgcggacagttgtctattcggtgctggtatgacaaagatggacgcttgttacaggagttcaacaaaattgaaccaccacttatatttgaatgcaatcaggcatgctcctgctggaggaactgtaagaaccgcgtggtccagagcggcattaaagtgcggttacagttatacaggactgctaaaatgggctggggcgttcgcgctctgcaaactattccgcagggaacctttatatgtgagtacgtgggagaactgatcagtgacgcagaagcggacgtcagggaggacgattcgtacctgtttgatctggacaataaagatggcgaagtgtactgtatcgacgcccgctactatggcaacatctctagattcattaaccatctgtgtgaccccaatatcattcctgtgcgcgttttcatgcttcatcaggacctgcgttttcctcgaattgccttcttctcatcacgcgacatccgcactggagaagagctcgggttcgattatggtgataggttctgggacattaaatctaaatacttcacctgtcaatgcggatcagaaaaatgtaaacattcagccgaagctatcgcactcgaacagagccgcctggccaggcttgacccgcaccccgaattgctgccagaactgggttcactgcctcctgttaatacatag

SEQ ID NO: 116165 - DNA, 897 bp, synthetic construct
  misc_feature 1..897: note = Description of Artificial Sequence: Synthetic coding sequence
  source 1..897: mol_type = other DNA
taatctaaaagaacgccactgcacgcagcagcacagaaaggctccgtggagatctgccatgtcctgctccaggcaggcgctaatattaacgccgtggacaaacaacagcgcactccgctgatggaagcagtcgtgaataaccacctagaagtggcccgttatatggttcaacgaggcggctgtgtctattctaaggaggaggacgggtcgacttgcctgcatcacgcagcgaaaatcgggaatctcgaaatggtgagcttgctcctgagcaccggacaggtagacgtgaacgcgcagggacagcttccaccacccagtctcccttcgcacccccaggatagtggtggctggaccccaattatatgggccgcggagcataagcacatcgaggtgattaggatgttgctgactaggggggctgacgtgacactcaccgataatgaagagaatatctgcttacattgggcctcttttaccgggagcgcggccatagccgaggtgcttctgaatgcccggtgtgatctgcacgccgtgaattaccacggcgatacgccattgcacattgccgccagagagagttaccacgactgcgtgctgctgttcctgtcgcggggggccaatcctgagctgcgcaacaaggagggggacactgcctgggaccttacccccgagcgctctgacgtttggttcgccctgcaactgaaccggaagctgcgcctaggcgtgggaaacagagcgataagaaccgagaaaattatttgccgcgatgtggcccgcggctatgagaatgtcccaatcccttgtgttaacggcgttgacggggaaccttgccctgaagactataagtacattagcgaaaactgtgagacctctaccatgaatatagatcgcaactag

SEQ ID NO: 116166 - DNA, 2769 bp, synthetic construct
  misc_feature 1..2769: note = Description of Artificial Sequence: Synthetic coding sequence
  source 1..2769: mol_type = other DNA
tcagaggtcgaggccctgaccgaacagctgagcgaggaggaagaggaagaagaggaggaggaggaagaggaagaggaagaggaggaggaagaggaggaagaggaagatgaagaatctggaaaccagagtgaccgctccggatccagcgggcggcggaaggcaaaaaaaaagtggcgaaaggactcaccctgggtgaagcctagtaggaagcgcagaaaaagggaacctccgagagcgaaggaaccaagaggcgtgaatggagtcggatcatccgggccgtctgaatacatggaggtcccgctggggtcgctggagctcccgagcgaagggaccctatctccgaatcacgctggcgtgagtaatgacactagctcccttgaaacagaacggggttttgaggagctccctctctgttcgtgtcgtatggaggcccctaagatcgatcgaattagcgaacgtgctggccataaatgcatggccactgagtcggtcgatggagagctgagtgggtgcaacgccgccatcctgaagagggaaacgatgagaccctcctctcgggtggccctcatggtgttgtgtgaaactcatcgtgccaggatggtcaaacatcattgttgcccaggatgcggttatttttgtaccgctggcacttttttagaatgccatcctgattttcgagtggcccatcgtttccataaggcttgcgtcagtcagctgaatgggatggtcttttgtcctcactgtggcgaagatgcaagtgaagcccaggaggtgacaataccacgtggcgacggggtaacaccaccagctggtacagcagcacctgccccccctccactgtcacaagatgtccccggccgcgctgacacttcgcagcctagcgctcggatgcgtggacatggcgaaccaaggcggccgccctgtgaccccctcgccgataccatcgattcctccgggccgtcactgactctgccaaatggtggctgcctttcagctgtcgggcttcctctcgggccgggaagagaagctcttgagaaagccctggtgatccaggaatcagagcgacgcaaaaaactcaggttccaccccaggcaactgtatctgtcggtaaaacagggagaactgcagaaagtgatcctgatgcttcttgataacctagaccctaatttccagtctgatcagcagtctaagaggacacctcttcacgccgctgcccagaaggggtccgttgagatctgtcacgtgctacttcaggcgggagcaaacattaatgcagtagataagcagcagcgtactcctctgatggaggccgtagtgaacaaccatctggaagtcgctcggtatatggtgcagcggggtggctgcgtttacagcaaggaggaggatggtagcacctgcctgcatcacgctgctaagattggcaatctagagatggtgtccctgctcttatccaccggccaggtagatgtgaacgcacaggacagtgggggatggactccaataatctgggcagccgaacacaaacacatagaagtaattcgcatgttgctgaccaggggagcagacgtgactctgacagataatgaagagaacatttgcctgcactgggccagcttcacggggagtgctgccatcgcggaggtcctcctaaacgctagatgcgatctgcacgcagtgaattatcacggcgacactccactccatatcgcagctagggaaagttaccatgactgcgtcttgctcttcctttctaggggtgccaaccctgaactcaggaataaagagggtgacaccgcctgggatctgacacccgagcggagtgacgtgtggttcgctctgcaacttaatcggaagcttcgtctaggggtcggtaaccgcgcaatccgaacagagaagatcatatgccgcgacgtcgcaaggggctacgaaaacgtcccgatcccctgtgtgaatggggttgacggagaaccttgcccagaagactataagtatatctccgagaattgtgaaacttccaccatgaacattgatcgcaatatcactcatttacagcactgcacatgcgtcgatgattgttcatcaagcaattgcttatgtgggcagctctcaatccgatgctggtacgacaaagatggccggctgctgcaggaatttaacaagattgaaccacccctcatttttgaatgtaaccaggcttgtagctgttggagaaattgcaagaatcgggtcgtgcaaagtggtatcaaggtgcggctgcagctatatcgcaccgcgaaaatggggtggggagtgcgggccctccagactatcccacagggaacatttatctgtgaatatgtcggagaactgattagcgatgctgaagcagatgtgagggaggatgattcatacctttttgatctggacaataaagacggagaagtatactgcattgacgctcgttattatggtaacatctcccggtttattaaccatttgtgtgaccctaacatcatccccgtcagagtctttatgttacatcaggatctgaggtttcctcgtatcgctttcttcagcagcagggacatacgcactggagaggaactcggctttgattatggcgaccgcttctgggatatcaaatcaaagtacttcacctgtcaatgcggatccgagaaatgtaagcacagcgccgaggcaatcgccctggaacagtcacgtctggctcgccttgacccgcaccccgaactcctccccgagctggggtccctgccaccggttaatacatag

SEQ ID NO: 116167 - DNA, 3702 bp, synthetic construct
  misc_feature 1..3702: note = Description of Artificial Sequence: Synthetic coding sequence
  source 1..3702: mol_type = other DNA
atgcgggggctgcctcgtgggaggggtcttatgagagcaagaggcagaggccgtgccgctccaccaggaagccgcggcagagggcggggaggaccccatagagggcgtggtcgcccgcggtctttgctcagccttcctagggcccaagcaagctggaccccccagctctctacgggcttaacctctccacccgtgccctgcttacccagccaaggagaagcccccgccgaaatgggggcactcctgcttgagaaagagactaggggggctacagaacgagtacatgggtctcttggggacacccccaggtccgaagagactttgcctaaggcaaatcccgacagcctggaaccagctggccccagtagcccagcctccgtgaccgttactgttggagacgagggtgccgatactcctgtgggggctacacccctgattggtgatgaatcagaaaacctggaaggagacggggaccttaggggaggacggatcctactgggccatgctacaaagtcgttcccatcaagtcctagtaaaggcggctcatgcccctcccgcgcgaagatgagcatgacaggcgccggaaaaagccctcctagtgttcaatctctggccatgcgtctgcttagcatgccaggcgcccaaggcgccgctgcggcaggctccgagccaccccctgcgacaaccagcccagagggccaacctaaggtccacagggccaggaagactatgagtaagcccggtaacgggcagcctcccgtgccagagaaaagacccccagaaattcaacatttcaggatgagcgacgatgtccattccttaggcaaggtgactagtgacctcgctaaaagacgcaagctcaactccggcggaggcctgtcagaggagcttggcagtgcacgcagaagtggggaggtgactttgactaaaggtgacccaggctctctcgaagagtgggagaccgtggttggcgacgatttttcactttactatgactcctatagcgtggatgagcgcgtcgactccgactcaaaaagcgaggtggaggccttaaccgagcaactatctgaagaggaggaggaagaagaagaagaggaagaggaagaggaagaggaggaagaagaagaagaagaagaggaagatgaggaatcaggcaatcaatcagaccgatctggttccagtgggcgtaggaaagcaaagaagaaatggcgcaaggattcaccatgggttaagccttcccgaaaaaggcgcaagcgcgagcctccacgggcgaaggagccacggggagtgagcaatgataccagcagtctggagacagagcggggcttcgaagagctcccattatgttcttgtcgtatggaggctcccaaaattgatagaataagcgagcgcgccggtcacaaatgcatggctaccgaaagcgtggatggggagctttccggatgtaacgccgctatcctcaagcgcgaaacgatgcgcccctcctccagagttgcattaatggtcctgtgtgagactcatagggccagaatggttaagcatcattgctgtccaggctgcggatatttttgtactgctgggacctttctcgaatgtcacccagattttcgggtggctcataggtttcataaagcctgtgtgagtcagctcaacggcatggtcttctgtcctcattgtggcgaggacgcatcagaagcccaggaggtcaccattcctaggggggatggcgtgacaccacctgctggcactgccgcacctgcccccccaccactgtctcaggacgtgcccggaagggctgatacttcccagccatcagccaggatgagaggacatggagaacctaggagaccaccctgcgaccccctagcagataccatcgattcgtctggaccttccctgaccctccccaatggaggatgcctatccgccgtgggactgccactaggccctgggcgggaggcactcgagaaagccctagtaatacaggaatctgagaggaggaaaaaactgaggtttcatccaaggcagctgtatctgagcgtcaaacagggcgaactccagaaagtcatcctgatgctcctcgataatctggatcctaactttcaaagcgatcagcaatctaaacgcactcctttgcacgctgctgcgcaaaagggatccgtggagatctgtcatgtcctgctgcaggcgggagcgaatatcaacgccgtggataagcagcaaaggacccctctgatggaagctgtcgttaacaaccatctggaggtggcaagatacatggtgcagagaggaggctgtgtgtatagtaaagaagaagatggctccacttgcttacaccacgccgctaagatcggaaaccttgagatggtgagtttgctcctatcaaccggtcaagtagacgtgaacgcgcaagacagtggcggttggacacctattatctgggcagccgaacacaaacatatcgaagtcatccggatgctgctcacccgaggagctgacgttactctgaccgacaatgaggagaatatctgtcttcattgggctagctttactggaagtgctgccatcgcggaggtgttgctgaacgcaagatgcgacctgcacgccgtaaactatcacggcgacactcccctccacatagccgcacgggaatcctaccacgactgcgtccttctattcctttctagaggcgccaatcctgaactgcgaaacaaagagggtgacactgcctgggacctaacaccagagcgatctgatgtttggtttgccctccagctgaacagaaaactgcggttaggcgtgggcaaccgggccattcggactgaaaaaatcatttgtagggatgtggcacgtggctatgaaaatgtgcccattccatgcgtgaatggggttgatggggagccctgcccagaggactataagtacatctcagagaattgcgaaacttcgaccatgaacattgatagaaatattactcaccttcagcactgcacttgcgtcgatgactgcagcagctcaaactgtttatgtggacagctaagtatccgctgttggtatgataaagatgggcgcctgctacaagaatttaataaaatcgagccccctctgatcttcgaatgcaaccaggcgtgtagctgctggcgcaactgtaaaaacagagtggtccagagtggcatcaaagtccgattacagttgtacagaaccgcaaaaatgggttggggagtgagggcactacagactattccccaggggacctttatctgcgagtacgtcggcgaacttatttcagatgccgaggccgacgtgcgagaggatgacagctatctgtttgatcttgataacaaagacggggaagtgtattgtatcgatgctcgctactacggcaatatatcacgatttataaatcacctgtgcgacccaaacattatcccagtcagggtctttatgctccaccaagatctgcgatttcctcgtatagcttttttcagttccagggacatacgtactggagaagagttgggtttcgattatggggatcgtttctgggatattaagagtaagtacttcacttgtcagtgcggttctgagaagtgtaaacatagcgccgaggccatcgccttggagcagtcacgtctggccagactggatccccatccggaactgctgccagaactgggttctctgccacccgtgaatacttag

SEQ ID NO: 116168 - DNA, 3702 bp, synthetic construct
  misc_feature 1..3702: note = Description of Artificial Sequence: Synthetic coding sequence
  source 1..3702: mol_type = other DNA
atgcggggcttgccacgaggcaggggcctcatgcgggcccgaggacgaggcagggccgctcctcccggatccagaggcagaggacggggggggcctcaccgcgggcgcggccgccccagatccctactgagtttgccccgggcacaggcgtcatggacaccgcagctctcgaccgggctgaccagtccgcctgtaccgtgtttaccgtcccagggagaagctcccgccgagatgggtgccttattattagagaaggaaacacgtggtgctacggagagagtacacggatccctgggagacacacccagaagcgaggagaccctaccaaaggccaccccggactcactggaacctgctgggccttccagtcccgcaagcgttacagtcactgttggtgatgaaggggctgacactcccgttggggctacaccacttattggcgacgagtctgaaaacctggaaggggacggggacctgagaggcgggagaatcctgctgggacatgccaccaagagctttccctctagcccgtctaaaggcggatcttgtcctagtagggccaaaatgtcaatgacaggtgcagggaagtctccaccctcagttcaatctttggctatgcggctcctgagtatgccgggtgcacagggcgcggcagcggcaggatctgagcccccgcctgccactacttccccagaaggacagcctaaagtgcacagagcaaggaaaaccatgtctaaaccaggcaacggccagcctcccgtcccagaaaaacgtccccccgagatacaacatttcaggatgagcgacgatgttcattcccttggaaaggtgacctcagacctcgccaaacggagaaagctaaacagcgggggcggcctgtcagaggagctgggaagcgcgcgacggtcaggtgaggttacgctgactaagggcgacccgggcagtctggaggagtgggaaacagttgtgggcgatgacttttcattgtattatgactcctactcagtcgatgagagagttgacagcgattcaaaatcagaggtcgaagcactaacagagcagctctctgaagaagaagaagaggaggaggaagaggaggaagaagaagaggaagaagaagaggaagaggaagaagaggaggacgaggaaagtggcaatcagtctgatcggtccgggagctctggtcgtcgcaaggccaagaaaaagtggcgaaaggatagcccctgggttaaaccttcccgcaagcgtagaaagagggagccgccaagagcaaaagaacctagaggagttagtaacgatacgtctagtctggaaaccgaaaggggattcgaagaactgccgctctgttcatgtcggatggaggctccaaaaatcgaccgtatctcggaaagggcaggacacaagtgcatggccacggagtcagtagatggcgaactgagcggatgtaacgccgccatcctgaagagagagaccatgcggcccagctcccgggtggccctcatggtcctgtgtgagacacacagagcaagaatggtgaagcaccactgctgtcccggatgtggatatttctgtactgccggtaccttcctggagtgtcaccccgattttagagtagcacatcggtttcacaaggcttgcgtctcacagctgaacgggatggtgttctgtcctcattgtggcgaagacgcttctgaggctcaggaagtcacaattcctcggggagatggcgttaccccaccagcgggaacggcggctccggcacctccccccctctctcaggacgtgcctggccgtgctgacacgtcgcagccttccgccagaatgagagggcatggagagccccgcaggcctccctgtgaccccctggcagacactatcgatagctcagggccttccctgaccctgcccaacggcgggtgtctctccgccgtgggtctgcctcttggcccaggccgggaggcactcgaaaaagccctggttattcaggagagcgaacgtaggaaaaaactaaggttccatccccggcaactttatctgagcgttaaacaaggcgagctgcagaaagttatcttaatgctgctcgataatctggacccaaatttccaatctgatcagcagtcaaaaagaacccccttacacgccgctgctcagaaagggagtgtcgagatctgccacgtcttgctccaggctggggccaatattaacgcggtggataaacagcagcgaacacctctaatggaggcggtggtgaataaccatctagaggtggcacgctacatggtgcagaggggtgggtgtgtctattcaaaagaggaagacggtagcacttgccttcaccacgcggctaagatcggcaacttggaaatggtctcgctgctgttgtcgactggtcaggtcgacgtcaatgcacaggacagtggagggtggacgcctattatctgggctgctgaacataagcatatcgaagtgatacgtatgttgctgactcggggcgccgatgtgacactcactgataatgaagagaacatttgccttcactgggcaagtttcacgggttctgctgccatcgcagaagtgctcctgaatgcaagatgcgatctccatgctgtcaactaccatggcgacacacctcttcacatagcggctcgcgaatcgtaccacgattgcgtactgctgttcctcagcaggggcgctaatcccgaacttcgcaacaaggagggcgataccgcgtgggatctgaccccagagcgatctgatgtgtggttcgccctccaactcaaccggaaactgcggcttggcgtcggaaaccgggccatcagaactgaaaagatcatctgcagagacgtggctcgcggctacgagaacgttccaattccgtgtgtgaatggggtcgatggggaaccttgcccagaggactataagtacatctcagagaattgcgagactagcactatgaacatcgaccggaacatcactcacctgcaacattgcacgtgcgttgacgactgtagcagcagcaattgtctatgtggccagctttcaattcggtgttggtacgataaggacgggcgactactccaggagttcaacaagatcgaacctccactaattttcgaatgcaatcaggcctgtagctgttggaggaactgcaaaaaccgtgtggtgcaatcgggcatcaaggttaggctacaattgtaccgcactgctaaaatgggatggggagtgcgcgctcttcagactatccctcaagggaccttcatctgcgaatatgtcggagaattgatctcagacgccgaggcagacgtaagggaagatgattcatatctttttgacttagataataaggacggtgaggtatactgtattgatgcccggtactatggtaacatatcgcggtttattaatcatctgtgtgatccaaatatcattcctgtccgcgtgtttatgttgcaccaagaccttcggttcccaagaatcgctttcttttccagcagggatatacggacaggagaggagctgggtttcgattatggggaccgcttctgggatatcaagtctaagtacttcacttgccagtgtggttctgaaaagtgtaagcacagcgctgaagcaattgctcttgagcaaagtagactggcccggctcgacccacatcccgaattgctgccagagctcggcagccttccacctgtgaacacctag

SEQ ID NO: 116169 - DNA, 3633 bp, synthetic construct
  misc_feature 1..3633: note = Description of Artificial Sequence: Synthetic coding sequence
  source 1..3633: mol_type = other DNA
atggctgccgccgcgggcgcagccgctgccgcagcagccgagggcgaagcgcctgctgagatgggagccctgctcctggaaaaggaaacgcgcggggcaaccgagcgcgtgcacggctccttgggcgacactccccgtagcgaggaaaccttgcccaaggccacacctgattctttggaacccgccgggcccagctcaccagcaagtgtgacggttacagtgggagatgagggtgccgatacaccagttggggccaccccactcatcggggacgagagcgaaaatctcgagggtgacggagatttaagagggggccgcatcttactgggacatgccaccaaatccttcccctcgtccccgtcaaaggggggaagctgccctagtcgagcaaagatgtctatgaccggcgcggggaagtcccctccatcagtgcagagccttgccatgcgcctgttgagcatgcccggagcacaaggcgctgcggccgctggaagcgaacccccaccagccactacttcccctgagggccagcctaaggtacacagagcccggaagaccatgtctaaacccggtaacgggcagccaccggtgcctgagaaacgaccaccggagatccagcactttcggatgtccgacgatgtgcatagcctgggtaaagtaacttccgacctagccaaacggcgcaaattgaactctggcggtggtctgagtgaagagctgggtagcgcccgtcgatcaggcgaagtgacactgaccaagggcgatccgggcagtcttgaagagtgggaaaccgtcgtcggcgatgacttttcattgtactatgatagttattctgtggacgagagggtcgactccgacagtaaatccgaggtcgaagccctgacagaacagctgtccgaagaagaagaggaagaggaagaggaggaagaagaggaagaggaagaggaggaggaggaggaagaggaagaagatgaagagtccggcaatcaaagcgatcggtctgggtcctccggccggcgtaaagccaaaaaaaaatggcgcaaagactccccttgggtgaagcccagtaggaaacggagaaaacgcgagccccctcgggccaaagaaccgagaggcgtgaacggggtaggttcttccggtccttcagagtatatggaggttcctctgggctcccttgagttgccaagcgaaggtactctttctcccaaccacgccggggtgagcaacgatacttccagcctggagacagaacgcggttttgaggagttacccctttgctcttgtcggatggaagcaccaaaaattgaccggatatctgagcgggcgggtcacaagtgcatggccactgagtccgtagacggcgaactgtccggatgcaatgcagcaattctgaagcgcgaaactatgcggcctagctcacgggtggccctgatggtcctgtgtgaaacacacagagcaagaatggtgaaacatcactgctgccccggttgcggctacttttgcacagcgggcaccttcctcgagtgccaccccgattttcgggtcgcacatcggtttcataaggcgtgcgtatctcagcttaacggcatggtgttctgcccacactgtggcgaagacgccagtgaggcgcaggaggttacaattccacggggtgacggagtaaccccccctgcaggcacagctgcacctgctcccccaccactcagtcaggacgttccaggtcgggcagacacctctcagccgtcagcccggatgcggggacacggagagcccagaagacctccttgcgatcctttggccgacacaatcgatagtagtggcccaagcctcactctgcccaacggtggctgtctctcagctgtgggactgcccctagggccaggccgtgaggcactagaaaaggccttggttattcaggagagtgaacgcagaaaaaagctgaggtttcatcctcgtcagctctacctgtccgtcaagcagggtgagcttcagaaggttatcctcatgctcctggacaaccttgatccgaattttcagtccgaccagcagtcgaaaaggactcctttacatgccgccgcacaaaaaggaagcgtcgagatatgccacgtcttgcttcaggcgggggctaacataaatgcagtggataagcaacagcggaccccgcttatggaggccgtggtgaacaaccatctggaggttgcccgctacatggtgcagagaggaggctgtgtatacagcaaggaggaagacggaagcacctgcctgcatcacgccgctaagatcggaaaccttgagatggtttcacttctattgtctacaggtcaggtggacgtgaatgcacaagactctggtggatggacaccgatcatctgggcggcggagcacaaacacatcgaggtgatccggatgttgttaacgcgcggtgccgatgtgacgctgacagacaatgaggaaaacatctgtttacactgggcctcattcacgggcagcgctgccattgccgaagttttgctaaatgcccgctgcgacctgcacgctgtgaactaccacggcgacaccccgctgcacatagccgcccgtgaatcctaccacgactgtgttctcttattcttgtcaaggggggcaaacccagaactgcggaataaggagggagataccgcctgggacctgaccccagaacgctccgacgtgtggtttgcactgcaattaaatcggaaactgcgcctcggcgtggggaaccgcgcaatccgtacagagaaaattatctgcagggacgtagcgaggggctacgagaacgtccccattccttgcgtgaacggcgtcgacggcgaaccttgccccgaggattacaaatacatttccgaaaactgcgaaacttcaacaatgaacatcgatcgtaacataacccacctacagcactgcacctgcgtggacgactgtagcagttccaattgcttatgtgggcagttgagcattaggtgttggtatgataaagacggtcggttactacaggagttcaataagatcgaaccacccctgatctttgagtgcaatcaggcatgttcttgctggagaaattgtaagaaccgcgttgtgcagtctggaataaaagtccgacttcagctttatcggacagccaaaatggggtggggtgtaagagcattgcagaccatccctcaaggaacgttcatttgtgaatatgtcggcgagctgatcagcgacgcggaagcagacgtgagggaggacgatagctacctgtttgatctcgataacaaggacggggaggtctattgcatagacgcacggtattatgggaacattagccgatttatcaatcacctgtgcgaccctaatatcattcctgttcgggtttttatgctccaccaagatctgcgattcccacgcattgccttcttctcttctagagatattaggacaggggaggaactggggtttgactatggggaccgcttctgggacattaagtcaaaatattttacctgtcagtgcgggtccgagaaatgtaaacactcagccgaggccatcgccctggaacagagtagactggcacgactagatccccaccctgagttactgcctgaattgggctccctaccacccgtcaacacatag

SEQ ID NO: 116170 - DNA, 897 bp, synthetic construct
  misc_feature 1..897: note = Description of Artificial Sequence: Synthetic coding sequence
  source 1..897: mol_type = other DNA
taaagcaagagaacgcctctccatgcggcggcgcagaagggatccgtagaaatttgccacgtgcttctgcaggctggggctaacatcaatgcagttgacaagcagcagcgaacgccacttatggaagctgtcgtgaataatcatttagaagtagcgaggtacatggtgcagcgggggggctgtgtgtattcaaaagaagaagacggttccacctgcctccaccacgccgctaagatcggaaatttagagatggtgtctttgctattatctacgggacaggttgatgtgaacgcccagggccagctgcctccccccagtctgcccagccacccacaggactcaggggggtggactccgatcatatgggccgcagaacacaaacacatcgaagtgattcgcatgctgcttactcggggcgctgacgtgaccctaactgataatgaagaaaatatatgtctgcattgggcaagtttcacagggtcagcggctatagctgaggtgttactgaatgccaggtgcgacctgcacgccgtgaattaccatggagatacacctctgcatattgccgccagagaatcctatcatgattgcgtgctgctgtttctctcacggggagccaatcccgaactcagaaacaaggaaggtgacactgcctgggatctcacacccgagcgctcagatgtgtggttcgctttacagttaaaccggaaactgcggttgggggtcggcaaccgggccattaggacagagaaaatcatttgccgcgacgtggctcggggctatgagaatgtacccatcccttgcgtgaacggcgtggatggcgagccgtgccctgaggattacaagtacatctcagagaattgcgagacaagcacaatgaatatcgatcgcaattag

SEQ ID NO: 116171 - DNA, 3804 bp, synthetic construct
  misc_feature 1..3804: note = Description of Artificial Sequence: Synthetic coding sequence
  source 1..3804: mol_type = other DNA
atgcggggcctacctcgaggacggggactcatgagggcccgcggaagaggcagagccgctccacctgggagtaggggcagaggacggggtggccctcacagaggtaggggcagaccccgcagtctgctctccctgccccgtgcacaagcttcttggaccccgcagttatcaactggtttgacctcccctccggttccgtgtctgccaagtcaaggagaggctccagcagaaatgggggcacttctgctcgaaaaggagacgcgtggagcaacagagagggtccacggctctctgggagatacccccaggtctgaagaaaccttacccaaagctaccccagacagcttggagcccgctggtccaagcagccccgcctcagtgacggtgacagtcggggatgagggtgccgacactccggttggagccactcctctgataggcgacgaaagcgagaatctggagggggatggcgacctgcgtgggggcaggatcctgcttggccatgcaaccaaatccttcccgtctagcccttctaagggcggctcttgtcccagtcgtgccaagatgagcatgacgggagctggtaaatcacccccaagcgttcaatcgctggccatgagactgctctcgatgccaggcgcccagggagcggccgctgctggctccgagccaccacctgcgaccacctctcctgaggggcaaccaaaggtgcatagagcaaggaagactatgtccaagccgggaaatggacagccgcccgtaccagagaagagacctcctgagattcagcactttcgaatgagcgatgatgtgcatagcctcggcaaggtgacatcagacctggccaaaaggcggaaactgaactcagggggggggttaagcgaggaactggggtccgccagacgaagcggcgaagtaaccctgactaagggagatcccggctcacttgaggagtgggagaccgtcgtcggggatgacttttcactgtactacgacagctattccgtggacgagcgggtcgattcagactccaaaagcgaggtggaagcgctgacagaacagttgtccgaggaggaggaggaagaagaagaggaggaagaagaggaggaggaagaggaggaggaagaggaggaagaggaggatgaagagtccggcaatcaaagcgatcgcagcggaagcagtggccgacgcaaagccaaaaaaaagtggaggaaggactcaccttgggtcaagccatctcggaaaaggcggaaaagggaaccaccgagggccaaggaacctaggggcgtcaatggggtgggaagtagcgggccaagcgagtacatggaagtgccactggggtccctggaactcccatctgagggaacacttagcccgaaccatgccggggtctcgaacgacaccagcagccttgagaccgagcgcggtttcgaagagctgcccctctgcagttgccgcatggaggctccgaaaattgacagaattagcgaaagggcaggacataaatgcatggcaactgaatccgtggacggcgaacttagtggctgcaatgctgctatcttgaaaagggaaaccatgagacccagttcacgggtcgctcttatggtgctatgtgagacacatcgcgcccgcatggtgaagcatcactgctgtcccggctgtgggtacttctgtaccgctggcacatttttagagtgtcatcctgacttcagggtggctcacaggttccacaaagcttgtgtctcacaacttaacggtatggtgttctgtccccactgcggcgaggacgcgtccgaggcccaggaagtcaccataccacgcggcgacggggttacacctcccgctggcaccgccgcgcccgccccacctccactaagccaggatgttcccggtagggctgacaccagccagccctccgctcgcatgcggggccatggcgagcctagacgtcctccctgcgaccccctggccgacaccatcgatagctcaggcccttctctaacactgcctaacgggggatgcctaagcgcagtaggactccctctcgggccagggagggaagcgctggaaaaggctctggtcatccaggaatccgagcgccgcaaaaaattaaggtttcatcccaggcagctatatttgtccgttaagcagggggagctgcagaaggttatacttatgctgttagataacctggatcccaactttcagagcgaccagcagagcaagcggaccccactgcacgcggccgcacagaaggggtctgtagagatttgccatgtcctccttcaggccggcgccaacataaatgctgttgacaagcagcagcgcaccccactgatggaggccgtggttaacaatcatcttgaagttgctaggtacatggtacagcggggaggatgcgtgtactcaaaggaagaagacggctccacttgtctccatcacgccgctaagatcggcaacctggagatggtcagtttactcctgagcaccgggcaggtagatgtcaatgcacaggactctggggggtggactcctataatatgggcagctgaacacaaacacatcgaggtgattcgtatgctgctaacgcgcggcgctgacgtcacccttacagataatgaagagaacatctgtctccattgggcgagcttcacggggagcgccgccatcgcagaggttttattgaacgctcgctgcgacctccacgccgtcaactatcatggagatactcctctccacatcgccgcccgagagtcctaccatgattgcgtgctgttgtttctgtctagaggggctaaccctgaactccggaataaagaaggcgacactgcttgggacctgacgccagagcggtctgacgtctggttcgcgctccaacttaacaggaaactgcgactcggcgtgggaaaccgagccattaggactgagaagataatctgtcgtgatgtggccagagggtacgaaaatgttcctattccttgcgtcaacggtgtggacggcgaaccatgcccagaggactataagtatatcagcgagaattgcgagacttctacgatgaacatagatcgcaatattactcacttgcaacattgcacttgcgtcgacgactgtagctcctctaattgcctttgcggccagctctcaatacgttgctggtatgataaggacggtcggttgctgcaggaattcaataaaattgaacctcccttaatattcgaatgtaatcaagcatgcagctgttggagaaattgcaagaatagagtagtccagtctggcattaaggtgagactccagctgtatcgcacagctaagatggggtggggtgtcagagcattacaaactatcccacaagggacgttcatctgtgagtatgtgggcgagctgatatcagatgccgaagctgacgtgagagaggatgattcctatctgtttgatctcgacaataaagatggggaagtatattgtatcgatgcccggtattacggtaatatctctaggttcattaaccatctgtgcgatcctaatattatacctgtccgggtgtttatgctgcaccaagaccttagattcccacggattgcattcttttcgtctcgcgatattcgcaccggagaagagctgggtttcgattatggcgacagattctgggatataaagtccaagtacttcacatgccaatgcgggtccgaaaaatgtaagcactccgccgaggcaattgcactggagcagtctagactcgcgcggctggacccgcacccagagctactgccagaattggggagcctgcctcctgttaatacctag

SEQ ID NO: 116172 - DNA, 2667 bp, synthetic construct
  misc_feature 1..2667: note = Description of Artificial Sequence: Synthetic coding sequence
  source 1..2667: mol_type = other DNA
tcagaggtggaggcactaacagaacagttgagcgaggaggaggaggaggaggaggaggaagaagaagaagaggaagaggaagaggaggaggaagaagaggaggaagatgaagagtcgggtaatcagtctgacagatctggatcttcgggtagaagaaaagccaagaaaaaatggagaaaagactctccttgggttaagcctagccgaaaacgcaggaagagagagcctcccagggccaaggaacctaggggggtgtcaaatgacacatcgagtctcgagactgagagggggttcgaagagctgcccctctgttcttgtcggatggaagcacctaaaatcgataggatctcagagagagcagggcacaaatgcatggcgaccgaaagcgtggacggggaattatccggatgtaacgcagcaatcttgaagcgtgaaaccatgagaccctcttccagagtcgctctgatggtcctgtgcgagacccaccgagctcgaatggtgaagcatcattgttgtccaggctgcggatacttctgcactgctggcacattcctcgagtgtcaccctgattttagagtagctcatcgcttccataaggcttgcgtgtcccagcttaacggaatggtgttctgtcctcattgcggtgaggatgcatctgaggcccaggaagttactatccctcgcggggatggcgtgactcctcctgcgggaactgccgctcccgcccccccgccccttagtcaggacgtgcctggccgagcagataccagtcaacccagcgctcgtatgaggggacatggggaacctaggcgccctccctgtgaccctctcgccgacacaatcgatagctccggcccgtcacttaccctgcccaacggaggctgtctaagcgccgtgggcctgcccctggggccaggtcgggaggccctggaaaaagcattagtgatacaggaatccgaaagacggaagaagcttagatttcaccccagacagctctatcttagcgtgaaacagggagagctgcagaaggtgattttaatgctactagacaacctggaccccaacttccaatcagaccagcaatccaagcgcacaccactgcacgcagccgcccagaaggggtccgtggagatatgccacgtgctgctgcaagctggcgccaatattaacgctgtcgacaaacagcaacggaccccgctcatggaggcagtcgttaataatcacctagaggtagcccgttacatggtccaaaggggggggtgcgtgtattctaaagaagaagacgggtctacgtgtcttcatcatgcggcaaagattggtaatctggaaatggtgagcctgctcttgtccactgggcaggtcgacgtgaacgcccaggacagtggtggttggacccccatcatttgggccgccgagcataagcacatcgaggtaatccgcatgcttctaacaagaggcgcagatgtgactttaaccgacaacgaggaaaatatctgcttacactgggccagtttcactggctccgctgccattgcagaagtattattaaatgcgagatgcgatctgcatgccgtgaactatcacggcgatacacccctgcatatcgcagctagggagtcttaccacgactgtgtcctcttgtttctgtctaggggcgctaaccccgagttgcgcaacaaagagggagataccgcttgggacttgacacctgaacgctcagacgtttggttcgctctgcagttaaatcggaagcttcgtctcggtgttgggaatagggcaattcgtacagaaaaaattatctgccgggacgttgccagggggtacgagaatgttcctattccctgtgtcaatggtgtggacggcgagccctgtccagaggactacaaatatatatcagagaactgcgaaacgtctacgatgaatatcgacaggaacattacacacctacagcattgtacttgtgtcgacgactgttcaagtagcaactgtctgtgtggccagctgtccatccggtgctggtatgataaagacggtaggcttcttcaggagtttaataaaatcgagccacctctaatcttcgagtgcaaccaagcctgcagctgctggagaaactgtaagaatagagtcgtgcagagtggcatcaaagtccgcctccagctgtaccgcacagccaaaatgggctggggcgtgcgggctctgcaaacaattccccaggggacattcatctgcgaatatgtgggagaactgatctcagacgccgaggctgacgtgcgggaggatgactcttacttgtttgatctcgataacaaagatggcgaggtctactgcattgacgcccgatattatggaaacatctcaagattcattaaccacttatgtgatcccaacatcatccctgtccgagtttttatgctccatcaggacctgaggtttcctcgcatcgctttctttagctccagagacatacggaccggagaagagctggggtttgactacggagatcgcttctgggacatcaaatctaaatattttacctgccaatgtggcagcgaaaaatgtaaacacagtgctgaagccatagccctggagcagtccagattagcccgactcgatcctcaccccgagctcctgccggaactagggtcattgcctcccgtgaatacctag

SEQ ID NO: 116173 - DNA, 3531 bp, synthetic construct
  misc_feature 1..3531: note = Description of Artificial Sequence: Synthetic coding sequence
  source 1..3531: mol_type = other DNA
atggcagccgccgcgggagcagccgcggcagctgctgccgaaggtgaggccccggcggagatgggggctctgttactggaaaaagaaactcggggtgccacagagcgggtgcatggctccttgggcgacactccacgcagtgaggagacactaccgaaagctaacccagacagcctggaaccggccggtccctcaagcccagccagcgtgacagtgactgtgggtgacgagggcgcagacactccagtgggggccactccactcatcggggacgagagcgagaacctggagggcgacggagatctaagaggaggccgcattctcctgggacatgcaacaaagagcttcccttccagcccatccaagggaggctcctgcccttccagggctaaaatgagcatgactggggctggtaaatcccccccttccgtccagagcctcgcgatgaggctgctgtccatgcccggcgcacaaggggcagcagccgctggcagcgagcctccaccagccactacctcccctgagggccagcctaaagtgcaccgagcgaggaaaaccatgtctaaaccgggcaacggccaaccccccgtgcccgaaaagcgccctcctgagatccaacactttcggatgtccgatgatgtgcattccttgggcaaggtgacatctgacctggcgaagcgccgtaagttaaactctggaggtggcttaagtgaagagctcggctcagcgagacgaagcggggaggtgacactcaccaagggagaccccggatcactggaggagtgggagacagtggtgggggatgacttcagcctgtattatgacagttacagcgtagatgagagagttgactcagatagtaaaagtgaagtggaagctctcacagagcagctgagtgaagaggaagaagaagaagaggaggaagaagaagaggaggaagaggaggaggaggaagaggaagaggaagaggatgaggagtcggggaaccagagcgaccgctcgggctcttctgggcgccggaaagccaaaaagaagtggagaaaggattcaccctgggtgaaaccctctcggaagaggcgaaagcgagaacctcccagagcaaaggagccaaggggcgtgtcaaacgacaccagttctctcgagaccgagcgcggctttgaggagctccccctgtgcagctgccgaatggaagctccaaagatagatagaatatctgagagagccggccataagtgtatggcaaccgaatctgttgacggggaactgtctggttgcaatgcagccattctcaagcgtgaaacaatgcgtccatcttctcgcgtagccctcatggtcctctgtgagacgcacagagccagaatggtgaagcaccactgttgccccggatgcgggtacttctgtacagccggaacattcttggagtgtcatcccgatttcagggtggctcacaggtttcataaagcttgtgttagccagctgaacggtatggtgttctgcccccattgtggcgaggatgcgtccgaggcacaggaggtgacaatccccagaggcgacggcgtgaccccgcccgctggcaccgcagctccagcgccgccccctctctctcaggacgttccaggaagagcagacaccagtcagccatcagctcgcatgaggggacatggcgaacccaggcgtccaccctgcgatcccctcgcagatacgatcgactcttccggccctagcctgactctccctaacggtggctgcctgtctgctgttgggttgcccttaggacccgggcgagaagcgctcgaaaaagcactagtgattcaggaatccgagcgaaggaagaaattgagatttcacccccgccagctgtatcttagcgtcaaacagggcgaactccaaaaagtcatcctgatgctgctggacaatctcgacccaaactttcagagcgatcagcagagcaaaagaacacctttacatgcagcggcccaaaaaggctcagtggagatatgccacgtgctgctccaggctggcgctaatattaatgccgtcgacaaacagcagcgaactccactcatggaagcagttgtgaacaaccatctggaagtggcacgatatatggtgcaaagaggcggctgtgtatatagcaaggaagaggacgggagtacgtgtctgcaccatgcagccaagattggaaacctcgagatggtgagcttgcttctgtccactggccaggtggatgtgaacgcccaggacagtggcggctggacacccatcatctgggccgcggagcacaagcatatcgaggtcatccgtatgctgctcactcggggagcagacgtgactctgacagataacgaggaaaatatatgcctgcactgggctagcttcaccggaagtgcagctatcgccgaggttctgttaaatgcgaggtgtgatctacacgcggtaaactaccatggagacacccccctgcacatcgcagcccgcgagtcttaccatgattgcgtgctgcttttcctgagtcgaggtgccaatcccgaactgcgtaacaaggaaggtgacaccgcttgggatctcacacccgagaggagtgatgtctggtttgcactgcagctgaatagaaagttgcgactgggggtgggaaatcgcgcgattagaactgagaaaattatttgtcgtgatgtagcacgcggctatgagaatgtgcccattccctgcgtaaatggggtggatggggaaccgtgccctgaagactataaatacatttcagagaattgtgagacttcaaccatgaatatcgatcgcaatattactcacctgcagcactgcacttgtgtggacgactgttccagttccaactgcctttgcggtcaactgtccattcggtgttggtacgacaaagatggacgattgctgcaggaatttaataagattgaacctccgctgatttttgaatgcaatcaggcctgctcttgttggaggaattgcaaaaatcgggttgtgcagtccggcataaaggtgcgactccagctttacaggactgccaagatgggatggggtgttagagccctacagacgatcccacaggggacgtttatttgcgaatacgttggtgaattgatctctgacgccgaggccgatgtccgagaagatgattcctatctgttcgatctggacaataaggatggtgaggtttattgcattgatgctcgatactatggaaacatctcccgcttcattaaccatctgtgtgaccctaacattatccccgtgcgggtgtttatgttgcaccaggatctgaggttcccacgaatagctttctttagttcccgggacatccgaactggggaggaactgggctttgattacggagacaggttttgggacattaagagcaagtacttcacctgtcagtgtgggagtgagaagtgcaaacacagtgccgaggccatcgcactggaacaaagccgtctggcccgactggacccccacccagagcttctaccggaactggggtcactgccgcctgtgaatacctag

SEQ ID NO: 116174 - DNA, 3096 bp, synthetic construct
  misc_feature 1..3096: note = Description of Artificial Sequence: Synthetic coding sequence
  source 1..3096: mol_type = other DNA
tcctgtcattgtactccaagttggccgcctgtgcctgaaaaaaggccccctgagatacaacatttcagaatgagcgacgatgtacatagcctgggaaaagtgactagcgatcttgccaagcggcgaaaactcaacagcggtggggggctgagcgaggaactgggttcagcgcgtcggtctggggaggtgactctgacaaagggtgatcccgggtccctggaagaatgggaaaccgtcgtgggggacgactttagtctttattacgacagctattccgtggacgagagagtggactctgatagtaaatccgaggtagaggctctgactgaacagctcagtgaggaggaagaggaagaggaagaggaagaagaggaagaggaggaagaagaagaggaagaggaggaagaagaggatgaagagagtggtaatcaatcagaccggagcggctcaagcggcagacgcaaggcaaagaagaagtggcggaaggattctccctgggtaaagccctcacgcaaacgaagaaagcgggagcctccccgggctaaagagcctcgtggagtcaacggtgtagggtcgtccggaccatctgaatatatggaggtcccactgggctccctggagctgcctagtgagggaactctgagtccaaatcacgctggggtttcaaacgacacctcaagcctggagactgaacgcggattcgaagagcttcctctttgttcctgtcgaatggaggccccgaaaatcgataggattagcgagcgcgccggtcacaagtgcatggcgactgaaagcgtggatggcgagctcagcgggtgcaacgcggctatactcaagcgcgagaccatgcgtccatcatccagggtcgcactgatggtcctctgtgagacccaccgcgcacgcatggtcaaacaccactgctgtcccggctgtggttatttctgcaccgcaggaacctttctcgagtgtcaccctgacttccgcgtagcccatcgcttccataaagcatgcgtgtcacagttgaatgggatggtgttttgcccccattgcggagaagacgcttcagaggctcaggaagtgaccatacctagaggcgacggtgtgaccccaccagctggtaccgccgcccctgcacccccccccctttctcaagatgtgcccgggagggctgacactagtcagccttccgccaggatgcgcggccacggcgagccaaggcggcccccttgcgaccctctcgccgacacaattgactcttcaggcccttctctgaccttgccaaatgggggctgcctcagcgccgtcggattaccactgggccctgggagggaggcgctcgaaaaggcccttgtgatacaagaatcagaacgccgtaaaaagctgcgctttcacccaagacagctgtacctgtcagttaagcaaggagagctacagaaggtgattcttatgctcttagacaacctggatccaaactttcagtctgatcagcagtcaaaaaggacacctctgcatgctgcagcccagaaggggtccgtagagatatgccacgtgcttcttcaggcaggcgccaatataaacgctgtggataagcagcaacgcacccccctcatggaagctgtcgttaacaaccacttggaagtcgcgagatatatggttcagagaggagggtgcgtgtattctaaggaagaagatggctccacgtgcttgcaccacgccgctaaaattggcaaccttgaaatggtctccctcctgttgagtacaggacaggtagacgtgaatgcgcaggatagcggaggctggacgccaattatatgggcggcagagcacaagcacatcgaagtcatccggatgcttttgaccaggggcgcagacgtcaccttaacagacaacgtgagcgagaggctcgtggaagaggaaaacatatgcctgcactgggccagttttacaggtagtgcagcaattgctgaagtgctcctgaatgctcggtgtgatctccacgctgtgaactatcatggcgatacacctcttcacatcgctgcccgggagtcttaccacgactgtgttctcttgtttctgagccgaggtgccaatccagagctgaggaataaagagggagataccgcgtgggacttgacgccagagcgctccgatgtgtggttcgcgctacaacttaatcgaaagctgagattaggcgtcggaaatagagccattcgcactgaaaaaattatctgcagagacgtagccagaggatatgaaaatgtgcccatcccttgtgtgaacggcgtcgatggtgagccttgtcccgaagactataagtatatctctgaaaattgcgagactagtacaatgaacatagacaggaatataacacacttgcagcattgcacttgcgtggatgattgctcctcttcaaattgcctctgcggccaactgagcataaggtgttggtatgacaaggacggccgcctcctccaagagttcaacaagatcgaaccacctctgatcttcgagtgcaatcaggcatgctcatgctggaggaattgtaagaatcgggtggtgcagtctggcatcaaggttcgcctgcaactgtacaggaccgctaagatgggttggggagttcgcgcgcttcagacgattccgcaggggacgttcatttgcgagtacgtcggcgaactgatcagcgacgccgaagcagatgtgcgagaagatgactcttatctgtttgatctggataataaggacggagaggtgtattgcattgacgcacgttactacggtaacataagtcggtttattaatcacctctgcgacccaaatatcataccggtgagggtgtttatgctacaccaagacttacggtttccccgtatagccttcttttccagtagggatatcagaacaggagaagagttaggcttcgactacggggataggttttgggacatcaagtcaaaatacttcacttgtcagtgcgggagcgagaaatgtaagcacagcgctgaagccatcgccttggaacagagtcgactggccaggctggacccccaccccgagctgctacctgagctcggctcgctcccacctgtgaacacctag

SEQ ID NO: 116175 - DNA, 3702 bp, synthetic construct
  misc_feature 1..3702: note = Description of Artificial Sequence: Synthetic coding sequence
  source 1..3702: mol_type = other DNA
atgcgaggactgccacgcggccggggattaatgcgcgcacggggtcgcggcagggccgcccctcccggatctagaggcagaggccgtggaggacctcaccggggcaggggtaggcccagatccttgctgtctctgcccagggcgcaggccagctggacccctcaattgagcaccggactcaccagcccccctgtcccttgtctgcccagccaaggggaggctcctgcagagatgggtgcactcctcttggaaaaagaaactaggggcgcgacagagcgagtgcatggcagtctaggtgacactcccagaagcgaggaaacactcccaaaagccacccctgactctttggagcccgccggacctagctcaccggcgtctgtcaccgtaactgtgggcgacgagggagctgacactcccgtcggcgccacccccctgattggagatgaaagcgagaaccttgaaggcgacggcgacctgagaggcggtcggatcttgttaggacatgcaacgaagagttttcctagctctccctcaaaggggggcagctgcccttctcgcgcgaagatgtctatgactggcgccgggaaatccccaccaagcgtgcagagcctggctatgcgcttgctgagtatgccgggggcccagggggcagcagccgccggaagcgaacctcccccggccaccaccagcccagagggtcaaccaaaggtccacagggcaagaaagacaatgtccaagccaggaaatggccagccaccggtgccagagaagcggcctcctgaaatccagcatttccgcatgagcgatgatgtccacagtctggggaaagtaacatcagacttagctaaacggcgcaagctgaattcgggcggtggcctcagtgaggagctgggttcggcaagaaggtctggagaggtcacactgacaaagggcgaccctgggtctcttgaagagtgggagacagtggtgggcgatgacttttctctgtactatgattcgtacagcgtggatgagcgtgtagacagtgacagcaaatcagaagttgaggcactcacagagcagcttagcgaagaggaagaggaggaggaagaagaagaggaagaagaggaagaggaggaagaggaggaagaagaagaggaagacgaagagagtggcaatcagagcgacaggagtggctccagtggacgcaggaaggcaaaaaaaaagtggcgcaaagattcaccgtgggtgaaaccatcccgcaaacgtagaaaaagggagcctccgcgggccaaggaaccccggggcgtgagtaacgacacctccagtctggagacggaaagggggttcgaggaactcccattatgttcctgcagaatggaggctccaaaaatcgacaggatttccgagagggcagggcacaagtgtatggctaccgagagcgtcgatggcgaactgagcgggtgcaatgccgccatcttgaagagagagactatgcgcccttcctctagagtggcgctcatggtcctgtgtgaaacccatagggcccgtatggtgaaacatcactgctgtcccggatgtgggtatttttgcaccgcaggcacatttctcgagtgtcatcccgattttcgagtagcgcacagatttcataaagcctgcgtctctcagctgaacggaatggtgttctgtcctcattgtggcgaggacgcttccgaggctcaggaggtcaccataccacgaggggacggcgtgactccacctgccggcacggctgctccggctcccccgccattgtcacaggatgtgccgggacgagcggatacctcccaaccatcagccagaatgcgcgggcacggcgaacctagaaggcccccatgcgaccctctcgccgacacaatcgacagtagcggtccaagtctgacattaccgaatggaggttgtctgtcagccgtgggcctccccctcggccccggtagagaagcccttgagaaggccctggtgatacaggagtccgagcggcggaagaaactcagattccaccccaggcagctctatctgtccgtcaaacagggggagctgcaaaaagtgattttgatgctgctggacaacctggaccccaattttcaatctgatcagcagagcaaaaggacaccactgcacgcagcagcccaaaaggggtccgtggagatttgtcacgtgttactgcaggccggcgctaatattaatgcagttgacaaacagcagagaactccattgatggaggcagtcgtcaacaatcatctagaggtggctaggtatatggtgcaacgagggggctgtgtctacagcaaggaggaggatgggtctacttgtctccaccatgccgctaaaatcggcaatctggaaatggtcagcctgttgctgtccacaggtcaggtggacgtcaacgcccaggactcaggtgggtggactccgattatttgggccgctgaacataagcacatcgaggtcatccgtatgcttctaactcgtggcgctgatgtaacgctcacggataatgaggagaatatttgcctacattgggcgagctttaccggatctgctgctattgcagaggttctactgaacgcccggtgcgatctccacgcggtcaactatcacggggacacaccgctccatatcgccgccagggagtcctatcacgactgtgtgctgctgttcctgagcaggggagctaatcctgagttacgcaataaggaaggcgacacggcctgggaccttacaccagaaagaagcgacgtgtggttcgccctgcagctgaaccggaaattacgccttggcgttgggaacagggccataaggacggagaagatcatctgccgggatgtggctcgtgggtatgaaaatgtcccgatcccttgcgtaaatggcgttgacggagagccctgccctgaggattataagtatatttccgagaactgcgaaacctccactatgaatattgaccgcaatataactcatcttcagcattgcacctgtgtggatgactgctcctcatcgaactgtctctgtggacagctgagtatccgctgctggtatgacaaggatggtcgcctgctgcaagagttcaacaagattgagccacccctgatattcgaatgcaatcaggcttgttcatgttggcggaattgcaagaacagggtggtgcagtccggaataaaagtcagactgcagctctatcgcacagcaaagatgggatggggcgtccgggctctgcagacaattcctcagggaacattcatctgcgagtatgttggtgagctaatctctgacgccgaggctgacgtgcgcgaggacgattcttacttattcgatcttgataataaagacggcgaggtatactgtatcgatgcacggtattatggcaatatatcgcggttcattaaccacctttgcgatcccaatatcataccagtacgcgtgtttatgctgcaccaggatctccggtttccgagaatcgcgtttttcagctccagagatatccggaccggggaggagcttggattcgattatggcgataggttctgggatatcaagtcaaagtacttcacgtgccagtgcgggtcagagaaatgcaagcattctgccgaggccatcgccctggaacagagtaggctggcccgcctggacccccaccctgaactgcttccagaacttggatccctcccgccagtaaacacatag

SEQ ID NO: 116176 - DNA, 3804 bp, synthetic construct
  misc_feature 1..3804: note = Description of Artificial Sequence: Synthetic coding sequence
  source 1..3804: mol_type = other DNA
atgcgcggtctgcctagaggaagagggcttatgcgtgccagggggaggggacgcgcagccccacctggctctagggggcgtggaagggggggaccccataggggccgagggaggccccgcagccttctctccctccccagggctcaagcttcctggactccccagttgtcaactgggctgacgagcccacccgttccttgtcttccaagtcagggtgaagcaccagcagagatgggcgccttgctgcttgagaaggagaccagaggagcgactgaaagggtccacgggtccttgggtgatacgccacgctcggaggaaacattaccaaaagccaacccagactcgctggagcctgcaggtcctagtagcccagcgtccgttacagtcaccgtgggtgatgagggcgccgatacccccgtcggtgcaacacccctcatcggggatgaaagcgagaaccttgaaggagatggggatttgcgaggtggacgaatactactcggtcacgccaccaagagttttccatcctcgcccagtaagggtggatcatgccctagccgggctaagatgagtatgactggagccggaaagagccctccttcagtccagtctctggcgatgcgactcctctcgatgcctggcgcccagggggccgctgcggccggctccgagccccccccagcaaccaccagccccgagggtcaaccaaaagtacatcgagcacggaaaaccatgtctaaacccggcaatggacagccgcctgttcctgagaaacggccacccgagatccagcacttcaggatgtcagatgacgtccacagcctcggaaaggttacgagtgacttagccaagagaaggaagctgaactcaggtggtggactaagcgaagagctggggtcggcgcgcagatctggtgaggtaacacttacaaagggggatcccgggtccttagaggagtgggagacagtggtcggagatgatttctcactgtattacgactcttactccgtagacgagcgcgtggatagcgacagtaaatctgaagtggaggctctgacagagcagctttctgaagaggaggaggaggaagaagaagaggaagaggaagaggaagaggaagaggaagaagaggaggaagaagaggacgaagaaagtggcaaccagagcgataggagcggaagtagcggaaggaggaaagctaaaaaaaaatggcgcaaggatagtccctgggttaaaccttctcgaaaacgccgcaagagggagcctcctagggctaaggagcctcgcggagtgaacggcgttggctccagtggacctagcgagtatatggaagtcccactgggatcactggagctgccctccgagggaaccctgtccccaaatcatgccggtgtgtcaaatgacaccagttctctggaaaccgagcggggttttgaggagctccctctctgctcgtgcagaatggaggcgcccaaaatcgatcgcatctctgagagggcgggccataagtgcatggctaccgagtctgtggatggcgagctctcaggctgtaatgcggctattctgaagagggagacaatgagaccaagctccagagtcgcattgatggttctctgtgagactcacagggcccgcatggtgaagcaccactgttgccccggatgcgggtatttttgcactgctggaaccttcttggaatgtcatcctgacttcagagttgcacaccggttccataaagcttgcgtgagccagttaaacgggatggtgttctgtcctcattgtggggaggacgcatcagaggcacaagaggtgacaataccccggggcgacggtgttaccccgcctgccggaacggcggctccagcccctcctccactctcccaggacgttcccgggagagccgatacatcccagccttctgcaagaatgaggggccacggggaaccccgacgcccgccatgtgacccactcgctgataccatcgacagctccggccccagtttgacactccctaacggtggatgtttatctgcagttgggctccccctcgggccaggccgtgaggctttagaaaaggctctggtgattcaggagtctgagcgccgaaagaaactgcggttccatccgcgccagctctacttatctgtgaaacagggggagcttcagaaagttattttaatgttgcttgacaacctggacccaaactttcagtccgatcagcaaagcaaaaggaccccactgcacgctgcagctcagaagggctccgttgagatctgtcacgtgctcctccaggcaggagcgaacataaacgcagtcgataaacaacagaggactccgctcatggaagcagtggtcaacaaccatctggaagtggcgagatacatggttcagcgaggaggttgtgtgtacagtaaggaggaggatggttctacttgcctgcaccatgccgctaaaattggcaatctggagatggtgtcactgctcctgagcaccggacaggtcgacgtaaacgcccaggatagtggcgggtggaccccaatcatttgggcggcagagcacaagcatattgaagttattaggatgctgctcacacggggcgctgacgttacccttacagataacgaggagaacatctgtttacactgggcttcctttactggcagcgccgcgatcgctgaggtcctgctgaacgcgaggtgtgatctgcatgccgtcaattaccacggtgacacccccctacacatcgccgctcgcgagtcgtaccatgattgtgtcctgctcttcctgtctcgaggcgctaatcctgagctgcgaaataaggaaggggatactgcttgggacctgacccccgagcggtctgacgtgtggttcgctctccagcttaaccggaagctgcgcctgggcgtcggcaacagggctatcagaactgagaaaattatttgtcgtgatgtggcaagaggttatgagaatgtacccataccttgtgtgaacggagtggatggtgagccctgtccggaagactacaagtacatctccgaaaattgcgaaacttccaccatgaatattgatcgtaacattacccacctgcaacattgtacatgtgtggatgattgtagctcatctaattgcctgtgtggtcagctcagcattagatgttggtatgacaaagacggtcggctcctccaagagttcaataagattgaaccaccactcatctttgagtgtaaccaagcgtgtagttgttggcgcaactgcaagaatcgcgtggttcaatctggcattaaggtacgattacagctgtataggactgccaagatgggatggggtgtgcgagcacttcaaacaattccacaggggacatttatctgtgagtacgtgggtgagctaatttccgatgccgaagctgatgtgcgcgaagacgattcgtatctgttcgatctggataacaaggacggtgaggtgtattgcattgacgctagatactacggtaatatctcacgcttcatcaaccatctttgtgaccccaatatcattcctgtccgggtttttatgctgcaccaggatttacgctttccgcgtatcgccttctttagttctagagatatcagaaccggggaagagctgggatttgattatggggaccgtttttgggacatcaaaagcaaatacttcacgtgtcagtgcggctctgagaagtgtaaacactcagcggaagctattgctctggagcagtccagactggcccggctggacccccatcctgagctacttccggagcttgggagcctcccaccagtgaacacttag

SEQ ID NO: 116177 - DNA, 897 bp, synthetic construct
  misc_feature 1..897: note = Description of Artificial Sequence: Synthetic coding sequence
  source 1..897: mol_type = other DNA
tgaagcaagaggacccccctccacgctgccgcccagaaaggctcagtcgagatttgccacgtgctgttacaggcaggagccaatattaatgcagttgataagcagcagaggaccccgctcatggaagcagtagtaaataaccacctggaggtcgcccgctatatggtccagagaggagggtgtgtgtacagcaaggaagaggacgggtctacatgtctgcatcatgccgcgaaaattgggaatttagagatggtctccctgcttctgagtacaggccaggttgatgtgaacgcgcagggccagctacccccgccctccctcccttcacaccctcaggattccggcggatggacaccaataatctgggctgccgaacacaagcatattgaagttatcaggatgttactgacgcgcggagcggacgtgacactcactgacaatgaggaaaacatttgccttcattgggcaagcttcaccggatcggcggcaattgccgaggtactactcaatgccaggtgtgacttgcatgccgtgaattaccatggggataccccactgcacattgccgctagggagtcgtaccacgactgcgtgctgctgttcctgtccaggggtgccaatcccgaattgcgcaataaagaaggcgataccgcctgggatctgaccccagagcgcagcgacgtgtggtttgctctgcaactcaaccgcaaactgagactaggagtgggcaacagagctatcagaacagaaaagattatctgtagagatgttgcacgcggatacgaaaacgtgccaatcccttgcgtgaacggagtggatggggagccatgcccagaggattacaagtacatttccgaaaactgcgagacttccaccatgaacattgatcggaactag

SEQ ID NO: 116178 - DNA, 897 bp, synthetic construct
  misc_feature 1..897: note = Description of Artificial Sequence: Synthetic coding sequence
  source 1..897: mol_type = other DNA
tagtctaaacgcacccctcttcatgctgccgcacagaagggcagcgtcgagatctgtcacgtcttgctccaggctggggccaacatcaacgccgtggacaaacaacagaggactccactgatggaggccgttgtgaacaaccacctcgaggtggcccgctatatggtccagagaggcggctgcgtctactctaaggaggaggacgggtccacctgcctgcaccatgccgcaaagattggtaacctggaaatggtttccctgctgctcagcactggccaggtggatgtcaatgcacaggggcagttgccccccccatcactgcccagtcatccacaggactctggcggctggacacctatcatctgggccgcagagcataaacacatcgaggtgatacgcatgctcctgactaggggcgctgacgtcacactgacggataacgaagagaacatatgtctgcactgggcttcatttaccggtagtgcagcgatcgctgaagtgttactgaatgcacggtgcgacctccacgctgttaattaccatggtgatactcccctgcacatcgccgctagggaatcgtatcacgattgtgttttactgtttctgtctagaggggcaaatcctgagctgcgcaataaggagggcgataccgcctgggacctaacaccggaacgcagcgatgtgtggtttgctcttcagctcaatagaaaactccgcctgggagtggggaatagagccataagaactgagaagatcatttgtcgggatgtcgcccgcggctacgaaaacgtgccaattccctgcgtaaacggcgtcgacggggagccttgccctgaggattacaagtacattagtgagaactgtgaaacgagtacaatgaacattgatcgtaactag

SEQ ID NO: 116179 - DNA, 3633 bp, synthetic construct
  misc_feature 1..3633: note = Description of Artificial Sequence: Synthetic coding sequence
  source 1..3633: mol_type = other DNA
atggccgccgccgccggcgccgcagcagctgctgctgccgagggcgaagcaccagccgagatgggtgctctcctgctcgagaaggagacacggggcgctacggaaagggtgcatgggtccttgggagacacaccccggtcagaagaaacactgccaaaagccacacccgacagtctggagcctgcggggccatctagtcccgcctctgtgaccgttactgtcggcgatgaaggcgctgacaccccagttggggccacacccctgattggtgatgagagcgaaaaccttgaaggcgacggcgaccttagagggggcaggatcctcctgggccatgcgactaaaagcttccccagctctcctagcaaaggggggtcgtgtccctcgagagcaaagatgtctatgacgggggcaggcaaaagccccccttcagttcagtccctggcgatgaggttgttatcgatgccgggggcccagggagccgccgcagccggctccgaaccgccaccggccacaactagcccagaaggccagccgaaggttcaccgtgcgcggaagaccatgtccaagcctggtaatggccagccaccagttcccgagaaacggcctccagagatacaacattttcgtatgtccgatgacgtgcattccttggggaaggtgacttcagacctcgctaagcgcagaaaactaaacagcggaggggggctctctgaggagctgggcagcgcaagaagaagcggagaggtcaccctcaccaaaggtgacccgggatcgctcgaagaatgggagactgtggtgggcgatgactttagtctttattatgatagctactctgtggatgagcgtgtggattccgatagtaagtcagaagtggaggccttgacagagcagctctcagaggaggaagaagaagaagaggaggaggaagaagaggaagaagaggaagaggaagaagaggaagaggaagaggacgaggaaagtggcaaccaatctgacaggtcaggctccagtggccggcggaaggctaagaagaaatggaggaaagacagcccctgggtcaaaccctccaggaagcgacggaaaagggagccacctcgcgctaaagaaccccgtggggtgaatggtgttggctcttcgggtccaagtgaatacatggaagttcccctgggttccctggagctcccctcggagggaactttgtcccccaatcacgccggcgtcagcaatgacacaagcagcctggaaaccgagcgtgggtttgaggaactaccgttatgctcctgcagaatggaggcccccaaaatagatcgtatcagcgagagagcaggccacaagtgcatggcaacagaatcagtagacggagagctctcagggtgtaatgctgcaattctcaagcgagagactatgagaccatccagcagagtggcgctgatggttctgtgcgagacccaccgtgcccgcatggtgaagcaccactgctgtccaggctgtggatacttctgcactgctggtacttttttggagtgccatcccgacttccgcgtcgctcacagattccataaggcatgcgtctctcagcttaacggtatggtgttctgccctcattgcggagaggatgctagcgaggcccaggaggtgaccatcccacgaggtgacggagtcacccctcctgcaggcacagccgcccctgcccccccccctctaagtcaggacgtccctggcagggccgacacctcacagccgagcgctagaatgcggggacatggagagcctcggcgccccccatgcgatcctctggccgatacaatagactcctctggcccgagtctcacgctgcctaatggtggatgtctgtccgcggtcggattgccattagggcctggtcgagaggcactggaaaaggctttggtcattcaagaaagcgaaaggcgcaagaagcttcggtttcacccgcggcagctctacctatccgtgaagcagggagaattgcagaaagtgatcttgatgctcttggacaatctggatcccaacttccagagcgaccagcagtcaaaacggaccccactgcacgctgcagcacaaaagggctcagtcgaaatttgccatgtgcttttgcaagccggtgcaaatatcaatgccgtggacaagcaacagagaaccccgctcatggaggctgtcgtcaataatcacctggaggtggctaggtatatggttcaacgcggaggctgtgtctattctaaagaggaagacggtagtacctgcttgcaccatgcggccaaaataggtaacttagaaatggtgagcctgctgctcagtaccggccaggtggacgtgaacgctcaggatagcgggggttggacaccaattatttgggcagctgagcacaaacatatcgaggttataaggatgctattgaccaggggggccgacgtgaccctgacggataacgaagaaaacatctgcttgcactgggccagcttcaccgggtcggccgctattgctgaggtgttgctcaatgctcggtgtgacctgcacgccgttaactatcatggagacactccccttcatatcgctgcccgtgagagctatcacgattgcgttctgttgtttctttcccgaggggccaaccctgaacttaggaataaggagggagacaccgcctgggatcttacacccgagagaagtgacgtgtggtttgccctgcaactcaatagaaagttaaggctaggcgttggcaaccgcgctatacgtacagagaagattatctgcagggatgtcgctcgcggctacgagaacgtccccataccatgtgtaaacggggtcgatggggaaccctgtccagaagattacaagtatatcagcgaaaattgtgaaacctcgactatgaatattgatagaaatatcacgcatctgcagcattgcacgtgcgtcgacgattgctcttcatccaactgcctgtgtggccaactgtctattaggtgctggtacgacaaggatggccgccttctgcaggagttcaacaaaattgagccacccttgattttcgaatgtaaccaggcttgctcttgctggcgtaattgtaaaaacagagtcgtgcagagtggcatcaaggtcagactgcagctttacaggacagccaagatgggatggggagtgagggctctgcagactatccctcaggggacatttatctgcgagtacgttggagagttgatcagtgacgcggaggcagacgtaagagaagacgattcctacctgtttgacctcgacaataaggatggcgaagtctactgcatcgacgcgcgctattatggcaatattagtagattcataaatcacctgtgcgacccaaacattatcccagttcgagtgttcatgctgcaccaggacctgagatttcctcgcatcgcctttttctctagccgggacataagaaccggcgaggaactcggtttcgactatggagacagattttgggacatcaaatcaaaatacttcacctgccaatgtggttcagaaaaatgtaaacactccgcggaggccatcgcgctggaacagagcaggctcgccaggctagatccccatccggaactgcttcctgagcttggctctctgcctccagtgaatacatag

SEQ ID NO: 116180 - DNA, 3531 bp, synthetic construct
  misc_feature 1..3531: note = Description of Artificial Sequence: Synthetic coding sequence
  source 1..3531: mol_type = other DNA
atggccgccgccgctggcgcagcagccgccgccgctgccgaaggcgaggcccctgctgaaatgggggctctcctcctcgaaaaagaaacacggggggctaccgaacgggtgcatggtagtttaggggataccccacgctctgaggagactttaccgaaggccacacctgattctctggaaccagccggtccaagttcaccagcgtcagtcactgtcactgtgggggatgagggagccgacacccccgtcggagctactcccctgattggcgatgaatctgagaaccttgagggcgatggtgacttacgggggggcagaatcctgctgggacacgcaaccaaaagctttccatcttccccgtcgaaaggaggctcttgtccgagtagggccaagatgtcaatgacgggagccggcaaaagccccccttccgtacagtccctggcaatgcgactgctatccatgcccggagcccagggggctgccgcagcaggtagtgagcctccacctgccaccacatcccctgaagggcaacccaaggtccatagagcgagaaaaacgatgagcaaacccggtaacggccagccccccgtgccggagaagcgccctcctgagattcagcatttcagaatgtccgacgatgtccactctctgggtaaggtgacctccgacctggccaaaagaagaaaactaaatagcggcggaggcctctcagaggaacttggctccgccagacgctccggggaggtgaccctgacaaagggcgatcctgggagcctcgaggagtgggaaactgtggtcggagatgattttagtctatactacgacagctactcggtagacgaaagggtggacagcgatagtaagagcgaagtcgaggcattaaccgagcagctgtccgaagaggaggaggaggaggaggaagaggaggaagaagaggaggaagaggaggaggaagaagaagaagaggaagacgaggagtccggcaatcagagtgatagatcaggaagctctggcaggcggaaggcgaagaaaaagtggaggaaagattccccatgggttaaaccttctagaaaaagacgcaagcgcgagccccccagagctaaggagccaaggggagtatccaatgacaccagcagcctggaaactgagagaggctttgaagaattgcccctgtgcagttgtcgcatggaagctcctaagatcgatagaatctccgagcgcgctggccacaagtgcatggcaacagaaagtgtggatggggagttaagtggttgtaacgccgccatcctcaaacgcgaaactatgcgccccagttctcgtgtggctcttatggttttgtgcgagacacaccgggcaagaatggttaaacaccactgttgtccaggttgcggatacttttgcacagcagggacatttcttgaatgtcacccagatttcagagtggctcataggttccataaagcatgcgtgagccagctaaatggtatggtgttttgtccacactgcggcgaggatgcaagcgaggctcaagaggtgaccattccccgcggggacggagtgactccccctgctggtacagccgctcccgcaccccctcccctgagccaggatgtgcctgggagagccgacacctctcagccctccgcaaggatgcgggggcacggagagcctcgaaggcctccctgcgatcctctcgctgacaccatagattccagtggtccgtccctgaccttgccgaatggtggttgcctctccgcagtgggactgccgctgggacctgggcgggaggctttagagaaagcgctggttatccaagaatcagagcgaaggaaaaagctcagattccaccctcggcaactttacctaagcgtgaaacaaggcgaattgcagaaggtgatactaatgctcctggataacctggatcctaattttcaaagtgaccaacagtccaaaagaacaccgctccatgcagctgcacagaaaggatcagtggaaatctgtcacgttctattgcaagctggggccaacatcaatgcagtggataagcaacagcgtactccgctgatggaggcagtcgtgaacaatcatcttgaggtcgcacgatacatggtgcagcgcggaggctgcgtttactccaaagaagaagatgggtccacatgcttacatcacgccgctaaaatcggcaacttggaaatggtgtcactcctcttatctaccgggcaggtcgatgtgaatgctcaggactctggaggatggacacctattatttgggctgccgagcacaagcacattgaagtgattcgcatgttgctgaccaggggcgccgatgttacgctgactgataacgaggagaacatttgtttgcactgggccagctttactggctctgccgccatagctgaagtgctactgaacgcccggtgtgaccttcacgctgtgaattatcatggcgatacccccctgcatatagccgctcgcgagtcctaccatgattgcgtactcctcttcctctctagaggagccaacccggagctgcgaaacaaagagggcgatacagcctgggatctcacccccgagcgcagtgacgtttggttcgctctgcagttaaaccgcaaattgcggctcggtgtgggaaatcgggccattcggactgagaagataatttgccgggatgtggccagaggttacgagaacgtcccaatcccatgtgtgaatggagtggatggcgaaccatgtccagaagattacaaatatatcagcgaaaactgtgaaacatcaacgatgaacatcgatcgtaacattacacatttgcagcactgcacctgtgtcgatgattgcagtagttcaaattgcctatgcggacagctctcaataagatgctggtacgacaaggacgggcgtctgctccaggagtttaataaaatagaaccacctctgattttcgaatgtaaccaagcgtgctcgtgctggaggaactgtaagaacagagtggtccaaagcggcattaaggtgagacttcagctataccgaaccgccaagatggggtggggcgtccgtgccctccaaaccattccccagggcactttcatttgtgagtacgtgggggagcttatttcggacgcggaggccgacgtgagagaggatgactcctaccttttcgatcttgacaacaaggatggcgaggtgtactgtatcgatgccagatactatggtaatatttccaggtttattaatcacctgtgcgatccaaatataatacccgttagagtgttcatgctgcatcaggaccttagattccctcgcatcgcctttttttcgtcccgggatatccgaactggagaagagctgggtttcgactacggcgatcggttttgggacatcaagtctaagtatttcacttgccagtgtggatcggagaagtgtaaacacagtgcagaagcaattgctctggaacagagcagactggcgcgattggacccgcacccggagttgttgcccgagctcgggagcctgccccccgtgaatacatag

SEQ ID NO: 116181 - DNA, 3702 bp, synthetic construct
  misc_feature 1..3702: note = Description of Artificial Sequence: Synthetic coding sequence
  source 1..3702: mol_type = other DNA
atgcggggtctgcctcgcggccgcggcttgatgagagcaagggggcgagggcgcgcagcaccacctggcagtcgcggcaggggcaggggcggtcctcaccggggcagaggtaggccacggagtctcctgtctttgccacgtgcccaggcctcctggacacctcagttatctacagggttgactagtcccccagtgccctgccttccttcccagggtgaggcacctgcagagatgggagctctcctgctagagaaggagacccgtggtgccactgagcgagtccatgggtccttaggcgataccccaaggagtgaagaaacgctcccaaaggctaatcctgactcactggaacccgctgggccaagctctcccgccagcgtgactgttaccgtaggagatgagggggctgacacacccgtgggagcaacccctcttatcggtgacgagtctgagaatctggagggcgatggcgacctgagagggggcagaattctgctgggccacgcgacgaaatcattcccaagttctcctagcaagggcggaagttgcccatctagggcaaaaatgtctatgacgggggctggaaagagtccacccagcgtccagagcttggcgatgcggttgctttcaatgcctggcgctcagggtgccgcagcggccggatccgagcctcctcccgccacaacatcccccgaagggcagcccaaggtgcatagagcccggaagacaatgtctaagcccgggaatggacaaccgcccgtgcctgaaaaacggcctcctgaaattcaacactttaggatgtctgatgacgtgcacagcctcggcaaggtcacaagtgacctcgctaagagaagaaagctcaatagtggcggaggcctgagcgaagagctgggctccgcacgccggtcaggcgaggttaccctcaccaagggagaccccggcagtctcgaggaatgggagacggttgtgggggatgacttctcactttactacgacagttattccgttgacgagcgcgtggacagcgactctaagagtgaagtggaggctctaaccgagcaattgagtgaggaggaggaagaagaagaagaggaggaggaggaagaggaggaggaagaggaggaagaggaagaggaggaagatgaggagagcggcaaccagtccgaccggtccggatcttccgggcgccgaaaggctaagaagaagtggaggaaggactccccctgggtcaagccatctcgcaagcgccgcaagagagagccacctcgggcgaaagaaccaaggggggtttcaaatgacacgagtagcctcgaaacagaacgagggtttgaggagctgccactttgttcgtgccgcatggaggctcctaagatcgaccgaatctccgaacgggcagggcacaagtgcatggccacagagtctgtggacggggaactgtccgggtgcaacgcagccatcttaaagcgcgagactatgcgtccttcttccagggtcgctctgatggtgctatgtgagacacatcgagcacgcatggtcaagcatcactgctgcccgggatgcgggtatttttgcacagcaggcacttttctggagtgccatcctgattttagagttgcccaccgtttccataaggcgtgtgtctctcagcttaacggcatggtcttctgtccacattgcggtgaggacgcgagcgaggcccaagaagtgaccattccaaggggagacggcgtgacacctcctgctggcacagctgctccagcacctccacccttgtcgcaggatgtgcccgggagagccgacacctcgcaaccctcagcccgcatgcgaggccacggtgagcccaggcggcccccctgcgatccgctggcagacacgatagatagcagcggcccctcgctcaccctgccaaacggaggttgcctctccgccgtcgggctgcccctaggtcctggtagggaagcactagagaaggcgctggttatacaggaatcagagaggcgcaagaaactgcgctttcatccgcgccagctgtacttgtccgttaagcagggagagttgcagaaggtcattctcatgctcctagataacctggatcctaatttccagtcagaccagcagtctaaaaggacccccctgcacgctgctgcacagaaaggctcagtggaaatctgccacgttttgctgcaggctggagccaacatcaatgccgtcgataagcaacagcggacaccgcttatggaagcagtcgtgaacaaccaccttgaagtagcacggtacatggtgcaacgagggggctgtgtgtactctaaggaggaggacggaagtacctgcctgcatcacgcggcgaagatcggcaacctggagatggtgagcctcctcctgtcaaccggacaggtggatgtgaatgcacaggattcaggaggctggactcctatcatatgggcggccgaacacaaacatatagaagtgataagaatgctgctgaccaggggcgctgacgtgaccctgaccgacaatgaagagaacatttgtctccactgggcttcttttaccggttcagccgctatagctgaagtcttgctaaatgcccggtgtgatctgcacgccgtaaattatcacggagatacgcccctgcacattgccgcccgagagagctaccacgattgtgtgttactttttctgtccagaggcgccaacccggagctgaggaacaaggagggtgacacagcatgggatctcacccctgagcgatcagacgtgtggtttgctctccaactgaatcgaaaacttagattgggtgtaggtaaccgtgcaatacgaacggaaaagatcatatgtcgggacgttgcccggggctacgagaatgtgcccattccatgcgtgaatggcgttgatggagagccatgtccagaggattataaatatatcagcgagaattgcgaaaccagcaccatgaacattgatcgtaacattactcacctccagcattgcacgtgtgtcgatgactgcagctctagcaattgtctttgcggacagctaagtattagatgctggtatgataaggacggcaggttgctgcaggaatttaacaagattgagccgcccttaatctttgagtgcaaccaggcctgcagctgctggcgtaactgcaaaaatcgagtggtgcagagcggaatcaaggtgaggctgcagctctaccggactgcaaagatgggatggggtgtccgagccctccagactattccccagggaaccttcatttgcgagtacgtaggggagttaatctcggatgctgaggccgacgtgagagaggacgacagttacctgtttgacctggacaacaaggacggggaggtgtactgcattgatgctcgatactacggcaatatcagccggttcattaatcatctttgtgatcctaatattattcccgtgagagttttcatgctacatcaggacttgcgttttcctcgcatcgcgtttttctcctccagggacattcggaccggggaagaactggggttcgactacggcgataggttctgggatattaagtccaaatactttacctgccagtgtggatccgagaagtgcaagcattccgcggaggcaatcgccctggagcagtctagacttgcaaggctggacccacatccggagctcttacctgaactgggctctttgccaccagttaatacctag

SEQ ID NO: 116182 - DNA, 897 bp, synthetic construct
  misc_feature 1..897: note = Description of Artificial Sequence: Synthetic coding sequence
  source 1..897: mol_type = other DNA
tgatcaaagaggacacccctgcatgcagctgcccagaaaggctcagtcgagatctgccacgtgttactgcaggctggagcaaacattaacgcggtggacaagcagcaaaggacccctctgatggaggctgtagtcaataatcacttagaagtcgccaggtacatggttcagcgggggggatgcgtttatagcaaggaagaggatgggagcacatgcctacaccatgcggccaagattggtaacttagagatggtctcactcctgctgagcaccggtcaggttgacgtgaatgctcaaggacagctccctccgccttcactgccatctcatcctcaggacagtggcggctggacccccattatttgggcagccgaacacaagcatatcgaggtgattcggatgctgctcaccaggggggctgacgtgacattaacagacaatgaagaaaacatttgcctccattgggcctccttcacaggctcagccgccatcgccgaggtcctcctgaacgcccggtgcgacctgcatgcagttaactatcacggcgacacccctctgcacatcgcagcgagggagagttaccacgactgtgtactgctcttcctgtccagaggagctaatccagagttgagaaacaaagagggcgacactgcctgggaccttacaccggaacgcagcgacgtatggttcgccctgcagctgaaccgcaagttgagactaggggtcggaaaccgcgccattcgcactgaaaagataatttgccgcgatgtggccagaggctacgagaacgtgcctattccctgtgtgaacggtgttgatggcgagccatgccctgaagactacaagtacatcagcgaaaactgcgaaacaagtacaatgaatatcgaccgcaactag

SEQ ID NO: 116183 - DNA, 3531 bp, synthetic construct
  misc_feature 1..3531: note = Description of Artificial Sequence: Synthetic coding sequence
  source 1..3531: mol_type = other DNA
atggctgctgccgccggagcggccgccgcggcggcagctgaaggcgaagctcccgctgaaatgggagctctgctactggagaaggagactcgcggggcaactgaaagggtgcacggctcccttggcgatacacccaggagtgaagagactttaccaaaagccaaccccgacagtttggagccagcgggcccttccagtcctgcctctgtgaccgtgactgtgggcgatgagggagcagacacgcccgttggagctaccccactaatcggagatgaaagtgaaaatctggagggtgacggggatcttagaggcggcagaatcctcctgggtcacgcaaccaaatcctttccctcgtccccgtctaaaggtggttcctgccctagccgagcgaagatgagcatgaccggggccggcaaaagccctccttccgtccagagcctcgctatgagattattgtcaatgccaggtgcccaaggcgcggcagccgctgggagcgaacctccccctgctaccacctcacctgagggccaaccaaaggtgcatagggctcgcaagactatgtcgaaaccgggcaacggccagccacctgtgcccgagaagagacccccagagatccaacacttccggatgagtgatgatgttcacagtctcggcaaggtaacgtcagacctggccaaaaggagaaagcttaattcaggtggcggactctcggaggagctcggcagtgctaggagatcaggagaagtaaccctgaccaaaggcgatcctggcagcctggaggagtgggagacggtcgtgggggacgatttcagtctctactacgatagctatagtgttgatgagcgcgttgatagcgattccaaaagcgaagtcgaggccctgactgagcagctgtcggaggaggaagaggaagaagaagaagaagaggaagaggaagaagaagaagaagaggaagaagaggaagaggaagatgaggagtctggcaatcagagtgacaggtcgggctccagcggaaggcgaaaagccaaaaaaaagtggagaaaggacagcccctgggtcaagcctagccgaaagaggcggaaacgggaaccccctcgagccaaagaaccccgaggcgtgtctaacgacactagtagccttgagacagagcggggtttcgaagagctcccgctgtgcagttgccgcatggaggcaccgaagattgaccgtataagtgagagagccgggcataagtgcatggcaactgaaagcgtggacggggagctgagcgggtgtaacgctgcgattctgaagcgggagaccatgaggccatctagcagagtggcactgatggtgttatgcgaaactcaccgggctcgtatggttaaacatcattgctgtccgggctgtggatatttttgtaccgccgggacttttctggagtgtcatcctgacttcagagtcgcacaccgtttccataaagcttgcgtgtctcagctgaatggaatggtcttctgtcctcactgtggcgaagacgctagcgaagcacaggaagtcactatccctcgcggcgacggcgtaactccccccgccggcacagcggctcctgccccaccgcccctgagccaggacgttcccgggcgcgcagacacaagccagccttctgcccggatgcgggggcatggggagccccgtcgcccgccttgcgaccccctggctgacacaatcgacagttccggcccgtctctcactctacccaatggtgggtgcctgagcgcagtgggactgcccctggggcctggtagagaggccctggaaaaagcattagttatccaggaatctgagcgtcgtaagaagctgcggtttcatccccgacagctgtatctgtctgtcaaacagggagaactgcagaaagttattctgatgctgcttgataatctggaccctaactttcagagtgatcaacagagtaagagaacccctctgcatgcagccgcccagaaaggttccgtcgaaatatgccacgtgctgctacaggctggagctaacataaatgctgtggacaagcagcagagaacacctctgatggaggcagttgtgaataaccatctagaagttgccagatatatggtgcagcggggaggctgcgtttactccaaagaggaggacggcagcacatgtcttcatcatgccgctaagatcggcaatttagagatggtctctctgctactatccaccggccaggtggatgttaacgcccaggatagcgggggctggacgcctataatttgggctgcggaacataaacacattgaggtgattcgtatgctgcttactcgtggggccgacgtgacgttgactgataacgaggagaacatctgcctgcactgggcatcgttcactggtagtgctgccatcgccgaggtgctcttaaacgctcgctgtgacctgcatgccgtcaactaccacggcgacacccccctccatatagctgcccgagagagttaccatgactgtgttctgctgttcctcagccgcggcgccaacccagaactgcgcaacaaagaaggggatactgcatgggacttaacccccgaacggagtgacgtatggtttgcacttcagttgaacagaaaactgcggctcggtgttggcaaccgggcgatacggaccgaaaagatcatatgccgtgatgtggcgagggggtacgagaacgttcctatcccttgcgtgaacggtgtggacggagagccctgccctgaagactataagtacatctctgagaactgcgaaacgtctacaatgaatatcgacaggaatattacccatttgcagcattgcacttgtgtggacgactgtagcagttccaactgcctgtgtggccaactgagtatccgctgctggtacgataaagatggacgattactgcaggaattcaataagatagaaccacccctgattttcgagtgtaaccaggcttgttcatgctggcgcaactgcaagaaccgggtcgtacaatctgggatcaaagtccgtctgcaactctatcgaactgcaaaaatggggtggggagtgagagccttgcagactattcctcagggaacgtttatttgcgaatacgttggggaactaattagtgatgctgaagctgatgttcgtgaagacgattcttacctctttgatctggacaataaggatggagaggtgtattgcatcgatgcaagatactacggtaacatttctcggttcattaatcacctgtgtgaccccaatatcattccggttcgggtgtttatgctccaccaggaccttagatttccgagaattgcattcttcagctcccgggatatcagaacaggggaggaattgggtttcgactatggcgatcgattctgggatattaagagtaaatattttacatgtcagtgtggtagcgagaagtgcaagcacagcgctgaggcgatcgccctcgagcagagtcgtctcgcccggctggaccctcatccagagctgcttccagaactaggctccctcccacctgtcaacacgtag

SEQ ID NO: 116184 - DNA, 2667 bp, synthetic construct
  misc_feature 1..2667: note = Description of Artificial Sequence: Synthetic coding sequence
  source 1..2667: mol_type = other DNA
tctgaggtggaagcccttaccgaacagctaagcgaggaggaagaggaggaggaggaggaagaggaggaagaagaggaggaggaagaggaggaagaggaagaggaggacgaggaatctggcaatcagagcgataggagtggatcttcaggccgccgaaaagctaagaagaaatggagaaaggactcaccttgggttaagcctagtcgcaaaaggaggaaacgcgagccacccagagctaaagaaccacgcggtgtcagtaacgatacttcctccctcgaaaccgagcggggattcgaggagctgcctctctgtagctgtagaatggaagccccgaaaattgaccgcatttcagaaagagcaggacataagtgcatggctaccgaatcagtggatggcgaactcagcgggtgcaatgctgcaattttgaagcgtgagactatgaggccctctagtcgggtggctctgatggtgctatgtgagacacacagagctaggatggttaaacatcattgctgtcctgggtgtggatatttctgcaccgcagggacattccttgagtgtcaccccgacttccgggtggctcaccggttccacaaagcatgcgtctcacagctaaacggcatggtgttctgccctcactgcggtgaagatgctagcgaggcccaggaagtcacaattccacgtggggatggcgtgaccccacctgccgggaccgcagcacccgctccaccaccactgtcgcaagacgtgcctggcagagctgatacatctcagccctcagctcggatgcggggccacggggagccgaggcgacccccgtgcgaccctctggcagacacaattgatagttctgggccgtcactaacattgcccaatggtggctgcctgtctgccgttggccttccgctcggccccggtagagaggctctggagaaggctctggtaatccaggaaagcgaaaggcggaaaaagttgcgctttcaccccaggcagctttacctttccgtcaagcaaggcgagctgcaaaaagtgatcctgatgctgctggataatctagacccaaatttccagagcgaccaacagagcaagcgtacaccactgcacgctgctgcccagaaaggttctgtggaaatttgtcacgtcctgttgcaggctggcgccaacataaacgctgtggacaaacaacaacgcacgccactaatggaggcggtggtcaacaaccacttggaagtggctaggtacatggtgcagagaggggggtgcgtttatagtaaagaggaggatggttctacttgtctgcatcacgctgccaaaatcggcaaccttgaaatggtcagccttctgctatcaaccggccaggttgacgttaacgcacaggactccggaggatggactccaataatctgggctgccgaacacaagcacattgaagtgatccggatgttgctgacccgcggcgctgatgtcactcttacagacaatgaggaaaatatctgcctgcactgggccagcttcacgggatccgctgcaatcgcagaggtcctcctgaacgcacggtgtgatctgcacgccgtaaactatcacggagataccccgctgcacatcgcagcgagggagtcttaccacgattgcgtgctgctcttcctttcacggggggccaacccggaactcaggaataaggagggggatactgcctgggacctgacccccgagcggagcgatgtttggtttgcattgcagctcaacaggaagttaagactaggggtggggaaccgcgccatccgcacggagaagattatctgccgggacgttgcgagaggatatgagaatgtcccaatcccctgcgttaacggcgtcgacggtgaaccctgcccagaagattataaatacatctccgaaaattgtgagacctcgaccatgaatatcgaccgaaatattacacacctgcagcattgtacatgcgtcgacgattgtagcagttctaattgcctctgtggccagttgtccatcaggtgctggtatgacaaggacggcagactgttgcaggagtttaataaaatcgaaccgccactcatctttgaatgcaaccaggcctgttcttgctggaggaactgcaagaatagagtagtccagtcaggcattaaagtgcggctgcaactctaccgcaccgccaagatgggatggggggtccgcgctctgcagacaatacctcagggaacgttcatttgcgagtatgttggcgagctcatcagtgacgccgaagctgatgtgagagaggacgattcctacctgtttgacttggataacaaggatggcgaggtgtattgtattgatgctcggtattacggtaatattagccggttcatcaatcacctgtgcgacccaaacatcatcccagtacgtgtgtttatgctgcatcaggacttaagattcccgcgaatcgcatttttttccagccgggacattcgaaccggcgaggaactcggcttcgactacggggataggttttgggatatcaaatcaaagtactttacatgccagtgcggcagcgagaaatgtaagcacagcgctgaggccattgccctggaacagtccagactggcccgcctggacccccacccggaactcctgcctgagctaggcagcctgcctccggtcaatacctag

SEQ ID NO: 116185 - DNA, 2769 bp, synthetic construct
  misc_feature 1..2769: note = Description of Artificial Sequence: Synthetic coding sequence
  source 1..2769: mol_type = other DNA
tccgaggtcgaggcactgaccgaacagttgagcgaggaagaagaagaagaagaagaggaggaggaagaggaggaagaagaagaggaggaagaggaggaggaggaagacgaggaatcaggcaaccaaagcgaccggagtggcagctcgggccgcagaaaggcgaagaagaagtggcgaaaagacagtccctgggtgaagccatccaggaaaaggaggaaaagggagcctcctagagcaaaggaaccacgaggcgtgaacggcgtgggctcttccggcccctctgaatatatggaggttcccttgggcagtctcgaactacctagtgaaggaacgctgagccctaaccacgccggcgtgtccaacgacacgagttccttagagaccgagagagggtttgaggaactaccgttgtgttcatgcaggatggaagccccaaagattgatcggatatccgaacgcgcaggccataagtgtatggccacagaatccgtggacggggagctcagtgggtgtaatgccgccattctcaagcgagaaaccatgcgaccctcctctagagtggcactgatggtgttgtgcgagacccacagggctcgaatggtgaagcatcattgttgtcccggctgtggatatttttgtacggctggaacgttcctggaatgtcacccagattttagagtcgctcacaggtttcataaggcttgtgtgtctcagctcaatggaatggttttttgcccacattgcggggaggacgcatccgaagcccaggaggtaaccatcccccgcggcgatggagtgaccccacctgcaggaactgcagcacctgcccctccaccgttaagccaggacgttcccggcagggcggacacaagccagccttccgcgcgaatgcgtggccacggtgaaccacggcggcccccatgtgaccccctggctgacacgatcgattcttccggaccatcactgactctacccaatggtggctgtttaagtgccgtgggcctcccactgggtcctggtcgtgaggcattagagaaggctttggtgatacaagagagcgagaggcgtaagaagctgcggttccacccccgccagctctatctgagtgtcaaacagggtgagttacaaaaggtgatacttatgctcctggataacctcgatccaaactttcaatctgaccagcagtccaagagaacaccactccatgccgctgctcagaaaggttcggttgagatctgccacgtgctgttgcaggcaggcgccaacatcaatgctgtggacaaacagcaacgcacaccactcatggaagctgtggtgaacaaccatctggaggtggctcggtacatggttcagcgaggtggatgtgtttattctaaggaagaggatggatccacttgccttcatcatgcagctaaaatcggcaacttagagatggtgtctctgctactgtctactggtcaggttgatgtcaatgctcaggattcaggaggatggacgccaatcatttgggccgctgagcacaaacatatcgaggttatccgaatgctgctgacacggggagccgatgtgactctgaccgataacgaggagaacatttgcctgcattgggccagcttcactggctcagcggccattgcagaagtgttgctcaacgccaggtgcgatctacatgctgtaaactaccatggcgatacaccgttacatatcgctgcccgagagtcttaccatgactgcgtgctactgttcttatcccgtggcgccaatcccgaactgcgcaacaaagagggcgataccgcatgggatctgacccccgagcgtagcgatgtgtggtttgcccttcagctgaataggaagcttaggttaggagtgggtaacagagctatccgcaccgagaagatcatctgcagggacgtcgctagaggctatgagaatgttcccatcccatgcgttaacggggtggatggcgagccgtgtcccgaggactacaaatatattagcgagaactgcgagacctccaccatgaacattgaccggaacatcacccacttacaacattgtacatgtgtcgacgactgttcttcgagcaactgtctatgtgggcagctgagcatccgctgttggtacgataaggacggccggctgttacaggagttcaataagattgagccaccccttatttttgaatgcaatcaagcttgctcctgttggcgaaattgtaagaatcgtgtcgtgcagagcggaatcaaagtgagactccagttgtatcgaacagcaaaaatgggctggggggttcgggctttacagactatccctcagggcacgttcatctgtgagtatgtgggtgagctcatctctgatgcagaggctgatgttagggaagatgatagctacctatttgatcttgataataaggatggagaggtatattgtatcgatgcccgttattatggtaacattagccgttttattaatcacctgtgtgatcctaacattatccccgtccgggtgtttatgcttcaccaagacctgcgattcccccgcattgccttcttctcctcaagagacataaggacgggtgaagagctgggtttcgactacggtgacagattttgggatattaaatcaaagtatttcacatgccagtgtggcagtgaaaagtgcaagcatagtgccgaggccatagcgctcgagcagtcccgcctggccagactggatccccatcctgagctcttgccggagttagggtcactaccaccggtcaacacttag

SEQ ID NO: 116186 - DNA, 3096 bp, synthetic construct
  misc_feature 1..3096: note = Description of Artificial Sequence: Synthetic coding sequence
  source 1..3096: mol_type = other DNA
tcatgtcactgcactccctccaggccccctgtccctgagaaacggccacccgaaatccagcatttccgcatgtctgacgatgtacattccctggggaaggtgacttcggatcttgccaaacggcggaagctgaactccggaggcgggctcagtgaagagttgggctccgctcggcgaagcggcgaggtcacccttaccaaaggcgatcccggatcacttgaagagtgggagactgtcgtaggtgatgatttctctctgtactacgattcttacagcgtagacgaacgcgtggatagtgattcaaaatctgaggtagaggctctgacggagcagttgagcgaggaagaggaggaggaggaggaggaggaggaggaggaagaagaagaggaggaagaagaagaagaagaagaagacgaagagtccgggaatcagagcgacagatcgggaagtagcgggcgccggaaagcaaaaaagaagtggaggaaggacagcccttgggtgaaaccaagtcgtaaaaggcggaaacgtgagcccccccgcgcgaaagagccgaggggcgtgaacggagtggggtcctccggcccatcagagtatatggaagtacctcttggcagcctggaactcccaagcgaggggacactatcccccaatcacgccggggtaagtaatgatacaagcagtttggagactgagaggggttttgaagaactgccactgtgttcatgtagaatggaagctcctaagatagacagaatctcggagagagccgggcacaagtgcatggctactgagtctgtggacggtgaactctccggctgcaatgctgcaatactaaaaagggagactatgagaccaagctctcgcgtcgcattaatggtactatgtgaaacacacagggccagaatggtaaagcatcattgctgcccaggctgcgggtacttctgcacagctgggacattccttgaatgccatccggatttccgggtagcccatagatttcataaggcctgcgtgtcccagttgaacgggatggtcttctgcccacattgcggcgaggacgcgagcgaggcacaggaggtaacaattcctcgaggagatggcgttacacctcccgctgggaccgcggcccctgcccctcccccacttagccaggacgtacccggtcgggccgacacctctcagcctagtgcaagaatgcgggggcatggggagccaaggaggccgccgtgcgatcccctggccgacactattgactcatcaggcccatccctgacactgcctaacgggggatgcctgtctgctgtgggactccccctgggacccggacgagaggctctggagaaagcgctcgtcatccaggagtcagaaagaagaaagaaattgcgctttcatcctagacagttgtacctctctgttaagcagggcgaactgcagaaggtgattttgatgctgttggataatttggaccctaattttcagtcagaccagcagagtaaacggaccccgctccacgctgccgcacagaagggatccgttgagatttgccatgtgctgctgcaggcaggtgcgaacatcaacgccgtcgataagcagcagcggaccccccttatggaagctgtggttaacaatcatctagaggtcgcaagatacatggtgcagagggggggttgtgtttattccaaagaagaggacgggtccacgtgtcttcaccatgcagctaaaatcggcaatctggagatggtgtccctgctgctgtcaacggggcaggtagacgtgaacgctcaggacagcggtgggtggacaccaataatctgggcggcagagcacaagcacatcgaggttattcggatgcttctgaccaggggggcagatgtgactctgactgataacgtgagtgaacgtctggttgaagaagaaaacatttgcctgcattgggcctcattcaccggaagcgctgccatcgcggaagttctgttgaatgcacggtgcgacttgcacgctgtcaactatcatggcgatactcccctccacattgccgccagagaaagttaccatgactgcgtgcttctattcctcagcaggggggctaaccctgaactccgaaacaaggagggggacaccgcatgggatttgactccggagaggtctgatgtgtggttcgcacttcagttaaaccgaaaacttcgcttaggcgtgggcaaccgggccatcaggactgaaaaaattatctgcagggacgtggcgcgcggatatgaaaacgtacctatcccctgtgtgaacggagtagatggtgaaccatgcccagaggattataagtacatcagtgagaactgtgaaacttctaccatgaacatagatcgaaacataactcatctgcagcattgcacctgtgttgatgactgctccagttctaactgcctctgtggacagctctccattaggtgctggtacgacaaggatgggcggctcctccaggagtttaacaaaatcgaacctcctctcatcttcgagtgcaaccaggcctgtagctgctggcgtaattgtaagaatcgcgtcgtgcagtctggtattaaagtgagattgcagctctatagaaccgccaagatgggttggggcgtgcgagcgctgcaaacaataccccagggtacctttatctgtgaatatgttggagaactgatctctgatgccgaagctgacgtgagggaagacgactcctacttatttgatttagataacaaggacggcgaggtgtactgcattgacgccaggtactacggtaatatcagtcgcttcatcaaccacctgtgcgatccaaacattattccagtgcgcgttttcatgctgcaccaagacttgaggttcccgcggatcgctttcttcagcagccgcgacatcaggactggggaggaactcggatttgactacggcgacagattttgggatattaagagcaagtatttcacttgtcaatgcggcagcgaaaaatgcaagcatagcgccgaggcaatcgccttggaacagtctagactcgccagactagatcctcaccctgagttgctgccggaactcggcagtctcccaccagttaatacttag

SEQ ID NO: 116187 - DNA, 3096 bp, synthetic construct
  misc_feature 1..3096: note = Description of Artificial Sequence: Synthetic coding sequence
  source 1..3096: mol_type = other DNA
tcatgtcactgcactccttcatggccaccagtgcccgaaaagagaccacctgaaatacaacattttcgaatgtccgacgacgtgcactctctgggaaaggtaaccagcgacctggccaagaggcggaagctgaacagtggagggggactttctgaagagctgggttctgcgcgcaggagcggtgaggtgactttgacgaaaggtgatcccgggtccctcgaggaatgggagacagtggtgggcgacgacttcagtttgtattacgactcctacagcgttgacgagcgcgtggactcagactcaaagagtgaggtggaggcgcttaccgagcaactctccgaggaggaggaggaggaagaagaagaggaagaggaagaggaggaggaggaggaggaagaagaagaggaggaagacgaggagtctggaaatcagagcgacagatccgggagctccggtcggcgcaaagctaagaaaaaatggagaaaggattctccttgggtgaagcccagccggaagaggaggaaacgcgagccccctagagccaaagagcctaggggagttaacggcgtaggttcttccgggcctagtgaatacatggaggtgcccttgggaagtttagaactgcctagcgagggcactctgtcccccaatcacgctggtgtatctaatgacaccagttccctggagaccgagcggggctttgaggagctgcctctgtgttcttgccgcatggaggcacctaagatcgatagaatttccgaacgagccggccataagtgcatggcaacggaatcagtcgacggcgagctgagcggctgcaatgctgcgatcctcaagagagagactatgcggccgtcatcacgcgtggccctaatggtgctctgcgaaacccatagggcccggatggtgaagcatcactgttgtcccggctgtggctatttctgtacagctggcacgtttctcgagtgtcatccagacttcagggtggcccaccggttccacaaagcctgtgtgagccagctcaacggaatggttttttgcccccactgtggcgaagatgccagcgaggcgcaagaagttaccataccacgaggtgacggggtgacacctcctgccgggacagccgccccagcccccccacccctttcacaggacgtccctgggcgagccgacacctcgcagccatcagctcgcatgcggggccatggtgagcccaggcggccaccatgcgatccactggctgacaccatagactctagcggcccgtcactcacccttcccaacggtggatgtttatccgccgtgggattacctctaggtcctgggagagaagccttagagaaagctcttgtgatccaggagtcagaacgacggaagaagttgagattccatccgcggcagctgtatctgtcagtgaagcagggagagctccagaaggtgattttgatgctcctcgataatcttgatcctaatttccagagtgatcagcagagcaaacgcactccactgcacgctgctgctcagaagggatccgtcgaaatctgtcacgtgctcctacaggctggggctaacattaacgcagtggacaagcagcagcggacacctctgatggaggccgtggttaataaccacctggaggttgcacggtatatggtgcaacgcggaggctgcgtgtactcgaaggaagaggacggtagtacatgcttgcatcatgctgccaaaattgggaatctggaaatggtgagcctgctcctctcaaccggtcaggttgacgtcaatgcgcaggattctgggggctggactcctataatctgggcggccgagcacaaacacatcgaagtaatcaggatgttgcttacgcgaggcgctgatgtgaccctcactgacaatgttagcgaaaggctggtcgaggaagaaaacatctgcctacactgggcgagcttcaccgggagtgcggccattgctgaagtgctcctcaacgcccgttgtgaccttcatgccgtcaactatcacggggatacgcctctgcatatcgccgctcgggaaagttaccacgactgcgtactcctattcctttctcgcggagctaatcccgagttgcggaacaaggagggagacacggcatgggacctcacacccgaacgatccgatgtttggttcgcgctgcagctcaatcgcaaactgcggctgggggtgggaaatagggcaatcagaaccgaaaagatcatctgtagagacgtggccagaggatatgagaatgtcccaatcccatgtgtgaacggggtggacggcgaaccctgccctgaggactataagtacatctcagagaattgcgagaccagcaccatgaacattgaccggaatataacgcatttgcagcactgtacctgcgtggatgattgttccagctcgaattgcctgtgtggacagctaagcatacggtgttggtatgacaaggatgggcggcttcttcaggagtttaataagatcgagccgcctctaatatttgagtgcaatcaggcttgctcctgctggcggaattgtaaaaacagagtggtccaatcaggcattaaagtgcggctccagctatatcgtacagccaagatgggatggggagtcagagccctccagaccattccccagggtacctttatctgcgaatatgtcggcgaactcataagcgatgctgaggccgacgtccgggaggatgactcttatctctttgacctggataataaggacggagaggtatactgtatcgacgctaggtactacggaaatatcagccgatttatcaaccacttatgtgatccaaacatcatccccgtgagggtgtttatgctgcaccaggacctccggtttcctcgcattgcatttttctctagccgcgacattcgaacgggcgaggaacttgggttcgactatggcgatagattttgggacatcaaaagcaagtacttcacctgtcagtgtggctcagaaaagtgtaagcactcagcagaggcaatcgccctggagcagagcaggctggcccggctggatcctcatcccgaactgttgcctgaactggggagcctgccccccgtgaacacctag

SEQ ID NO: 116188 - DNA, 3096 bp, synthetic construct
  misc_feature 1..3096: note = Description of Artificial Sequence: Synthetic coding sequence
  source 1..3096: mol_type = other DNA
agttgccactgcaccccaagctggcctcccgtaccagaaaaacgtccacctgagatacagcatttccgaatgtcggatgatgtacatagccttgggaaggtcacctcagatttggccaagcgtcggaagctgaattccggcggcggactctccgaggagctgggcagcgcaaggcggtccggcgaggtgaccctgaccaagggtgatcccggatctctcgaggagtgggagaccgtggtgggcgacgacttttccctgtactacgatagctactcagttgacgagagagtggattccgacagtaagtcagaggtggaggcactgactgaacagctgagtgaggaagaggaggaagaggaagaagaggaagaggaggaagaggaggaggaggaagaggaggaggaggaggaggacgaagagtccggtaatcagagtgacaggtccggtagcagcggacggcgaaaagccaagaagaagtggcggaaagattcgccatgggtgaaaccatcacggaagcgtcgcaagcgtgagccgcctagagcgaaggagccaaggggggttaatggtgtcggaagctccggcccttccgagtatatggaagtccctctgggcagtctggaactgccctctgaaggtacactgagtccaaaccatgctggagtgtcgaacgatacctcctcattggagactgagagagggttcgaagaactcccactttgctcgtgccgtatggaggctccaaaaattgaccggatttctgaacgagccggccataagtgcatggcaactgaatctgtggacggcgagttgtcaggctgcaatgctgccatcctcaagcgagagacaatgcggccatcgtcccgggtagcgctgatggtactttgcgagacgcacagggccaggatggtcaaacaccactgctgtccaggctgcggctacttttgcacagctggtactttcctcgagtgccatcccgacttcagagtggcccatcgttttcataaggcctgtgtgtcccagctgaacgggatggtgttctgtcctcactgcggagaggatgctagtgaggcccaggaagtgactatccccagaggggacggagtcacaccaccagctggaacagcggctcccgctcccccaccactttcccaggatgtgcccggacgggcggatacaagccagccttcagccaggatgagaggccacggagagccccggagaccgccatgcgacccgctggccgacacaatcgatagcagcggacccagtctgactctcccgaatggaggatgccttagcgcagtgggattgcctttggggccaggtcgagaagctctagagaaagctctcgttattcaagagagcgagcgaagaaaaaagctccgcttccacccgcgtcagctctatcttagcgtcaagcagggagaattgcagaaagtcatactgatgctcctggataacctggaccccaactttcagtcagaccagcagtctaagaggacccctctgcacgcagccgcacagaagggatccgtggaaatctgccacgtgctgctgcaagcgggagccaatataaacgctgtggacaagcaacaacgaaccccactgatggaggccgtcgttaataaccacctcgaagttgcaaggtatatggttcaaagaggtgggtgcgtctactccaaggaagaggacgggagcacgtgcttacatcatgccgccaagatcggaaaccttgagatggtgtctctgcttttaagcacaggccaggtggacgtaaacgcacaggattctggcggttggacccccatcatatgggcagccgagcacaaacacattgaggtgattcggatgcttctcacgagaggggccgacgtgaccctgacagataacgtgtccgaacggctcgtggaggaggaaaacatctgtttgcactgggcctcgtttactgggtccgccgcgatcgccgaagttcttcttaacgcacggtgcgacctgcatgcagtcaactaccatggcgatactcccctccatattgccgccagggaatcctatcacgattgtgttctgttgttcctgtccaggggcgcaaatccagaacttaggaataaggaaggggacacagcatgggaccttacacctgaacgctccgacgtgtggttcgcactccagctgaataggaagctgcgtctgggcgtcgggaacagggcaattcggactgagaagatcatttgcagggacgtcgccagaggatatgaaaacgtccccattccttgcgtgaatggggttgacggagagccttgtccagaggattacaagtatatttctgaaaactgcgaaacctccactatgaacattgaccgcaatataactcacctgcagcattgcacttgcgttgacgactgctcctcttccaattgtctgtgcggacagctctcaattcgttgctggtatgacaaagatggtcggctgttacaggagtttaacaagattgagcctccactaatcttcgaatgcaatcaggcttgtagctgttggcggaattgtaaaaatagagtcgttcaatcaggtatcaaagtcaggcttcagctttaccgcaccgctaaaatggggtggggagtgagggctctccaaacgattccgcaaggcacatttatctgtgagtatgtcggggagttgatctcagacgcggaggccgacgtccgcgaggatgacagctatttgtttgatttggataataaggatggcgaggtgtattgcattgatgctaggtactacggaaacatctcaagattcatcaaccacctgtgcgatcctaacattatccccgtccgggtgttcatgcttcaccaagatctgaggtttcccaggattgccttcttttcctctcgagacatccggactggagaagaactgggctttgattacggagaccggttctgggacataaagagtaagtacttcacctgccagtgtggctctgagaagtgcaagcatagtgccgaggccatcgcacttgaacaaagccggctggcccgtctcgaccctcaccccgagctgctgcccgaactgggctccctcccacctgtcaatacttag

SEQ ID NO: 116189 - DNA, 3096 bp, synthetic construct
  misc_feature 1..3096: note = Description of Artificial Sequence: Synthetic coding sequence
  source 1..3096: mol_type = other DNA
tcttgccattgcacccccagcagaccaccagttccagagaagagacctccagaaattcaacacttcaggatgtctgatgacgttcatagcctcggcaaggtgacgagtgatctggccaaacgcagaaagctgaactccggtggaggactttctgaagagcttggtagcgcacggcgcagcggagaagtcactttgaccaaaggggacccaggctcactggaagagtgggagactgtagtgggtgacgatttcagtctatactatgacagttattctgtggatgaacgcgtagatagcgattcaaaaagcgaggtggaggcacttaccgagcagctgagcgaggaggaagaggaagaggaagaagaggaggaagaagaggaagaggaagaggaggaggaagaggaggaagaagatgaggagtcaggaaaccaaagtgaccgctccggctcctctggacggagaaaagctaagaagaaatggcggaaagatagcccatgggttaaaccaagtcgcaaacgcaggaagcgcgaaccaccacgagccaaggagcctcgaggggtaaatggcgttgggtcaagtgggccgtccgaatatatggaggtcccccttggctcactagaacttcctagtgagggaactctctcgcccaatcatgccggcgtctccaacgacacatcatcgttggagactgagagaggcttcgaagaactcccactgtgtagttgccggatggaggctcccaagattgatcgaatctccgaacgggctggccacaaatgtatggctaccgagagcgtggacggagaactgtccggttgcaatgctgcaattctcaaaagggaaaccatgcgaccatctagccgggtggcccttatggtgctgtgcgaaacacaccgggcacgaatggtcaaacatcattgctgtcccggatgcggctatttctgtactgcaggaacttttctcgagtgtcacccagattttagggtcgcacatagattccacaaagcctgtgtgtcacaactgaatggcatggtgttttgccctcactgtggagaggacgcttctgaggcccaggaggtgactattcctagaggcgacggggtgactccccccgcaggcacagccgctcctgctccacctccactgtctcaggatgtcccgggaagggccgacacctcacagcccagcgcgagaatgagagggcatggggaaccaaggcggcccccttgtgaccctttggcggatacgatagattccagcggaccatcactgacgttgcccaacggcggctgcctttcagccgtgggactgcctctgggacccggcagggaagcactcgaaaaagcgctggtgattcaagaatccgaaagacggaagaaactgcgcttccacccccgccagctgtatctgagtgtcaaacagggcgagttacagaaggtgatcctgatgttgctggacaacctcgatcctaactttcaatctgatcagcagtcaaaacgcacccccctccatgccgccgcccagaaggggtcggtggaaatttgccacgttctccttcaagcaggcgccaacattaatgccgtggacaagcagcaacgcacccctctgatggaggctgtcgttaataaccacctcgaagtggctcgttacatggtccagcggggtggatgcgtctatagcaaggaagaagatgggtctacatgcctccaccatgctgcaaagattggaaatctggagatggtgtctcttctgctctccacaggacaggtggacgtaaatgcgcaggattccggggggtggacaccaatcatctgggcagcggaacacaagcacatcgaagtgattagaatgttgctgacgagaggggccgacgtgacactgacagacaatgtgtcagaacgcttggtcgaggaggagaacatttgcctgcactgggccagtttcacggggagcgccgccattgctgaagttctcctgaatgcccggtgcgatcttcacgccgttaattaccacggggacacgccgctgcatattgccgcaagagaaagttaccatgattgcgtgctcctcttcttaagtagaggggccaacccagaattgcggaacaaagaaggggatacagcctgggacctgactcctgagcggtccgacgtgtggttcgctctgcagctaaatcggaagttacgtttgggggtgggaaatagagcgatcagaaccgaaaaaattatttgccgggatgtcgctcgagggtatgagaatgtccctattccatgtgttaacggtgtagatggcgagccatgccccgaggattacaagtacatctctgagaattgtgagaccagtaccatgaatattgacagaaacataacccatttgcagcactgcacttgtgttgacgattgtagttcttcaaattgcctgtgcggtcagctgtccatccgatgctggtacgacaaagatggcagacttcttcaggagtttaataaaatcgagcctccactcatcttcgagtgcaatcaggcatgcagttgctggcgtaattgcaaaaaccgggtagttcaatcaggtattaaggtacggttgcagctttaccgcaccgcgaaaatgggttggggggtgcgagccctgcaaactatcccacaggggacttttatctgtgagtatgttggcgaacttatatcagatgcggaggctgacgttcgggaggatgacagttacttgttcgacttggacaataaggacggagaggtgtattgtatagacgcacggtattacggcaatattagccggttcatcaaccatctgtgtgaccccaacattatcccagtgagagtgttcatgcttcatcaagatctgaggttccccagaatagcattctttagctccagggatattcggacaggagaggaactgggcttcgactatggggataggttttgggacataaaaagtaagtacttcacctgtcaatgcggctcagagaagtgcaagcattcggcagaagctatcgcactagaacagagtaggctagctcgattggatccgcacccagagctgttacccgaattaggttcgctccctccagtgaatacttag

SEQ ID NO: 116190 - DNA, 3096 bp, synthetic construct
  misc_feature 1..3096: note = Description of Artificial Sequence: Synthetic coding sequence
  source 1..3096: mol_type = other DNA
tcctgtcattgcacgcctagttggcctcctgtcccagagaagcgaccacctgagattcaacactttcgtatgagtgacgatgtgcattcactgggcaaggtgacatccgacctggcaaagcgaagaaagttaaactcgggcggtggtctttccgaagagctagggtctgctaggcggagtggggaagtgaccctgacaaaaggggacccaggtagcttggaggagtgggagaccgtcgtgggcgacgatttcagcctttattatgattcctactcagtcgatgagagggtggattctgacagcaagtctgaagttgaggctttgacagagcagctcagcgaggaggaggaggaggaagaggaggaagaggaggaggaagaagaggaggaggaagaagaggaagaggaggaggacgaggagagcggcaaccagtcagataggagcggcagctctgggaggcggaaagcaaagaaaaaatggcgaaaggacagcccctgggtgaagccctcccgaaagaggcggaaaagggagcctccacgggcaaaggaaccaagaggcgtaaacggcgtaggttcgtctggtccttctgaatacatggaagttcccctaggttcactggaactgccctccgagggcaccctctctcccaatcacgcaggcgtatccaacgacacaagctcgctggagacagaacgcggtttcgaagaactaccgttgtgctcgtgtcggatggaggccccgaagattgatcgaatcagcgaacgggcaggtcataaatgcatggcgactgagtcggtggacggggaactgagtgggtgcaatgctgccatcctcaaacgagaaactatgcgaccaagcagccgcgtggcactgatggtcctttgcgaaacacaccgggctagaatggtgaaacatcattgctgccctggatgtgggtatttctgtactgccggaacgtttttggagtgtcacccagactttcgcgttgcacacagatttcataaagcctgcgtctctcagctaaacggcatggtattttgtcctcattgtggggaggatgcaagtgaagcgcaagaggtgactattcctagaggcgacggcgtgacgccacccgccggtacagccgcacccgcaccacctcctctctctcaggatgtgccaggccgggctgacacaagtcagcctagtgctcgcatgagaggtcacggtgagcctcgacggcccccctgcgaccccctggctgataccatcgattccagtgggcctagcttgacgctgccaaacggaggctgtctctcagccgtggggcttcctctaggtcctggcagagaagccttagagaaagcactagttattcaggagagcgagcgcagaaagaaactgaggttccatccacggcagctgtatctgtcagttaagcagggcgagctccagaaagtcatcttaatgctgctcgacaatctcgatccgaactttcagagcgaccaacagtctaaaagaactcctctgcacgctgccgcccagaagggctccgtggagatatgtcacgtgctgctgcaagccggtgccaatatcaatgccgtggacaaacagcaacgcacccccttgatggaagccgtggtcaataatcacctggaagtcgcgcgatatatggttcagaggggcggctgcgtgtattccaaggaggaggacggttctacatgcctccaccacgcagccaagataggcaacctcgaaatggttagccttctgcttagtacgggtcaggtagacgtcaacgcgcaggacagtggcggctggacaccgattatttgggccgctgaacataagcatatagaggtcattcgcatgctcttgactagaggcgctgacgtaactcttacagacaatgtttccgagcgcttggtcgaagaagaaaatatctgcttgcactgggccagcttcacaggttccgctgccattgccgaagtcctcctgaacgctagatgcgacttgcatgcagtgaactaccacggggacacaccattgcatattgccgcccgcgagtcatatcatgattgtgtcctactctttttaagcagaggggctaatcctgaattaagaaataaagagggggatacggcctgggacctgacgcctgaaagaagcgacgtgtggttcgccctacagttgaaccggaagctccgtctgggggtcggcaatcgggcgattaggacggaaaaaattatttgcagagatgtggctcgaggctatgaaaatgtacccattccttgcgtgaatggagtggatggggaaccatgcccagaggattacaaatatattagtgaaaactgcgagactagtaccatgaacattgatcggaatattacgcatctccagcactgtacatgcgtggatgattgttcttcatcaaactgcctgtgtggtcaactgtctataaggtgctggtacgacaaggatggtaggcttctgcaggaattcaataaaatcgagcccccactaatctttgagtgcaatcaggcatgctcatgctggcgtaactgtaagaatcgcgttgtgcagagtggaatcaaggtccgactgcagctatataggactgcaaagatgggctggggagtcagagctcttcaaaccataccgcaaggaacctttatttgcgagtacgttggagagctgataagcgacgccgaagccgatgtgagggaagacgactcatacctgtttgatctggacaacaaggacggtgaggtgtactgcatagatgcgaggtactacggtaatatcagcagatttatcaaccacctttgtgaccccaatatcatcccggttagagtctttatgttgcatcaggatctccggtttccacggatcgcttttttctccagccgagacatcagaaccggcgaagagctcggctttgactacggcgatcgcttttgggatattaagtcaaagtactttacctgtcagtgcgggtctgaaaagtgcaaacattctgccgaagcaatcgcccttgagcagtctaggctggcgcgcctcgatccacaccccgagctgctgccagagctggggagcctcccacccgtgaatacttag

SEQ ID NO: 116191 - DNA, 2178 bp, synthetic construct
  misc_feature 1..2178: note = Description of Artificial Sequence: Synthetic coding sequence
  source 1..2178: mol_type = other DNA
atggcggatgaagatcttatttttagactcgaaggggtcgacggagggcagagcccccgcgccgggcacgacggcgatagtgatggcgactccgacgacgaggagggctatttcatctgtcccataacagacgacccctcatctaaccagaacgttaattccaaggtaaacaagtattatagcaatctgacaaagtcagagagatacagttccagtggttctcccgccaatagctttcatttcaaagaggcctggaaacacgcaatacaaaaggcgaagcacatgcccgatccctgggctgagttccatctggaggacatcgcaacggagagagctacgagacacagatataacgcagtgacaggcgaatggttagatgacgaggttttgataaaaatggcaagccagcccttcggcaggggtgccatgagggagtgtttcagaacaaagaagctgtccaactttctgcatgctcagcaatggaagggagcaagtaattacgtcgccaaacggtatattgaacccgtggacagggatgtgtacttcgaggacgtccggctgcaaatggaagctaaactgtggggcgaggaatataaccggcataaacctccaaagcaggtagacataatgcagatgtgtatcattgagctaaaggataggccaggcaagcctctcttccatctggagcactacatcgaagggaaatacataaagtacaattcaaatagtggctttgttagagacgacaatattcgactcaccccgcaggcatttagccacttcacgttcgaaagaagtggccatcaattgattgtggtcgatatacagggggtcggtgacctctacaccgatcctcagatacataccgagacgggtacagatttcggtgatgggaacttgggcgttagaggcatggccctcttcttctactcacatgcttgtaacaggatttgcgagtctatgggtctcgccccatttgacctcagccctcgggagcgggacgctgttaaccaaaatactaagctcttgcagtccgctaagaccattttgcgcggaacagaagaaaaatgcggttctcctcaggtcaggacccttagtggtagtagaccacccctgttgcgtccactgtccgaaaacagcggggatgagaacatgagcgacgtcaccttcgacagtctcccctccagcccctccagcgcgaccccacatagccagaagcttgaccatctacactggcccgtattcagcgacctagacaacatggcttctcgcgaccacgatcacctcgataatcacagagagagcgaaaactcaggcgattccggatatcctagcgaaaagcggggcgaacttgatgatcccgagcccagggagcatggacacagctactctaaccgtaagtacgaatccgacgaagatagcctcggctcgagcgggagagtgtgcgttgaaaaatggaatctcctaaatagttcccgacttcatctccctagggcctctgccgtggctctggaagtccagcggttaaacgccctggacctcgagaaaaagattgggaaaagcattctggggaaggtgcacctcgccatggtgcgctatcatgaaggcggacgcttctgtgaaaaaggcgaggagtgggaccaggaatcagctgttttccacctagagcacgccgcaaacttgggcgagctagaagccattgtgggactcggccttatgtatagccagctgccacatcacatactcgccgatgtgtccttgaaagaaacggaagaaaataaaactaaagggtttgattatctacttaaggcggcggaggcaggggatcgtcagtcaatgatcctcgtggccagggctttcgacagcgggcagaacctaagtcctgatagatgtcaggactggctggaggcccttcactggtataatactgctctggagatgacagactgcgacgagggaggcgaatatgacggtatgcaggatgaaccccggtacatgatgctcgcgcgggaggccgagatgctgtttactgggggctacggcctggaaaaggatccccaaagaagtggggacttgtatacccaggccgccgaggctgccatggaggcaatgaaaggccggcttgcgaaccagtattatcaaaaagccgaagaagcctgggcccagatggaggagtag

SEQ ID NO: 116192 - DNA, 1389 bp, synthetic construct
  misc_feature 1..1389: note = Description of Artificial Sequence: Synthetic coding sequence
  source 1..1389: mol_type = other DNA
atggggaaggaaaaaactcatataaatatagtagtcattgggcacgtggattcaggaaaaagcaccactacgggtcatttaatatataagtgcggcgggattgacaagagaaccatcgaaaagttcgagaaggaggcggcagaaatggggaaaggctcttttaaatacgcttgggtgcttgataagctgaaagctgagcgagagcggggaatcacaattgacatctctttgtggaaattcgagacctccaagtactatgtaactatcatcgatgctcctgggcatcgcgatttcattaagaacatgataacagggacatctcaggccgattgcgccgtactcatcgtggccgccggtgtgggagaatttgaggccggcatatcaaagaatggtcagacacgggaacacgccctgctggcctatactttaggcgtaaagcagctgattgtgggagtaaataagatggactctacggaacccccatatagccagaagcgctacgaggagatcgtgaaagaagtgtccacatacataaaaaagatcggctacaaccctgatacggtggcgttcgtgccaatcagtggatggaatggagacaacatgctggaaccctcggccaacatgccttggtttaaggggtggaaggtaactaggaaagacggcaatgcaagtggaactacactgctggaagcccttgattgtattctgcctccaacccggcctacggataagcccctgagacttccgctccaggatgtgtacaaaattggcggaattgggactgtgcccgtaggtcgtgtcgagacaggtgtcctcaagcctggtatggttgtcactttcgcccctgtcaatgtaactaccgaagttaaatccgtggaaatgcatcatgaagccttatctgaggccttgccgggcgataacgtcgggttcaacgtgaagaacgtgagtgtgaaagatgttagaaggggaaacgtggctggagactccaaaaacgatccacctatggaagcagcaggcttcactgctcaggtcatcatcctaaatcaccccggacagatttccgccggttacgcccctgttctggattgccatacagcacacatcgcttgcaaatttgcagagctgaaggagaagatagatagacgctccgggaaaaaactagaggatgggccgaagttcttaaaatccggagatgcagcgattgtcgacatggtcccggggaagccgatgtgcgtggagtcctttagtgactacccccccctggggcgctttgctgtacgggacatgagacaaacagtggcggtgggagtcattaaggctgtggacaaaaaagctgccggcgccggtaaagtgaccaaaagtgcccagaaagcccagaaggcaaaatag

SEQ ID NO: 116193 - DNA, 1389 bp, synthetic construct
  misc_feature 1..1389: note = Description of Artificial Sequence: Synthetic coding sequence
  source 1..1389: mol_type = other DNA
atggggaaagagaagacgcacatcaatattgttgtgatcggacacgtggacagcggcaaatccacgaccacagggcacctgatttataaatgcggcgggattgataaaagaactattgaaaagttcgaaaaagaggccgccgaaatgggcaaaggcagtttcaagtacgcctgggttcttgataagttaaaggccgaaagagagcggggaatcaccatcgacatttccctgtggaagttcgagaccagcaaatactatgttacaatcattgacgcccccggtcaccgcgattttattaagaacatgatcactggaactagtcaggctgactgcgctgtcctgattgtcgccgctggtgttggagaattcgaagctggcatttccaagaatggccagactagagagcacgccctgcttgcctacaccctgggggtgaaacagctcatagtgggggtaaataagatggactctacagaaccaccctactcccagaaaaggtacgaggaaatcgtgaaagaagtttctacatatattaagaaaattgggtataaccctgatactgtcgctttcgtgccaatctccggctggaacggcgacaacatgctcgaaccctccgccaatatgccctggtttaaagggtggaaggtgacccgcaaagatgggaatgcctccggcactactctgctcgaggctctggattgcatactgcccccaacgcggcccacagataaaccattaagacttcctctgcaggacgtctataagattggagggattggcacagtgccagtgggaagagtggagacaggagttcttaagcccgggatggtcgtcacgttcgctcccgtgaatgtgactactgaagtgaagtctgtggagatgcaccacgaggctttgtcggaggccttacctggggacaacgtgggatttaatgtaaagaacgtgtcagtgaaagatgtcaggaggggaaacgttgctggtgacagcaagaatgacccacctatggaggcggcaggctttacagcacaggtcataattctgaaccatcctgggcagatctcagctggctatgctcccgtgctggactgccacactgctcacattgcctgtaaatttgccgagctcaaagagaagattgacaggaggtcagggaaaaagctggaggacggtcctaagtttcttaaatctggagatgctgctatcgtggatatggtacccggtaaacctatgtgcgtggagagtttttcagactatccacctctggggcggtttgcagtcagggacatgcggcagacagtcgctgtcggcgtgatcaaggctgttgataagaaggcagctggtgccggtaaagtgacaaagtcagctcaaaaggcccagaaggctaaatag

SEQ ID NO: 116194 - DNA, 1389 bp, synthetic construct
  misc_feature 1..1389: note = Description of Artificial Sequence: Synthetic coding sequence
  source 1..1389: mol_type = other DNA
atgggtaaggagaaaacacacattaatatcgtggttatcgggcatgtggacagcggtaaatcaacaaccacaggccatctcatctataagtgcggaggaattgataagcgcacaatcgaaaagttcgaaaaggaggcagccgagatgggaaagggctccttcaagtatgcttgggttctcgacaagcttaaagctgaaagagagcgtggcatcactatagacatctccttatggaaatttgaaacctctaaatactacgtgactatcatcgatgcacctggacatcgggatttcattaaaaatatgatcactggcacaagccaggctgattgcgctgtgctgatcgttgccgctggagtgggagagttcgaggctgggatctcaaaaaacggccagacgcgggagcacgctctgttggcatacacactgggagtgaaacagctgatagtcggagttaacaaaatggactcaacggagcctccctacagtcagaaaagatacgaagaaatcgtgaaggaagtgagcacatacatcaaaaaaataggctacaatcccgacacagttgcgtttgtccccatctccgggtggaatggggataatatgctggagccaagcgcaaacatgccatggtttaaagggtggaaggttacacggaaagatggcaatgcctccggaactactctcctcgaggcactggactgcatcctcccgccaacgcggcctaccgataaacctctgagattaccactgcaggatgtgtacaagatcggcggaattggcaccgtgcctgtaggaagggtggagacaggggtactgaaacctggaatggtggtcacttttgctcccgtcaacgtgacaactgaggtaaagtctgttgagatgcatcacgaggccctgtcagaagcactcccgggtgacaatgtgggattcaatgtaaaaaatgttagcgttaaagacgtgcgcagggggaacgttgctggagactccaagaacgaccctcctatggaagctgccggttttactgcccaggtgatcattctgaatcaccctgggcagatttccgcaggctacgccccagtactagattgccacaccgcccacatcgcctgtaaattcgctgaactgaaggagaaaattgatcgtagatccggcaagaaactcgaagacgggccgaagtttctgaagtccggcgacgccgcaatagttgacatggtgccaggtaagccaatgtgcgttgagtccttcagcgactatccgccactggggagatttgccgtaagagacatgaggcaaaccgtggccgtcggcgtgatcaaggccgtggacaaaaaggcggctggtgccgggaaggtcaccaaaagtgcacagaaagcccagaaagctaagtag

SEQ ID NO: 116195 - DNA, 438 bp, synthetic construct
  misc_feature 1..438: note = Description of Artificial Sequence: Synthetic coding sequence
  source 1..438: mol_type = other DNA
atggggaaagagaaaactcatataaacatcgtggttattggacacgtggatagcggtaaatcaacaacaactgggcacttgatctacaagtgcggcggaatcgataagcgaacgatcgaaaagtttgagaaggaggcggcagaaatgggtaagggctccttcaaatacgcctgggttctcgacaaactcaaagccgagagggagcgcggaatcaccattgatatcagcttgtggaaattcgagacctccaagtactacgttacaatcatcgatgctcccggtcatcgggatttcatcaagaatatgattacaggcaccagccaggccgactgcgctgtactcatagtagccgcaggggtcggcgagtttgaagcgggaatcagcaagaatggccagacccgagaacacgccctgcttgcctatacgctgggagtctag

SEQ ID NO: 116196 - DNA, 1281 bp, synthetic construct
  misc_feature 1..1281: note = Description of Artificial Sequence: Synthetic coding sequence
  source 1..1281: mol_type = other DNA
atgggaaaagaaaagacacacattaacatcgtggtgatcgggcacgtagactctgggaagtctactacaactggtcacttgatatacaaatgcggaggcatcgataaaagaaccattgagaagtttgaaaaggaagcggccgagatgggcaaaggaagcttcaaatatgcatgggtgctcgataagttgaaggccgagcgggagagggggattacaatcgacattagtctatggaaattcgagacctctaaatactatgtgacgatcatagacgcaccagggcaccgagattttattaaaaacatgatcacagggacctcacaggcggactgcgcggtacttattgtcgccgcaggcgtgggagagtttgaagcgggcatttccaaaaacggacagacccgtgaacatgcactgttagcgtacaccctcggcgtaaagcaattaatcgttggtgtcaataagatggattctacggagccaccttacagtcagaagcggtacgaggagatagtgaaggaggtgtcaacatacatcaagaagattggttacaatcctgataccgtggcattcgtgccaatttctgggtggaacggcgataacatgctggagccctcagccaacatgccctggtttaagggatggaaagtgaccaggaaggatggcaacgctagtggtacaacactgctcgaggctctcgattgtattctccctccaaccagaccaacggacaagccgctgagactgccgcttcaggatgtttacaagattgggggcatcggtactgtgcccgttccctcgggtgactggtgctcacctggcatggtggtaacgtttgctcccgttaatgtcaccacggaggtgaaatcagttgaaatgcaccatgaggcattgagcgaagcactacccggagacaacgtgggatttaacgttaagaacgttagtgtaaaggacgtgagaaggggaaatgtggccggagactcgaagaacgatcccccgatggaggccgctggctttacagctcaggttatcattctgaatcacccaggccaaatttctgctggatatgcgccagtccttgactgtcacactgcccacatcgcctgcaagtttgccgaactgaaagaaaagattgaccggcgcagtggcaagaaactggaagacggcccaaagtttctcaagagtggtgatgctgcgatcgtggacatggttcccggtaaaccaatgtgcgtggagagctttagcgattaccctcccctgggcaaaagtctctgctgttcctag

SEQ ID NO: 116197 - DNA, 1326 bp, synthetic construct
  misc_feature 1..1326: note = Description of Artificial Sequence: Synthetic coding sequence
  source 1..1326: mol_type = other DNA
atgggaaaggagaagacacacatcaatattgtggtaatcggacatgtggactcgggtaaaagtacaaccacagggcacttaatttacaagtgtggcggcattgataaacggaccatcgagaagttcgagaaggaggcagctgagatggggaaaggctcctttaagtacgcgtgggtcctcgataagctgaaagccgagcgagagaggggaatcaccattgatatatccctgtggaaattcgaaacatccaaatactacgtgaccattatcgacgcccccggtcacagagatttcatcaagaatatgattactggaacctcgcaggccgactgcgccgtgttaatagttgcagccggagtgggggagttcgaggccggaatctccaagaatgggcagaccagggaacacgccctgcttgcatattctcagaaacgatacgaggaaatcgtgaaagaggtgtccacatacatcaagaaaatcggttacaaccctgacactgttgctttcgtgcctataagcgggtggaatggtgacaacatgttggaacctagtgccaatatgccatggtttaagggatggaaggttacccgcaaggatggcaacgcctcaggaactactctgctggaggcattagactgcatcttgccacccactagaccaactgataagccactccgcctgcccttgcaagatgtttacaagatcggtgggatcggaacagtgcccgtgggccgggtggagactggtgtgctgaagcccggaatggtggtcacttttgcccccgttaacgttactacggaagtgaagtcggtagagatgcatcacgaggctctgtcagaagccttgccgggagacaacgtggggtttaacgtgaagaatgtgagtgtgaaagatgtcagacgaggaaacgtggctggcgattccaagaacgacccccccatggaagctgcaggcttcactgctcaggttatcatcttgaatcatcctgggcagatttcagccggctatgcccccgtcctggattgccatacagctcacatagcttgcaaattcgccgaactaaaggagaagatagatagaaggtcagggaaaaagctagaagatggtccgaagttcctgaaatccggggatgcagccattgtggatatggtccccggaaaacctatgtgcgtcgagtcattcagcgactacccgcctctgggccggttcgccgtgagggacatgcggcaaacagttgccgtgggtgtgataaaagcagtggataagaaggcggccggcgcagggaaagtcaccaaaagtgcacagaaagcacagaaggcaaagtag

SEQ ID NO: 116198 - DNA, 324 bp, synthetic construct
  misc_feature 1..324: note = Description of Artificial Sequence: Synthetic coding sequence
  source 1..324: mol_type = other DNA
atggggaaggaaaagacacacattaacatagtggtgattggtcacgtagattccggtaaatctaccaccaccggccatctcatttacaagtgtggcggcattgacaagcgtacgattgaaaagtttgagaaagaagccgcagagatggggaaaggctccttcaagtacgcatgggtgttggataagctgaaagctgagagggagcgcggcattacgattgatatttccctctggaagttcgaaacgtccaagtactacgtgaccatcatagacgcccctggtcatagagactttataaaaaacatgataaccggaaccagctag

SEQ ID NO: 116199 - DNA, 336 bp, synthetic construct
  misc_feature 1..336: note = Description of Artificial Sequence: Synthetic coding sequence
  source 1..336: mol_type = other DNA
atgggaaaggagaaaacacatattaacattgttgtgatcggacacgtcgactccggaaagtctacaaccaccggacacctcatttataaatgcgggggcattgataaacgaacgattgagaagttcgaaaaggaagctgctgagatgggcaaaggctcctttaagtacgcatgggtgctggataagcttaaggccgagcgggagcgaggcattaccatagacatttcgctgtggaagtttgaaactaccaaacagtggacgaggcgcttgttggaactggccagatctccaagcttgcccagaaagctcagaagactgaatgaatactatccttag

SEQ ID NO: 116200 - DNA, 1626 bp, synthetic construct
  misc_feature 1..1626: note = Description of Artificial Sequence: Synthetic coding sequence
  source 1..1626: mol_type = other DNA
atggtcattaacctttgcctcccccagttccgaccacgcattcattgcaataaaatcagtgcagatggatatgaagttgaaaacctgatctcagaggacctcacaaagaggtcgcacgggtttcgtactgaatattttataaagcctcccgtctatgtgacggtttcattcccattcaatgtcgaaatttgccgaattaacatcgacttaactgccggggggggccagaacgtaactggacttgagatgtatacttccgctagcagttcgagggtcagttggaacacgccccagtgccgcacgctcggcccagctgagccaagtgtcccggacaaagaggcattcacactggtgggtaaggttctgcttaagaaccagtctcaagtcgtttttagtcacagaggcttcaaggcccggccaccctttggtgccatggaagctactcttccgtcacccgctgtggtagctcaggaactgtggaataaaggcgccctcagtctgtcccacgtggcgcacctccgcatatgcataacccacgtcaccggcggagggatcccatgtattaaacgtctggaagtgtggggtcagcccgctaagacctgctcccaggaggtgatcgactcgattttgctggttacctctgaaaacctgcctcaggacgtggccctccaggcccccgccctcccaatggagtccgattgcgacccaggcgatcaacctgaaagccaacaagccccttcctccctccagaagttagctgagatcatccaagatgtcccagaggagtttctagatccaatcacgttagaaattatgccatgtcctatgctgctaccaagcggaaaggtcatcgatcagtccaccctcgaaaagtgtaacaggtcagaggctacatggggacgagttccatcggatcccttcaccggagtggccttcaccccacacagccagccactgcctcatccttcgctcaaggcaaggatcgaccacttcctcctccaacactcaatacctggttgccacctgctaggccgtgcacaaaccgccctcgcggtcataccctcgagcatcgtgctgcccagccagaagagaaagattgaacaggccgagcatgtgcccgatagcaattttggggtgaacgctagctgtttcagcgccacctcgcccctcgtgttgcctaccacatccgagcacaccgctaaaaagatgaaagctaccaacgagccaagtttgacacacatggattgttctactggccccctgagccatgaacagaaactgagtcagtcacttgaaatcgcccttgcctccactttgggatctatgccgtcttttacagcgcgcttaactaggggtcagctgcagcacctggggaccaggggcagcaacacaagttggcgccctggcaccgggagcgagcagccaggtagcatcctcggcccggagtgcgcaagctgcaaacgggtgttttcaccttactttaagaaagagccagtctaccagttgccgtgtgggcatctgctctgccgtccttgcctgggagagaagcaacggtccttgccgatgacatgcacagcctgtcaaaggccggtagcatcacaggacgtcttacgggtgcacttctag

SEQ ID NO: 116201 - DNA, 1392 bp, synthetic construct
  misc_feature 1..1392: note = Description of Artificial Sequence: Synthetic coding sequence
  source 1..1392: mol_type = other DNA
atgggcaaagaaaagactcatataaatattgtcgtcattggccacgtcgactccggcaagtctactaccacagggcatctgatctacaagtgtggtggtatcgataaaaggaccattgagaaattcgaaaaggaggccgccgaaatgggtaaggggagctttaaatacgcctgggtgctggataaactgaaggcagagcgggagcggggcatcactatcgatatatctctctggaaattcgaaaccacaaagtattacatcacgataatagacgccccaggccacagggactttatcaagaacatgataactggcaccagtcaggctgattgtgctgtgctgatcgtggcggcaggagtgggagaatttgaggccggaattagcaagaatggccaaaccagggagcacgctttactggcctataccctgggagtcaaacagctcattgtgggagtgaataaaatggattcgaccgaacctgcatatagtgaaaagcggtatgatgagatcgtgaaggaggtgtccgcatacatcaagaagatcggctacaaccctgctaccgtgccctttgtgcctatctccggctggcatggggacaacatgctggagccgtccccaaacatgccctggttcaaagggtggaaagtggaacgcaaggaggggaacgcaagcggtgtgtccttgctcgaggccctggacacaatcctgccaccaacacggcctactgataaaccacttaggttgcctctgcaggatgtctacaagattgggggtatagggaccgtgcctgtgggcagggtggagacaggtattttgaggcccggaatggtagtgacgttcgcaccagtaaacattaccactgaggttaaatcagtagagatgcatcatgaggctctgagcgaagcactccccggcgataacgtaggctttaatgttaagaacgttagcgtcaaggatattcggcgaggaaatgtttgtggcgacagtaagtccgatcccccgcaggaggccgcacaattcacctcacaagttatcattctgaatcaccctggacaaatttccgccggctattcccctgtcatcgactgtcataccgcccatattgcatgtaagtttgctgagttaaaggaaaaaatcgaccggagatcgggcaagaaactagaagataatccgaaatcactgaaatcaggcgacgcagcaattgtagaaatggttcctggcaaaccaatgtgtgtggaatcattctcacaatatcctcccttgggccgcttcgctgtaagggatatgcggcagacagtggcagtgggagtgataaagaatgtggagaaaaaaagcggtggtgccggaaaggtgacaaaatccgcccagaaggcacaaaaagcagggaagtag

SEQ ID NO: 116202 - DNA, 678 bp, synthetic construct
  misc_feature 1..678: note = Description of Artificial Sequence: Synthetic coding sequence
  source 1..678: mol_type = other DNA
atgggttttggtgatctgaagagcccagcgggacttcaagtgctgaacgactatctggctgataagagctacattgaggggtacgttccaagccaggccgacgtggccgtttttgaagcagtttcttcccccccccctgccgatctgtgtcatgcattgcggtggtacaaccacatcaaatcatacgagaaggaaaaagcttcccttcccggagtgaaaaaggccctgggcaaatacggccccgcagacgtggaagatactacagggagcggagctacagacagtaaagacgatgatgatatcgacttgtttgggtccgacgatgaggaagagtctgaggaggccaagcgactccgggaggagcggttggcccagtacgagagtaagaaggcaaagaagcccgcccttgtggctaagtctagtatactcctagatgttaaaccttgggacgacgagacagatatggcaaaattggaggagtgtgtgcgaagtatccaagcagacggacttgtctggggatcaagcaagcttgtgcccgttgggtatggtatcaagaagttgcaaatacagtgtgtggttgaagatgataaagttggcactgacatgctggaagagcagattacagcgtttgaagactatgtccagagtatggacgtagcagcattcaataagatctag

SEQ ID NO: 116203 - DNA, 678 bp, synthetic construct
  misc_feature 1..678: note = Description of Artificial Sequence: Synthetic coding sequence
  source 1..678: mol_type = other DNA
atgggcttcggtgatcttaagtccccagccggcctgcaggtgcttaacgactatctcgctgataagagttacattgaagggtatgttcctagccaagcagatgtggctgtgttcgaggccgtgtcatcccccccccctgctgacctctgccacgccctgcggtggtacaaccacatcaagtcttatgaaaaggagaaagcaagtttgcccggcgtaaaaaaggcactgggtaaatatggtccggccgatgtagaagataccactggcagcggagccactgatagtaaagatgacgatgatatcgatctctttggcagtgatgatgaagaagaaagcgaggaggccaaaagattaagggaggaacggttagctcagtacgaaagcaagaaggctaaaaagccagctcttgtggccaaatctagtatcctcctcgatgtaaagccctgggacgatgaaaccgacatggctaaactggaggagtgtgtgagaagcatccaggctgatggccttgtgtggggctcatcgaaactggtgccagtggggtacggtattaagaagcttcaaatacagtgcgtcgtcgaggacgacaaggtgggcacagatatgctcgaagagcaaattacggcctttgaggactacgtccagagtatggatgtcgcagcattcaataagatttag

SEQ ID NO: 116204 - DNA, 678 bp, synthetic construct
  misc_feature 1..678: note = Description of Artificial Sequence: Synthetic coding sequence
  source 1..678: mol_type = other DNA
atgggcttcggtgacctaaaaagtccagccggcctccaggtgctgaacgactacttagcggacaaatcgtacatcgaggggtatgtgccctctcaggctgacgtggccgttttcgaggctgtgagttcgccgcctccagcggatctgtgtcatgccctcaggtggtataaccacattaagtcatacgagaaggagaaggcatccctcccgggggtgaaaaaggccctgggcaagtacgggcccgcggatgtggaagacacaacaggcagcggtgctacagatagtaaggacgacgacgacatcgatttgttcggcagcgacgatgaggaggaaagtgaggaagccaagaggctgcgggaggaacgattggcccagtatgagtcgaaaaaggcgaaaaaacccgcactcgttgcaaaatcctcaatccttctcgacgtgaaaccttgggacgacgagaccgacatggccaaactagaggaatgtgtgcggtccatccaagctgatggccttgtttggggaagtagcaaattggtgcctgtaggctacggcattaagaaattgcagattcagtgcgtggtggaggatgacaaggtgggaaccgacatgctggaagaacagatcaccgcatttgaagattatgttcaaagcatggacgtagcagctttcaataagatttag

SEQ ID NO: 116205 - DNA, 372 bp, synthetic construct
  misc_feature 1..372: note = Description of Artificial Sequence: Synthetic coding sequence
  source 1..372: mol_type = other DNA
atgggcttcggggatctgaaatcccccgcaggccttcaggttctcaacgattacctagccgataagtcctatatagaagggtacgtaccttcccaggctgacgttgcagtgtttgaggccgtcagctcccctcctccagctgatttatgccatgccctgagatggtacaatcatatcaaatcctacgaaaaggagaaggccagcttacccggagtaaaaaaggctcttgggaaatacggccctgctgacgttgaagacacaaccggcagcggtgccacagactccaaggacgatgatgacatcgatctgtttgggtctgacgacgaagaggaatcagaggaagccaagcgactgagggaagagaggctgtag

SEQ ID NO: 116206 - DNA, 846 bp, synthetic construct
  misc_feature 1..846: note = Description of Artificial Sequence: Synthetic coding sequence
  source 1..846: mol_type = other DNA
atggccaccaatttcctggcccatgagaaaatatggtttgataaattcaagtacgacgacgccgagcgtaggttttacgaacagatgaacggtccagtagccggggcctcgaggcaagagaacggtgctagcgtcatcctgcgtgatatagcccgggccagagagaacattcagaagtccctggccgggtctagtggaccaggggcctctagtggcacctctggagaccatggcgaactggtggtgcggattgctagtctcgaggttgaaaatcaaagcctgcgaggcgtcgtacaggagctgcagcaggctatcagcaagctggaagcaaggctgaacgtgcttgagaagtcctcacccggacatcgggccaccgcgccacaaacccaacatgtgtcacctatgaggcaggtcgagcctccagccaagaaaccggccactcccgctgaggatgatgaggacgatgacatcgacttgttcggaagtgataacgaggaagaagacaaagaagctgcccaacttagggaggagaggctgagacagtacgcagaaaagaaggccaaaaagcccgcattagtggctaagagctccattttacttgacgtgaagccctgggacgacgaaacagatatggctcaactcgaagcatgcgtgcgatcaatccagctcgacggtctggtctggggagccagcaaactggtccctgtggggtatggcattagaaaactgcagatccagtgtgtggtggaagatgacaaggttgggactgacctgcttgaggaggagatcaccaaatttgaggagcacgtgcagtctgtcgatatcgctgcattcaacaagatctag

SEQ ID NO: 116207 - DNA, 1896 bp, synthetic construct
  misc_feature 1..1896: note = Description of Artificial Sequence: Synthetic coding sequence
  source 1..1896: mol_type = other DNA
atgaggagcggtaaagcctcatgcaccctggagaccgtgtgggaggataagcataaatacgaggaggccgaacggagattctatgagcacgaagccacccaggcagctgcaagtgcgcagcagttacctgcggaaggacctgctatgaacggccctggacaggatgatcccgaggacgccgacgaagctgaggcccccgacggtggaagcagaagggatccacgcaaatcccaagattctcggaagccgctccagaaaaagcgtaagcggagtccaaaatccggacttgggccagcagatttggccttgctcggcctctccgcggagagggtatggttggacaagtcgttatttgaccaggccgagagtagctacaggcaaaaactggccgacgtcgccgcccaggccgcttggccccctgctctagcaccatgggggctgtgtacccacggcaaccaagtggcctgccatcatgtaacctgggggatttgggttaataagtcttcattcgatcaggcagagcgagctttcgtggagtggagccaggcactgctcctcgcgcctgacggcagtcgccggcagggaacgccaaatacaggccagcaggttgctgttcccgatctagcccaccagccttctccccccgtgaatggacaaccccctctcggctccttgcaggccctcgtcagagaggtatggctggagaagccccgatacgatgcggctgagagaggattctacgaagccctctttgatggacacccacctggcaaggtgcgactgcaagagcgggccgggctggctgaaggcgcgagaagaggccgccgtgatagacgaggtcggaacatcctgggcaataagagggccggactcaggcgcgctgatggcgaagctccgtcagcgctgccatattgttactttctgcagaaggacgccgaggccccatggctgagcaaacctgcctacgattcggcggagtgccggcaccacgctgccgaggccctgcgcgtggcgtggtgtctggaagccgctagcttgagccacaggcccggaccacggtcaggtctgtctgtgtccagtctacggcccaacagaaagatggccacaaactttctagcccacgagaagatctggtttgacaagtttaagtacgatgatgctgagcgccgcttctatgaacaaatgaacggccctgttgctggggcctcccggcaagaaaacggggccagcgtgatccttcgagacatcgcgcgagcaagagaaaacatacagaagagtctagccggttcaagcggcccgggcgcttcttctggaacctcaggggatcacggcgagctggtcgtgaggatcgccagtttagaggtcgaaaaccaatctctaaggggggtcgtacaggagttacaacaggcaattagcaaactggaggcccgtttgaacgtcctggagaaatcgtctccagggcaccgggctaccgcaccacagacacagcacgtttctcctatgcgacaagtcgagccaccagccaaaaagccggccacccccgccgaagatgatgaggacgacgatattgatttatttggcagtgacaatgaggaagaagacaaggaggcagcacagctaagggaggaaagactccgccagtacgcggagaaaaaggcaaagaaacctgctctggtcgcaaagtcctcgatcctgctcgatgtgaagccatgggacgacgagactgatatggcacagctggaggcatgcgtacgttccatacagttggatggactggtttggggagccagtaaactggttcctgttggttacggaatccgaaagctgcagattcaatgcgtaggcggaagacagggaggcgacaggctggctggaggcggcgatcatcaagtttag

SEQ ID NO: 116208 - DNA, 1728 bp, synthetic construct
  misc_feature 1..1728: note = Description of Artificial Sequence: Synthetic coding sequence
  source 1..1728: mol_type = other DNA
atgaacggacctggacaagacgaccccgaggatgcggatgaagctgaggcacccgatgggggctccagacgcgatccccgaaagtctcaggactctcgaaaacccctccagaagaaaagaaagcggagtccgaaaagtggactcggtcctgcagatttggcgctactgggtctgtccgctgagagggtgtggcttgataaatcgcttttcgaccaggcagaatcatcctaccgccagaagcttgcagacgttgccgcacaagcagcctggcctcccgcacttgctccgtgggggctctgcactcacggcaatcaggtggcctgtcaccatgttacatggggtatctgggtaaataaatcctcattcgaccaagcagaacgggccttcgtggaatggtcacaggccctgcttctggctccagatggctccaggagacagggaacgcccaacacaggccagcaggtggccgtccccgatctagctcatcagccctctccacctgtgaatggtcagcctcccctgggcagcctgcaggccctggtgagagaagtgtggctggaaaagcctcgctatgatgcggccgagaggggattctatgaagctttatttgatgggcatcccccggggaaagtgaggcttcaggagcgcgcaggcctggcagagggcgcgcggcgcggccgccgcgatagacgaggccggaatattctcggcaataaaagagccggcttgagaagggccgatggtgaggcaccaagtgcactgccatattgttatttcttgcaaaaagacgccgaagctccatggttatccaagccagcctatgatagcgccgaatgtcgtcaccacgctgctgaagcccttagggtggcttggtgcttggaagctgctagtcttagtcataggccgggaccaagatccgggctgtccgtaagctccctgcgtcctaaccgaaagatggccaccaacttcctggctcacgaaaagatttggtttgacaaattcaaatacgacgacgcagagcgacgattctatgagcaaatgaatggacctgtagccggagcttcacgccagagcagtggcccaggagctagctctggcacaagtggcgatcacggtgaactcgtggtgagaatagcatcactggaggtggaaaatcagtctctcagaggagttgttcaggagcttcaacaggccatttctaaattagaggctaggctaaatgtcctggaaaagtcaagccctggccaccgagctacagccccccagacccagcacgtgtctcctatgagacaggtggaaccccccgcaaaaaaaccagccacacccgccgaagatgatgaagacgacgacattgacttattcggctccgataacgaggaggaggacaaggaagcagcccaacttcgggaggagcggctccggcagtatgccgaaaagaaagcaaaaaagcccgctctggtggccaagagctctatcttgcttgacgtcaagccctgggacgacgagaccgacatggctcagctggaagcctgcgtaaggagtatccagctggatgggctcgtgtggggtgctagtaaattagtgcctgtcggttacggtatcagaaaactccagattcaatgcgtcgtcgaggatgacaaggtgggcactgatctgcttgaggaggaaatcaccaagttcgaggagcacgtgcagtccgtcgacatagcagcctttaataaaatttag

SEQ ID NO: 116209 - DNA, 846 bp, synthetic construct
  misc_feature 1..846: note = Description of Artificial Sequence: Synthetic coding sequence
  source 1..846: mol_type = other DNA
atggctacaaacttcctcgctcatgagaagatttggtttgacaagttcaagtacgacgacgctgagagacgcttttacgagcagatgaatggacccgttgccggtgccagccgtcaggaaaacggcgcaagtgtcatcttacgagacatcgctcgggctcgagaaaatattcagaaaagcctggcagggtccagtgggcctggggcctctagcggaactagtggggaccatggagagctcgtggtgagaatcgcctcactcgaagtcgaaaaccaatcacttcgtggtgtcgtccaggagctgcaacaggcgatcagcaagctcgaggcacgactcaatgtgcttgaaaagtcttctcctgggcaccgtgcaactgcccctcagacccagcatgtgtcaccgatgcgacaagtggaacctcctgctaaaaaacctgcaactccagctgaagatgacgaggacgacgacatcgacctcttcggctccgacaatgaggaagaagataaagaggccgcccaattgagagaggagcggctccggcagtacgctgaaaagaaggccaaaaagcctgcactggttgcaaagtcttccattctgctggatgtgaagccatgggacgatgagactgacatggcacagctggaggcttgcgttaggtccattcagctcgatggactggtctggggcgcttccaaacttgtgcctgtgggttacggcatcaggaaactgcaaattcagtgcgtagttgaggacgacaaagtgggcactgacctgttggaggaggagatcactaagttcgaagaacacgtccaatctgtcgacatagccgccttcaataaaatctag

SEQ ID NO: 116210 - DNA, 846 bp, synthetic construct
  misc_feature 1..846: note = Description of Artificial Sequence: Synthetic coding sequence
  source 1..846: mol_type = other DNA
atggccaccaattttttagcacacgagaagatttggttcgataagtttaaatatgacgacgccgagaggcgcttctatgaacagatgaatggccctgtcgctggggcctctaggcaggaaaatggggctagcgttatcctgcgcgatatcgcacgcgcaagagagaacattcaaaagagtctcgctggcagctcagggcctggagcctctagcggtacatcaggcgatcacggcgagttggtggtgcgcatagcaagcttggaagtggaaaatcagtcccttcgcggagtagtccaggaattgcagcaggcgatctctaagttggaagcaagactgaatgtgctcgaaaagtctagtcccggccacagagccactgccccacagactcaacacgtctcgcccatgaggcaggtggagccccccgcaaagaaaccagccacccctgcggaagatgatgaggacgacgacatcgacctgttcggttctgataatgaggaggaggacaaagaggccgcgcaactacgcgaagaacgtcttaggcagtacgccgagaagaaggctaagaagcctgcactggtcgctaaaagcagcattctgctcgacgttaagccctgggatgatgaaaccgacatggcgcagttggaagcctgcgtgcggagtattcagctggacggactcgtgtggggagcgtcgaagctggtgcctgtgggttatggaatacgtaagctgcagattcaatgtgtcgttgaggatgacaaagtgggcaccgatctccttgaggaagagattaccaagttcgaagagcacgtccagagcgtggacatcgccgcatttaataagatctag

SEQ ID NO: 116211 - DNA, 1944 bp, synthetic construct
  misc_feature 1..1944: note = Description of Artificial Sequence: Synthetic coding sequence
  source 1..1944: mol_type = other DNA
atgcgctccggcaaggcatcttgcacactcgagactgtttgggaagataaacacaagtacgaggaggccgaaagacgcttctacgaacacgaagccactcaggctgccgccagcgcacaacagctgccggccgagggtcctgccatgaacggacctggacaggacgaccctgaagacgctgatgaggctgaggcaccagacgggggctctcggcgggaccctagaaagtcgcaagactctaggaaacctctccagaagaaacgcaagcgaagccccaaaagtggtctcgggcccgccgatttggcccttcttgggctttccgccgagagggtgtggctcgacaaaagcctatttgaccaagcagaatcaagctacagacaaaaactggcagacgtggccgctcaggcagcgtggcccccagctctggctccctggggactgtgtacccatggcaaccaggtcgcctgccaccacgttacttggggcatatgggttaataaaagttcattcgaccaggcagagcgagcttttgtggagtggtcccaggccctgctcctggcccccgatgggagccgccgtcaaggaactcccaacactggccagcaggtggcagtgccagatctggcccaccagccatccccacccgttaacggccagccacctctcggttccctgcaggccctggtccgtgaagtctggctcgaaaaacccaggtatgacgccgccgaaagggggttctatgaggctctgttcgacggtcatccccccggtaaagtgagactgcaggaacgcgcaggtctggccgagggcgctcgacgtggtaggagagacagacggggtaggaacattctgggaaataagagagccgggcttcgacgcgcggacggagaagctccttcagccctgccttattgttattttctgcaaaaggatgctgaggccccctggctgtcgaagcccgcctatgactccgctgagtgtagacaccacgcagccgaagccctgagggtcgcctggtgtcttgaggccgcctccttgtcacatcggcctggcccccggtcaggcctgtccgtttcctcattaaggccgaacagaaaaatggctacaaatttcctggcacacgagaagatctggtttgacaagtttaaatacgacgacgccgagaggcggttttacgaacagatgaatggccccgtcgctggcgcaagccgacaggagaacggcgccagcgtcattctacgtgatatcgctagggcgcgtgaaaatatacagaagtcgttggccgggtctagcgggcctggcgcttcttcggggactagtggagatcacggggaactggtggtgagaatcgcaagcctggaagtcgaaaatcagagtttgagaggcgtggtccaagagctccagcaggctatctccaaactggaggcccgtttgaatgttctggaaaaaagcagccctggccatcgtgctactgccccccagacgcagcacgtgtctccgatgcgccaggtggaacccccagccaagaagccagcaacacccgctgaggacgacgaagacgacgacatcgatttgttcgggagcgataatgaggaggaagataaagaggccgcccagttgagggaggaaagactgcggcagtacgctgagaaaaaagccaagaagccagcgcttgtagctaaaagcagtatactcctggatgtgaagccttgggatgacgagactgacatggcccaattagaggcctgcgtgcggagcatacaactggacgggctggtctggggagcctctaagctcgtgcccgttgggtatggcatacgaaaactgcaaattcagtgcgtcgtggaagatgataaagtgggtacagacctcctggaagaagaaatcacgaaatttgaagagcatgttcagtccgtggatattgccgcctttaataagatctag

SEQ ID NO: 116212 - DNA, 1944 bp, synthetic construct
  misc_feature 1..1944: note = Description of Artificial Sequence: Synthetic coding sequence
  source 1..1944: mol_type = other DNA
atgcggtctggcaaagcctcctgcactttggaaactgtttgggaggataagcataagtatgaagaggctgaaaggagattctacgaacatgaagccacccaggctgccgcatctgctcagcagctgccagctgagggacccgctatgaatggccccgggcaggatgaccccgaggacgcagacgaggccgaggcacctgacggcggtagcaggagggacccgcgcaaatctcaggatagtcgaaagcctttacaaaaaaaaaggaagcgatctcccaaatcgggactaggtcctgccgatctagccctcctgggcctgagtgcagagagggtgtggttggacaaaagcctattcgaccaggctgagtctagctacagacagaaattggcagacgtcgctgcccaggccgcctggccaccagcattggctccttggggactctgcacacatggcaaccaagtggcttgtcaccatgttacctggggaatctgggtcaataagagctcattcgaccaggcggaacgtgcattcgtggagtggagccaggcactgctgctggctcctgatggcagccggcgccagggaactcccaacactgggcagcaggttgctgtgcccgatcttgctcatcaaccatcgcccccagtgaacggccagccgcccctcgggagcctgcaggccctagtgagagaggtttggcttgagaagccgaggtacgacgctgcagagcggggattctacgaagctctctttgatgggcatccccccgggaaagtgaggcttcaagaaagggctggactcgccgagggggctcgtcgaggccgccgcgatcgtcgtgggaggaatattctcgggaacaagcgcgcgggcctgcgaagagccgacggtgaagccccctccgcattgccatactgttatttcttgcagaaagacgcagaggcaccttggctgtcgaaaccggcctatgatagcgccgagtgtcgacaccacgctgccgaggcactaagagtagcgtggtgtctagaggccgccagtctgtcccatcgtcctggccctcgctccggtctctctgtgagctccctgcgaccaaatcgtaaaatggcaactaactttttggcccatgaaaaaatctggttcgacaagtttaagtatgacgacgcagagcggcgattctatgaacaaatgaacggacccgttgctggggcgtcccgacaggaaaacggggcttcagtgattttaagggacattgctagggcccgcgagaatattcagaagagcctggctggatcatccggccccggagctagtagcggtacctccggggatcatggggagctggtggtccggattgcctcgctagaagtcgagaaccaaagcctgagaggtgtcgttcaggaattacagcaggcaatttctaaattggaggcccgcctgaacgtactggagaagtcaagcccaggacaccgcgccaccgctccgcaaactcagcacgtgtcacctatgcgccaggtggagccaccagctaagaagcctgctacccctgctgaggatgacgaggacgatgacattgatttgtttggatccgacaatgaagaggaagataaggaggctgcccagctgcgcgaggagcgcttgagacagtacgccgaaaagaaggcaaagaagcccgctttagttgccaagtctagtatcttgctggacgtgaagccctgggatgacgagactgatatggcccagttagaagcctgtgtacgttctattcaactagatgggctggtgtggggagctagtaaactggtgcctgtgggatacgggatccggaaactccagattcaatgcgtagtcgaagatgacaaagtcggaacggacctgctggaggaagaaatcacaaagttcgaagaacacgttcaatccgtggatatagcagcctttaataaaatctag

SEQ ID NO: 116213 - DNA, 774 bp, synthetic construct
  misc_feature 1..774: note = Description of Artificial Sequence: Synthetic coding sequence
  source 1..774: mol_type = other DNA
atggccacaaatttcctggcccacgagaagatctggttcgacaaatttaagtatgacgatgctgaaagacgcttttacgagcagatgaatggcccagtggccggagctagtcgtcaatctagcggtcccggggccagtagcggcactagcggcgaccacggggagctggtcgtgcgcatcgcttcattagaggtggagaatcagtcattgcgcggagtggtgcaggagctgcagcaagccatctcaaagctggaggctagactcaacgtgttggaaaagtcgagtccagggcacagggccacagctccacagacccagcatgtgagccccatgcgccaggttgaacccccagcaaaaaaacccgctaccccagctgaggatgatgaggatgatgacatcgatctcttcgggtctgataacgaggaggaggacaaagaggcggcgcagcttcgagaagaacgactgcgccagtatgccgaaaagaaggcaaagaaacctgcgctggttgccaagtccagcatcctgctggacgtcaaaccctgggatgacgaaacagacatggcccagctcgaggcctgcgtgcgaagcattcagctggatggtcttgtctggggcgcctcaaaactggtcccggttgggtacggaattcggaaacttcagatccagtgtgtggtcgaggacgataaggtgggaacagacctcttggaagaggagattacaaagtttgaggaacacgtgcaaagcgttgacattgccgcctttaacaaaatctag

SEQ ID NO: 116214 - DNA, 546 bp, synthetic construct
  misc_feature 1..546: note = Description of Artificial Sequence: Synthetic coding sequence
  source 1..546: mol_type = other DNA
atgagaagcggtaaagctagctgcacactggaaacagtgtgggaagataagcacaaatatgaagaagcggaacgtaggttttacgagcacgaggccacccaggccgccgctagcgcccagcagctgcccgccgaaggacccgcaatgaacggcccagggcaggacgatccagaagatgccgacgaagcagaagcacctgacggaggtagcagacgggaccctcggaagtcacaggattctaggaagcccctgcaaaaaaaacggaagaggagccctaaatcaggtctcggccccgccgatctggccttgttaggcctgtcggctgagagagtgtggctcgataagagtctcttcgatcaagctgaatcctcctatagacagaaattggcagatgtggcggctcaggccgcatggcccccagctctggccccatggggtctctgtacccacggaaaccaggtagcttgccaccacgtgacatggggaatatgggtcaacaaatcaagttttgaccaggcggagagggcgttcgtcgaatggagttag

SEQ ID NO: 116215 - DNA, 192 bp, synthetic construct
  misc_feature 1..192: note = Description of Artificial Sequence: Synthetic coding sequence
  source 1..192: mol_type = other DNA
atgcggagcggaaaagcaagctgcaccctggagaccgtctgggaagacaagcacaagtacgaagaagcagagcgtaggttttacgagcacgaggccactcaggctgccgcttccgcccagcagctgcctgcagaggggccggccatgaatgggcctgggcaggacgacccagaagatgccgacgaggcatag

SEQ ID NO: 116216 - DNA, 120 bp, synthetic construct
  misc_feature 1..120: note = Description of Artificial Sequence: Synthetic coding sequence
  source 1..120: mol_type = other DNA
atggccactaattttcttgctcacgaaaaaatttggttcgataagttcaagtacgatgacgccgaacgccgattctacgagcagatgaatggaccggtggctggggcttctcgtcaatag

SEQ ID NO: 116217 - DNA, 246 bp, synthetic construct
  misc_feature 1..246: note = Description of Artificial Sequence: Synthetic coding sequence
  source 1..246: mol_type = other DNA
atgcggagcggcaaagcttcctgcacacttgaaactgtgtgggaggacaaacacaagtacgaagaagcagaaagaagattctatgaacatgaagcaacacaggcagccgcctctgctcagcaattaccagccgagggccccgcgatgaatggccctggacaagatgatccagaggacgctgacgaggcagaggctcctgacggcggctctaggcgcgacccgcgtaaatcacaggacagcaggtag

SEQ ID NO: 116218 - DNA, 114 bp, synthetic construct
  misc_feature 1..114: note = Description of Artificial Sequence: Synthetic coding sequence
  source 1..114: mol_type = other DNA
atgaggtctgggaaggctagttgtactttagaaacagtgtgggaggataaacacaagtacgaggaagctgaacgacgcttctacgagcacgaagctacccaagctgccgcttag

SEQ ID NO: 116219 - DNA, 162 bp, synthetic construct
  misc_feature 1..162: note = Description of Artificial Sequence: Synthetic coding sequence
  source 1..162: mol_type = other DNA
atgcggtcaggcaaggcgtcatgtacccttgaaacagtttgggaggacaaacacaaatatgaggaagccgagcgaagattctacgagcatgaggccactcaggcggccgctagcgcacagcagctgcccgcagagggccccgctatgaacgggcctgggtag

SEQ ID NO: 116220 - DNA, 192 bp, synthetic construct
  misc_feature 1..192: note = Description of Artificial Sequence: Synthetic coding sequence
  source 1..192: mol_type = other DNA
atggccacgaatttccttgcccacgaaaagatatggttcgacaagttcaaatatgatgatgctgaaagaaggttttacgagcaaatgaatggccctgtcgccggcgcttccaggcaggagaatggagctagcgtgattctgcgggacatcgcacgggcacgagagaacatccagaaatctcttgccggctag

SEQ ID NO: 116221 - DNA, 903 bp, synthetic construct
  misc_feature 1..903: note = Description of Artificial Sequence: Synthetic coding sequence
  source 1..903: mol_type = other DNA
atgcgtagcgggaaggcatcttgtactctggagacagtttgggaagataaacataagtacgaagaggctgagcggcgtttttacgaacatgaggctacacaggctgctgcgtctgcacaacagctgcctgcagaaggcccagctatgaatggacccggacaggacgatccagaggacgccgatgaggcggaggccccagatggagggtcccggagagatcctcggaaaagccaggactcccggaagccccttcaaaagaagagaaaacgcagccctaagtctggactggggcccgccgacctggctttgttgggactgtccgctgaacgggtctggttggacaagtccttgtttgatcaggccgaatcttcctacagacagaaacttgcagatgtagccgcccaagccgcgtggcctccggcattagcgccatggggattgtgcacgcacggaaatcaggtggcctgccaccatgtgacttggggcatatgggtgaataagtccagctttgatcaggcggaaagggctttcgtggagtggagccaggccttactcttagcccccgatggcagtcgtcgacagggtactcctaataccggacaacaagtcgccgtccctgatcttgcgcatcagcccagtcctcctgtcaatgggcagccccccttgggttccctgcaggccttagtgagagaagtgtggctagagaagccacgatacgatgcagccgagcgcggcttctatgaagcactgttcgacggccaccctcctggcaaagtgaggctgcaggaacgggcaggtctggcggagggggctagaaggggacggagggataggaggggcaggaacatcctcggcaacaaacgagcaggcctgcgccgcgctgacggggaagccccaagctag

SEQ ID NO: 116222 - DNA, 66 bp, synthetic construct
  misc_feature 1..66: note = Description of Artificial Sequence: Synthetic coding sequence
  source 1..66: mol_type = other DNA
atgcggagcgggaaagctagctgtacactcgagaccgtgtgggaagataagcataaatacgagtag

SEQ ID NO: 116223 - DNA, 474 bp, synthetic construct
  misc_feature 1..474: note = Description of Artificial Sequence: Synthetic coding sequence
  source 1..474: mol_type = other DNA
atgcgttcagggaaagccagttgtaccctggagaccgtgtgggaggacaaacacaagtacgaagaggccgagaggagattttacgagcatgaggcaacgcaggctgctgcatcagctcagcagcttcctgccgaaggaccagctatgaacggccccgggcaagacgaccccgaggatgcagacgaagctgaggcccctgatggagggagcagacgggaccctcgaaagagtcaggactcacgtaaaccactccaaaagaagaggaaacgtagtccaaaatccggtctaggtcccgcagacctggcccttctagggttgtctgcagagagagtgtggctggataaaagcctgttcgaccaagccgagtccagctacaggcagaagctagctgatgtcgctgctcaggccgcctggccaccagcactggcaccatggggcttgtgcacacatgggaatcaggtggcttgtcattag

SEQ ID NO: 116224 - DNA, 774 bp, synthetic construct
  misc_feature 1..774: note = Description of Artificial Sequence: Synthetic coding sequence
  source 1..774: mol_type = other DNA
atggccaccaactttctggcccacgagaagatatggtttgataagtttaagtacgatgatgctgaacggcgcttctatgaacaaatgaatggcccggtcgccggtgcgtcaagacaaagtagtgggccgggggcctcgagcggtacttccggggatcatggggagttagtggtaagaattgcctctcttgaggtcgagaatcagagcctccgcggggttgtccaggaactacaacaagcaatctccaaactggaggcaagattgaatgtgctcgagaaatcttcccctggacaccgggctactgcccctcaaacccagcatgtatcacctatgcgccaagtggagcccccagccaagaagcctgcgactccagctgaggacgacgaagacgacgatatcgatctgttcggcagcgataatgaggaggaagataaggaagctgcgcagctgagggaagaacgactgcggcagtatgcagagaaaaaagctaagaagccagcgctcgtggcaaaatccagtatcctgctcgacgtgaagccctgggatgacgaaactgatatggctcagctcgaggcatgcgttcgttcgatccagctcgatggcctggtatggggggcttccaaactagtgcccgtgggttacggtatcagaaagctgcaaattcagtgtgtggttgaagacgataaggtgggcaccgatttactagaagaagaaattaccaaattcgaagaacatgttcagagtgttgatatcgcggctttcaacaagatttag

SEQ ID NO: 116225 - DNA, 846 bp, synthetic construct
  misc_feature 1..846: note = Description of Artificial Sequence: Synthetic coding sequence
  source 1..846: mol_type = other DNA
atggctactaattttctggcacacgaaaaaatctggttcgacaagtttaagtacgacgatgccgagaggagattttacgaacagatgaatggcccggttgccggggcctctcggcaggagaacggagcttcggtgattcttagggatattgcccgggctcgggagaatattcagaaatccctcgcaggaagcagcgggcctggagccagtagcggcactagtggtgatcatggagagttggtagtccggattgcatccctggaggtggagaatcaatccctgagaggtgttgtgcaggaattgcagcaggcaatctctaagctcgaagcaaggctcaacgtgttggagaaaagctctcctggtcatagagccaccgccccccaaacacagcacgtgagtcccatgagacaggtggagccgccagcgaagaagcctgccaccccagccgaggacgacgaggacgacgacattgacctgttcggttctgacaacgaggaagaagacaaagaggctgcccagctcagagaggagaggctgcggcagtatgcagaaaagaaggccaaaaaaccagctttggtggccaaatcttcaattttactggacgttaaaccttgggatgacgagacagacatggcccagctagaggcttgcgttagatcgatccagttggacggtctggtatggggggcatccaaactagtccctgtcggatacggaattaggaaactgcaaatccagtgcgttgtcgaggacgacaaggtgggaaccgatctgctcgaagaagagatcacaaagttcgaggaacatgtacagtccgttgacatcgctgccttcaacaagatctag

SEQ ID NO: 116226 - DNA, 441 bp, synthetic construct
  misc_feature 1..441: note = Description of Artificial Sequence: Synthetic coding sequence
  source 1..441: mol_type = other DNA
atgaggagtggaaaagcatcctgcacccttgagacagtgtgggaagacaaacacaaatacgaggaagccgaacggaggttttatgagcacgaggctacgcaggccgccgcttctgctcagcagctgccagccgaaggtcccgctatgaacggaccaggccaggacgatccagaagatgctgatgaagccgaggctccggatggcggatccaggcgtgatcctcgcaaatctcaagattctcgtaagccactccagaagaaaagaaaacgctccccaaagtccggtctcggcccagcagaccttgctttactagggttatcggctgaaagagtgtggctggataagagtttgtttgaccaagccgagtcttcatacagacagaagctggcggatgtggccgctcaggcggcttggcctcccgcactggctccgtggggatag

SEQ ID NO: 116227 - DNA, 615 bp, synthetic construct
  misc_feature 1..615: note = Description of Artificial Sequence: Synthetic coding sequence
  source 1..615: mol_type = other DNA
atggcaaccaatttcttggcccacgaaaaaatttggtttgacaaatttaagtatgatgacgccgaacgtcggttttacgagcagatgaatggaccggtggctggtgccagcaggcaagaaaatggggcgtctgtgatactgcgcgatatagcaagagcaagggagaatatccaaaagtccctcgccggttcctccggccccggtgcgtcctccggtacttctggggaccatggcgaactcgtcgtgaggattgccagccttgaagtggaaaatcagagtctgaggggggttgtccaggaattgcaacaggctataagtaagttggaagccagactcaatgtgttggaaaagtcctcgccggggcatagagccacggccccccagacacagcacgtctccccaatgcggcaggtggaacccccagcaaagaagcccgccactcctgcggaagacgatgaggatgacgatattgacctgttcgggtctgacaatgaggaggaggacaaggaagctgcccagcttcgcgaggagcgcctacgtcaatacgcggagaaaaaagctaaaaaaccggcattagtcgccaagagtagtatactgttggatgtcaaaccgtag

SEQ ID NO: 116228 - DNA, 390 bp, synthetic construct
  misc_feature 1..390: note = Description of Artificial Sequence: Synthetic coding sequence
  source 1..390: mol_type = other DNA
atgcgttctggaaaagcgagctgtacactggagactgtgtgggaggataagcacaagtacgaggaagccgagaggaggttttacgagcacgaagctacacaagccgccgccagtgctcagcagttgcctgcggagggcccagccatgaatgggcccggtcaggatgatccggaagatgctgatgaggcggaggctccagacggcggctctcgcagggaccctcggaaatctcaggactctcgcaagccattacagaaaaagcgcaagagatcccccaaatccgggctgggccctgcggacctggccctgctgggcctgtccgctgagcgcgtttggctcgataagagtctgtttgaccaagctgagagtagttatcgccagaagctgtag

SEQ ID NO: 116229 - DNA, 501 bp, synthetic construct
  misc_feature 1..501: note = Description of Artificial Sequence: Synthetic coding sequence
  source 1..501: mol_type = other DNA
atggccaccaattttcttgcccacgagaaaatttggttcgacaagtttaaatatgacgacgccgaaaggaggttttacgaacagatgaatggtccagttgccggcgcaagcagacaggagaacggggcttcggttatccttcgagatatcgcccgtgccagagaaaacattcagaaatctttagcaggcagctccggccccggtgcctccagcggcactagcggagaccatggggaactagtcgtgcgcattgcaagcttggaggtggagaaccagtctttacgcggggtcgtgcaggaattgcagcaagcgattagcaaactggaggccagactgaacgttctcgaaaagtcttccccaggccatcgcgcaactgccccacagacacagcatgtatccccaatgagacaggtggaacccccggccaaaaagcctgcaactccagccgaggatgatgaagacgacgatattgatctatttggtagcgacaatgaagagtag

SEQ ID NO: 116230 - DNA, 255 bp, synthetic construct
  misc_feature 1..255: note = Description of Artificial Sequence: Synthetic coding sequence
  source 1..255: mol_type = other DNA
atgcgctccggtaaagccagttgcacgttggaaactgtctgggaggacaaacacaagtatgaggaggccgagcggcgcttctacgaacatgaagctacccaggcggctgctagcgcgcagcagctgccagctgagggacccgccatgaacgggcccggtcaggacgaccctgaggacgccgacgaagccgaagcccccgatggcgggtcccgtagggatccccgcaaaagccaggatagcagaaaaccgttgtag

SEQ ID NO: 116231 - DNA, 600 bp, synthetic construct
  misc_feature 1..600: note = Description of Artificial Sequence: Synthetic coding sequence
  source 1..600: mol_type = other DNA
atggccacgaactttcttgcacacgagaaaatctggtttgacaagtttaagtacgatgacgccgagcggcgcttctacgaacagatgaacggccccgtcgccggggccagcagacaggaaaacggggcctcggtgatcctgcgggacatcgctagggccagagagaacatacagaagtctctggccgggagttcgggccctggagcaagctccggcacctctggtgaccacggcgaactggtagttcgaatcgcttcattggaggtggaaaaccagtcgctccgaggggtggtgcaggaactgcagcaggcaatctctaaacttgaggcaaggctcaacgtgcttgagaagtcttctcctgggcatcgtgcaactgcacctcagacacagcatgtttcacccatgaggcaagtggaacctcctgctaaaaagcctgcaacccctgctgaagacgacgaagacgacgacattgaccttttcggttccgataacgaggaggaggacaaagaggctgcacagctgcgagaagagcggttgcggcagtacgccgagaagaaggccaagaagccagccctcgttgccaagtccagtatcctttag

SEQ ID NO: 116232 - DNA, 774 bp, synthetic construct
  misc_feature 1..774: note = Description of Artificial Sequence: Synthetic coding sequence
  source 1..774: mol_type = other DNA
atgaggagcggcaaggcctcttgtaccctcgaaactgtctgggaagacaaacacaaatacgaggaagcagaacgtcgcttctacgaacacgaagccacccaggccgcagcatcagcacagcagttaccggcggagggacccgccatgaacggcccgggtcaggacgaccctgaggatgcggacgaggcagaagcgcccgacggcggcagtagacgcgaccccaggaaaagccaagacagccgaaagccgctgcagaagaagcgcaagcgcagcccgaagtctggattgggcccagctgacctggccttacttggcctttcagctgagagggtctggctggacaaatctttatttgaccaagccgagagtagctataggcaaaaactcgctgacgttgccgctcaggctgcttggcctcccgctttggccccatggggtctgtgtactcacggcaaccaggtggcttgtcatcatgtcacatggggtatctgggtcaacaaaagcagttttgaccaagccgagcgggcctttgttgagtggagccaggcattgctgctagcgcctgatggctcaaggcggcagggtacgcctaacacagggcagcaggtcgccgtaccagatctcgcccatcagccctctccccctgtgaacgggcagccacctctcgggagcctgcaggctttggtccgcgaggtatggctggaaaagcctaggtatgacgctgcggagcgaggattttacgaagctctcttcgacggacacccacctggttag

SEQ ID NO: 116233 - DNA, 540 bp, synthetic construct
  misc_feature 1..540: note = Description of Artificial Sequence: Synthetic coding sequence
  source 1..540: mol_type = other DNA
atgcggtccgggaaagcctcttgcactctggagacagtctgggaagataagcacaagtatgaggaagcggaaagacggttttatgagcacgaggccacacaggccgcagcttctgcccagcagctgccagccgagggcccggccatgaacggtccagggcaagatgacccagaggatgccgacgaagcagaagcacccgatggtggctccagaagggatccaagaaaaagccaagattcaaggaaacccttgcagaagaagagaaaaagatcccctaaatctggcctaggccccgcagacttggctttactgggcctgtctgccgagcgtgtctggctggacaaaagtctctttgaccaggctgagagcagctaccgccagaagctcgccgatgtggctgcccaagcagcttggccgcctgcgctggctccttggggcctctgcacacacggaaatcaagtcgcctgtcatcatgtaacctggggaatctgggtcaacaaatcttcatttgatcaggctgagagggctttcgtcgaatag

SEQ ID NO: 116234 - DNA, 108 bp, synthetic construct
  misc_feature 1..108: note = Description of Artificial Sequence: Synthetic coding sequence
  source 1..108: mol_type = other DNA
atggctacaaactttctcgctcacgaaaagatctggtttgacaagttcaagtacgatgacgctgaacgccgattctatgagcagatgaacgggccagttgcagggtag

SEQ ID NO: 116235 - DNA, 150 bp, synthetic construct
  misc_feature 1..150: note = Description of Artificial Sequence: Synthetic coding sequence
  source 1..150: mol_type = other DNA
atgcggtctggaaaagctagctgcaccctggagacagtgtgggaagacaagcataagtacgaagaggcagaaaggagattctatgaacatgaagccactcaggcagccgcatcggcacaacagctccctgccgagggccctgcgatgtag

SEQ ID NO: 116236 - DNA, 120 bp, synthetic construct
  misc_feature 1..120: note = Description of Artificial Sequence: Synthetic coding sequence
  source 1..120: mol_type = other DNA
atggccactaactttctggcccatgagaaaatctggttcgataagtttaagtatgatgatgcagagagacgcttctacgaacaaatgaatggcccagtggcaggggcttctcgacaatag

SEQ ID NO: 116237 - DNA, 573 bp, synthetic construct
  misc_feature 1..573: note = Description of Artificial Sequence: Synthetic coding sequence
  source 1..573: mol_type = other DNA
atgcggtcggggaaagcaagctgcacactcgaaactgtatgggaagataagcataaatacgaagaggcagagcgacgtttctacgaacacgaagctactcaggcagctgcttccgcgcagcaattgcctgccgaggggcctgccatgaatggtcccggccaagacgaccctgaggacgcagatgaagccgaagcccccgatggcgggtctagaagagacccacgcaagagtcaggactcccgcaaaccactccagaagaagagaaaacgatcccctaaaagcgggttgggtccagccgacttagccctgcttggtttgagcgcagagagggtgtggctagacaaatccctgttcgaccaggcagagtcttcctatcggcaaaaactcgccgacgtggctgcccaggcagcatggccaccagccctggcaccctggggcctctgcacacacggcaatcaggtggcgtgccaccacgtgacctggggtatctgggtgaacaaatcatcctttgaccaggccgaacgcgcatttgttgagtggtcccaggctctgctcctcgcaccggatggctag

SEQ ID NO: 116238 - DNA, 2094 bp, synthetic construct
  misc_feature 1..2094: note = Description of Artificial Sequence: Synthetic coding sequence
  source 1..2094: mol_type = other DNA
atggaagcaccgctgggaagtatcctgagtccttgcccaggccgggctgcgactggacgggccggcaccggcagggtgggaactggtttgcgcccacccgctgtactgcaactttgccctttactagccttttacaggtgtgtgcgcaaaatgcgttctggcaaagccagctgtaccctcgagacggtatgggaggacaaacataaatatgaggaagcagaaaggcgtttctacgagcacgaggccacccaagccgccgcttccgcccaacagctcccggccgagggaccagccatgaacggtccaggacaagacgaccccgaggatgctgatgaggcagaggccccggatggcgggagccgtcgagatcctcgaaaatctcaagatagccgtaagcctctccaaaagaaacggaagaggagccccaagtcggggctcgggcctgccgatctggccctcctgggcttgtccgccgaacgcgtgtggctggataagagcctctttgaccaggctgaatcatcataccgccaaaagctcgctgatgtagctgctcaggcagcttggccgcctgcgctcgccccttggggattgtgtacccacggaaatcaagtagcttgtcaccatgtgacctgggggatctgggtgaataagtcgtcctttgatcaggccgaaagagccttcgtagaatggtctcaggcactcctactcgcccccgacggcagccgcagacagggcacaccaaacacagggcagcaggtggccgtgcctgacctggcccatcaaccaagtccccccgtgaacggacaaccgcccttgggtagcctgcaggcgcttgtcagggaggtgtggcttgagaaaccccggtacgacgccgccgaaagaggcttctatgaagcgctgtttgatggacaccccccaggtaaagtgcggctgcaagagcgagctggtctggcagaaggcgctaggagaggacgaagagacaggcgagggcgcaatatactgggcaacaagagggccgggctgcgccgggctgacggcgaagctccaagcgccttgccatactgctacttcttgcagaaggacgccgaggcaccatggctttctaaacctgcctacgacagcgcagaatgtcgccatcacgctgctgaggccttgagggtggcctggtgcctcgaagctgcctctctgagtcatagacctggcccccggagcgggttgtcggttagtagcctccgacctaaccgtaagatggccacgaacttcctcgctcacgagaaaatttggtttgacaagtttaaatacgatgacgccgaaagacggttctatgaacagatgaatggcccagttgccggagcaagtaggcaggagaatggtgcgtccgtgatactacgggacatagcccgtgccagggagaacatccagaagagtctggcaggctcctccggcccaggcgcaagctccggcaccagcggggaccatggagagctggttgtcagaatcgcctctttggaggttgagaaccaatctctgcgaggcgtggtacaggagctgcagcaggccattagcaagctggaggctcggctcaatgtcttggagaagagttctcctggacaccgagcaaccgctccccagacacagcatgtgagccctatgcggcaggtggaaccgcctgcaaaaaaaccggctacacctgcagaagacgacgaggatgacgatatagacctgttcggctcggataacgaggaagaggacaaggaggctgcccagttacgtgaagagagactgaggcagtacgcggagaaaaaagcgaagaaaccagccctggttgccaagtcaagcatcctacttgatgtgaaaccctgggacgatgaaacggacatggcgcagctggaagcctgcgttcggagcatccagttggatggcctcgtgtggggcgcctctaagttagtgccggttggatacggaatccgcaagcttcagatccagtgtgtggttgaagatgataaagtgggcaccgacctactggaggaggaaataaccaaatttgaagagcatgtccaaagcgtggacattgcagcattcaataaaatctag

SEQ ID NO: 116239 - DNA, 615 bp, synthetic construct
  misc_feature 1..615: note = Description of Artificial Sequence: Synthetic coding sequence
  source 1..615: mol_type = other DNA
atggctacaaacttccttgctcatgaaaagatttggttcgacaagtttaagtatgacgacgccgagagacgattctacgagcagatgaacggccctgtggccggtgcgtcaagacaggaaaacggggcctccgtaatcctccgcgatatagctcgggcacgggagaatatccagaagagcctcgcgggcagttccggccccggggcttccagcggcactagtggtgaccacggtgaactggtggttcgcatcgccagcctggaagttgaaaaccaatcactcaggggggtcgtgcaggaactacaacaggccatttccaaactggaggctcggttgaatgtactggagaaaagtagtcctggccatcgggccaccgccccacagacccagcacgtctcccccatgcggcaggtggaacccccggccaaaaagcctgcaacacctgccgaagatgatgaagacgacgacatcgacctgtttggctcagataatgaggaggaagacaaggaggcagctcagctaagggaagagcgtctgcgccagtacgcggaaaaaaaggcaaaaaagccggcactagtggcaaagtcctccattttacttgatgttaagccttag

SEQ ID NO: 116240 - DNA, 507 bp, synthetic construct
  misc_feature 1..507: note = Description of Artificial Sequence: Synthetic coding sequence
  source 1..507: mol_type = other DNA
atggcaaccaattttctggctcatgagaaaatttggttcgacaaatttaaatacgatgatgctgagagaagattttacgaacagatgaacggtcccgtagccggggcctccaggcaagagaacggagcctctgtgattctccgggatattgctcgcgcgagggagaatatccagaagtcactggccggcagtagcgggcccggagcctcaagcggaacgtccggagatcatggagaacttgtagtgcgaatcgccagtttggaagtcgagaatcaatctctccgcggggtcgttcaggagctccagcaggcgataagcaagctggaagctagacttaacgtactggagaaatctagtccaggacaccgggctaccgctccccagacgcaacatgtaagtccaatgcgtcaggtcgaacccccagccaagaagccagccactccggcggaggacgacgaagacgatgacatcgatctgttcgggtcggacaacgaggaagaggattag

SEQ ID NO: 116241 - DNA, 786 bp, synthetic construct
  misc_feature 1..786: note = Description of Artificial Sequence: Synthetic coding sequence
  source 1..786: mol_type = other DNA
atggccacaaactttttggcgcacgaaaagatctggttcgataaattcaaatacgacgatgcagagaggagattctacgaacagatgaacggacctgttgctggagcgtcgaggcaagaaaatggcgctagtgtcatattacgggacattgccagggcccgggaaaatattcaaaagagcttagccggttcttccggacccggcgcaagcagtggcacatccggtgaccacggcgaactggtggttcggattgcttcccttgaggtagagaatcagtcgctgcgcggagttgttcaagagctgcaacaggccattagtaagttggaggcccggctgaacgtgcttgagaaatcttctcccggtcacagggccaccgcgccacagactcagcacgtgagccccatgaggcaggtggaaccgccggctaaaaagccagccacccctgccgaggatgatgaggacgatgacattgatctgttcgggagcgacaatgaagaagaggacaaggaggctgcccagctgcgggaggagcggctgcgtcagtacgccgagaaaaaagctaagaaaccagccctcgtagcgaaatcttcaatactgctcgacgttaaaccatgggacgatgagaccgatatggcgcaactagaggcttgtgtgcgaagtattcaacttgacgggctcgtctggggcgcatccaaattggtcccggttggctatggtatcaggaaactgcaaatccagtgcgtcgtggaagacgacaaggtcggcacagatttgctggaagagtag

SEQ ID NO: 116242 - DNA, 96 bp, synthetic construct
  misc_feature 1..96: note = Description of Artificial Sequence: Synthetic coding sequence
  source 1..96: mol_type = other DNA
atgagaagcgggaaggcatcatgtacgctcgagactgtatgggaggacaagcacaaatacgaggaggccgaaaggagattctacgaacacgaatag

SEQ ID NO: 116243 - DNA, 207 bp, synthetic construct
  misc_feature 1..207: note = Description of Artificial Sequence: Synthetic coding sequence
  source 1..207: mol_type = other DNA
atgcggagcggcaaggcatcgtgcacactggagactgtgtgggaagacaaacacaaatatgaagaggccgagaggaggttttacgagcacgaggccactcaggcggctgcgtcagcacagcaacttcctgctgaagggccagcgatgaacggtccggggcaggacgacccagaagatgccgacgaggctgaggcccccgatggctag

SEQ ID NO: 116244 - DNA, 789 bp, synthetic construct
  misc_feature 1..789: note = Description of Artificial Sequence: Synthetic coding sequence
  source 1..789: mol_type = other DNA
atggctaccaattttttggcccatgaaaagatttggttcgacaaattcaagtatgatgacgctgaaaggaggttctatgaacaaatgaacggtcccgtggccggtgcatctagacaggaaaatggcgccagtgtgattctgagggacattgccagggccagagagaatattcagaaatcgctggctgggtcaagcggccccggggcatcctcaggcacctctggtgatcacgtggtgcaggaactacagcaggcaattagcaaacttgaggcaagactaaacgtccttgaaaaatcctctcccgggcacagagccacagccccacagacccagcatgtatcacctatgcggcaggtcgagcccccagccaaaaaaccggctacaccagccgaggacgacgaggatgacgacattgatctgtttgggtccgacaatgaggaggaagataaagaagctgcccagctgcgcgaggaaagactccgccagtatgcagaaaagaaagccaagaagccagctctcgtcgctaaatcttcgatcttgctagatgtgaaaccttgggatgacgagacagatatggcacagcttgaggcctgcgtgaggtctatccagcttgatgggctagtgtggggcgcctctaagctggtcccagtgggatacgggatacgaaaactccaaatccaatgcgtagtggaagacgacaaggtggggaccgacctgctggaagaagagatcacaaaatttgaggagcacgtgcagtccgttgatatagcagcatttaataaaatctag

SEQ ID NO: 116245 - DNA, 525 bp, synthetic construct
  misc_feature 1..525: note = Description of Artificial Sequence: Synthetic coding sequence
  source 1..525: mol_type = other DNA
atggccgcagccgctgaactgtctcttctggagaaatccttgggcctgtcaaaaggcaataaatattccgctcagggagaacgccagatcccagtgctccagacgaacaacggcccttctcttactggactgacaacgattgccgcccacttggtgaagcaggccaataaagagtacctgctggggagcaccgccgaagagaaagccatcgtgcagcagtggctcgagtacagagtaacacaggtggatggacactcaagcaaaaacgacattcataccctgttgaaggatctgaattcttacctggaggataaggtgtacttaactggctacaatttcacactggctgacatactcttgtactacggactgcaccgctttatcgtggacctcaccgtgcaggagaaggaaaaatacctcaacgtctccagatggttctgccatatccagcattatcctggtatcaggcagcatctgtcctccgttgtgtttattaaaaaccgattgtatacaaattcccactag

SEQ ID NO: 116246 - DNA, 420 bp, synthetic construct
  misc_feature 1..420: note = Description of Artificial Sequence: Synthetic coding sequence
  source 1..420: mol_type = other DNA
atggctgcagccgccgaattgtctttactcgagaaaagtctgggcctaagtaaggggaacaaatattctgcccagggagagagacagatccctgtgctacagacaaacaacggaccgagtctgactggcctcaccaccatcgcggcacatctcgtcaagcaagccaacaaggagtacctgttaggatctactgccgaagagaaggctatagtccagcagtggctggaatatcgagtaactcaggtcgacggacatagctcaaagaatgatatccataccctgctgaaggacctgaattcctacctcgaggacaaggtatacctcactggttataactttactctggcagatattctactttattacggtctgcacaggtttatcattcgcaagctgcgccacacagaggtgggtaattag

SEQ ID NO: 116247 - DNA, 1314 bp, synthetic construct
  misc_feature 1..1314: note = Description of Artificial Sequence: Synthetic coding sequence
  source 1..1314: mol_type = other DNA
atggccgctggtaccctttatacataccccgaaaattggagagcgttcaaggccctgatagctgcccagtactccggagcacaggtcagagtactgagcgcgccccctcatttccacttcgggcagacgaaccggaccccggagttcctcaggaagttccctgccggaaaggtccctgccttcgagggagatgacgggttctgtgtctttgagtctaacgccatcgcttattatgtgtctaatgaggagctacgagggtcaacacctgaggcggctgcccaggtcgtgcagtgggtcagcttcgctgattccgacatagtacccccagccagcacatgggtgttccctactctcgggattatgcatcataataagcaggccacagagaacgctaaggaggaggtgagaagaattctgggcttgttggatgcttatctgaaaacaagaactttccttgtgggagagagagtgactcttgcagacattaccgtggtatgtaccctcctctggctctacaaacaggtcttggagcctagcttccgccaggcattcccaaacaccaatcgctggtttctgacctgcattaaccagccccaatttcgggctgtcctcggtgaagtgaagttgtgtgaaaagatggcccagttcgacgccaagaaattcgctgaaacgcaacctaaaaaggacactcccaggaaagagaagggaagtcgcgaagagaagcagaagccacaagctgagaggaaggaggagaagaaagctgctgccccagcccccgaggaggaaatggacgagtgtgaacaagcccttgcagcggaacctaaagcaaaagaccccttcgctcacctccccaagtctacgtttgtgctggacgagttcaagcgcaagtattccaacgaggacactctctccgtggcactgccctatttctgggaacatttcgacaaggatgggtggagcctgtggtacagcgaatacaggttcccagaagagctgactcagacatttatgagttgtaacttaataactggcatgtttcagagactggataagcttcgtaaaaacgccttcgctagcgttattctatttgggaccaacaacagctcctcaatttctggtgtgtgggtgttcagagggcaagaactagcatttccactgagtcccgattggcaggtagattacgaaagttacacctggaggaagttagaccctggtagcgaagaaacccagacactcgttcgggaatatttttcatgggagggtgctttccagcacgtcggaaaggcttttaaccagggtaagatcttcaagtag

SEQ ID NO: 116248 - DNA, 1464 bp, synthetic construct
  misc_feature 1..1464: note = Description of Artificial Sequence: Synthetic coding sequence
  source 1..1464: mol_type = other DNA
atggctgagaggtgggtggcccccgccgtcctgcgaagggctaggtttgcttcaactttctttttatccccgcagatttatgcacataaagacggcgatctcaggagcgcattcttcatcttgtccttcaagcggggagagtttattcccttcctgaactggacactatatacgtaccctgagaactggcgggccttcaaggctctgattgctgcccaatacagtggcgcccaagtgagagtgctgagtgctcctccacattttcatttcggccagaccaataggactccagagttccttaggaaattcccagctggcaaagtgcccgccttcgaaggagatgatggtttttgcgtgtttgagtctaacgccattgcatattacgtgagcaatgaggagctgcggggctccacgcctgaagcggccgcccaagttgtgcaatgggtgtcattcgccgactcggacatagtgcccccagctagtacctgggtgtttcctacactaggcatcatgcaccacaacaaacaggcaaccgaaaacgctaaggaggaggtgcgccgcatactgggactgctcgatgcttatctgaagacccgaacattcttagtgggcgagcgagtaaccctggcagacatcaccgtagtctgcactctgctgtggctctacaaacaggtcctggaaccttcatttagacaagcatttccgaacactaacagatggttcttaacgtgcataaaccagccgcagtttcgagcagtgctgggtgaggttaagctgtgcgagaagatggcccagtttgatgcaaaaaagttcgccgagactcagcctaaaaaagacacgccacggaaggagaaaggctcaagagaggaaaaacaaaagccccaggccgaacgcaaggaggaaaagaaagccgctgctcccgccccggaggaggaaatggatgaatgtgagcaggcgctcgccgctgagccaaaggctaaagacccattcgcgcatctccctaagtctaccttcgtgctcgacgaatttaagcgaaaatattctaacgaggacacattgtcggtagcactcccctacttttgggagcacttcgacaaggatggatggagcctatggtatagtgaatatcgttttccagaagagctgacacagacattcatgtcatgtaatctgatcaccggcatgttccaaaggctggataaactcagaaaaaatgccttcgcctcagtgatcttattcggcaccaacaatagcagctcaatttccggcgtgtgggtgtttcgcgggcaggagcttgcctttcccctgagccctgactggcaggtggattacgaatcctatacctggaggaaactggatcccggaagcgaagagacacaaactctggtgcgcgaatacttttcctgggaaggggcatttcagcatgtcgggaaggcttttaaccagggcaagatcttcaaatag

SEQ ID NO: 116249 - DNA, 621 bp, synthetic construct
  misc_feature 1..621: note = Description of Artificial Sequence: Synthetic coding sequence
  source 1..621: mol_type = other DNA
atgcaccacaataagcaggcaaccgaaaacgccaaggaggaggtcaggaggattctggggttattggatgcttacctgaagaccagaacctttctggtgggtgaacgggttacgttggcggcggaacctaaggccaaggacccgtttgcccacctgcctaaaagtacctttgttcttgatgaatttaagcgcaagtattccaacgaagacacactgtccgtggctctgccttacttttgggaacatttcgacaaggacggatggtcgttatggtactccgagtacaggttcccagaggaactgacccagacgtttatgagctgcaacctgataactggcatgtttcaacggctggataaattgaggaaaaacgcttttgcgagcgtgattctttttggtactaacaacagctcctccatttcgggagtatgggtgttccgtggccaagagctcgccttcccccttagtcccgattggcaggtcgactatgagtcctacacttggaggaaacttgaccccgggtctgaagagacacagacactcgttcgtgagtatttctcatgggagggggcgttccaacatgtgggtaaagctttcaaccagggaaaaatcttcaaatag

SEQ ID NO: 116250 - DNA, 2577 bp, synthetic construct
  misc_feature 1..2577: note = Description of Artificial Sequence: Synthetic coding sequence
  source 1..2577: mol_type = other DNA
atggtaaatttcactgtggatcagatcagagccataatggacaagaaggccaacatacgaaacatgtccgtgattgcacacgtggaccacggcaagagcacccttaccgattctttagtttgtaaagccggcattatcgccagtgccagggcaggggagacacgcttcactgacactcggaaggacgaacaagaaagatgtataaccattaagagtactgcaatcagtctgttttatgaactgagcgagaatgacctgaatttcatcaaacagtctaaagatggcgcaggcttcttgatcaacttgatcgactctccggggcacgtggactttagtagtgaagtcaccgccgccctgcgggtcaccgatggagctttggtggtggtggactgcgtgtctggtgtatgtgtccaaacagagaccgtccttaggcaggccattgcagagaggatcaaacccgtgctaatgatgaataaaatggacagggcactgctggaactgcagttagagcctgaggagctgtatcaaacattccaaagaattgtggagaacgttaacgtcattattagcacgtatggcgagggggagagcggccctatgggcaacattatgatcgatcccgtgttgggcaccgtcggcttcggctctggcctgcacggctgggcttttaccttgaagcaattcgctgaaatgtatgtggcaaagtttgctgctaagggagaaggccagttggggcccgccgaaagagcaaaaaaagtggaggacatgatgaagaagctgtggggcgataggtactttgaccccgccaatggaaaatttagtaagtccgccacatctcctgagggcaagaagctgccgcgtaccttctgtcaattgatactcgaccccattttcaaggtgtttgacgctatcatgaactttaagaaggaggagacagccaaactgatagagaagcttgacatcaagctggattcagaagacaaagataaggaaggcaaaccactgctgaaggcagtcatgcgccggtggctaccggctggcgacgccctgctgcagatgatcacaattcatctcccaagccctgtgaccgcccaaaagtatcgctgtgaactgctttacgaaggtccgccggacgacgaagccgccatgggcatcaaaagctgtgatccaaaggggcccctaatgatgtatatatctaagatggtgcctacctctgacaaaggaagattctatgcctttggacgggtgttctccggtctagtcagtaccgggcttaaagtccggattatgggacctaattacacacccgggaagaaggaggacctgtacctcaagcctatacagaggacaattctgatgatgggccgatatgtcgagcccatcgaggatgtgccttgcggcaacattgtggggctggtgggtgttgatcagtttctggtgaagacgggcaccataaccacgtttgagcacgcccataacatgagggtcatgaagttctcagtgtctcccgttgtcagagtggccgtagaagccaaaaaccctgccgacctgccaaaactggtggagggccttaagaggctggctaagtcagatccgatggtccaatgcattatcgaggaatctggcgagcacataatcgccggcgctggggagctccacctcgagatatgcctcaaagatctggaagaggatcacgcttgcattccgatcaagaaaagtgaccctgtcgtgagctacagggagactgtttctgaagagagcaacgtcctatgcctgtccaaaagccccaacaagcataaccgcctatacatgaaagcacgaccctttccggatggactggccgaggacatcgacaagggagaggttagtgccagacaggagctcaagcagcgagcccgttatctcgccgaaaaatacgagtgggacgtcgccgaagcccggaaaatatggtgctttggccctgatgggaccgggcccaatatcctgactgacattactaaaggggtgcagtatctaaatgagataaaggattctgtggtcgccggctttcaatgggccaccaaagaaggggctctttgtgaagagaacatgagaggcgttcgcttcgacgtacacgacgtaacgctgcacgccgacgctattcatagagggggcgggcagatcatacctacagctcggcgctgtctgtatgcctctgtgttgacagcacagcccagactgatggaacctatctatctggttgaaatccaatgtccagaacaagtggtgggcggcatttacggggtgttgaatcggaagagaggtcacgtttttgaagaatctcaagtagccgggacacccatgttcgtggtgaaagcctacctccctgtgaatgaatcttttggatttaccgcagatctgcgctccaatacaggcggccaggcatttcctcaatgtgtgtttgatcattggcaaatcctgcccggcgacccctttgataactcatctcgtccaagccaggtcgtcgcagagacgcgaaagcgcaaaggactgaaagaagggattcctgccttagataactttcttgacaagctgtag

SEQ ID NO: 116251 - DNA, 1752 bp, synthetic construct
  misc_feature 1..1752: note = Description of Artificial Sequence: Synthetic coding sequence
  source 1..1752: mol_type = other DNA
atggttaactttactgttgatcagatacgtgccattatggacaaaaaggctaatatccgtaatatgagcgtgattgcccatgtcgatcacggcaaaagtacactgactgatagcctggtgtgtaaggcaggaattattgcatctgccagagcaggcgaaacccggtttaccgacaccaggaaagatgagcaggagaggtgtattacaatcaagagtaccgccatctcgcttttctacgaactcagcgaaaatgaccttaactttatcaaacagtccaaggatggagctgggtttttgatcaacctcattgactcccccggtcacgttgacttctcaagtgaggtgaccgccgcactccgcgtgactgatggtgctctcgtggtagtggattgtgtgtcgggagtatgtgtccaaacagagactgtgttgaggcaggctatagccgagcgcataaagcctgtgcttatgatgaacaagatggatcgagctctgttggagcttcaactggagccagaggagctttaccagacatttcagcgtatagtagagaatgttaacgtgataatcagcacctatggggagggtgagtcaggtccgatgggaaacatcatgatcgaccctgtgctgggcacagtgggctttggtagcggcctacatggttgggctttcacgcttaaacaattcgctgagatgtacgtggcaaagtttgcagccaagggcgagggccagctgggacccgcagagcgggccaaaaaagtggaggacatgatgaaaaagttatggggtgaccggtattttgatccagcaaatggtaagttttcaaaatctgccactagccctgaggggaagaagctgccgcgcacattctgccagttgatcctggatcctatctttaaagtgttcgacgccattatgaatttcaaaaaggaggagaccgcaaagttgatcgagaagctggacatcaaactcgattctgaggataaagacaaggaggggaaacccttgcttaaagccgtgatgaggaggtggcttccagctggagacgccctgcttcagatgataacgatccatcttccttcacccgtgactgcccagaaataccgctgcgaattgctttatgagggtcctccggatgacgaggctgcaatgggaataaagagctgtgatcccaaggggccgctcatgatgtacatctccaagatggtgccgacgtccgataagggaagattctacgcatttggtcgcgtgttctcaggcctggtgagcacggggctcaaggttcggatcatgggacctaattacactcccgggaagaaagaggatttgtacttaaagcctattcaacgaacaatactaatgatggggaggtatgtggaaccaatcgaggatgtaccgtgtggcaatattgtaggcctggtgggagtagaccagtttctggtcaaaactggaacgatcactacttttgagcatgctcacaacatgagagtgatgaagttcagtgtctccccagtggtaagagtcgctgtggaggctaagaacccagccgacctccccaagctcgttgagggtctaaaacggctggcgaagtcggatcctatggtgcaatgtatcattgaggagagtggagagcacatcattgccggggcaggcgagcttcacctggaaatttgcctgaaggatcttgaagaggaccatgcgtgtattccaattaagaaggagaccgtgtctaagaaaaagaaaaagaaaaagtag

SEQ ID NO: 116252 - DNA, 351 bp, synthetic construct
  misc_feature 1..351: note = Description of Artificial Sequence: Synthetic coding sequence
  source 1..351: mol_type = other DNA
atgcccaaaaacaaagagtacgcgcaggttatcaaaatgctgggcaacggacgactggaggctatgtgctttgacggcgtgaaacggctatgccacatacgaggcaaactacgcaaaaaggtgtggatcaacacttcagacatcatcctggttggtttgcgagactatcaggataacaaagctgatgtgattctgaagtacaacgctgacgaagccaggagtctgaaggcctatggtgaattgccagagcatgccaagattaacgaaaccgacaccttcggccccggggacgatgacgaaatccaatttgatgatattggtgatgatgatgaggatatcgatgatatttag

SEQ ID NO: 116253 - DNA, 435 bp, synthetic construct
  misc_feature 1..435: note = Description of Artificial Sequence: Synthetic coding sequence
  source 1..435: mol_type = other DNA
atgcctaagaacaaaggaaaagggggaaaaaaccgccggcgtggaaaaaatgaaaacgagagtgagaaaagagaattggtcttcaaagaagatgggcaagagtacgcccaagtgattaagatgcttgggaacggtaggctggaagcgatgtgtttcgatggggtcaaacggctttgtcacattcgcggcaaattacggaagaaggtgtggattaatacatctgatatcattcttgtaggactgagggattaccaggacaacaaggccgacgtgatcctgaagtacaatgctgacgaagcgcgttctcttaaagcatatggcgagctgccagagcacgccaaaatcaatgagaccgacacctttggccctggagacgacgacgaaatccagttcgacgacatcggcgatgacgacgaagatatcgatgatatctag

SEQ ID NO: 116254 - DNA, 435 bp, synthetic construct
  misc_feature 1..435: note = Description of Artificial Sequence: Synthetic coding sequence
  source 1..435: mol_type = other DNA
atgcccaagaataagggtaaaggcggcaaaaacagacgaaggggcaagaatgaaaatgagtcagaaaaaagagagcttgtgtttaaagaggatggccaagaatacgcacaggtcatcaagatgctgggtaatgggagattagaggccctctgtttcgacggggtaaagcgcctgtgtcatatccgaggcaaactgaggaagaaggtgtggatcaacacttccgacataattttggtgggactacgagattatcaggacaataaggctgatgttatactgaagtacaacgccgacgaggccagaagcctcaaggcttatggtgagttaccagaacacgccaagattaatgaaaccgacacttttggccctggggacgatgatgaaatccagttcgacgacatcggtgacgatgacgaggacatcgatgatatctag

SEQ ID NO: 116255 - DNA, 384 bp, synthetic construct
  misc_feature 1..384: note = Description of Artificial Sequence: Synthetic coding sequence
  source 1..384: mol_type = other DNA
atgcctaagaacaaggggaagggtggcaagaacaggcgtaggggaaagaacgagaacgaaagcgagaagagggaattagtcttcaaagaggatggacaggaatatgcacaagttataaagatgcttggtaatgggagattagaagccttatgctttgatggcgtgaagagactgtgccatatccgcggtaagctacgaaagaaagataataaagctgacgtgattttgaaatataatgcggatgaggcaagaagcctcaaagcgtatggcgagctgcccgagcacgccaagatcaacgagactgatacattcggccctggcgacgatgacgagattcagtttgatgacatcggcgacgatgatgaggatatagacgacatctag

SEQ ID NO: 116256 - DNA, 1419 bp, synthetic construct
  misc_feature 1..1419: note = Description of Artificial Sequence: Synthetic coding sequence
  source 1..1419: mol_type = other DNA
atggccggtggtgaagccggcgtaaccctgggccaaccgcacttgtcaagacaggacttgactacattggacgtgactaaactaacgcctctgagccacgaagtgatatcaaggcaagcgactatcaacatcgggacaatcggccatgtcgcccacggaaagtctacagtggtgaaggccattagtggcgtacacacggtgaggttcaagaatgagctagagcgaaacattaccataaagttaggatatgccaacgccaaaatctataaactggatgatccaagttgccccaggcctgaatgctacaggtcatgtggaagtagtactcctgatgaattccccactgacatcccaggaacgaagggtaatttcaagttggtgagacatgtctccttcgtggactgccctgggcacgacatactgatggccaccatgttaaacggtgcagcagtgatggacgctgccctgctactgatcgcggggaacgaaagctgcccacagccacaaactagtgagcatctggccgccattgagataatgaaactgaagcacatactgattcttcagaacaaaatcgacctggtcaaggagtcccaggccaaagagcagtatgaacaaatccttgcctttgttcagggaacggttgccgagggcgctcctattattcccatttccgcccagctgaagtataatatagaggtcgtctgcgagtatatagtgaaaaagattcctgtaccgccacgagattttacctccgagccacggttgatagtcatacgatcctttgacgtcaataagcccggctgcgaagttgatgatctgaagggaggtgttgcaggcgggtccatcctgaagggagtattgaaggtgggacaggaaatcgaagtacggccgggcattgtgagcaaagattctgaaggcaaactcatgtgcaagccaatctttagcaagatcgtatccctgtttgctgagcacaacgacctccagtatgctgcccctggcggtttaatcggggtgggtaccaagattgaccccactctttgccgggctgacagaatggttggccaagtattaggtgccgtgggcgctttgcccgagatttttacagaactcgaaatctcgtacttcctactaagacgcctgctgggggtgcgtacagagggtgacaagaaagccgcaaaggttcagaaactgagtaaaaatgaagtccttatggtgaatattggcagcctgtccacgggcggccgggtgtccgccgtgaaagccgacctgggcaagatcgtcttgacgaatccggtttgcactgaggtgggggagaagattgcgttgtcccgccgggtagaaaagcattggaggctgattgggtggggtcagatcaggcgcggtgtgaccatcaagccaactgttgatgacgactag

SEQ ID NO: 116257 - DNA, 552 bp, synthetic construct
  misc_feature 1..552: note = Description of Artificial Sequence: Synthetic coding sequence
  source 1..552: mol_type = other DNA
taagcaggtggggaggcaggagtcaccctcgggcaacctcatctgagcaggcaggatttaaccaccttggacgttaccaaattaacaccgctttctcacgaggttatttcaagacaggcgacgattaatataggcacaatagggcatgtcgcccacggaaagagtactgtggttaaggcgattagtggcgtccataccgtgcgctttaaaaatgagcttgagcgaaacataactattaagctggggtacgccaatgccaagatctacaagctagatgacccaagctgtccccggcccgagtgctacagaagctgtgggagttcaacaccagatgaatttccaaccgatatcccgggtactaaagggaattttaagctggttagacatgtgtcttttgtggactgcccaggccacgatattctaatggcaactatgcttaacggagctgctgttatggacgctgcactgctgctaataggcaaatacttgactattggcctcgacaagtcgatgtggaacaagtccaagatgaagtacctgaagggcaactag

SEQ ID NO: 116258 - DNA, 1116 bp, synthetic construct
  misc_feature 1..1116: note = Description of Artificial Sequence: Synthetic coding sequence
  source 1..1116: mol_type = other DNA
atgtttcaggaggtaaaggcagataaggtcaccatgctgtggaataagaaggccacagccgtgctggtgattgcaagcacggacgtggacaagaccggagcctcctactatggggagcagaccctgcattacattgccaccaacggtgaatccgccgtggtgcagctgccaaagaatgggccgatttacgatgtggtatggaatagttcgtctacagagttttgtgctgtctatggcttcatgccagccaaggcaaccatttttaacctgaagtgcgatcccgtgtttgactttggcaccggacctagaaacgctgcctattatagtcctcacggccacatcctcgtcctagcagggtttggcaatctgcggggtcagatggaagtctgggacgttaaaaactataagctgattagtaagccagtggcctccgacagtacttacttcgcctggtgccctgatggagaacatatcctgacagccacttgcgcaccccgtctgcgcgtgaacaacggctacaaaatttggcactatacgggttccatcctacacaaatatgatgtacctagcaacgcggaattgtggcaagtatcttggcaaccttttctggacggcatcttccccgccaaaacaataacatatcaggccgtaccatctgaagtgccaaacgaggaaccaaaagtggccaccgcttaccgaccccctgccttgagaaataagccaataacgaatagcaagctgcacgaagaggagcctccccaaaatatgaaaccccagagcggcaacgataagcctctgtctaagacagctctcaagaatcagagaaagcatgaagctaaaaaggccgccaagcaagaagccaggagcgacaagtctcccgatcttgcgccgacaccagcaccacagagcacacctcggaacactgtcagtcagtctatcagcggagatccagaaatcgacaagaagattaagaacctgaagaaaaagttaaaagctattgaacagctgaaggagcaagctgcaacgggaaaacagctggaaaagaatcaactggagaagatacagaaggaaacagccctcctgcaagagttggaggacctggagttaggcatatag

SEQ ID NO: 116259 - DNA, 1758 bp, synthetic construct
  misc_feature 1..1758: note = Description of Artificial Sequence: Synthetic coding sequence
  source 1..1758: mol_type = other DNA
atggcaccatccaccccactgcttactgtacgggggtcagaaggactatacatggtgaatggacccccacatttcacagaatcaaccgtgtttccccgtgaatctggcaagaattgcaaagtatgtatattttctaaggatggcacactcttcgcatgggggaacggagaaaaggtgaatataatctccgtgaccaataaggggttattacacagttttgatctattaaaagctgtgtgtctggaattttccccgaagaacacagttttggcgacatggcagccatatacgacaagcaaggacggtacagccggtatccctaacctccaactgtacgacgtcaagacgggaacgtgtctgaaaagttttatacagaagaagatgcaaaattggtgtccgagctggtccgaggatgaaaccctgtgcgctcgcaacgtcaacaacgaagtgcacttttttgagaataataattttaacaccatcgcaaacaaactgcacttacaaaagattaatgacttcgtgttgtccccaggtccgcagccatataaagtggccgtctacgtgcctggaagcaagggtgcgccgtcattcgtgaggctttatcagtatcccaactttgccgggccccacgccgcacttgcaaacaagtctttctttaaagctgacaaagtaacaatgttgtggaacaagaaggctaccgctgtgctcgtgattgccagcacagatgtggataagactggcgcaagctactacggggaacagactctccactatatcgccacgaatggagaaagcgctgtggtgcagttgccaaagaacggccccatttacgacgtggtgtggaattctagcagcactgaattttgcgctgtgtatggatttatgccagccaaggccacaatctttaacctgaaatgcgatcccgtgtttgacttcgggactggccccaggaatgccgcctactatagccctcacggccatatcctggtgctggctggcttcggtaatctgagaggacagatggaggtgtgggatgtgaagaactataagcttatcagcaagcctgtggccagcgattcaacatattttgcatggtgtcccgacggagaacatatcctcaccgcaacctgcgcccctcgcctgagagtaaacaatggctacaagatatggcactacacgggcagtatcctccataagtatgacgtcccaagcaacgcggagctatggcaagtgtcgtggcaaccattcctggatgggatctttcccgccaaaactatcacttaccaggccgtcccatctgaggtgcccaatgaggaaccgaaggtagccaccgcctacaggcctcctgccctgcgcaataaaccaataacgaattctaagttgcacgaggaagagcccccccagaatatgaagccacagtctgggaacgacaagcctctgtcaaagacggccctcaagaaccagcgaaaacatgaagctaagaaggctgccaaacaggaggcacgtagtgataagtcacctgacttagcccccacacctgctccacagtccacccccaggaataccgtgagtcagtccatctcaggcgatcccgagattgacaagaagattaagaacctgaagaagaaactgaaggctatcgagcagctgaaggaacaagcagcaaccggcaaacagctagaaaagaatcagctggagaaaatccagaaggaaacggcactattgcaagaacttgaggatttagaactgggtatttag

SEQ ID NO: 116260 - DNA, 1893 bp, synthetic construct
  misc_feature 1..1893: note = Description of Artificial Sequence: Synthetic coding sequence
  source 1..1893: mol_type = other DNA
atgcagggcggcaacagcggggtgcgaaaaagagaagaagagggagatggcgccggcgccgtggctgctcctccagctatcgactttcctgcagaaggtcctgatccagaatacgacgaaagtgacgtacctgcggaaattcaggtgctcaaagagccgctgcaacagcctacattcccctttgcagtcgcaaaccaactgctgctggtgtccctgctggagcatctgagtcacgttcacgaacccaacccgcttaggtcacgccaggtgttcaagctgctgtgtcagacatttattaagatgggtctactgtcttcgtttacgtgttctgacgaattctcctcgcttcggctgcaccacaatcgtgctatcactcatttgatgcgaagcgccaaggagagagtgcgtcaggatccatgtgaggatatttcacggattcagaagatacggagccgagaagtggctctggaagcacaaacatccagatacctgaacgaatttgaagagctcgcgatcctggggaaaggaggatacggtagagtgtataaggtgagaaataagttggatggacagtattacgcgatcaagaaaattctcatcaaaggggccactaagaccgtgtgtatgaaggtcctcagggaagtaaaggtccttgccggcttacagcatcccaatatcgtgggctaccacactgcttggatcgagcacgtacacgtgattcagccccgcgccgatagagctgctatcgaacttccgtccctggaagtcctgagcgatcaagaagaggacagagagcagtgtggggtgaagaatgatgagtcttcatcttcctcgatcatatttgctgagcccacacccgagaaagagaagaggttcggagaatctgacaccgaaaaccagaacaacaaaagcgtgaagtacacgaccaacctcgtaatcagggaatcgggggaactggagagtacgctagaactccaggaaaatgggctcgcaggattaagtgcatcctctatcgtggagcagcaactgccgctcaggaggaattcccaccttgaggagtccttcactagtacagaggagtctagtgaggagaacgtgaactttctcgggcagacagaggctcagtaccacttaatgctccatattcagatgcagctatgcgagctctccctgtgggattggattgttgagcggaataaacgcggacgcgaatatgtcgacgaaagtgcttgtccctacgtgatggccaatgtggctactaagattttccaggaactggtggagggagtgttctatatccacaatatgggcatcgtccaccgggatctcaaacctcggaacatcttcttgcatgggcctgatcagcaggtcaaaattggggactttggcctcgcctgtaccgacatccttcagaaaaacaccgattggaccaatcggaacggaaaacggacacctacccacacctctagggtggggacgtgcctttatgcctctcccgagcaactggagggctccgaatacgatgcgaagtctgatatgtactcgctgggtgtggtgctgctggaactcttccagccgtttggtacagaaatggaacgcgccgaagttttgaccggcctgaggaccggtcagctacctgaatctctaaggaagcgctgccccgtgcaggccaagtacattcagcacttgactagacggaactcaagtcagcgaccctccgctattcagctgctgcagagcgaactttttcagaattccggaaacgtgaacttgactctgcagatgaagattattgagcaggaaaaggaaatcgccgagctcaaaaagcaactgaacctgttgtctcaagataaaggagtccgagacgatggcaaggatggcggtgtgggctag

SEQ ID NO: 116261 - DNA, 1734 bp, synthetic construct
  misc_feature 1..1734: note = Description of Artificial Sequence: Synthetic coding sequence
  source 1..1734: mol_type = other DNA
atgaatcagacccacttcgtgcaagataggtgtctcagcgatccatgcgaggacatctctcgtatccagaagatccgcagccgtgaggttgcacttgaagcacagacaagcagatacctcaacgagttcgaggagctggccatcttgggtaaggggggatacggtcgagtttacaaggtacggaataagttggatgggcaatactacgccatcaagaaaatactcattaaaggagccacaaaaactgtgtgcatgaaggtgctccgggaggtgaaggtcctggctgggttacaacatcccaacatcgtcgggtaccacaccgcctggattgagcatgtccacgttatccagccaagggcagatcgggccgcaatcgaactaccaagcctcgaagtactgtccgatcaagaagaggacagggagcagtgcggggtgaagaacgacgagtccagctcttcttccatcatttttgccgagcccacaccagagaaagaaaagagattcggtgagagcgacacagagaaccagaacaacaagtctgtgaagtacacaactaatctcgtgatccgcgagtccggggagctggagagcactttggagcttcaggagaatggcttagctgggctgtctgcgtcttcaattgttgagcagcagctgcccctgcggcgcaatagtcacctggaggagagcttcacgagcacagaagagagcagtgaggaaaacgtgaatttccttggccagaccgaggcgcagtaccacctgatgcttcacattcagatgcaattgtgcgaactatcgctatgggactggatcgtggagaggaacaaacggggtagagaatatgttgacgagagtgcttgcccatatgtgatggctaatgtggccacaaagattttccaggagctggtggagggagttttctacatccataatatgggtatagtgcaccgggatctgaaacccaggaatatctttcttcacggtcctgatcagcaagtaaagattggcgactttggccttgcatgcactgatatactgcagaagaataccgactggaccaatcgaaacggtaaaagaacacctacacatacttctcgcgtgggaacttgtttgtatgctagtccagaacagctagagggttccgaatatgatgctaagagcgacatgtatagtctgggcgtcgtactgcttgagttgtttcagccattcggaacggaaatggagcgggctgaagtgctgacaggcttacgcaccgggcagcttccagaaagtctgcggaaaaggtgccctgtgcaagctaagtacattcagcatctgaccaggaggaactccagccagcgccccagcgcaattcaattgttgcagagtgagctgtttcagaacagtggaaacgtgaatctgaccctccagatgaagatcatcgagcaggaaaaggagatcgctgaactgaagaagcagcttaatctgctcagtcaggataaaggcttttccgtgatccccaagcctcatccttgtaaagccctgtacagcgctccgcagatgatatcccggcagttacgttccttgagctgtctctgtccagcactctttcctgggacctcgagctttattgtggccttatcatcaccggccaacctgtacataccacagagacagcggtcagatgaactcgtctttgaaagccagaagggctctgccatggagttagccgttattaccgtcgacggtgtatag

SEQ ID NO: 116262 - DNA, 3351 bp, synthetic construct
  misc_feature 1..3351: note = Description of Artificial Sequence: Synthetic coding sequence
  source 1..3351: mol_type = other DNA
atggaacgggccataagtcctggtctgctggtgcgtgccttactgcttctcttactgttgctcggactcgcagcaagaaccgtcgccgccggtcgagctcggggcctgccagccccaaccgctgaagccgcattcggtctcggtgctgcggccgcccccacaagtgccacaagagttcctgcggcaggagccgtagctgccgccgaggtaaccgttgaggacgccgaagcccttccggcagccgccggagaacaggaacctcggggcccagaacctgacgacgaaactgagctacgtccgcgggggcgctcactggtgataattagcactctggacgggcgaatcgccgccctggatcccgaaaatcatgggaagaaacagtgggacctggatgtgggaagcggatccctggtatcatctagtctgtccaaacccgaagtgttcggtaacaagatgatcattccctcactggatggagccctgtttcaatgggaccaggatagggaatcaatggaaaccgtccccttcacagtcgagtccttgctcgaatccagttataagttcggtgatgacgtggtactggtcggtggcaagtctttaacaacatacgggttgtctgcatactccgggaaagtgagatacatttgctccgcattaggttgcaggcagtgggactctgacgagatggagcaggaagaagatatcctcctactgcagcgcacccagaagaccgttcgcgccgtgggcccccggtctggtaacgaaaagtggaactttagtgtcggtcatttcgagctgagatacattcccgatatggaaacacgcgcgggattcatcgaatccacttttaagcctaacgagaacacagaagaaagtaagattatctccgatgtagaggagcaggaagccgctatcatggacatcgtaataaaagtgtcggtggcagactggaaggtgatggcatttagtaagaagggcggccatctcgaatgggagtatcagttttgtacccccatcgcgtctgcctggcttctgaaagacgggaaggttattccaataagtctattcgacgacacaagttacacaagcaatgacgacgtcctggaagatgaagaggacatcgtagaagccgctaggggcgcgactgagaattccgtgtacctaggaatgtacagagggcagctctacctacagtccagtgtcagaatttctgagaagttcccatcctcccctaaagccctcgaatctgtgaccaacgaaaatgcaatcattccacttcccacaattaagtggaaacctctcatccactcccccagcaggactcccgtcttggtcggtagcgacgaatttgacaagtgtctctcgaacgacaagttttcccacgaggaatactcaaacggagccctatccatcttgcagtacccttacgataatggatattatctcccctattacaagagggaaagaaataaaagaagtacccagatcacggttaggttcctagataatcctcattacaataagaacatccggaagaaggacccagtgctgctgctacactggtggaaggagatagtagcaacgatcctcttctgcatcattgcaactactttcatagtgagaagattattccaccctcacccccatcgtcagcgcaaggaaagtgagacacaatgccagacggaaaataagtatgactcggtgagtggtgaagcaaatgactcttcctggaacgacatcaagaactcgggctatattagccgctatctgacagatttcgagccgatccagtgtctcggcaggggaggctttggcgtggtctttgaagctaagaacaaagtcgacgattgcaactacgctatcaaaagaattcggcttccgaacagagagctggcccgggagaaagtcatgagagaagtcaaagcactggctaagctggaacaccccgggatagttcgctactttaacgcttggttagaagccccccccgagaaatggcaggaaaagatggacgaaatctggctgaaagacgaatcgacagattggcctctgagtagcccatcacccatggatgccccctctgttaagatccgccgtatggacccgtttgcgaccaaagagcacattgaaatcattgcgccatcaccacagcgaagccgttcgttttccgtcgggatttcttgtgaccagactagctcaagtgaatcacagttcagtcctctggagtttagtgggatggaccatgaggacatctctgaatccgtagatgcagcctacaatctgcaagactcctgtttgactgactgcgacgtggaagacggaactatggatgggaatgatgagggccattctttcgaactgtgtcccagcgaggcatcgccatatgtgcgttctcgagaacgtacctccagctcaatcgtcttcgaagactcagggtgcgataacgcttcttcaaaggaagaaccgaaaacaaatagactccatatcggcaatcattgtgctaacaagttgacggcgttcaagcctactagttcaaagtcaagcagcgaagccaccctatctattagtccccccagaccaactactctgtcactcgatttgactaaaaataccacagagaagctgcagccttcttctccgaaagtttacctctacattcagatgcagctttgtcgtaaggaaaatttgaaagactggatgaatgggcgctgcactattgaagaaagagaaaggtcagtgtgcctgcacattttcctgcagattgctgaagctgtggaattcctccacagcaagggcttgatgcatagggacttgaaaccaagcaatatattcttcacaatggatgatgtagtgaaagtgggcgactttgggctggtgacggctatggaccaggacgaggaggagcagacggttctaacccccatgccagcttatgcacgccacactggacaggtgggcactaaattatacatgagtccggaacagattcacgggaactcctattcccacaaggtcgatattttttcactcggcctgatcctgtttgagcttctatatccttttagtacacaaatggaaagggtgagaactcttaccgacgttcggaatctaaagtttcctccattgttcacccagaagtacccatgcgagtatgtcatggttcaggatatgctttctccgagtcctatggaacgccctgaggctatcaatattatagaaaacgccgtgtttgaggacttagattttccaggcaagaccgtgctccggcaaagaagccgtagtctctcaagttctggaacaaagcactccagacagagcaataattctcactccccactgcctagcaattag

SEQ ID NO: 116263 - DNA, 2898 bp, synthetic construct
  misc_feature 1..2898: note = Description of Artificial Sequence: Synthetic coding sequence
  source 1..2898: mol_type = other DNA
atgattatcccttcgctagatggggctctgtttcagtgggatcaggatcgcgagagcatggaaaccgtcccattcacggtggagtcactgctggaaagctcttataagtttggcgacgatgtggtcctggtcggaggcaagtcactgacaacctatggtctgtctgcctattcaggcaaagtgcgctatatctgctctgccttagggtgcagacagtgggactccgacgaaatggagcaagaagaagatattctgctcctgcagcgaacacagaaaacagtgagagccgtcggacccaggtccggcaacgagaagtggaacttctcagtgggccacttcgagctccgttatattcccgatatggagaccagggcgggtttcatcgaaagcactttcaagcctaatgaaaatactgaggaaagcaaaatcatctcagacgttgaagaacaagaagccgccatcatggatattgtaataaaggtgtccgtggctgattggaaggtgatggctttctccaaaaaggggggccacctcgagtgggagtatcagttctgcacgcctatcgcatcggcctggcttctcaaagatggtaaggtgatacctatatccctttttgacgataccagctacacatccaatgacgatgtactggaggatgaggaggacatagtcgaagccgcccggggagccaccgagaattccgtgtacctgggcatgtataggggccaattgtacctgcaatcatctgtccggatctcggaaaagttcccctcctctcccaaagccctggagtccgtgactaacgaaaatgcaatcatcccactgccaacaatcaagtggaaaccactgatacattccccatccagaactccagtcttggtaggctctgatgaatttgacaagtgcttgtccaatgataagttttcacacgaggaatactccaacggggcactgtcaattttgcagtatccatatgacaatgggtattacctcccttattacaaacgagagagaaataagagatctactcagattactgtccgttttctggataatcctcactacaacaaaaacatcagaaaaaaggatcccgtgctgctgctacattggtggaaggaaatagtagccaccattctgttttgcataatcgctaccacattcatcgtaaggcggctgtttcatccccatccccaccggcagaggaaagaatccgaaacacagtgccagaccgaaaacaaatacgatagcgtttccggcgaagctaacgattccagctggaatgacatcaaaaacagcggttacatctctaggtacttgacagatttcgaacccatccagtgcctcggtcgcggcggcttcggggtggtgtttgaggctaaaaacaaagttgatgactgtaactatgccattaaaaggattaggctcccgaacagggagctggccagggaaaaagttatgcgggaggtgaaagccctcgcgaaattagagcaccccgggatcgtcaggtatttcaacgcatggctcgaggccccgccagagaagtggcaggagaaaatggacgagatctggctaaaagatgagagcactgactggcctttgtcctcaccttccccaatggatgcaccatcagtcaagatcaggcgcatggacccctttgccaccaaggaacacattgaaattatcgctcccagccctcaaagatcacgtagctttagtgtcgggattagttgtgatcagaccagctcttcggaaagtcaattctctccccttgaattttcaggcatggatcacgaagatatctcggagtctgtagatgccgcctacaacctgcaggattcttgcctcacggactgcgatgtggaggacggaactatggatggtaatgacgagggccattctttcgaattatgcccctctgaggcttctccgtatgtgcggagccgcgagaggacctcttctagtattgttttcgaggattctgggtgtgataatgcttcatcaaaggaagagccaaagacaaatagattgcatatcggtaaccattgtgcgaataagctcacagcgttcaagcccacatcgtcaaagagctcctctgaggcaaccctgtcaattagcccgcccagacccaccaccctaagcctggatttaaccaagaacaccacagagaagcttcaaccaagttctcctaaggtctatctttatatacagatgcagctctgtcgaaaagaaaacctcaaggattggatgaatgggagatgcaccatagaggaaagggagagaagtgtgtgtcttcacatctttctacaaattgccgaggccgtggagtttctgcactctaaaggactcatgcacagggatctgaaacccagtaacattttcttcactatggatgacgtagtgaaggtaggagattttggactggtcacggccatggatcaagacgaggaggagcagacagtcttgacgcctatgcctgcttatgccaggcatacaggccaagtggggactaaactgtacatgtcccctgaacagattcacggtaattcttactcccataaggtggacattttctcactcggtctcatcctctttgaactactgtatcccttcagtacacaaatggaacgtgtcagaacccttacggacgtaaggaacttaaagttcccccccctgttcactcaaaagtacccatgcgaatatgtcatggtgcaggacatgttaagcccaagcccaatggagcggccagaggctattaacattatcgagaacgcggttttcgaagacttggacttcccgggcaagactgtccttcgccagcgtagtcgctccctcagcagcagcggaacaaagcactctcggcagtctaacaactcgcattctcctctgccctcaaactag

SEQ ID NO: 116264 - DNA, 1569 bp, synthetic construct
  misc_feature 1..1569: note = Description of Artificial Sequence: Synthetic coding sequence
  source 1..1569: mol_type = other DNA
atggccgcagtggccgtcgctgtcagagaagatagcggctccggaatgaaggctgagctgcctcctggtccgggcgccgtgggtcgggaaatgaccaaggaggagaaactgcagctccgcaaggagaagaaacagcagaaaaagaaaagaaaggaggaaaagggcgcagaaccagagactgggtcggcagtctccgcagcacagtgccagggtccaacaagagagctgcccgagagcgggattcagttaggcacccctcgggagaaggtacctgccggcagatccaaggcagagctgagagctgaacggagggccaaacaggaagccgaacgcgccctgaagcaggcaagaaaaggtgaacagggcggtcctccccctaaggcgtctccatcaacagcaggggaaacgcctagcggagtgaagcgcctgcccgagtatccccaagtggatgatctccttcttcgccgcctggtgaagaagccggagcgccagcaggtgccaacacgcaaagattacgggagcaaggtgtccctgtttagccacttgcctcagtacagtagacagaactctctcacacagttcatgagcattccctcttctgtgatccatcccgccatggtgcgactggggctgcagtattcccagggcctggtgtccggctccaatgctaggtgtattgctctgctgagagcactgcagcaggtgatccaggactacacgacacctcccaacgaggagttgtcaagggacctcgtcaacaaattgaaaccatatatgtctttcttgacccagtgcagacccctcagtgccagtatgcacaacgctattaaattcttgaacaaagaaataacttcggtcggtagctccaagcgcgaagaggaggccaagtccgaactgagagctgcaattgatagatatgttcaagagaagattgttctggcggctcaggcgatctcacgtttcgcgtaccagaagatatcaaatggcgacgtgattctcgtctacggctgcagctctctggtgagtcgaatcctacaggaagcttggacagaggggaggcgcttccgcgtggtcgtcgtcgattcacgaccttggctcgaaggtcgccataccctgcgctctctggtccacgccggggtacccgcaagctacctactgatcccagccgcatcctacgtgctccccgaagtgagtaaagtcctgctgggtgcgcacgcccttttggccaatggaagcgtcatgtctcgagtaggcacggctcagctggctctcgtcgctagagcccataatgtgccagtcctcgtctgctgtgaaacttataagttctgcgaaagagtgcagaccgatgccttcgttagtaacgaactcgatgatcccgacgatctacagtgcaagcgtggcgaacatgtagcactggccaactggcagaatcacgccagccttcgactgcttaatcttgtgtatgatgtcacccctcctgagctagtggatctagtgattacggaattgggcatgatcccatgctctagtgttcctgtagttcttcgagtgaagagtagtgaccagtag

SEQ ID NO: 116265 - DNA, 1632 bp, synthetic construct
  misc_feature 1..1632: note = Description of Artificial Sequence: Synthetic coding sequence
  source 1..1632: mol_type = other DNA
atgcctacccagcagcccgccgcgccaagtacccgcgctcccaaaccttccagatctctctccggatctctctgtgccctttttagcgatgccgattctggtagtggcatgaaagctgaactgccaccaggcccaggagcagtaggcagggagatgactaaagaggaaaagttgcagttgagaaaagagaagaagcagcagaagaaaaagcggaaggaggaaaagggcgctgagcccgagacgggcagcgctgttagtgccgcacagtgtcagggccccacacgggaactgccggaatcgggtatccagttaggtacacctcgggaaaaggtgcctgcaggccggagcaaagccgagttgagagccgaacgccgtgctaagcaggaagccgagagggccctcaagcaggcaagaaaaggagagcaagggggtcctccccctaaagcatcacctagtaccgcaggcgagaccccatcaggggtaaagaggctgcccgaataccctcaggtggatgacttattgttacgcagacttgtaaaaaaaccagaaaggcagcaggtaccaaccaggaaggattacggttccaaggttagtctgttctcccacctaccacagtacagtcgacagaattccctgacgcagttcatgtccatcccaagctccgtaatacatccggccatggtgcgacttggcctacagtattcccaaggccttgtgagtgggtcgaacgcccggtgcattgccctcctgagggcccttcaacaggttatacaggattatacaactccacctaatgaagaattgtcccgagacctggtcaacaaattgaaaccatatatgtcgttcttgacccagtgtagaccactatctgcttcaatgcataacgccattaagttcttgaataaagagatcacatcagtaggcagctcaaagagggaggaggaagcaaagtctgagctgcgagccgcaatcgatagatacgtgcaagagaagatcgtgcttgcggcccaggctatctcacggttcgcgtaccagaagatcagcaacggggacgtcatactggtgtacggctgctctagcctcgtatcccgcatacttcaggaggcctggactgaaggcaggcggttccgggtcgtggtcgtggactctcggccctggctggagggacgtcatacgctgagatcattggtgcacgccggagttcctgcatcatacctccttattcctgccgcctcatacgtgctacctgaggtttcgaaagtgctgctgggggcacacgccctgcttgcgaatgggtctgtcatgtcccgcgtaggcacagcacagttggctctggtggccagggcccacaacgtgcccgtgctagtgtgttgtgaaacatacaagttctgtgagcgggttcagacggatgcatttgtgtccaacgagcttgacgacccagacgatctgcagtgcaaaagaggcgagcacgtcgcccttgctaattggcagaatcacgcgagccttcgcctgctcaaccttgtttatgatgtcacaccacctgaactcgtagaccttgtcattactgaactgggcatgatcccttgtagctcggtacctgttgtattacgggtcaaatcctccgaccagtag

SEQ ID NO: 116266 - DNA, 918 bp, synthetic construct
  misc_feature 1..918: note = Description of Artificial Sequence: Synthetic coding sequence
  source 1..918: mol_type = other DNA
atggacgataaggaattaattgagtattttaaatcccagatgaaagaggatcccgatatggccagtgctgtggccgccattcggacccttctggagttccttaaacgagacaaaggagaaactatccagggcctgcgtgctaacctgacttctgcaattgaaaccctttgcggcgtggattcttcagttgccgtctctagcgggggagaactttttctccgtttcatcagcttggcttcactggagtatagcgattattctaaatgcaagaagatcatgatagagcggggcgaactatttttgagaaggataagcttatccaggaataagatcgctgacctttgccatacgtttattaaggacggagccactattctgacccacgcatactcaagagtggtattgagggtccttgaggccgccgttgccgctaaaaaacgcttttccgtgtatgtcactgaatcacaacccgacctgagtggtaagaaaatggcaaaagccctgtgtcacttgaacgtgcccgttactgtggtcctagatgctgctgtgggttatatcatggagaaggccgatctcgttatcgtgggggctgagggagtggtggagaatggtggcataattaacaagatcggcaccaatcagatggcagtgtgcgctaaagcacagaacaagccattctatgtggtggctgagtcctttaagtttgtgagactatttcccctgaaccagcaggatgtccccgacaaatttaagtacaaagctgacactttgaaagtcgctcagaccggacaagatctgaaagaggagcatccatgggtagactacaccgctccttccctcataacgctgctatttaccgatttgggagtgcttacgccaagcgcagttagcgatgagctgattaagctgtatttatag

SEQ ID NO: 116267 - DNA, 1056 bp, synthetic construct
  misc_feature 1..1056: note = Description of Artificial Sequence: Synthetic coding sequence
  source 1..1056: mol_type = other DNA
atgcctgggtccgccgctaaaggctccgagttaagcgagaggatcgagagcttcgtggagaccctaaaaagagggggcgggccgcgaagctcagaggagatggccagagagaccctcggactgctacggcaaattattacggaccacaggtggtctaatgctggagagttaatggagctgatccgcagggagggtagacgcatgacagctgcacaaccatctgagaccaccgtgggcaatatggtcagacgagtcttgaagatcatccgtgaggagtacggtcggttacatggccggtcggacgagtctgatcagcaagagtcccttcacaagctgctcacctcaggtgggcttaatgaagacttctcctttcactatgcgcagctacagtctaacatcattgaagccattaatgagctgctcgtcgaactcgaagggaccatggaaaatattgctgcccaggcccttgaacacatccactctaatgaagtgatcatgactatcgggttttctaggacagttgaggcattcctgaaggaggcagcacgcaaaaggaagttccacgtgatcgtcgccgaatgcgctcccttctgccagggccacgagatggcagttaacctctcaaaggccggcatcgagacaactgtgatgaccgacgcagcgatctttgcagtcatgtcccgcgtgaacaaggttatcattggaaccaaaacaatattagcgaacggagcgctgcgggccgtgaccgggacgcatactctcgcattagccgcgaagcaccattctacccccctaatagtgtgcgcaccaatgttcaagctgtcccctcaatttccaaacgaggaggatagtttccataagtttgttgctccggaagaagtgcttccgttcacagagggggatatcctagaaaaggtgagcgttcactgcccggtattcgactatgtcccgccagaactgatcactctcttcattagtaatattgggggcaatgccccaagttatatatacaggctcatgtccgaactctatcatccagacgaccatgttctgtag

SEQ ID NO: 116268 - DNA, 1359 bp, synthetic construct
  misc_feature 1..1359: note = Description of Artificial Sequence: Synthetic coding sequence
  source 1..1359: mol_type = other DNA
atggagttccaggcagtcgtaatggcggtgggaggcgggtctagaatgaccgatctcacctcatcaatcccaaaacctctgttgcctgtaggcaacaaacctcttatctggtatccactcaacctgctggagcgcgtgggctttgaggaggtgatcgtggtgaccaccagagacgtgcagaaagcactttgcgccgagtttaaaatgaagatgaagcctgacattgtctgtattcccgacgatgccgatatgggaactgctgactctctcagatacatctatccgaagctgaagaccgacgttcttgtccttagctgcgacctaatcacagatgtagcactgcacgaggttgtcgacctttttagagcctacgatgccagtctcgcgatgttaatgcgcaagggccaggacagcatcgagcccgtcccaggccaaaaagggaaaaagaaagcagttgagcagagggacttcattggggtggactccaccggaaaacgcctccttttcatggcaaacgaggccgacctcgacgaagagcttgttatcaaaggctctatcctccagaagcaccccaggatcaggttccacaccggcttggttgacgctcacctttactgtctgaagaaatacattgttgacttcttaatggaaaacgggtcaattacaagcattcgatctgagctgattccctatctggtcagaaagcaattctctagcgcgagctcacagcagggtcaagaggagaaggaggaggatttgaaaaagaaagagctgaagagcctcgatatctactcatttatcaaagaagctaataccctgaatttggcaccttatgatgcctgttggaatgcgtgtcgcggggatagatgggaagacctgtcccgcagtcaggtgcgatgctatgtgcacattatgaaggaaggactgtgtagtagagtgtccaccttgggattatacatggaagcgaataggcaggtgcccaaactactgtctgccctgtgtcccgaagaaccacccgtccattccagtgcacagatagtatctaaacaccttgtgggagtggactctctgatcggccctgagactcaaattggcgaaaagtcgtcaattaaacggtctgtgatcggaagctcttgtttgataaaggaccgagtgactatcaccaactgtctgttgatgaattccgtcaccgttgaagaaggctcaaacatccagggctcagtcatctgcaataacgccgtaatcgagaagggcgccgacatcaaggactgtttaatcggctccggccaacgcatagaagccaaagcaaagagagttaacgaagtcatcgttggcaacgaccagttgatggagatctag

SEQ ID NO: 116269 - DNA, 594 bp, synthetic construct
  misc_feature 1..594: note = Description of Artificial Sequence: Synthetic coding sequence
  source 1..594: mol_type = other DNA
atggagtttcaggcggttgtcatggccgtgggcggaggatcacggatgactgatctgacaagtagcatccctaaacctctactgcctgtgggtaataagccactgatttggtatccgctgaatcttttggagagagtcggatttgaagaagtgatcgtggtcacaactagggatgtccagaaagctctctgcgcagaatttaaaatgaagatgaaacctgatatcgtatgcattccggacgacgcggatatgggcaccgcagacagcttacgttacatctatccaaaactgaagacggacgtcctggtcttgtcctgcgacctcatcacagacgttgccttacacgaagtcgtcgatctgtttcgagcctacgacgcctcgctcgctatgctcatgagaaaagggcaggattccattgagcccgtccccggacagaaaggaaagaagaaagcagatggagattctctttgctgccaggccggggtgcaatggcaccacctgggatccttacagagcccacctccaggatttaagcacttcacatgtctgtctcttccctcctcttgggattacatgcatatgcccccgcactag

SEQ ID NO: 116270 - DNA, 1239 bp, synthetic construct
  misc_feature 1..1239: note = Description of Artificial Sequence: Synthetic coding sequence
  source 1..1239: mol_type = other DNA
atggagttccaggctgtagttatggccgtcggcggggggagtcgaatgacagatctgacttccagcatccccaaaccacttctgccagtcggcaataaacccctcatctggtatccactgaatctcctggagcgagtcggttttgaggaggtgattgtcgtgacaacgcgcgacgtgcagaaggctctgtgtgcagaattcaagatgaagatgaaaccagacatcgtttgcattcccgacgacgccgacatgggcaccgctgactcactgcgttacatctacccaaaactgaagacagacgtcctggtgctgtcgtgcgaccttataacagatgtggccctccacgaggtagtggatctgttccgggcctacgacgcctccctcgctatgctgatgaggaagggccaggattcgatcgaaccagtgccggggcaaaaaggaaagaagaaggcagtggagcagagagattttataggagtcgactcaactggaaaacgtctgctgttcatggcaaacgaggccgatcttgacgaggagttagtgatcaaagggtctattttgcaaaagcacccgagaattaggttccatactgggctcgtagatgcccacctgtactgcttgaaaaagtatatcgtcgactttttgatggaaaacggctctataacgagcattcgctcggagctgatcccttatctcgtgcgtaaacagttctcatccgctagctctcagcaagggcaggaggagaaggaggaggatctgaagaagaaggaactgaagagtctggacatttattcctttattaaggaagctaacacgcttaacctggctccttatgacgcatgttggaacgcctgccgaggagacaggtgggaggatttgagcaggagccaggtcaggtgctacgtccacataatgaaggaaggactctgttccagagtgagcacattggggctctatatggaggccaatcggcaggtgccaaaacttcttagtgcattgtgccccgaagaacctcctgtccatagctccgcccaaattgtgagcaagcatctcgtgggcgtggacagtctgatagggcctgagacccaaatcggcgaaaaaagttcaatcaaaagaagcgtaatcgggtctagctgtctgatcaaagaccgagtcaccattaccaactgtctccttatgaattccgtgactgtagaagaaggctacgtgtctccctgtacccatctaaggcagagatag

SEQ ID NO: 116271 - DNA, 669 bp, synthetic construct
  misc_feature 1..669: note = Description of Artificial Sequence: Synthetic coding sequence
  source 1..669: mol_type = other DNA
tgagtgatcaaaggttcaatcctccaaaagcacccaagaattcggttccacaccgggctggttgatgcccacctgtactgcctcaagaagtatatcgtggatttcctgatggagaatgggagcatcacaagcatccggtctgagctaatcccttacctggtccggaaacagttctcttcagcttcgtcccagcaggggcaggaggaaaaggaggaagaccttaagaagaaggagctgaaatctctcgacatatactcattcatcaaggaggcaaatacacttaacctggcaccctacgatgcttgctggaacgcctgtagaggtgatcgctgggaggacctctccagatctcaagttaggtgctatgtgcatatcatgaaagaggggctttgcagtcgtgtctctactctggggctgtacatggaggcaaacaggcaggtccccaaactgctgtccgcactgtgtccagaggaaccacctgtccatagttcggcccaaattgtctccaagcatcttgtgggagtggactccttgatcgggcctgagacccagatcggcgaaaaatcctccattaaaagatctgttattgggtccagctgccttatcaaggacagagtgactatcaccaactgcctcttaatgaattcggtgaccgtggaggaagggtag

SEQ ID NO: 116272 - DNA, 1572 bp, synthetic construct
  misc_feature 1..1572: note = Description of Artificial Sequence: Synthetic coding sequence
  source 1..1572: mol_type = other DNA
atggcagccgtggcagtggccgtacgggaagatagtggatccggcatgaaagccgaactcccccctgggcccggggcagtggggagggaaatgacaaaagaggagaagttacaactcagaaaagaaaaaaaacaacaaaagaagaaacgtaaagaggagaagggcgccgaacctgagaccgggagtgctgtgagtgccgctcagtgtcaggtggggcccactagggaactgcctgagtccggcattcagttaggtactccgcgagagaaagtgccggccggcagatccaaggctgagctgcgggccgagagaagagccaaacaagaggccgagcgggcactcaagcaggctagaaagggggagcaagggggtccccctcccaaagcaagccccagtaccgcaggcgagacaccatccggcgtgaagcggttacccgaatatccgcaggtcgacgaccttctactgcgcagactggtcaaaaaaccagagcgacagcaagttcctacacgtaaagactatggcagtaaggtcagcctgttctcgcatcttcctcagtattctagacaaaatagcctgacacaattcatgtctatccccagttccgtgatacatcccgccatggtgagactggggttgcagtacagtcaagggttagtgtccggaagcaacgcacgatgcattgctttactccgtgcattgcagcaggtgatacaggattacactaccccacctaacgaggagttgtccagggatctcgtcaataagctgaaaccctacatgtctttcctgacccaatgccgccccttgtctgcaagcatgcacaatgccattaagtttctgaataaggagattacgagtgtcggtagcagtaaacgcgaagaggaagccaagtccgaactgagagcagcaatcgaccgctacgtacaggaaaaaatcgttctggccgcacaggccatttctcgatttgcttaccagaagattagtaacggagatgtcatcttggtttacggatgctcttccttggtgagcagaattctgcaggaggcatggaccgagggcagaaggtttagagtggttgtggtggattcaagaccatggttagaggggcggcatacactcagatctctggtgcacgccggcgtgccagccagctatttattgattcctgccgcgtcatacgttctccccgaggtcagtaaagtcttgctcggcgcccacgcccttttggccaatggaagtgttatgagtcgcgtgggcactgctcagttggccttggtggcaagggctcataacgtccccgtgctcgtctgttgcgagacatacaaattttgcgagcgagtgcagacagatgctttcgtcagtaatgaactggatgatcctgacgacctgcagtgcaaaaggggagaacatgttgctttggccaattggcaaaaccacgcatcattgcggcttctcaacttggtgtacgatgtaacccctcctgaactggtggacttggtaatcaccgagctcggcatgatcccctgtagttccgtacccgtggtattgcgcgtgaaatctagcgaccagtag

SEQ ID NO: 116273 - DNA, 1563 bp, synthetic construct
  misc_feature 1..1563: note = Description of Artificial Sequence: Synthetic coding sequence
  source 1..1563: mol_type = other DNA
atggctgctgtcgctgtggccgtccgagaggattctgggagtgggatgaaagccgaaagcccttgggcatgggtgggccgagagatgactaaggaagagaaacttcagctccgaaaggagaagaagcagcagaagaaaaagcggaaggaagagaaaggtgctgaacctgaaacgggatccgccgtgtccgcagcacagtgccagggtcctacccgagaattgccagagtctggtatccagctggggacacctagggagaaagtgcctgctgggcggtccaaggccgaactcagagctgaacgccgtgcgaagcaagaagccgagcgggccttgaaacaagcaaggaagggggagcagggggggccacctcctaaagcttccccttcaacagccggggagacccctagcggcgttaagcgtctcccagaatatccccaggtggatgatctccttcttcgcagattagtgaagaaacctgaacgacagcaggtgcccacgcgcaaggattacggatccaaggtctctctgttttctcacctgccacaatactcacgccagaattccctgacacagttcatgtccataccctcttctgtcatacaccccgcaatggttcgcctcggactgcagtactctcagggactagtgtctggctcaaatgctcgttgtattgccttgctcagggctctgcagcaagtaatccaggattatacaactccacccaacgaggagcttagcagggatctggttaacaaattgaagccatatatgtccttcctgacacaatgccgtcccctgagcgcttcaatgcataatgcgattaagttcctcaataaagaaatcaccagcgtggggtcgagcaaacgggaggaggaggctaagagcgagctgagagccgctatagaccggtatgtgcaggagaagattgtgttggcggcccaggcaatctcacgctttgcttaccaaaaaatatcgaacggcgacgtcatcctggtatatggatgctctagtttagtgagtaggatcttacaggaggcatggaccgagggtagaagatttcgcgttgtcgtcgtggactccaggccttggctcgagggcagacataccttaagatcactggtccacgccggagtacctgcatcataccttcttatccctgccgcatcctatgtcctgccagaggtgagtaaggtgctcttaggcgctcatgcgcttctcgccaatggctctgtgatgtcccgcgtggggaccgctcagctggccctggtggcccgagcgcacaatgtgcccgttctggtgtgctgtgaaacatacaaattctgcgaaagggtccagactgacgcctttgtgtctaatgagctcgacgatccagacgacttacagtgtaaacgcggcgaacacgtggccttagccaattggcagaatcacgcctctctccggctgcttaacctggtgtatgacgtgactccacccgagctcgtagatctggtcatcacggaactgggcatgattccatgttctagcgtaccagtggtgctcagagttaagtcatccgaccagtag

SEQ ID NO: 116274 - DNA, 2166 bp, synthetic construct
  misc_feature 1..2166: note = Description of Artificial Sequence: Synthetic coding sequence
  source 1..2166: mol_type = other DNA
atggctgctccggtggtagcgccgcctggagtcgtagtgagccgggccaataaaaggagcggagccggccccggcggaagtggcggtgggggggctcggggggctgaggaagagcctcctccccccctgcaagctgttttggtggctgactcattcgatcgtcgattttttcccatctctaaggatcagccgcgcgtccttctaccgcttgccaacgtcgccctgattgattacacgctcgaatttctgaccgccacaggagttcaggagacgtttgtcttctgctgttggaaggccgcgcagatcaaggagcacctgctgaagagtaagtggtgtagacctacaagccttaatgtcgtgcgaataatcacctctgaactttaccggagtctgggagacgtgctgagagatgtggatgccaaggcactggtgcggtcagactttttattagtttatggggacgtgatctcgaatattaatataacccgtgcattagaggaacaccggttgcggcgaaagctagagaagaatgtttccgtaatgacgatgatcttcaaggagagctcccctagccacccgacaagatgccacgaggacaatgtcgttgtcgccgtggactccaccacaaacagagtgttgcacttccagaagacacagggactgcggagattcgccttccctctgagcctgttccaaggatcctcggatggcgtcgaggtaagatacgatctccttgattgtcatatctctatctgctccccccaggtggcccaactttttactgataactttgactatcagactagggacgatttcgtcagaggactgttagtcaacgaagaaatcctgggcaaccagatccatatgcacgtgacagccaaagaatatggggcacgagtgtccaaccttcatatgtacagcgcagtgtgtgcggacgtgatacggagatgggtatatccactcactcccgaggcaaactttactgacagcacaacacagtcttgcacccattctcggcataacatttatcgaggtcccgaagtcagcctggggcacggtagcatcttggaggaaaacgtgttgctcgggtccggcaccgtcatcggctcaaactgcttcatcacaaattctgtgatcggccccggatgccacatcggcgacaatgtggtccttgatcagacatatctgtggcaaggagtccgggtggccgcaggcgctcagattcaccagtcactgctttgtgataacgccgaagtgaaggagagagttacactcaaaccacggagcgttctcacctctcaggtggttgtcggtcctaacattaccctacccgaaggctctgtcatttcgctccaccccccggacgccgaggaagatgaggatgatggggagtttagtgatgatagcggcgccgaccaagagaaagataaggtaaaaatgaaagggtacaatcctgccgaagtaggagcagcaggaaaagggtacctttggaaggccgcaggcatgaacatggaggaagaggaagagttacagcagaacctctgggggcttaagataaacatggaagaggaaagtgagtcggaatccgagcaatccatggactccgaggaacctgacagtcgcgggggctccccacagatggatgacataaaagtgttccagaacgaggtgctgggaaccctgcaacgcgggaaagaagagaatatcagctgcgacaatctggtactggagatcaactcactgaaatacgcatataatatttccttaaaagaggtgatgcaggtcctttctcatgtggtactggagtttcccctacaacagatggactcgcccctggacagctctcggtactgcgccctgctgttgcccctgctcaaagcctggtcgccggtctttcggaactatatcaaacgcgctgccgaccacctcgaggccttagcagctatcgaggactttttccttgagcatgaggccctcggaatttcaatggcgaaggtcctgatggcgttttaccaactggagatcctggccgaggaaaccatcctctcgtggttttctcaaagggataccacagataaggggcagcagcttcgcaagaatcagcaactccagcgcttcatccagtggctgaaagaggccgaggaggagtcatcagaggacgattag

SEQ ID NO: 116275 - DNA, 1014 bp, synthetic construct
  misc_feature 1..1014: note = Description of Artificial Sequence: Synthetic coding sequence
  source 1..1014: mol_type = other DNA
cccccccagccttcgaaaatgctggggctgcaggttgcacagctttttacagataactttgactaccagacacgagacgacttcgtcagagggcttctggtgaacgaggaaatcctcgggaatcagatccatatgcacgtgaccgccaaggagtacggtgctcgcgtgagtaacttacatatgtactccgccgtatgtgccgacgtgattaggcgttgggtttaccccctgaccccggaggctaacttcaccgacagcacaactcagtcgtgcacccacagcagacataacatctatcgcggtccagaggtgtccctcggacatgggagtattttggaggagaacgttctgttggggtcggggacagtcatcgggtcaaactgctttatcacaaatagcgtgatcggaccaggatgtcatataggcgacaacgtggtcctcgaccaaacatacctctggcagggggtccgtgtggcagcgggtgcgcagattcaccaatctctgctatgcgacaatgccgaagttaaggagagagtcactctaaaacctcgttccgtcttgacatctcaagtggtggtgggccctaatataaccttgcctgagggatccgtcattagtctgcatccccccgacgcggaagaggacgaggacgacggcgagttcagcgatgactccggcgcagaccaggagaaggacaaggtgaaaatgaagggttacaaccctgccgaagtaggcgctgcgggaaagggatatctctggaaggcggcagggatgaatatggaagaggaggaagagctccagcagaatctttgggggttaaagattaacatggaggaagaatcggaatctgaatcagagcaatccatggactcagaagagcctgacagccgaggcggtagcccacagatggacgacatcaaggtgtttcagaacgaagtgctgggaaccctgcaaaggggcaaagaagaaaatatttcctgtgacaacctcgtgctggagataaactcgttgtag

SEQ ID NO: 116276 - DNA, 2574 bp, synthetic construct
  misc_feature 1..2574: note = Description of Artificial Sequence: Synthetic coding sequence
  source 1..2574: mol_type = other DNA
atggaagctggcccatctggagctgctgcaggggcatacctcccgcccctccagcaggtgttccaggcaccccgcaggcccgggattggcacagtggggaagcctatcaaactcctggccaactattttgaggtggatattccaaaaatagatgtataccattacgaggtggatattaaacccgacaaatgccctaggcgggtcaatagagaggtggtggagtacatggtgcaacatttcaagccccaaatcttcggggacaggaaaccagtgtatgacggcaagaaaaacatctacaccgtgacggcactcccaattggaaacgagcgcgtggactttgaggtgacgatccccggcgagggaaaggatagaattttcaaggtaagtatcaagtggttagctatagtttcttggcgcatgctgcatgaagcactggtcagcggtcagattcctgtcccactcgagtctgtccaggcccttgacgtggccatgaggcatctcgcttccatgagatatacacccgtgggaagatcctttttctctcctcccgagggctattatcacccgctaggcggagggagagaagtttggttcgggttccaccagtccgttcgccctgccatgtggaaaatgatgctcaatatagacgtgtccgctacggctttctataaggcccagcctgtgatcgagtttatgtgcgaggtgctggacatcagaaatattgacgaacagcctaaaccccttacggattctcagagagttagatttaccaaagagatcaagggcctcaaagttgaggtaacccattgcggccagatgaagcggaagtaccgcgtctgcaatgtaaccaggagacctgcttctcaccagacatttccactccaattggagtctgggcaaacagtcgagtgtaccgtggcccagtattttaaacaaaagtacaatctgcaactcaagtatcctcacctgccctgcctgcaggtcggacaagaacagaaacatacctacctccctttagaggtgtgcaatatcgtcgctgggcagcggtgcattaagaagctgaccgataaccagacttcgactatgatcaaggcgactgctaggtctgccccagaccgccaggaggaaatcagtagattgatgaaaaatgcttcctacaatcttgatccttacattcaggagttcggtatcaaagtaaaggacgacatgaccgaagttaccggacgagtgctgcccgcccctattcttcagtacggtggccgaaacagagcaattgcgacacccaaccaaggcgtgtgggacatgagagggaagcagttttataacggtattgagatcaaggtatgggccattgcctgctttgcaccccagaaacagtgccgggaggaggtcttgaaaaacttcaccgatcagttgcgcaaaatcagtaaggatgcaggaatgccaatccaaggccagccctgtttctgcaaatatgcgcaaggagctgacagtgtggagccaatgtttcggcatttgaagaacacctacagcggacttcagctgataatcgttatcctgccaggaaaaactccagtgtacgccgaggttaaaagggtgggggacaccctgctggggatggcgacccagtgtgtgcaggtgaagaacgtagtcaaaacatccccgcagaccctgtctaatctctgtctgaagatcaatgtcaagcttggtggcataaataacattcttgtgccccaccagcggtccgctgtgttccagcagccagttattttcctgggagccgacgtcactcatccgccagcaggggatggcaaaaagccttcaataacagccgtagtggggagcatggacgcacatccgagcagatactgcgccactgtccgcgtccaacggccaaggcaggaaattatcgaagacctgagctacatggtgcgagagctcttgatccagttctacaagagtacccggtttaagcccacaaggatcatcttctatagagatggggtgccagagggccagctccctcagatcctgcattatgagctcctcgcaatccgagacgcctgtatcaagctggagaaagactatcagcccggcatcacatacattgtcgtgcaaaagaggcaccatacgcggctgttctgcgccgataagaatgagcgaattggtaagagcggaaacatccctgcagggaccaccgtcgacactaatatcacccaccctttcgagtttgacttttacctgtgttcccacgccggcatccagggtacatctagaccttcccactactacgtgctgtgggatgacaacaggttcacagctgacgaactgcaaatcctcacgtaccagttgtgccacacttacgtccgctgcacaaggtccgtgtcaatccccgcgcctgcgtactacgcgcgactcgtcgctttccgggcccgttatcacttggtggataaggaacatgacagcggggagggaagtcacatttctgggcagtctaacggccgtgacccacaggctttggcaaaggctgtccaggtgcatcaggataccctgcgtacaatgtactttgcttag

SEQ ID NO: 116277 - DNA, 2349 bp, synthetic construct
  misc_feature 1..2349: note = Description of Artificial Sequence: Synthetic coding sequence
  source 1..2349: mol_type = other DNA
atggtacagcactttaaaccacagatattcggcgatcgcaagccagtctacgacggaaagaagaacatctatactgtcaccgcactgcccataggtaacgagcgtgtggacttcgaggttacaatccccggagagggaaaagacaggatcttcaaggtgagcattaagtggttagctattgtgagctggcggatgttacatgaagccctggttagtggacaaatacccgttcctctggagagcgttcaggccctggacgtcgcaatgcgccacctagcctcaatgcgttacacccctgtcggtaggagcttcttctctccccctgagggttactaccaccctctggggggtggaagggaggtatggtttggttttcatcaatctgtccgcccagccatgtggaaaatgatgcttaatatcgatgtctcggccactgcattctataaggctcagccagtgattgaattcatgtgtgaggtgctggatattaggaatattgacgaacagcccaaacccctgacagactcacagagggtcaggttcaccaaagagataaaggggctaaaagttgaggtgacacattgcggccagatgaagagaaaatatcgcgtgtgcaatgtcacccgtcggcctgccagccatcaaaccttcccgcttcaactcgaaagtggccaaacggtcgaatgcactgttgctcagtactttaagcagaagtacaatctgcagctgaagtacccccacttgccctgtttgcaggtcggtcaggaacagaaacacacctacctgcccctagaggtgtgtaacattgtggctggtcaacggtgcatcaagaaactgaccgacaaccagacgtcaaccatgattaaagccacagctaggtctgccccagacaggcaggaagagatttctcgattgatgaagaatgcatcctacaaccttgacccttacatccaagaattcggtatcaaggtgaaggatgacatgacagaggtgaccgggagggtcttacctgcgcctatccttcaatatggtggccgcaaccgagccattgccaccccaaatcagggtgtatgggatatgcgcggtaagcagttttacaacgggattgagataaaagtttgggcaatagcctgcttcgctccccagaagcagtgccgagaggaggtactaaagaatttcactgaccagctgaggaagatctccaaggatgcaggaatgcctatccaaggtcaaccctgcttctgcaaatacgctcagggagcagatagcgtggaacctatgtttcgccatctcaagaatacgtattccgggctgcagttgattattgttatactcccaggtaagactccggtctacgctgaagtgaagagagtcggagacactctgttgggcatggccacccagtgtgtgcaggtgaaaaatgtggtcaagacttccccccaaaccctgtctaacctgtgtctcaagattaacgtgaagctgggtggcatcaataatatcctggtgcctcaccagaggtccgcagtgttccagcagcccgtgatatttctgggggcagacgtgacacacccccccgccggggacgggaaaaagccaagcattacagccgtggtgggatctatggacgcccatcctagcagatattgcgcaaccgtacgtgtccaaaggcccagacaggagattatcgaggacctgtcatatatggtgcgggaacttctgatccagttttacaaaagcactagattcaagccaacacgcatcatcttctatagggacggtgtgcccgaaggccaattaccacaaattttacattacgagctcctagcaatccgcgacgcgtgtatcaagttagaaaaggactaccagccaggaatcacctacattgtggtacagaaacggcatcatacccgcctcttttgcgcggataaaaatgagagaattgggaagtccggcaatatccccgcaggtacgaccgttgacaccaatatcacccaccccttcgaattcgatttttatctgtgcagccatgcgggaatccaaggcacttccagaccgagccactactatgtcttgtgggacgataaccggtttaccgccgatgagctgcagatcctcacatatcaactgtgtcacacatacgtgcggtgcacccgtagcgtttcaatccccgcaccggcttattatgcaaggttggtggcattcagggctcgctaccatttagttgataaagaacacgacagcggagaaggtagccatatcagtggtcaatctaacgggagagaccctcaggctctggctaaggctgtgcaagttcaccaagacactctgaggaccatgtactttgcatag

SEQ ID NO: 116278 - DNA, 1254 bp, synthetic construct
  misc_feature 1..1254: note = Description of Artificial Sequence: Synthetic coding sequence
  source 1..1254: mol_type = other DNA
atggaatttgtaaaatgccttgggcatccagaagagttctacaaccttgtgcgctttcgtataggggggaagcgtaaggtgatgccaaagatggaccaggactccctgtcttcatccttgaagacatgctacaagtacttgaaccagacctctcgctccttcgccgctgtaatacaggctcttgacggggaaatgcgcaacgccgtgtgcattttttacttagtgctgcgcgcgctggataccctagaggatgatatgactataagcgtggaaaaaaaagtacctctgctgcacaacttccactcctttctgtatcaacccgactggagatttatggagagtaaagagaaagatcggcaggtacttgaggacttccctaccatctccttagagttcaggaacctggccgagaagtatcaaacagtcatcgcagacatttgtcgcagaatggggataggcatggcggagtttctggacaagcacgtaacatcagaacaagagtgggataaatattgtcactatgtggcaggactagttggtatcggtttgtccagactgttctctgcatcagagttcgaagatccactggttggtgaagacacggaacgggcaaactccatgggactgtttctgcagaagacaaatataatccgggactatctcgaggatcagcagggcggacgagagttttggccccaggaggtgtggagccgttacgtgaaaaagctaggcgattttgctaagcctgaaaacattgatctggccgtccaatgcctgaatgagctcatcacaaacgccctacaccatatccccgacgttatcacatacctttccaggttgcgaaaccagtcagttttcaatttttgcgccatccctcaagtgatggctattgccaccctggctgcctgttacaataatcagcaggtgttcaaaggcgcagtgaaaatccgaaaggggcaggccgtgacgctgatgatggacgccaccaatatgcccgctgttaaagccattatctaccagtacatggaagagatctatcatcgcatacccgactcggatcctagcagctctaagactcggcagataataagcacaatcagaacacagaatctccccaattgccagttgatatcccggtctcactactctcctatctacctgagtttcgtgatgttactggctgccttaagttggcagtacctgacgaccttaagtcaggtgaccgaggactacgtgcagacaggcgagcactag

SEQ ID NO: 116279 - DNA, 2478 bp, synthetic construct
  misc_feature 1..2478: note = Description of Artificial Sequence: Synthetic coding sequence
  source 1..2478: mol_type = other DNA
atgtacagcggcgccgggcctgctttagcaccaccggcccctccgccaccaatccagggctatgctttcaaacctcctccccggcccgatttcggcacgtctggaagaaccatcaaactgcaggcaaacttttttgagatggacatacccaaaatcgatatctaccattacgagttagatataaagcctgagaaatgccccagacgcgttaatcgcgaaattgttgagcatatggtgcagcatttcaagacccaaatatttggagatcggaagcctgttttcgacggacgaaagaatctctacactgctatgcctctgccaatcgggagagacaaagtggagctggaggtcacactccccggagagggaaaggaccggattttcaaggtgtccataaagtgggtttcctgcgtgtcactccaggccctgcacgacgccttatctgggaggttgccttctgtaccattcgagaccatacaggccttggacgtagtgatgagacatctacccagcatgagatatacaccagttggccgtagcttcttcaccgctagtgaaggctgtagtaaccctcttggcggaggcagggaagtatggttcggcttccaccagagcgtccgccccagcctctggaagatgatgttgaacatagatgtgtctgccactgctttctacaaggcccagccagtcatagagttcgtttgcgaagtgctcgacttcaaaagtatcgaagagcagcagaaacctctaacagattctcagcgggtgaaattcactaaagagataaaggggcttaaggtggaaatcacacattgcggccagatgaagagaaagtaccgggtgtgcaatgtcaccagacggccagcatcccaccagacgtttccgctgcaacaagagagcggccagacggtcgagtgcactgtggctcaatactttaaagaccgccacaagctggtgttgagatatccacatctaccttgcctacaagtgggccaggagcagaagcacacctatctgccgctggaagtgtgcaatattgtggcgggccagcggtgtattaagaagttgacggacaaccaaacgtcgactatgatccgggcaaccgctcggtctgctccggatagacaggaggagatttctaaactgatgcggtctgcatcttttaacaccgacccctatgtgagagagttcggaatcatggttaaggatgagatgaccgatgtaacaggacgcgtgttgcaacccccttccatcctgtacggtggaaggaacaaggcaatagcaacacccgtgcagggagtgtgggacatgaggaataagcagttccataccggtatcgaaataaaggtgtgggccatcgcatgtttcgcaccccagcgccagtgtacagaggtacaccttaagtcttttactgagcagctccgcaagatttcccgggacgcaggaatgccaatccaaggccagccatgcttctgtaagtacgcccaaggcgcggactcagtcgagccaatgtttcggcatctcaaaaatacttacgccgggctccagcttgtggtcgttattctgccgggaaagacaccagtgtatgctgaggtcaagcgtgtcggggatacggttctcggaatggcaacacagtgcgtccagatgaaaaacgtgcagaggaccacaccgcagacgctctcgaacctttgcctgaaaatcaatgtgaagctgggtggcgtgaataatattctgctcccgcaagggcgacccccggtctttcagcagcccgttatttttcttggcgctgatgtgacacatccccctgctggcgatggtaaaaagccgtcaatcgccgccgtggtgggaagcatggacgcacaccccaatcggtattgcgccaccgttcgcgtgcagcagcacaggcaggagatcatacaggacctagctgccatggtgcgagagctcctgatccagttttacaagagtacccgttttaagcctactcggataatcttttatagagacggcgtatcagaaggccaatttcaacaggtattacaccacgaactcctcgctatacgggaagcctgcattaagctggagaaggactaccagcccggcataacatttatcgtggtgcaaaaacgacaccacacacgcctgttttgtactgataagaatgaacggggcacatccaggcctagccattatcatgtcctgtgggacgataatagattcagtagtgacgagttgcaaattctcacgtatcagctttgtcacacctatgtgcggtgcacgcggtctgtgagcatccccgcccccgcatattacgctcatctggtggcctttagggcccgatatcaccttgtcgacaaagaacacgattctgctgaggggtcacacaccagcggccagtccaatggaagggaccatcaggctctcgccaaagcagttcaagtacatcaagacaccctccggaccatgtattttgcatag

SEQ ID NO: 116280 - DNA, 1881 bp, synthetic construct
  misc_feature 1..1881: note = Description of Artificial Sequence: Synthetic coding sequence
  source 1..1881: mol_type = other DNA
atgtgcgaagtcctagacatccacaatattgatgagcaacccaggcccctcaccgatagccaccgcgtaaaattcaccaaagagattaaaggtttgaaggtggaggtcacccactgtgggaccatgagacgcaaatatagagtgtgtaatgtcacccgccggccagcaagccatcaaacgtttccattgcagctggagaacggccagaccgttgagcgcaccgtcgcccagtattttcgggagaaatacactttacagctcaaatatccccacctgccatgccttcaagtcggacaagagcagaaacatacttatctgccacttgaagtttgcaacatcgtggcggggcagcgttgcattaagaagttaaccgacaaccagaccagtactatgatcaaagccactgcccggtcagcccctgacagacaggaggaaattagccggctggttcggagcgccaattacgagacagatccattcgtccaggagttccagttcaaggtgcgagacgagatggctcatgtgacaggtcgagtactgcccgccccaatgctccaatacggcggtcgtaatagaaccgttgcgacaccctctcacggggtctgggacatgagggggaagcagttccacacaggagttgagatcaagatgtgggccatcgcctgcttcgcgacccagagacagtgcagggaagagattctgaaaggttttaccgaccagctccgaaagatctctaaggatgcagggatgcctatacaggggcagccatgcttttgcaaatatgcccaaggggcagacagcgttgagcccatgttccgacatctgaagaatacctactcaggcttgcaactgatcatcgttattctgccaggaaagacgccggtgtacgcggaggtgaagcgggtcggtgataccctgctggggatggccacccagtgtgttcaggttaagaacgttataaagacaagcccacaaaccctgagcaacctgtgcctgaagatcaatgtcaagctcggtggcatcaacaacatcttggttccccaccagcggccctcagtcttccagcaacctgtgatatttcttggggctgatgttacacaccctcccgctggtgacggaaagaagccttcgatcgcagctgtcgtgggttctatggatgcccatccatcccgttactgtgcaaccgtgcgggtccagagacccagacaggagatcatccaagatctggcatccatggttcgggagttgctcatccagttttataagtcaacgcgcttcaagccaaccaggataatattttaccgcgatggcgtctcagagggccagttccgtcaggttctttactacgagttgctggcgattagagaggcctgtatatccttggaaaaggactaccagccaggcattacatatatcgttgtgcagaaacgacaccatacgaggctattttgtgcagatcgcacagagagagttggcagaagtgggaacatcccggccggtacaaccgttgatacagacatcacccacccatacgagtttgacttctacttgtgctctcacgctggaatccagggtacatctaggccttcccactaccatgtgttgtgggatgacaattgttttacagcggatgagcttcaactcctcacctatcagctgtgtcacacatatgttcgctgtactaggagcgtttctatccccgctcccgcatattacgcgcatttggtagccttccgcgcaagatatcacttggttgacaaggagcacgacagcgccgaaggcagccatgtttcaggccagtccaatggtcgggatccgcaagctttggcgaaggccgtccagatccaccaggacacactgcgcacaatgtattttgcctag

SEQ ID NO: 116281 - DNA, 690 bp, synthetic construct
  misc_feature 1..690: note = Description of Artificial Sequence: Synthetic coding sequence
  source 1..690: mol_type = other DNA
atggaaatcgggtccgctgggcctgctggcgcccagcctctgctcatggtgccgaggaggccgggctatgggaccatgggaaagcccattaagctgctggcaaactgttttcaggtcgagattccgaaaattgacgtatacctgtatgaggtcgacatcaaacccgacaaatgtcctcggagagtgaaccgggaggtggtagacagtatggtgcagcattttaaagtaacaatcttcggggaccggcgcccagtatatgacggcaagcggtcgctttataccgccaatccacttccagtggccacaaccggtgtggacctggacgttacccttcctggggagggcggcaaggatcgaccatttaaggtgtcaattaaatttgtctcccgggtgtcttggcacctgctgcacgaagtccttactggacggactctgccagagccactcgagttggacaagcctatctccaccaatcctgtacatgccgtggatgtggtacttcgacacttgccttccatgaagtacactcctgtgggacgaagcttcttttctgcccctgaaggatatgaccatcctctggggggaggacgggaggtttggtttggttttcaccaaagcgtgcggccggccatgtggaagatgatgcttaatatcgacgagcgcgatctttggcaacagtgtggcgagtag

SEQ ID NO: 116282 - DNA, 2583 bp, synthetic construct
  misc_feature 1..2583: note = Description of Artificial Sequence: Synthetic coding sequence
  source 1..2583: mol_type = other DNA
atggagatcgggtccgccggacctgccggagctcagccgctcctcatggtgccaagacggcccggctacggaacaatgggtaagcccatcaagctcctggcgaactgctttcaagtggaaataccaaaaatagatgtgtacctgtatgaggtggacattaaaccggacaaatgcccaagacgggtgaatcgggaggtggtggactccatggtgcagcacttcaaggtgacaatctttggcgatcgcagacccgtgtacgatggcaagcgtagcttgtatacagcaaatccacttcctgtcgccactactggcgtggacttagatgtaacactgcccggcgaggggggaaaagatcggccatttaaggtgagcattaaattcgtaagtagagtgagctggcacctgttacacgaggtgctcaccgggagaaccctccccgagccgttggagctcgataaacctatctcaacgaatccagtgcacgcagttgatgtggtacttcggcatttgccatcgatgaaatatactccagtaggtcggtccttcttcagcgcccccgagggttacgaccaccctctgggaggaggaagggaggtatggttcgggtttcatcaaagcgtgagacccgccatgtggaaaatgatgctaaacattgatgtgtccgctacggccttctacaaggcccagcccgtaatccagtttatgtgcgaggtgttggatatccataacattgacgagcagcctcgcccattgaccgactcccatagagttaagttcaccaaagaaatcaaggggctgaaggtcgaagttacccattgtggcacgatgagacggaaataccgcgtgtgcaatgttacccgacggcccgccagccaccagaccttcccgcttcagctggaaaacggtcaaaccgtcgagagaactgtggcccagtatttccgtgagaagtatacgctacagctcaagtaccctcatctgccttgccttcaggtgggccaggaacaaaagcacacctatttgccccttgaggtgtgcaatattgtggcagggcagcggtgcatcaaaaagttgaccgacaaccagacctcaaccatgattaaggccacggctcgaagcgcaccagatcgtcaggaggagatcagcaggcttgtgagaagcgcaaattatgaaacagatcctttcgtacaagagttccagttcaaggtaagggatgaaatggcccacgtaacaggaagggtcttgccagctccaatgctgcagtacggcggacgaaatagaacagttgccacaccctcacatggcgtgtgggacatgcgagggaagcaattccacacgggtgtggagataaaaatgtgggccatcgcatgctttgctacacagcgccagtgcagagaggaaatacttaaagggttcacagaccaacttagaaagatatccaaagacgcaggcatgcccatccaagggcagccatgtttttgtaagtatgctcaaggggcggatagcgtggagccaatgttccggcatttgaaaaatacctatagcggcctccaacttatcatcgtgattctccccggcaagacccccgtatacgccgaagtcaagcgcgttggcgatactctgttaggtatggccacccaatgcgtacaggttaagaacgtaataaagacatcaccacagactcttagcaacctgtgccttaaaattaatgtcaaactgggaggaatcaacaatatcctcgtgccgcatcagaggccctctgtctttcaacaacctgtcatctttctcggagccgatgttacccaccctcccgcgggagatggcaaaaaaccgtccattgcagcagtcgtagggagcatggacgcccatccgagcagatattgcgccaccgtcagggtgcagcggcctaggcaggagattattcaggacctggcgagcatggtaagagaactgctcattcagttttacaagtctactagatttaagccgacccgtataatcttctaccgggatggtgtctctgagggtcagtttcgtcaggtcctgtattacgagctgctggcaatcagggaagcttgtatcagtttagagaaagattatcaacctgggattacttacattgtggtccagaaaagacaccacacaaggcttttctgcgcggaccgcacggaaagggtgggccggtctggcaatattcccgcgggaactaccgtggacaccgacattactcacccgtatgagttcgatttctacctgtgctctcacgccggcatccaaggaacttcacggccctcccactaccacgtcttgtgggacgataattgctttaccgccgatgaacttcagttactgacttaccagctttgccacacatatgtgagatgtacacgaagcgtatctattccagcccctgcctactacgcacacctggttgcatttcgggcgcgttatcatctcgttgacaaagaacatgattcggccgaaggctctcatgtgtcagggcagtcaaacgggcgtgatcctcaggctctcgcgaaggccgtgcagatccatcaggataccttgcggactatgtatttcgcatag

SEQ ID NO: 116283 - DNA, 690 bp, synthetic construct
  misc_feature 1..690: note = Description of Artificial Sequence: Synthetic coding sequence
  source 1..690: mol_type = other DNA
atggaaattggtagcgccggcccagccggcgcccagccactcctgatggttccaaggcgacccgggtatggcaccatgggcaaacccataaagctgttagccaactgttttcaggtagagattccgaagattgacgtttacctctatgaagtggacatcaaacccgataaatgcccgaggagggttaacagggaagtcgtggatagcatggtccagcatttcaaggtaactatttttggtgatcgtcgacccgtgtatgacggcaaacggagtctctatacagctaatcctctgcctgtggcaactactggcgtcgatcttgacgttaccctgcctggagaaggcggaaaagacagacccttcaaagtgtcaatcaagttcgtgagcagagtgagttggcacctgttgcatgaggtcctgactgggagaacactgccagaaccactggagctcgataagcccatttcgaccaatccggtgcatgccgtggatgtcgtgctcaggcacctgccgtcaatgaaatatacacctgttggccgctccttcttcagcgccccagaaggctacgatcaccctctgggaggagggcgcgaagtgtggttcgggttccatcaaagcgtgcgcccggcaatgtggaaaatgatgttgaacatcgacgagcgggatctatggcagcagtgcggggaatag

SEQ ID NO: 116284 - DNA, 2586 bp, synthetic construct
  misc_feature 1..2586: note = Description of Artificial Sequence: Synthetic coding sequence
  source 1..2586: mol_type = other DNA
atggaggctctgggcccagggccgcctgcctcattatttcagccaccacggagacccggtttaggaacagtgggcaaacctatccgcttgctggctaaccatttccaagtccaaatcccgaaaatcgacgtttaccattacgacgtcgacataaaacccgagaaacgccctcgaagggtcaatcgcgaggttgtcgatacgatggttaggcatttcaaaatgcagattttcggcgatagacagcctggatacgacggcaaacgaaatatgtacactgcccaccctctgcccatcggcagagaccgggttgacatggaagtaactctgccaggagaaggaaaagatcagacatttaaagtctctgtgcagtgggttagtgtggtgtccctgcagctcctcttggaggcgctcgccggccacttgaacgaggtgccggacgatagcgtgcaggccttagatgtgattacaaggcacttaccctcaatgcgatacactcctgtgggtcgcagtttctttagcccccctgaaggttactatcaccccttgggaggaggcagagaggtgtggtttggcttccaccagtccgtgaggcccgcaatgtggaatatgatgttgaacattgatgtcagcgccaccgcattttacagagcacagccgattatagagttcatgtgtgaggtgctggacatacaaaacataaacgaacagaccaaacctctcaccgattcccagagagtaaagttcaccaaagagatcagaggactgaaagtggaagtgacccactgtggtcagatgaaaaggaagtatagggtgtgcaacgttacacgacgtcctgcgtcccatcagacatttcctctgcagctggagaacggacaggcaatggagtgtaccgtggcgcagtactttaagcagaagtacagcttgcagttaaagtaccctcacctgccgtgcctccaggtgggacaggagcagaagcacacatacctgccattggaagtatgtaacattgtggctggccagaggtgtataaagaaactgactgacaatcagaccagtactatgatcaaagcgaccgcaaggtcagcacccgatagacaagaggaaatctctaggctcgtgaagagcaactccatggtggggggcccagacccttatctgaaagagttcggaatcgttgtccacaatgagatgactgagcttaccgggcgagtgttgcccgcgccaatgttacagtatggaggacgaaacaaaactgtagcaactccaaaccagggggtgtgggacatgagaggcaaacagttttacgccgggattgagatcaaagtctgggcagtggcctgtttcgctcctcagaagcagtgtagagaagacctcctgaagtctttcacggaccagctccggaagatatccaaagatgccggcatgcctatccagggccagccttgtttctgtaaatatgcccagggtgcagatagtgtcgagccaatgttcaagcatctaaaaatgacatacgtggggctccagcttatcgtagtcattctgccaggtaagactcctgtttacgccgaggtgaagagagtgggagatactctgctagggatggctacccaatgtgtccaagtgaagaatgtcgtgaagacctcccctcagacattgagcaatttgtgtcttaaaataaatgctaagctgggtggcattaacaacgtcctcgttccacatcagagaccctccgtcttccaacagcccgtaatctttctgggagcagatgtaacgcacccccctgccggagacgggaagaagccctccatcgccgcagtcgtggggtctatggatgggcacccctcccggtactgtgctactgtccgagtacagacctcacggcaagagatctcccaagagctgctgtacagtcaagaggtgatccaggacttgacaaacatggtcagggagttgttgattcaattttataagagtacacgctttaagccaacacgtataatctactatcgaggcggcgtatccgaagggcagatgaagcaggtcgcctggccggagctgatcgcaatcagaaaggcctgcatctccctggaggaagattatcgcccgggcattacgtacatcgtagtgcagaagagacatcacactcgactgttttgcgcagataaaaccgagagggtgggtaaatccgggaatgtgcctgcaggtacgactgtggactccaccataacacacccgtcagaatttgatttttacctctgtagtcacgccgggatccaggggacgagccgccctagccattatcaggtgttatgggatgataactgtttcacagcagacgagctccaactcctaacttaccaactctgtcatacatacgttaggtgtacgaggtccgtgtctataccagctcccgcctactacgcacggctcgtagctttcagagcccgatatcatttggtggacaaggatcatgactccgctgaggggagccacgtctcaggccagtctaatggaagggacccacaggcactggcaaaggccgtgcagatccaccacgatacccaacatacaatgtactttgcctag

SEQ ID NO: 116285 - DNA, 1755 bp, synthetic construct
  misc_feature 1..1755: note = Description of Artificial Sequence: Synthetic coding sequence
  source 1..1755: mol_type = other DNA
atgtttgctaaagcttttagagtcaaaagcaatacagcaattaagggatcggaccgaaggaaactgcgggcagatgtgaccacggcctttcccactctcggtaccgatcaagtctccgaattggtccctggaaaggaggaactgaacatagtaaagctatacgctcataaaggagatgcggtgacagtgtacgtttctggtgggaatcctatcctatttgagctggagaaaaacctgtacccgaccgtctatacactctggagttatccagacctgctccccacgttcacaacttggcctctcgtgctggagaaacttgtgggaggagcagatctgatgcttcctggcttggttatgccccctgccggtctgccgcaagttcagaagggagatctctgcgctatttctctggtgggaaacagggccccagtggccataggtgttgctgccatgtcaacagccgagatgcttacctccggactgaagggccgaggcttctccgtgttacatacctatcaggatcatctgtggcgaagcggcaacaaatcatcccccccctccattgcgcctcttgctctggacagtgcagatctgtcagaggagaaaggttccgtccagatggactccactctgcaaggggatatgagacacatgacccttgaaggcgaggaggagaacggtgaagtacaccaggcaagagaggacaaaagcttgagcgaggctcccgaagatacatcaacacggggcctgaaccaggactcgaccgacagcaagaccctgcaagagcagatggacgagctcctacagcagtgtttcctacacgccctgaagtgccgcgtaaaaaaagcagacctgccgctgcttacatctaccttccttgggtcccacatgtttagctgctgtcccgaaggacgacagctggacattaagaagtcctcctataagaaactgtctaaattcctgcagcagatgcagcaggagcaaataattcaagtgaaggaactgtctaaaggcgtggaaagtattgtcgcggtggattggaagcatccaaggatcacttcctttgtgatacctgaaccaagccccactagtcaaacaatacaggaggggtctcgcgagcagccctatcacccacctgacatcaagcctctgtactgcgtgcccgctagcatgacattgttatttcaggagtccgggcacaagaaaggcagctttctggaaggatccgaggtaaggactatcgtgattaactacgctaagaaaaacgacttagtcgacgccgacaacaagaatctcgttcgactggaccccatcctctgcgattgtattttggagaaaaatgagcagcacacagttatgaagctgccatgggacagtttgctcactaggtgtctggagaagctccagccggcttatcaggtgacattacctggccaggagccaatagtaaagaagggccgcatctgccccattgacattactctcgcccaacgcgccagcaataaaaaagtgaccgtagtcagaaatctcgaagcttatggccttgacccctatagcgtggccgcaatcctgcagcagcggtgccaggcgtccactaccgtcaacccggccccaggcgcaaaggatagcctccaggtccagattcagggaaaccaggttcatcacttgggctggctcctgttagaagagtaccagctccctcggaagcatatacagggactggaaaaagccctgaagccgggaaagaaaaaatag

SEQ ID NO: 116286 - DNA, 816 bp, synthetic construct
  misc_feature 1..816: note = Description of Artificial Sequence: Synthetic coding sequence
  source 1..816: mol_type = other DNA
atgtttgcaaaagctttccgggtcaaatctaacacagccattaagggctccgataggcggaaattgagggcggatgtaaccacggcttttcctacactcggcactgaccaggtatcagagctggtgcctggaaaagaggagctgaacatcgtgaaactgtatgcccataaaggcgacgccgtgactgtgtacgtgagcggcgggaatccaattctttttgaactggagaaaaatctgtatcctacagatctcatgttgccgggactcgtaatgcctccggctggacttcctcaggttcaaaagggcgacttgtgtgctatttctctggtggggaatcgggcacctgtggctattggggtggccgccatgtccactgctgaaatgctgacaagcggtctgaaaggtcgaggcttttctgtcctgcatacctatcaggatcacttatggcgctccggaaataaatccagtccccctagcatcgcgcctctggcactggattcggccgacctgtccgaggagaagggaagcgtacaaatggattcaacgctgcagggggacatgcgacatatgaccctcgaaggcgaggaggagaacggtgaggttcaccaggcccgtgaggacaagtcgctttccgaggcacctgaggacacatccacaaggggtcttaatcaggactccaccgattctaaaacgctacaggaacaaatggatgagcttttgcagcagtgtttccttcatgccctcaagtgtagggttaagaaggccgatctccccctgcttacaagcacttttctagggtcacacatgtttagttag

SEQ ID NO: 116287 - DNA, 1383 bp, synthetic construct
  misc_feature 1..1383: note = Description of Artificial Sequence: Synthetic coding sequence
  source 1..1383: mol_type = other DNA
atgttcgcaaaggccttccgggtaaagtccaatactgctatcaagggttcagataggcgaaagttacgggctgatgtcacaaccgcctttcctaccctggggacagatcaggtaagcgagctcgtacctggtaaggaggaactgaatatcgtaaagctgtacgcccacaaaggtgacgccgtgacagtgtacgttagtggagggaaccccatcctctttgagctggagaagaacctctaccccacagtctacaccctgtggtcgtaccctgacctactccctacctttacaacatggcctctggtcctggaaaagctggtcgggggcgcagacctgatgctgccaggcctggtgatgcccccagctggcctgcctcaggtgcagaagggtgatctctgcgctatcagcttggtcgggaaccgagcacctgtcgcaatcggcgtggctgccatgagcaccgccgaaatgcttaccagcggactgaagggtcgaggcttttcagtgctgcacacttaccaggaccacctctgtcccgagggcagacagctagacattaagaagtctagctataaaaagctcagtaaatttctgcaacagatgcagcaggagcagattattcaggtgaaggaattgtcaaagggggttgaatccatcgtagccgtagattggaaacatccgcgaattacctcgttcgtcatccccgaaccgagccctacgagtcagaccattcaggagggcagccgcgaacagccctaccaccccccagacatcaagccactgtactgtgtgcccgccagtatgaccctcctcttccaggaatccggccacaagaagggtagcttcctagagggatctgaggtcagaactatcgtgatcaattatgccaagaaaaatgatctcgtcgatgccgacaataagaacctggtaaggctggatcctatattgtgtgactgcatcttggagaaaaacgagcagcacactgttatgaagctcccttgggacagcctgcttacacgctgcctggaaaagctgcagcccgcctatcaagttacactccccgggcaggagcctattgttaagaaagggaggatttgtcccattgatattactctcgcacagagagcgtcaaataagaaggtgactgtcgtcagaaacctcgaggcgtatggactcgacccctacagtgtggcggccattcttcagcagagatgccaggcatccacaactgttaatcctgcgcctggagccaaggatagtctgcaggtccagattcagggaaatcaagttcatcacttggggtggctgctgctggaggaatatcagcttcctcgcaaacatatacagggcctggagaaggctttgaaacccggcaagaagaagtag

SEQ ID NO: 116288 - DNA, 816 bp, synthetic construct
  misc_feature 1..816: note = Description of Artificial Sequence: Synthetic coding sequence
  source 1..816: mol_type = other DNA
atgttcgctaaggcctttcgggttaaaagtaacaccgccattaaaggatccgatcggcggaagctaagagccgacgtaaccacagccttccctacgctggggactgatcaggtgtcagaactcgtgcctgggaaagaagaattgaatatagtgaagctgtacgcccacaaaggggacgcagtcactgtgtatgtgtccggaggcaatccgatcctgttcgagctggagaagaatctctatcccactgatctgatgctgcccggacttgtgatgcccccagcaggcttaccccaggtccagaagggagacctctgtgccatttctttagtcggcaaccgtgcccccgttgccattggcgtggccgctatgtctacggccgaaatgttgacctccggactgaaaggtagagggttcagcgtgcttcacacataccaggaccacctgtggcggagtgggaacaagtcttcacctccctctatcgcccccttggcccttgactcagctgatctgagtgaggaaaagggttccgtccagatggacagcacactgcaaggtgatatgcgccatatgaccctggaaggtgaagaggaaaacggggaggtccatcaggctagggaggataaatccctgagcgaagcccccgaagatacgtcgacccgcgggctgaaccaggactctactgactccaaaaccctgcaagagcaaatggatgagcttttgcagcagtgttttctgcacgctttgaagtgccgggtgaagaaggctgatctgcccttgctgacctcgacattccttggaagccatatgttttcatag

SEQ ID NO: 116289 - DNA, 2742 bp, synthetic construct
  misc_feature 1..2742: note = Description of Artificial Sequence: Synthetic coding sequence
  source 1..2742: mol_type = other DNA
atgagccgcttctttaccaccggctctgactctgaaagtgaatctagtttgtcaggggaggaactggttacaaagccggtaggcggcaactatggcaagcagccactgctcctgagcgaggacgaggaggatacaaaacgcgttgtcaggagtgcaaaggacaagagatttgaagagctcacaaacctgattagaactatccgtaacgccatgaagattcgtgatgtgacaaaatgtttggaagaatttgagctactgggaaaggcctatggaaaggcaaaatccattgtcgacaaggagggggtccctagattttacattaggatcctggctgatctggaagactatttgaacgagttgtgggaagataaggaaggaaagaaaaaaatgaacaaaaataacgcaaaggcactgagtacattgaggcagaaaatcagaaagtataacagggacttcgaatcccacatcacgagttacaagcaaaatccggagcaaagcgccgacgaggatgccgaaaagaacgaggaggattccgagggatccagcgatgaagatgaggatgaagatggcgttagtgctgcaacctttctgaaaaagaaaagtgaggctccatccggggagtctcgcaagttcctgaaaaagatggacgacgaggatgaggacagcgaagacagtgaggatgacgaagattgggacaccggcagtactagcagtgactctgattctgaggaagaggaggggaagcagaccgccctggcaagccggttcttaaagaaagctccaaccacagacgaagacaaaaaggccgcggagaagaaacgcgaggacaaagccaagaaaaagcatgaccggaaatccaaaaggctggatgaggaggaagaggacaacgagggtggggagtgggagcgggttcgaggaggggtccctctggtcaaagagaagcccaaaatgttcgccaaaggcacagaaatcacacacgcggtggtcattaaaaagctcaatgagatcttacaggccaggggaaagaaggggacagatagggccgcccagatcgagctgcttcagctactggttcagatcgccgctgagaacaatctgggtgagggcgtaatagtaaagattaaatttaatattatcgctagcctgtatgactataacccaaatctcgcaacctacatgaagccggaaatgtggggaaaatgcctggattgcatcaatgagctgatggatatcctgtttgccaaccctaatatcttcgtcggcgagaacattttggaagaaagcgaaaacctgcacaacgcggaccagccactgagagtgcgcggatgtatccttactctcgttgagcgtatggatgaagaatttacgaaaatcatgcagaacacagacccacattcacaggaatacgttgagcacctgaaagacgaagcacaggtctgtgccataattgagagggtacaacggtatttggaggagaagggcaccaccgaggaagtgtgtcgtatctatctgttgagaatactgcatacctattataaattcgattacaaagcccaccagcgccagttaactcctccagaaggatcatccaagtccgagcaggaccaggccgagaacgaaggggaggactccgcagtgttgatggaacggctatgcaaatacatatacgcgaaagatagaacggaccggattagaacctgcgccatactgtgtcatatctatcaccacgctttgcattctcggtggtaccaggccagggacctaatgttgatgtctcatctgcaggataacattcagcatgccgaccctcccgttcagatcttgtacaatagaaccatggtccagttgggcatctgtgcattcaggcagggtttaaccaaggatgctcataatgctctgttggacattcagagctcggggcgggcaaaagagttgctgggacaggggctgcttttgcgttccttgcaggagcgtaatcaggagcaggagaaagtggaacggcggcgtcaggtacccttccacttacatatcaatctggagcttcttgagtgcgtttacctggtctctgcaatgctgttggagatcccatatatggcagcacatgagtctgacgctcggcggaggatgatttccaaacagtttcaccaccaacttcgagtgggggagagacaaccactgttaggcccacctgagagtatgcgggagcatgtggtggccgcctcgaaagctatgaaaatgggtgattggaaaacttgtcactcctttatcatcaacgaaaagatgaacgggaaggtctgggacctcttcccagaggcagacaaggtgaggacaatgctggtacgaaaaattcaggaggagtcgctgaggacctatctcttcacttattcttcggtgtacgattccatctctatggagacactctcggatatgtttgaactggacctgcccaccgttcacagcattattagcaaaatgatcatcaacgaggaactgatggccagcttagatcagcccacacagaccgtggttatgcatcggactgaacctacagctcagcagaatcttgccctgcaattggcagagaagctcggttcactcgtcgagaacaacgaaagagtctttgatcataaacagggcacatacggcggctattttcgagaccaaaaggatggatatagaaagaacgaggggtacatgagacggggtggctacaggcaacagcaatcacaaactgcatattag

SEQ ID NO: 116290 - DNA, 4149 bp, synthetic construct
  misc_feature 1..4149: note = Description of Artificial Sequence: Synthetic coding sequence
  source 1..4149: mol_type = other DNA
atgccagcttactttcagcggcccgagaacgcacttaaaagggcaaacgaattcctggaagtaggaaaaaaacagccagctctggatgttctttatgatgttatgaaaagcaaaaagcacaggacctggcaaaaaattcatgagccaattatgttgaaatatctggagctttgcgtggatctgcggaaaagccacctggccaaagagggcttataccagtataagaacatatgtcagcaagtaaacattaagagcttggaggacgtcgttcgggcttatctgaagatggccgaagagaagaccgaggcggctaaggaagagtcacagcagatggtgcttgatatcgaagatctcgacaacatccagacaccagagtctgtcctcctgtcagccgtgtctggtgaggacacacaggaccgcactgataggctcctgctgacgccgtgggtgaaattcctgtgggagtcttatcgccaatgccttgatctattgaggaacaattctagggtcgagcgactgtatcacgacatcgcacagcaggctttcaagttttgcctccagtacaccaggaaagcggagtttcgcaaactgtgtgacaacctcaggatgcatctgtcccagattcagaggcaccacaaccaatccaccgcaatcaacctgaacaacccagaaagtcagtcaatgcatctagagacaagactcgtccaactggactcagcaattagtatggagctgtggcaggaggcatttaaggctgtcgaggatattcatgggctgttttccttgtccaaaaagcctccaaagccacagctcatggccaactactataataaagtttccaccgttttctggaaaagtgggaatgcactgtttcacgcatctaccctgcaccgactgtatcatctgtcgagagaaatgaggaaaaacctaacccaagacgagatgcaacgcatgtctactcgggtcctcctggcaacattgtccattccaattaccccagagaggaccgacattgcaagattgcttgatatggacggcatcattgtcgagaaacaacgccgcctcgctaccctgctaggactgcaggcacccccaacccgaatcggcttgatcaatgatatggtgaggtttaatgtcttgcagtatgttgtcccagaagtaaaagatctgtacaactggctggaggtggaattcaacccgcttaagctatgtgagcgggtgacaaaagttttaaattgggtgcgggagcagcccgaaaaggaacctgagctccaacagtatgtgccacaactccaaaacaataccatcttgagactgttgcagcaagtgtctcagatctatcagagtatcgaattctcacgcctaacctctctcgtgcctttcgtagatgccttccagctggagagggctatcgtggatgccgctcgccactgtgacctgcaggtgaggatcgatcacaccagtagaactctatccttcggcagtgatctcaattacgccacccgcgaagatgcacctattggcccacacctgcagtcaatgcctagcgaacagattcgaaatcagctgacagcaatgagcagcgtgctggcaaaagcactggaggtgattaagcccgctcatatcctgcaggagaaggaggaacagcaccagctcgctgttactgcatacttgaagaattcacgcaaggaacatcaaaggatcttagcccgcagacaaacgattgaggagcggaaggaaaggcttgagtccctaaatatccagagagagaaggaggagcttgaacagagggaagctgagttgcagaaggtgcggaaggctgaggaagagcgcctcagacaagaagctaaggagagagaaaaggaacgcattctgcaggagcatgaacagatcaaaaagaaaacggtgcgcgaaagactcgagcagataaagaagactgagctgggagccaaagcgttcaaggatattgatattgaggacctggaggagcttgaccccgacttcattatggcaaaacaggttgagcaactcgaaaaggagaagaaggagctacaagaaaggctgaagaaccaggagaagaagattgattatttcgaaagggctaaaaggctggaagagataccgctcattaagagcgcttatgaagaacaacggatcaaagacatggatctctgggagcagcaagaagaggaacgcataaccacaatgcagttggagcgcgagaaggccctggagcataaaaatcgcatgagccgaatgctggaagatagagacttgtttgtgatgaggctcaaggccgcccgtcaaagcgtttatgaagaaaagttgaagcagtttgaggagcgtctggccgaggaacggcataaccggttagaagaacgaaagaggcaacgcaaggaagagcgtaggatcacatactacagggagaaggaggaggaggagcagaggcgagcagaggaacagatgctgaaagagcgcgaggagagggagcgcgccgaacgtgccaagagagaggaggaactgcgagagtaccaggagagagtcaaaaagcttgaagaggtggagaggaagaagcggcagagggaactggaaattgaagagagagaacgccgcagagaagaggagaggagactgggggatagttccctctctaggaaagacagccggtggggcgatcgtgactctgagggaacctggagaaaggggccagaagcagactctgaatggcggagagggcctcccgagaaggaatggagacggggcgagggtcgcgatgaggatagatctcacagacgggatgaggagaggccccggcggcttggcgacgacgaagatcgtgagccctcattacggcccgatgatgatcgcgttccacgcagaggcatggacgacgacaggggaccccgccgcggtcccgaggaagatagattttcccgcagaggggccgacgacgataggcccagttggcgcaacacggacgacgacaggccaccaaggaggatagcagacgaagacaggggcaactggagacacgcagatgacgaccgccctccacgcagaggcttggacgaagatcgcggttcgtggagaaccgcagacgaagatcggggaccacggcgagggatggatgacgatcgtgggccccgcagaggcggcgccgacgatgagcgcagctcatggaggaacgccgatgacgatcgaggcccaagaaggggactcgatgatgacagggggcctcgaaggggcatggacgatgatcggggtcccaggcgaggcatggatgacgataggggccccaggaggggaatggatgatgaccgtggtccgaggaggggccttgatgacgataggggaccatggcgtaacgctgacgatgaccgcataccccgcaggggggctgaggacgatagagggccttggaggaacatggatgacgataggctcagccgtcgcgcagatgatgaccgattccctaggcggggggacgatagccgaccgggcccatggcgaccgctggtgaagccaggaggctggagagagaaggagaaggctcgagaggagagttggggccctccacgggaatctagaccttccgaagagcgtgagtgggatcgtgagaaagagcgcgaccgcgacaatcaagatcgggaggagaacgataaggaccctgaacgggagagggacagagaacgagacgttgacagggaagatcgatttaggcggcctagggacgaaggaggctggaggcgcggccccgccgaagaatcaagctcctggagggactcttcccggcgggatgaccgcgacagggatgacagacgcagagagcgggatgaccgaagggatcttagggagcggcgggatctgagggacgatagagacagaagaggacctccactccggagtgagagagaggaggtaagttcttggcgaagagctgatgacaggaaggatgaccgggtcgaagagagggacccccctagacgggtaccccctcctgcactttcacgtgatcgtgaaagagatagagatagggaacgggagggtgaaaaagaaaaagcttcttggagagctgaaaaggaccgtgagtcactcagacggaccaaaaacgagaccgatgaggacggatggacaactgtgaggagatag

SEQ ID NO: 116291 - DNA, 4047 bp, synthetic construct
  misc_feature 1..4047: note = Description of Artificial Sequence: Synthetic coding sequence
  source 1..4047: mol_type = other DNA
atgaaatccaagaagcacaggacctggcagaagattcatgagcccatcatgctgaaataccttgaattatgtgtggacttgcgcaagagtcacctcgcaaaggaaggcctttaccagtataaaaacatatgtcaacaggtaaatatcaaatccttagaagacgtggtgcgcgcctacctgaagatggccgaagaaaagaccgaggccgcaaaagaagaatcccagcagatggtgctagacatcgaagatttagacaacatccagaccccagaaagcgtcctgctgtccgccgtgtccggagaggacacacaggacagaaccgaccgtcttctcctgacaccctgggtgaagttcctgtgggaaagctacagacagtgtctggacctgctcaggaataatagtagggtcgagagactttatcatgacatcgcacagcaggccttcaagttttgcctgcagtatacaagaaaggctgagtttagaaaactgtgtgataaccttaggatgcacctctcccagatccagcggcaccacaaccagagcacagcgataaatttgaacaaccctgaatcacagtcgatgcacctggagacaagactagtgcagcttgattcagccatctctatggagctctggcaggaagcttttaaagcagtcgaagacattcatggacttttctcgctgagcaagaagccccctaagcctcagttaatggcaaattattataataaagtgtcgacggttttctggaagtccggtaatgctttatttcatgcatccacccttcaccgcctgtaccacctgagcagggaaatgagaaagaatctaacacaggatgagatgcagagaatgagtacaagggtactcctggctactctgtccataccgattactcccgagagaacagatatcgcacgcctgcttgatatggatgggataattgtcgagaagcagagacgtctcgctactctgctcgggctgcaggcaccccccacaagaatcggtctgattaacgatatggtccgattcaacgtcctccagtatgttgttcctgaagtaaaggatttgtataactggctagaagttgaattcaacccccttaaactgtgcgagagggtgacaaaagtgcttaattgggtgcgcgagcagcctgagaaagaaccagaactccaacaatacgtgccgcagctacagaacaacacaatactgcggctactgcagcaggtcagccagatttaccagtctatagagttttcccggctgacatccctggtgcccttcgtggacgcgttccaattggaacgcgctattgttgacgcagcccgccattgtgacctgcaggtgcggatcgaccataccagccgcaccctgtctttcgggtccgatctcaactatgctactcgagaagacgcacctatcggcccccacctccagtcaatgcccagcgagcagattcggaaccagctgacagccatgagcagcgttctggcgaaggccctcgaggttataaaacctgcacacattcttcaggaaaaagaggaacagcatcagctggccgtaaccgcttatttgaagaattctaggaaggagcaccagcgaatcctggccaggaggcagacaattgaagagaggaaagaaaggcttgaatctctgaacatccaaagggaaaaagaggagctggagcaacgcgaagccgagctgcagaaagtcaggaaggctgaggaggaaagattgcgacaagaggccaaggagagggagaaggagcggatccttcaggagcatgaacagattaagaaaaagacagtgagagagaggctcgaacagatcaagaagaccgagcttggggccaaggcttttaaagatatcgacatcgaggaccttgaagaattggatccagactttataatggccaaacaggtcgaacagctggaaaaagagaaaaaggagctgcaggaaagactaaaaaatcaggagaaaaagatcgattatttcgaacgcgcaaagcgtctggaggagatcccccttattaaatctgcctacgaggagcagaggataaaggacatggacctgtgggagcaacaggaagaagaacggataactactatgcagttggaacgggagaaagcactcgagcataagaaccgaatgtccaggatgcttgaggaccgcgatctcttcgtcatgaggttaaaagcagccagacagagtgtctatgaggagaaactgaaacagttcgaggagaggcttgccgaggaacgccacaatagactggaggaaaggaagcgccagcggaaggaggagagacgaataacgtattaccgtgagaaagaggaggaggaacagcggcgggccgaagaacagatgctgaaggagagagaggagagggaacgcgccgaacgcgcaaaacgagaagaagagttaagagaataccaagaaagagtcaaaaaactcgaggaagtggaacgcaagaagaggcaacgcgagctggagatcgaggagcgcgaacggaggcgcgaagaggagcgaagactcggcgatagctcactatctcggaaagattcgagatggggtgacagggacagcgaggggacttggagaaaaggtccagaggcggacagtgagtggcggaggggcccgccagagaaggaatggcgacgaggagaaggaagagacgaagaccgctcacaccgcagggacgaggaaaggccaaggagactgggagatgacgaggatcgtgaaccctcactgaggcccgacgacgaccgcgtgcctcggagaggaatggacgatgaccggggccctagacgaggcccagaggaggacagattctccagaagaggcgcagatgatgacagaccatcctggagaaataccgatgatgaccgccctccgaggcggatcgccgacgaagataggggtaattggagacatgctgatgacgacagacctccccggcgcggtttggatgaggatcgaggatcttggaggaccgccgacgaggacaggggtccacgcagggggatggacgacgatcgcgggcctaggagaggaggtgccgacgacgagcgttcatcctggcgaaatgccgacgacgacaggggcccgcggagaggtctcgatgatgaccggggacccaggcgcgggatggacgatgatagggggccgcggagagggatggatgacgacagaggtccacggcgtggaatggatgatgaccgtggcccccgccgaggcctagatgacgatcggggcccttggcgaaacgccgatgacgataggattcctcggagaggcgccgaagatgaccgggggccatggaggaacatggacgatgaccgcctgtcccgcagggccgacgacgaccgcttccctcggcggggcgatgattccagacctggtccttggcgccccttggttaagccaggagggtggagagaaaaagagaaagccagggaggagagctggggaccccctcgggaatcaaggccgtctgaggagcgggagtgggatcgcgagaaggaacgcgaccgagacaaccaggatcgagaggagaatgataaggaccctgaacgagagagagatagagaaagggacgtggatagagaagatcgcttcaggcggccaagggatgaaggtggttggagaagaggaccggccgaagagtcctcttcctggcgcgactccagccgaagagatgatcgggatcgagacgaccggcggcgagaacgagacgataggcgcgatttgagagaacggagggatcttcgtgacgaccgggataggcgtggaccacccctgaggtccgagagggaggaggttagttcatggcggagggcagacgaccgcaaggacgaccgggtcgaggagcgggaccccccccggcgggtcccccccccggcgctatctcgtgatagagagagagatagagatcgcgagagggagggagaaaaggaaaaggcttcctggagggccgagaaagaccgagagtccttgaggcggaccaaaaacgagaccgatgaggatgggtggacaacagtccgcagatag

SEQ ID NO: 116292 - DNA, 2619 bp, synthetic construct
  misc_feature 1..2619: note = Description of Artificial Sequence: Synthetic coding sequence
  source 1..2619: mol_type = other DNA
atgcaggacgcagaaaacgtcgctgtccctgaggcagcggaagagcgcgccgaacccggtcagcaacagccggcagccgagcctccccctgctgaggggctcctgcgcccggctggacccggagcccccgaagccgctgggaccgaagcaagttccgaggaagtcggcattgccgaagccgggcctgaaagtgaagtccgaactgagcccgcggcagaggcagaagccgcaagcggcccttccgaaagcccatcacctcccgcagctgaggagcttcctggatctcatgccgaacctccagtaccggctcaaggtgaggctccaggagagcaggcccgggatgaaagatcagacagtagagctcaagccgttagtgaagatgctgggggcaacgagggccgggcggcggaagcagaacccagggcactagaaaacggcgatgctgacgaacccagttttagtgaccccgaagattttgtggacgatgtcagcgaggaagagttgctgggtgacgtgctgaaggaccgacctcaggaggcagacggaattgacagcgtgattgtggttgacaatgtgccgcaggtcgggcctgatcggttggaaaaactcaagaatgtgattcacaagatctttagcaagttcggcaagattactaatgatttttatcctgaagaggatggaaaaactaagggctatatctttctggagtacgcatcccctgcccacgccgttgacgctgtgaaaaacgcagatggatacaagcttgataagcagcacactttcagagttaatctgttcacggacttcgataaatatatgactattagtgatgagtgggacatccccgagaaacaaccgttcaaagacttgggaaatttgagatactggttggaagaagccgaatgtcgggaccagtacagcgtcattttcgagtcgggtgacagaactagtattttctggaacgatgtaaaagatccagtgtcgattgaggagcgtgcacgttggacagaaacttacgttagatggtcccctaagggaacctacctggctacttttcatcagaggggcattgccctctgggggggtgagaagttcaaacaaatccagcggttctcacaccaaggggtgcagctcatcgacttttcaccctgcgaaaggtatctcgttacattttcacctctgatggacacgcaggatgacccccaagctatcattatctgggacattctgacgggacacaagaagcggggttttcactgcgagagtagcgcccattggccaatctttaagtggtcccacgacgggaagttctttgctaggatgactctggacaccttatcaatctatgaaaccccatccatgggactgctggacaagaagagtctcaagatctcaggaattaaagactttagctggtcaccaggagggaatattatagcgttttgggtccctgaggacaaagatataccagccagggtgacgttgatgcaactccctacaaggcaggagatacgagttcgtaatttgtttaatgtggtagactgcaagctccactggcagaagaatggcgactatctgtgtgtgaaggtcgaccggacacccaaaggcactcagggcgttgtgacaaattttgagatattccggatgcgagaaaagcaagtacctgtagacgtcgtcgaaatgaaggagaccattatcgccttcgcgtgggaacccaatggctctaagtttgccgtgcttcatggagaggctccaaggatctcggttagcttttaccatgtcaaaaataacggaaaaatcgagctcattaaaatgtttgacaagcagcaagccaacacaatcttctggtcgccgcagggtcagtttgtggtcctcgccgggctccgttcaatgaatggtgcacttgccttcgttgacacatctgactgtacggttatgaacatcgcagagcactacatggcgagtgacgtcgaatgggatcccaccggacgttatgtggtgactagcgtgtcctggtggagccataaggtggataacgcttattggctctggaccttccagggcagacttcttcaaaaaaataataaggaccggttctgccagctcctgtggcggccgaggccacctactcttctgagtcaggagcaaattaaacagataaaaaaggacctgaagaagtacagtaaaattttcgagcagaaggatcggctcagccagagcaaagcaagcaaagagttagttgaaaggcgtaggaccatgatggaagactttaggaagtatcgcaagatggctcaggaactctatatggagcagaagaatgaacgactggagctcagaggaggagttgacaccgacgaactggacagcaatgtggatgactgggaagaagaaactatcgaatttttcgttacagaagagatcatcccaggaattaggtctgacctggagcattgcgctcagccgtgtgtcctgtggtccagaggacgaccggctggatcccgcgtgacccccgcctcgtctctgtgttccctcgccctggactgtgactgcgcctggattctacccttacggcacatctttgttcccttctccccgtggtgcctgcagtgggggatatag

SEQ ID NO: 116293 - DNA, 2445 bp, synthetic construct
  misc_feature 1..2445: note = Description of Artificial Sequence: Synthetic coding sequence
  source 1..2445: mol_type = other DNA
atgcaggacgctgaaaatgtggcagtgcctgaggcagccgaagaacgcgccgagcccggccagcagcagccagcagctgagccgcccccagcggagggattactgaggccagcagggcccggcgctcccgaagctgccggaactgaggcaagcagtgaagaggttggcattgcggaggcgggccctgaatcagaagtgaggacagagcccgccgccgaggccgaggccgccagcgggccatcagaatcacccagccccccagccgctgaagagcttcctgggagccacgccgaaccaccggttccagctcagggggaagcccctggcgagcaggcaagggacgaaagaagcgactcccgagctcaggctgtgagtgaagacgctggtggtaacgaagggcgcgctgccgaggccgaaccacgcgctctggaaaacggggacgccgacgagccatcctttagcgaccccgaggacttcgtggacgacgtgagtgaggaggaactcctgggtgacgttctgaaagacagaccccaagaggctgacgggatcgacagcgttatagtggtggataacgtcccacaggtgggtcctgaccgcctagagaagctgaagaacgtcattcataagatcttctctaaatttgggaagatcacaaatgacttctacccagaggaagatggcaagacaaaaggatacatctttctagaatatgcaagcccggcccacgctgtggatgcagtgaaaaatgccgatgggtacaagctcgacaaacaacacacattcagggtcaacctgttcaccgatttcgataaatacatgacaatctccgatgagtgggacatccccgaaaagcagccctttaaagatctcgggaacttgaggtattggctggaggaggctgaatgtagagatcaatattccgtgatcttcgaaagtggcgatagaacatctattttctggaacgacgtgaaagatccggtgtctatcgaagagcgtgccaggtggaccgagacatacgttcggtggtcaccgaagggcacctacctagctaccttccaccagagaggaatcgccctgtgggggggcgagaaatttaaacagatacagcggttcagtcaccagggtgtccagttgatagacttctccccctgcgaaaggtatctggttacattctcccctctgatggatacccaggatgatcctcaggccattataatctgggacattctcactggacataaaaagagaggttttcactgtgagtcaagtgcccattggcctatcttcaagtggtcacacgacggaaagttttttgctaggatgacactcgacaccctgtctatttacgaaactccttccatgggcttactggacaagaaatctctgaaaatttctggcatcaaggatttttcatggagtccaggtggcaatatcattgccttttgggtgccagaagacaaagatattccagccagagtgactctaatgcagttgcccacaaggcaggagattcgggtgcgcaatttgttcaatgtggtcgattgtaaacttcactggcaaaagaacggagactatttgtgcgtgaaggtcgaccggacacccaaaggaacgcaaggcgtggtaacaaacttcgaaatcttccggatgagagaaaaacaggtgcccgtggatgtagttgagatgaaagaaaccattatcgctttcgcttgggaacctaatggaagcaaatttgctgtgctgcatggcgaggctccacggatctctgtctcgttctaccatgtgaagaataacgggaagatcgagctcataaagatgttcgacaagcagcaggccaacaccatattttggtcaccccagggccagttcgtggtgttggcaggattaaggtcgatgaacggtgcattggcattcgtggatacatctgactgtaccgtcatgaatattgcggagcactacatggcatctgacgttgagtgggatccaaccggtaggtatgtggtgacaagtgtttcctggtggtcacacaaagtcgataatgcttactggctgtggactttccaaggacgtcttctccaaaaaaacaataaagaccggttttgccaactgctctggcgccctagacctcctactcttctaagccaggaacagattaaacaaatcaagaaagaccttaagaagtatagtaagatttttgagcaaaaagacaggctgagccagtctaaagcctcaaaggagctcgttgaaagaagaagaacaatgatggaggattttaggaaatatcggaagatggctcaggaactgtacatggagcaaaaaaatgaacggctggaacttcgcggaggagtcgatacagatgagctggacagcaatgttgacgattgggaggaggagaccattgaattctttgtgacagaggaaattattccacttggcaaccaggaatag

SEQ ID NO: 116294 - DNA, 2445 bp, synthetic construct
  misc_feature 1..2445: note = Description of Artificial Sequence: Synthetic coding sequence
  source 1..2445: mol_type = other DNA
atgcaggatgccgagaatgtcgccgtgccggaagccgccgaagagcgggccgagcctgggcagcaacagcctgcagctgagcccccccctgcagagggccttctccgacccgccggccccggggccccggaggcagctggaaccgaggcaagcagcgaggaggtcggcatagcagaggccgggcctgaatccgaagtgagaacggagcccgcagcagaagctgaagctgcctccggaccttccgagagtccctcccctcctgccgctgaggagctacccggctcgcatgcagagccaccagttcctgcacagggcgaggccccgggcgaacaagccagagatgagcgcagtgattcccgagcccaagccgtatctgaagacgccggggggaacgaaggaagggccgccgaagcggaaccgagagctctggagaacggggatgccgatgagccctctttctcagatccggaggattttgtggatgatgtgtcagaggaggaattattaggcgatgttttgaaggatcgaccacaggaggccgatggcattgacagcgtgatcgtggttgacaatgtgccacaggtgggccctgacaggctggaaaagttaaagaacgtgatccacaaaatcttctcaaagtttgggaagattacaaacgacttttaccctgaagaagatgggaagacgaaggggtacattttcctcgagtacgcatccccagcacacgccgttgacgccgtgaagaatgcagatggctacaagttggataagcagcacacgtttcgcgtaaacctctttacagattttgacaaatacatgactataagcgacgagtgggacataccagaaaagcagccttttaaggaccttggcaatctcaggtattggttggaggaggcagagtgtcgcgatcagtactccgttattttcgaatctggcgatcgaacttctattttttggaacgatgtgaaagatccagtctcaattgaagaacgcgctagatggaccgagacatacgtgcgttggtcccctaagggcacctatttggccacgttccaccagcgggggatcgctctgtggggaggggaaaaatttaagcaaattcagcgcttctcccatcagggcgttcagctgattgacttttctccctgcgaaaggtacctcgtgacattctctcccctgatggacacacaagacgacccacaggccatcataatctgggacatacttaccgggcataaaaagagaggcttccattgcgagtcatcagctcattggcccattttcaaatggtcacacgatggcaagttcttcgcgagaatgacccttgacacactaagcatctacgagacaccatccatgggattacttgataagaagtccttaaagataagcggcattaaggacttcagctggtctcctggtggaaacataatcgctttttgggttccggaggacaaagacatccctgcgagggtgacattgatgcagcttccgacccgccaggaaatccgtgttaggaatctatttaatgtcgttgattgtaagctgcactggcagaagaatggggactatctgtgcgtgaaagtggaccgaacacccaagggaacccaaggagtcgttacgaactttgaaatctttaggatgcgagagaaacaggtccccgtggacgtcgttgagatgaaagagaccatcattgccttcgcctgggagcctaacggtagcaagttcgcagtattgcacggtgaggccccgaggatctccgttagtttttatcacgtgaagaacaatggcaagatcgaactaatcaaaatgttcgacaagcaacaagccaataccatcttttggtctccacagggccaattcgtggtcctcgccgggcttagaagtatgaacggagcactcgcattcgtggatacgtctgattgtactgttatgaacatcgccgagcactatatggcctccgacgtcgaatgggatcctacaggccgctatgtggtgacatcagtgagctggtggtcccataaggtcgacaacgcatactggctctggacctttcagggccgcttgctacagaaaaacaacaaggaccgtttctgtcaactcctttggaggccacggccgcccactctgttatcccaagagcagatcaaacagatcaagaaggaccttaagaagtacagtaaaatctttgagcaaaaggatagactgtcacagtctaaagcctcaaaagaacttgttgagaggcgccgtacaatgatggaggactttagaaaataccgcaaaatggcccaggaactctacatggagcaaaaaaacgaacggctcgagctgcgggggggcgttgacacagacgaacttgactctaatgtcgatgactgggaggaagaaaccattgaattttttgtgacggaggagatcatacctttaggcaatcaggaatag

SEQ ID NO: 116295 - DNA, 2217 bp, synthetic construct
  misc_feature 1..2217: note = Description of Artificial Sequence: Synthetic coding sequence
  source 1..2217: mol_type = other DNA
atgcaagatgcagaaaatgtggcggtgcccgaagccgctgaggagagggcagggtctcacgccgaaccgcccgttccagcacagggggaagccccaggagaacaggcaagagatgaacgttccgatagccgcgcgcaggcagttagcgaggatgctggcggcaacgagggaagggctgccgaggcagagcccagagctctggagaacggagatgccgacgagccctccttcagcgatcctgaggacttcgtagatgatgtcagtgaggaggagctgctgggcgacgtgctgaaggaccggccacaggaagctgacggaatagacagcgtgattgtagtggacaacgtccctcaggtaggcccagaccgtctggaaaaactgaaaaacgtgatccataaaatcttcagcaagttcggcaagatcacaaacgacttctatcctgaagaggatgggaagaccaagggttacatatttctggagtacgcatcccctgcccacgcagtcgacgctgtgaagaatgccgacgggtacaaattagataaacaacacacattcagggtcaatctcttcacagacttcgataaatacatgactatcagcgacgagtgggatattcctgagaagcagccattcaaggacttaggtaatctaagatactggctggaagaggcagaatgccgagaccagtattcagtgatctttgagtccggcgaccgcacatccattttctggaatgacgtcaaggatccggtgtctatcgaagagcgagccaggtggacagagacctatgtgcggtggtctccaaagggtacgtacctggccacctttcatcagcgtggcatagccttgtggggaggagagaagttcaaacagattcaacgcttctcacatcagggagtccaactaatcgatttcagcccgtgcgaacgatacctggtgacattctcaccactcatggacacccaagatgatccacaggcaatcataatttgggacatcctcacaggtcataagaagcgcggtttccattgcgaatcctcagcccattggcccatattcaaatggagtcatgatgggaagttcttcgctcggatgacactggacacattgagtatttatgaaacgccttccatgggactgcttgacaagaaatctctcaagatttcaggcattaaggatttctcctggagcccgggggggaacatcatcgccttctgggtaccagaggacaaagatatcccagccagggtcactttgatgcagttgccaacacggcaagaaattcgtgtgaggaacttattcaacgtggtggactgcaagctgcactggcagaagaacggcgattacctgtgcgtcaaggtggacaggacccccaagggaacccagggggtggtgactaactttgagatttttaggatgcgggagaagcaggttccagtggacgtggtcgagatgaaggagaccattattgctttcgcatgggagcccaatgggtctaagttcgccgtcctccacggagaagcccctagaatctccgttagcttttaccacgtcaagaataacggcaaaatagagttgattaagatgtttgacaaacagcaggctaatactattttctggtcaccacaaggccagtttgtggtgctcgcaggcctgaggtctatgaatggagcccttgcctttgttgacacttcagattgcacagtcatgaacatcgccgagcattacatggcaagcgatgtggagtgggaccctacaggaaggtacgttgtgaccagcgtaagctggtggtcacacaaggtggacaacgcctactggctttggacattccagggccgtctgctgcaaaaaaacaataaggatcgtttctgccaactgttgtggaggccccgtcctcctacccttctgtcccaggaacagataaaacagataaagaaagaccttaagaagtacagcaaaatctttgaacagaaagacagattatctcaatccaaggcaagcaaggagctggtggagcgccgaaggactatgatggaggactttcggaaatatagaaagatggcccaagagttgtacatggagcagaaaaatgagagactggaactaagagggggcgttgatacggatgagttagactcaaacgttgacgattgggaggaggaaaccatagaattctttgttacagaggagatcattccactggggaatcaggaatag

SEQ ID NO: 116296 - DNA, 2742 bp, synthetic construct
  misc_feature 1..2742: note = Description of Artificial Sequence: Synthetic coding sequence
  source 1..2742: mol_type = other DNA
atgtccaggttctttacgactggctccgactctgaatcagagagttcccttagtggcgaggagctcgtgactaaacctgtaggcggcaactacggtaagcagccacttttactcagcgaagacgaagaggacaccaaaagagtcgttcggagcgcaaaggataaaaggtttgaggagctcaccaacctgatcaggacaattagaaacgcgatgaaaattcgggatgttactaagtgtctagaagagttcgaactcctaggtaaggcttacggcaaagccaagagtatcgtcgataaggaaggtgtcccaagattttatataaggatccttgctgacctggaggactacctcaacgagctttgggaggacaaggaaggcaagaagaagatgaacaagaacaacgccaaagccctttctactcttcgccagaaaatcaggaagtacaacagggactttgagagccacataacttcatacaagcagaaccccgagcagtctgccgatgaagacgctgaaaagaatgaagaggattctgaaggatctagtgatgaagatgaagatgaggatggagtgagcgccgctacattcctgaaaaagaagtccgaagccccgagtggcgaatctcgaaagttcctgaaaaagatggacgacgaggacgaagattcggaggacagcgaggacgatgaggattgggatactgggagtacttctagcgattccgatagtgaagaagaagagggtaagcagacagcactcgctagccgctttctgaagaaggcccccacaacggatgaagataaaaaagccgccgagaagaagcgggaggataaggctaagaaaaagcatgatcggaagagcaagcgcctggatgaagaagaggaagacaacgagggtggcgagtgggaacgggtgcgcggaggagtaccactggtgaaggagaagccaaaaatgtttgcaaaaggcaccgagatcacccacgccgttgtaattaagaagctgaacgaaatcctgcaagcgagggggaagaaaggcaccgaccgagcagctcagattgagttgctgcagctgctggtgcaaattgccgccgagaataacctgggggagggggtgatcgttaaaatcaagttcaatatcattgcttcactttatgactacaacccaaatctggccacctatatgaagccagagatgtggggtaagtgcctcgactgtatcaatgagctgatggacattttgttcgccaatcccaatatttttgtcggtgagaatattctggaagagtccgaaaacctgcacaacgctgatcagccacttagagtgcgagggtgtatccttactctcgtggagcgcatggatgaagagttcaccaagatcatgcagaatacagatccccactcccaagaatacgtcgaacacctgaaggatgaggcacaagtgtgcgccatcattgaacgcgtgcagcgctacctagaagagaagggaaccaccgaagaagtgtgtaggatttatcttctgcggatcctgcacacctattacaaatttgactacaaggcccaccagaggcagctgaccccgcctgaaggctcatcaaaatccgagcaggaccaggctgaaaacgaaggggaagacagcgccgtgctgatggagaggctgtgcaagtacatttacgccaaggaccgaaccgacagaatacgcacctgtgccatcctgtgtcacatatatcaccacgccctccacagccgctggtaccaggcccgggaccttatgctcatgtcccatctccaggacaacatccagcacgctgatccacccgtgcagatcttgtataaccggacaatggttcaactcgggatttgtgcctttcggcaaggtctaacgaaggatgcccacaacgccttactagatattcaatcaagtggccgcgctaaggagctgttaggacagggtctgctgttgcgctctttgcaagaacgaaatcaagagcaggaaaaggttgagcggcgcagacaggttccattccatctgcatatcaacctcgaactgctggagtgcgtctacctggtgtccgccatgttactcgagataccatacatggcggcccacgaatcggacgcgcgccgccgaatgatatccaaacaatttcaccaccagttgcgcgtgggcgagcgccagcccctgctcggcccgcctgagtccatgagggagcacgtggtggcggcatcaaaagccatgaagatgggagactggaagacatgccacagtttcattatcaatgagaagatgaatgggaaggtgtgggaccttttccccgaggctgacaaggtgaggaccatgcttgttcgaaaaatccaagaagagtcactgcgcacctatctgttcacctactcatctgtgtatgatagcattagtatggaaacccttagcgacatgtttgaactcgacctacctactgtgcattctatcattagcaaaatgatcatcaacgaagagctgatggcatccctggaccagccaacccagacggtagtcatgcatcgcacagagcccactgcacagcaaaatctcgcgctgcaattggcggaaaaactggggagcctggtcgagaacaatgaaagggtctttgaccataagcagggaacatatggcggctactttcgcgaccagaaggatggttatcgaaaaaatgaaggatatatgcgccggggcggatacaggcagcaacaaagccagactgcctactag

SEQ ID NO: 116297 - DNA, 2286 bp, synthetic construct
  misc_feature 1..2286: note = Description of Artificial Sequence: Synthetic coding sequence
  source 1..2286: mol_type = other DNA
atgagcaggttcttcaccactgggtctgactctgaaagcgagtcgtccttgagcggtgaagaactcgttactaaacccgttgggggcaattacggtaaacagcctctcctcctgagcgaagatgaagaggacactaaaagggtagtgcggagcgccaaggacaaacgttttgaagaactgacaaatctcattaggacaattcgaaacgcaatgaagatcagggatgttactaagtgcttagaggagttcgaattactcggaaaagcttacgggaaggctaaatcgatagtggacaaggagggcgtgccacgtttctatattagaattctggccgatctggaggattatctgaatgaactgtgggaggacaaggaggggaaaaaaaagcatgatagaaaaagtaagagattagacgaggaggaggaagataacgaggggggggagtgggagcgagtgagggggggcgtaccgctggtcaaagagaagcccaagatgtttgccaaaggaacagagatcacccacgccgttgttataaaaaaactcaatgagatactccaggccagaggaaagaaggggactgacagggccgctcagatagagctcctccagttgctggtacagatcgccgccgagaataacttaggtgagggcgtgattgtcaagatcaagttcaatatcattgcttccctctacgactacaaccctaacctagccacctatatgaagcctgagatgtgggggaagtgcttagactgtatcaatgagctgatggacatcctttttgctaatcctaatatattcgtgggcgagaacattctcgaggaaagtgagaacctccataacgcggatcaacccctcagagtgcggggctgtatcctaacactggtggaaagaatggacgaagagttcactaaaatcatgcagaataccgatccccacagtcaggaatacgtagagcacttgaaggatgaggcacaggtgtgtgctatcatcgagagggttcagcgctatcttgaagagaaggggacaacagaagaagtgtgtaggatttatctgcttcggatcctccacacttattacaagtttgactacaaggcccaccagagacagttgacacctcctgaaggtagcagcaaatccgagcaggatcaggcagagaacgaaggggaggacagcgctgtgttgatggaacggctttgcaaatacatatatgcgaaagatagaaccgatagaattagaacatgcgccatactgtgccacatctaccaccatgccttacatagcagatggtaccaggccagagatctgatgctgatgagccatttgcaagacaacatccagcatgcagatccgccagttcagatattgtataaccggacaatggtccagcttggaatatgcgcctttcgccagggactgacaaaagatgcccacaacgcacttttagacatacagtctagcgggcgggccaaagaactcctggggcagggtctgctcctgcgctccctgcaggagaggaatcaggagcaggagaaggtggaacggaggagacaagtcccattccatctgcacatcaacctggaactccttgagtgcgtctatttggtgtctgccatgcttctcgaaattccctacatggcagctcacgaatcggatgctaggcgaagaatgatctctaagcagttccaccatcagctcagggtgggggagagacagccacttctgggaccaccagaatctatgcgcgaacacgttgtggccgcctcaaaagccatgaaaatgggcgactggaagacctgccactcttttattattaatgaaaagatgaacggcaaagtgtgggatttattcccagaggcagataaagtgcgcacgatgctggtaagaaagattcaggaggaatctctccgtacctatctgtttacatattctagtgtttacgacagtatcagcatggagaccctttccgacatgtttgagttagatctgcctacggtgcactcaataatatcgaaaatgattatcaacgaggaactcatggcatcccttgatcaacccactcagacagttgtgatgcaccgaacagagcctacagcccagcagaatctcgccttgcagttggccgaaaaactgggctccttagtggaaaataacgagcgggtgtttgatcacaaacagggaacctacggaggatactttagagatcagaaagacggctacaggaagaacgagggatatatgcgtcgtggagggtatcgtcagcaacaatcccagaccgcctactag

SEQ ID NO: 116298 - DNA, 2742 bp, synthetic construct
  misc_feature 1..2742: note = Description of Artificial Sequence: Synthetic coding sequence
  source 1..2742: mol_type = other DNA
atgtcccgattcttcaccaccggaagtgacagcgaatctgagtcttcactgtccggcgaagaattggtgacaaaacctgttggcgggaactacggcaaacagcccctgttactctccgaagacgaagaggataccaagagggtggtgaggagcgcgaaagacaaaaggtttgaagagttgaccaatctaatccgcaccatccggaacgcgatgaagatccgggacgtgaccaagtgtctcgaggagtttgaactgctgggaaaagcatatggtaaagctaaatctatcgtggacaaggagggcgtgccacgcttctatatacgcatcctggccgatctggaggattacttaaacgagctgtgggaggacaaggaaggaaaaaaaaaaatgaacaaaaataatgctaaagccctcagcacactgagacaaaagatccgaaagtacaatcgggactttgagtcgcacatcacctcttataagcagaacccggagcagtctgccgatgaggatgcagaaaagaatgaggaggacagtgagggcagcagcgatgaggacgaggacgaggacggggtgtcagctgcaacctttttaaaaaagaagtctgaggccccatcaggggagagccgaaaattccttaagaagatggatgatgaagacgaagattccgaagacagcgaggacgatgaggactgggacaccgggtcaactagcagtgactcagattctgaggaggaagagggcaaacagaccgccttagcatctcgatttctcaagaaagcccctaccactgacgaagacaaaaaggcagctgaaaagaaaagggaggacaaagctaaaaagaagcatgatcggaagagtaaaagacttgacgaagaggaagaggataatgaggggggcgagtgggagcgcgtgcgggggggcgtaccattagtgaaggaaaagccaaagatgtttgcaaaggggaccgagatcacccatgcagtagtcattaaaaaactgaatgagattcttcaggcgcgcggcaaaaagggcacggatcgcgccgcacagatcgaacttctgcagttgctggtgcaaattgctgctgaaaataatctaggcgaaggggttatcgtgaagattaaattcaatatcattgcgagtctgtacgactacaatccaaacttggctacgtacatgaaacccgaaatgtggggcaagtgcctggactgtattaatgaactcatggatatcctcttcgcgaatcctaacatatttgtcggtgagaatatcttagaagaatccgaaaatcttcacaatgccgatcagccactcagagtcaggggttgtatactgacacttgtggaacggatggatgaagagtttaccaagatcatgcagaatacagacccgcactctcaagagtatgtagaacatcttaaggatgaggctcaggtctgtgcgattattgagagagtgcagcggtatctggaagagaaaggcaccacggaggaggtgtgtagaatttacttgctcagaattctgcacacatattacaaatttgattataaagcgcaccagcgtcagttgactccgccagaggggagttcaaagtccgaacaggatcaggccgaaaacgagggggaggatagcgccgtgctaatggaaagactgtgcaaatatatttacgctaaggacagaaccgataggattcggacatgtgcaattctgtgccacatctaccatcatgctctgcacagcaggtggtaccaggcccgagacctaatgctcatgtcacatctgcaggacaatatccagcacgccgatcccccagtccagatcctctataataggaccatggttcaactggggatctgtgcattccgccaagggctgaccaaggatgctcataatgcactgctggatatacagtcctcaggtcgtgctaaagaactgctagggcagggcctcctccttaggtctctgcaggaaaggaatcaagagcaggaaaaggtggagcgaaggcggcaggtgccatttcacctccatattaaccttgaactgctggagtgcgtgtatctggtatccgcaatgctgcttgagatcccatatatggctgctcacgagtcagacgcccgccgccggatgatctctaaacagtttcaccaccagctgagggttggagaacgccagcccctgctcggccctccagagtccatgcgcgagcacgtggtcgcagcctctaaggctatgaaaatgggagattggaagacctgccattctttcatcatcaacgagaaaatgaatggtaaggtgtgggatttatttccagaggcggacaaggtgaggacgatgctggtcaggaagattcaggaagagagtctgcgtacctatctgtttacatactcatctgtttatgactctatctctatggagacccttagcgacatgtttgaactggacttgcccacggtccacagcattatttccaaaatgatcataaatgaggagctcatggcctctcttgaccagccaacacagaccgtcgtaatgcatcggactgaacctaccgcccaacagaatctcgcgctgcagctggccgagaagctggggagtctggtcgagaacaatgaacgggtttttgaccacaagcagggaacttacggaggctactttcgcgaccaaaaggatggctaccggaagaacgaggggtatatgcgccgcgggggttatcgccaacagcaaagtcagaccgcctactag

SEQ ID NO: 116299 - DNA, 2208 bp, synthetic construct
  misc_feature 1..2208: note = Description of Artificial Sequence: Synthetic coding sequence
  source 1..2208: mol_type = other DNA
atgagccgattcttcactaccgggtcagattcggaatctgagtcttctttgtccggtgaagagctggtcactaaaccagtcggcggaaactatggcaaacagccactgcttctgagcgaggatgaagaagacactaaaagggtggtgcggtccgccaaggacaagaggtttgaggagctgaccaaccttatccgaactattcgaaacgcgatgaagatccgcgacgtcactaaatgtttggaggagtttgagcttctgggaaaagcgtacgggaaggcgaaatcaatcgtggacaaagcaaagaagaagcatgatcgtaaatccaaacgcttggatgaagaagaggaagataacgaagggggagaatgggagagagtgcgtgggggcgtgcctctagtcaaggagaaacccaagatgttcgcgaaggggaccgaaattacccacgccgtcgtaattaagaaactaaacgaaatcctgcaggcaagaggcaaaaaggggaccgatcgggccgcgcagatagaattgctgcagcttctggtccagatagcggcggagaacaacctaggcgagggcgtcatcgtcaaaattaagttcaacattattgccagcttgtacgactacaacccaaacctcgccacctatatgaagccagagatgtgggggaagtgcttggactgtataaatgagctcatggacattttattcgcgaaccctaacatctttgtgggagagaacattttggaggagtctgaaaatctccacaatgccgatcagccactaagagtaagagggtgtatccttaccctcgtagagcgtatggatgaggagttcaccaaaatcatgcagaacacggatccccacagccaagaatacgtggagcatctaaaagacgaggcccaggtgtgtgcaattattgaacgggtgcagaggtatctcgaggagaagggcacaacggaggaagtgtgccgcatttacttgctcaggattctgcacacttactacaaatttgattacaaggcgcaccagagacagctgaccccgccagagggatctagcaagagcgaacaggatcaagcagagaacgagggggaggattccgcggttctaatggaacgactctgcaaatacatatacgccaaagaccgcactgatagaatcagaacctgtgccatcctgtgccatatctaccatcatgccttacacagccgctggtaccaggccagggacctgatgctgatgagccacctgcaggacaatattcagcacgccgatcctcctgtgcagatcttatacaatcgtaccatggtgcagctcggcatctgcgcatttaggcagggacttaccaaggatgctcataatgctcttctagacattcagagttctggtcgggctaaagagctgttaggccaggggctgctgttacgtagtctgcaggaacggaatcaggaacaggaaaaggtggaacggcgccggcaggtgccatttcacctgcacatcaatctggagctcctggagtgcgtatacctggtttcagctatgttacttgaaatcccatacatggctgcacatgagtctgatgcgcgccggaggatgataagcaaacagtttcatcatcagctgcgtgttggggaacgccagcccttgctggggccccccgagtctatgagagaacacgttgttgctgccagtaaagctatgaaaatgggtgactggaagacatgtcactcgttcattatcaacgagaagatgaacggtaaggtatgggacctctttcccgaggccgataaggtgagaaccatgctggttcgcaagatccaggaagaaagtcttagaacctacctgtttacgtatagtagcgtgtatgatagtatatcaatggagacactgtctgatatgtttgagctggacctgcctaccgttcactccataatctcaaagatgattattaacgaagaactcatggcctcccttgatcagcctacacagaccgtggtcatgcatcgtaccgagccgaccgcccagcagaatctcgccctccagttagccgaaaagctgggcagtttggtggaaaataacgagagagtctttgatcataagcaggggacctatggcggctatttcagagatcagaaggatgggtataggaaaaacgagggctacatgcggcgcggcggttacaggcaacagcagtcccaaacagcttactag

SEQ ID NO: 116300 - DNA, 2697 bp, synthetic construct
  misc_feature 1..2697: note = Description of Artificial Sequence: Synthetic coding sequence
  source 1..2697: mol_type = other DNA
atgagcaggtttttcacaaccggtagcgattcagagtccgagagctcactctcgggtgaagagcttgtaacgaaacctgtgggtggaaactacggtaaacagcctcttctgctgagcgaagatgaggaagatactaagagagtcgtaagaagcgccaaggacaaacggttcgaggaacttacaaatctgatccgaacaattcgaaacgccatgaagatccgtgacgtcaccaagtgcctggaggagttcgagcttctcggaaaggcgtacgggaaggccaagtcgattgtggataaagagggagtaccacgtttctacattcgtattttggccgacctcgaggattacctcaatgaactctgggaggataaggagggaaagaagaagatccgtaagtataatcgcgatttcgagtcccacatcaccagctacaagcaaaaccccgagcaaagcgcggacgaagatgcagagaagaacgaagaagatagcgaaggatcctccgacgaggatgaagacgaggatggcgtaagtgctgccacttttctcaagaaaaagagcgaagcccccagcggggaatccaggaagtttctaaaaaagatggatgacgaggacgaagattccgaggatagcgaagacgatgaggactgggatacaggaagcaccagctcagacagtgatagcgaagaggaggaaggaaaacagaccgccctggcgtcacgttttcttaagaaggctcccactaccgacgaggacaagaaagctgctgagaaaaagcgagaagacaaggccaagaagaagcatgatcgaaagtccaaaaggctggatgaggaggaggaagataatgagggaggggaatgggagcgcgtccgcggtggcgttcccttggtcaaagaaaaaccaaagatgttcgcgaaaggaaccgaaatcacccacgctgtcgtgattaaaaaattaaacgaaattctgcaagctagggggaagaaggggacagacagagctgcccagatcgaattgctgcagctgctggttcagatagctgctgaaaataacctgggcgaaggtgtcattgtgaagatcaagtttaatattatagccagtctgtacgactataatccaaacctcgccacctatatgaagcctgagatgtggggcaagtgtctggactgcattaatgagttgatggacattctctttgccaacccaaacatcttcgtaggagagaatattctggaggagtccgaaaacctgcacaatgcagatcagccactgcgcgtgcgcggatgtattctgactctcgttgaacgcatggacgaggagttcacaaagatcatgcagaatactgatcctcattcccaggagtacgttgagcacctgaaggatgaagcccaggtgtgcgccataattgaaagggtgcaacgttatctcgaggagaagggtacaaccgaggaggtctgcagaatttatctcttgcgcatactgcatacctattataagtttgactataaagcccatcagaggcaactgacgcctcccgagggatcatcgaagtcagagcaggatcaggcagagaacgagggcgaggactctgcggtcctgatggaacggctgtgtaaatacatatatgccaaagacagaaccgatcgcatccgtacttgcgccatcctgtgccacatatatcaccacgccctccatagcaggtggtatcaagctcgcgatcttatgttgatgtcacacctccaggacaatattcagcatgcggatcccccagtgcagatcctttataaccggacaatggtgcagcttggaatatgtgcatttcggcagggcctcacgaaggatgcgcacaacgcgctgctcgacattcagagtagcgggagagccaaggaactccttggccaaggtctgctcctccggagccttcaggagcggaatcaggaacaggagaaagtcgagcggcggaggcaggtgccatttcatctgcacatcaacctagaattacttgagtgtgtttacctggtcagcgcaatgttgctcgagatcccttatatggctgcgcatgagtctgacgctaggagaagaatgatttctaaacagttccaccaccagcttagggtgggagaacggcagcctcttctgggcccaccggagtctatgcgggaacacgtggttgcagctagtaaagccatgaagatgggagattggaaaacctgccattcatttattatcaacgaaaaaatgaatgggaaggtttgggacctgttcccagaagcagataaagtgcggacaatgttggtgcggaagatacaggaggagagcttgcgcacatatctcttcacgtatagctccgtgtacgactccattagtatggagacactgtccgatatgttcgagctagatttacctacggtgcattctataatctctaaaatgattatcaacgaggaactaatggcaagtctggatcagccgacacagacggtggtgatgcacaggacagagcctaccgctcaacagaacctggcactgcagctcgcggagaaattgggctccttagtggaaaacaacgaaagggttttcgaccacaagcagggcacctacggaggatacttccgcgaccaaaaggatggctaccggaagaatgaggggtacatgcggcggggtggctatcgccaacagcagtcgcagaccgcgtattag

SEQ ID NO: 116301 - DNA, 2055 bp, synthetic construct
  misc_feature 1..2055: note = Description of Artificial Sequence: Synthetic coding sequence
  source 1..2055: mol_type = other DNA
atggggctaagcgctgctgccccactttggggccctcccggtctcctacttgccatcgcactccatcctgctctctcagtgccccctcgcagagactattgcgtactgggagcggggcctgctggcctgcagatggcatattttctgcagagagctgggagagattatgcagtgttcgaaagggcccctcgaccgggcagcttctttacccgctacccacgacaccgcaagctgatcagtattaacaagcgatatactggaaaggcgaacgctgaattcaaccttaggcacgactggaattcactgctgagccacgaccctagactgttattcaggcactattcccgcgcttacttcccagacgcccgcgacatggtgcgctatctcggagatttcgctgacacactcggcttgcgggtgcaatataacaccacaatcgcccacgtgacactggacaaagaccgacaagcttggaatgggcactactttattctgactgatcaaaaggggcaggtccaccagtgcagcgtcttgtttgtggccactggcctgagtgtgcccaaccaagtggattttccaggcagcgagtacgccgaagggtacgagtcagtaagcgtggaccctgaagactttgtggggcagaacgtgcttatcctgggcagaggaaacagtgccttcgaaacagctgaaaacattctcggagtgaccaatttcatacacatgctttccagaagtcgtgttaggctttcatgggccacacactatgtgggggacttaagggcaatcaacaacggactcctggacacctaccagctgaagtctttagacggtttactggagtcagacctgacagatcttgccattttgaaggacagcaaaggcaaattccacgttaccccgaagttttttctggaggaagctaataccaaccagtcagccgactctatcactctgccacaggacgacaacgacaactttgccatgcgcgtgccctacgatcgggtcataagatgtttagggtggaatttcgattttagtatctttaacaagtcactgcgcctaaactctgggaacgcattcggtaagaagtacccacttatacgggctagctatgaaagtaagggtagccgcggcctcttcatattgggaactgccagccacagcgtggactaccgtaagagcgcaggagggtttattcacggttttaggtataccgtgagagccgttcatcggttgctagaacaccggcaccactccgtgacatggcctgccactgaactgcctattacccagctgacctcttcaatcgtgcgcagagtgaatgaggcatccggcctgtaccagatgttcggagtgctggcggatgtaatactcctgaaggagaactccactgccttcgagtatctcgaggagtttcccattcagatgttggcccagctggagacgctgacgggcaggaaggcgaaacacggcttgtttgtgattaacatggagtacgggcggaatttttccgggcccgacaaagatgttttctttgacgatcgcagcgtcggtcatacagaagatgcttggcagtctaactttctgcatcctgttatctattattaccggtacctacctaccgaacaagaagtgaggtttagacccgcgcattggcccttgcccaggcccacggctattcaccacatcgtcgaagatttcttgactgactggaccgctcccattggccatattctccctttaaggcggttcctggagaattgcctggacactgacttacgctccttttacgctgagtcttgtttcctgtttgcacttacaaggcagaagctgccaccattttgccaacagggctacctgaggatgcagggactagtgtccacagagagcctgtggcaacatcgagtggagtctagactgttgcgtgattatgccccaacagggcggcgacttgaggattcatcccagcagcttggcgatcaggagccactaggtagccctctggccccaggaccactggcccagagtgtcgacagtaataaagaagagctgtag

SEQ ID NO: 116302 - DNA, 1602 bp, synthetic construct
  misc_feature 1..1602: note = Description of Artificial Sequence: Synthetic coding sequence
  source 1..1602: mol_type = other DNA
atggctaaattcatgacccccgtaatccaagataatccttccggctggggtccatgtgccgttccagaacagtttagagatatgccttaccagccttttagtaaaggcgacaggctcggaaaggttgccgattggaccggggcaacgtatcaggataagaggtacactaacaagtactcatctcaattcggtggcggatctcagtacgcctacttccatgaggaggatgagtctagttttcaactcgtggatactgctcgcactcagaaaacggcttatcagcgaaacagaatgcggtttgcgcaaaggaacctgagacgagataaggatagaagaaatatgctccagtttaatctgcaaattctgccaaagtcagctaagcagaaggaacgagagcgcattcgacttcagaagtcacagaagcctagggattctagcgtggaagttagatctgactgggaggtcaaagaagagatggactttccgcagctcatgaaaatgagataccttgaagtctcagagccacaagatatcgaatgctgcggtgctctcgagtattatgataaggcctttgatagaattacgactagatcggagaagccgctcaggtccataaagcggattttccacaccgtgactaccaccgacgacccggtcatacgaaaactggcaaagactcaggggaacgtgtttgctactgatgctatcttggccactctaatgtcatgcaccagaagtgtgtactcgtgggacatagtcgtgcagcgcgtcgggagtaagctctttttcgacaaacgagacaattcggactttgacctgctaactgtcagtgagactgcgaacgagcctccacaggacgaaggcaactcttttaactctccacgcaacctcgctatggaggcgacatacattaaccacaatttttctcagcaatgcctgagaatggggaaggagcgatacaactttccaaatcctaatcccttcgtcgaagacgatatggataagaatgagatagccagcgtagcataccgctatcgcagatggaaactgggggatgacatagatttgattgtgcgctgcgaacacgacggtgtcatgaccggcgcaaatggcgaagtctctttcatcaatattaagactctgaacgagtgggattcgcgacactgtaatggcgtagactggcggcaaaagctcgactcccagcggggagccgtgattgcgacagaactgaaaaataactcctacaaacttgctcggtggacctgctgtgctcttttagctggctcagagtacctcaagttgggatatgtatctagataccatgtgaaggactcctcacgtcacgtgatccttggcacacaacaatttaagccgaacgagttcgcctctcaaatcaacctgtccgtcgagaacgcttggggcatcttgagatgtgtcatcgatatctgcatgaagttggaggaagggaagtatctcattctgaaggacccaaataagcaggtgatcagagtatatagcctgccagatggcactttcagctctgatgaggacgaggaagaagaggaagaagaggaggaggaggaggaggaggaagagacatag

SEQ ID NO: 116303 - DNA, 372 bp, synthetic construct
  misc_feature 1..372: note = Description of Artificial Sequence: Synthetic coding sequence
  source 1..372: mol_type = other DNA
atggcaaaatttatgactccggttattcaagacaacccttcgggatggggaccttgtgcagtacctgagcagttcagagatatgccgtaccagccatttagcaaaggcgatcggctgggcaaggtcgccgattggacaggcgccacctaccaagacaagcgatatactaataaatattcttctcagttcgggggtgggtctcagtacgcttacttccatgaggaggatgaaagttccttccagttggtggatactgcaaggactcagaagacggcctatcagcgcaacagaatgcgttttgcgcagcgcaacctgcgaagggataaagaccgacgcaacatgttgcaatttaacctccagatcctgccgtag

SEQ ID NO: 116304 - DNA, 1647 bp, synthetic construct
  misc_feature 1..1647: note = Description of Artificial Sequence: Synthetic coding sequence
  source 1..1647: mol_type = other DNA
atggccaagttcatgacccctgtgattcaggataacccttcaggttggggcccatgcgccgttcccgagcagttccgggatatgccttatcaacctttttccaagggcgataggctggggaaggtggcagactggacaggtgcaacctaccaggacaagcggtataccaacaagtactcaagccagtttggcggaggttcccagtacgcctactttcacgaagaggatgaatcctctttccaactggtagatacggcccgcacccagaaaacagcctaccagcggaacaggatgcgctttgctcagaggaatcttagacgggataaggatagaaggaacatgcttcagtttaatctccaaatcttgcctaaatcagcgaaacaaaaagaaagggaaaggatacgcctgcaaaaaaaattccagaaacagttcggcgtgcgacagaagtgggatcaaaagagccaaaaacctcgcgatagcagtgtggaggtaagatctgactgggaagtgaaagaagagatggattttccccagctgatgaagatgcgctaccttgaagtgagcgaaccacaggacatcgaatgctgcggtgcgttggagtactacgacaaggcttttgatcggatcaccacacgcagcgaaaagcctctcaggtcaatcaagagaatttttcatacagtgaccactacagacgatcccgtgattcggaaactagcgaagacccagggaaacgtttttgccacagatgctattctcgcaacactgatgtcctgtactaggtcagtctactcttgggacatagtggtgcagcgggtggggagtaagctgttttttgataaacgcgacaacagtgatttcgacctgctgacagttagcgaaacggctaatgagcctccacaggatgagggaaattctttcaactcaccacgaaacctggctatggaagcaacttatatcaaccataatttctcgcagcagtgtctcagaatgggcaaggagaggtataattttccaaatcctaatccatttgtggaggacgatatggataaaaacgagatcgctagcgtcgcatacagataccgcagatggaagctcggagatgatatcgacctcatcgtgcgatgcgagcatgacggggtgatgactggcgcaaacggcgaagtgtcattcattaatattaaaaccctgaatgagtgggactcacgacattgtaatggagtagattggcgtcagaaactcgacagtcaacgcggggccgtcattgccaccgagctgaaaaacaactcttataaactggctcgttggacttgctgcgccttgctcgcaggcagcgagtacctgaaacttggctacgtgtctagataccatgtgaaggatagcagtcgtcatgtgatactgggaactcagcagttcaaaccaaacgagttcgcttcccagattaacttatcagtcgagaatgcctggggtattctccgatgcgtgattgatatttgtatgaagcttgaagagggcaagtatctcatcctgaaagatccgaacaagcaagtgattcgtgtttattccctgcccgatgggacattctcgtccgatgaagatgaggaggaggaggaagaagaggaagaagaggaggaggaggaggaaacctag

SEQ ID NO: 116305 - DNA, 519 bp, synthetic construct
  misc_feature 1..519: note = Description of Artificial Sequence: Synthetic coding sequence
  source 1..519: mol_type = other DNA
atggacaagaatgaaatcgcaagcgtcgcatatcggtataggcgctggaaactcggagacgacatcgacctgattgtgaggtgcgaacatgatggtgtgatgactggcgctaacggcgaggtgagctttataaatataaagactctcaatgagtgggacagccgtcactgcaacggggtcgactggagacagaaactggattcccaaagaggagctgtgatcgcaactgaactcaaaaacaactcctacaagctcgcaagatggacctgttgtgctctactggccggatccgaatatctgaagctcgggtacgtgtcaagatatcacgtaaaagacagcagtcgtcacgtgattctcggcactcagcaatttaagccgaatgagtttgcttctcagataaatttgtctgtagaaaatgcatggggaatactgcgctgtgtgattgacatatgtatgaagctcgaggaagggaaataccttatcctgaaagatcccaacaagcaagttatacgggtttag

SEQ ID NO: 116306 - DNA, 561 bp, synthetic construct
  misc_feature 1..561: note = Description of Artificial Sequence: Synthetic coding sequence
  source 1..561: mol_type = other DNA
atggcaaaattcatgactcccgtgatccaggataacccttcgggctggggaccctgtgccgtacccgaacagttcagagatatgccctaccagccattcagcaaaggagatagactcggcaaggtggcagactggaccggagcgacctaccaggacaagagatataccaataagtatagctcacaattcgggggcggatcccagtatgcctattttcacgaggaagatgagtcgagcttccagctcgtagacacagctcggacccaaaagacagcataccagcgaaatcggatgaggttcgcccaacgtaacctgcgccgggacaaggacaggcggaacatgctgcaatttaatctccagatcctgcctaagtccgcaaagcaaaaagagagagagaggatcagactccagaagaaattccaaaagcagttcggcgttcgacaaaaatgggatcagaagtcacaagtcatgtacttataccagaactcagcccttgagtttgggagcgtgtacctcgttgtgtttatcaactccttggacgagatctacttcacttattag

SEQ ID NO: 116307 - DNA, 810 bp, synthetic construct
  misc_feature 1..810: note = Description of Artificial Sequence: Synthetic coding sequence
  source 1..810: mol_type = other DNA
atggctaaatttatgactcccgttatccaggacaatcctagtggatggggcccatgtgccgttcccgagcagttccgagatatgccttatcagcctttttcaaagggagaccgccttggtaaagtcgccgactggacaggagcgacttaccaggataaaagatacactaacaaatactcgtcccaatttggaggaggttctcagtacgcctactttcacgaagaggatgaatccagtttccagttggtggacacggctcgtacgcaaaaaacagcctaccagcggaaccgcatgaggttcgcccaacgcaacctccggagggacaaagacaggagaaatatgctccaattcaatcttcagatcctgccaaagtcagctaagcagaaagaacgggagcgaatccgtctccagaagaagtttcagaaacagtttggagtgcgtcagaaatgggaccagaagtcgcagaaaccccgcgattcgtccgtcgaggtgcgatctgattgggaggtgaaggaggagatggacttccctcagctgatgaaaatgagatacctcgaggtcagtgaaccacaggacatagaatgctgcggagccctggaatactatgataaagcctttgataggatcaccacaagatctgagaaacctctgcgttcaatcaagaggatttttcatacagtgactaccaccgacgatcccgtaattcgtaagctggctaagacccagggaaatgtcttcgctaccgacgctatcttagcaaccctgatgtcttgcacccggagtgtgtattcctgggatatagtcgtctag

SEQ ID NO: 116308 - DNA, 522 bp, synthetic construct
  misc_feature 1..522: note = Description of Artificial Sequence: Synthetic coding sequence
  source 1..522: mol_type = other DNA
atggctaaattcatgacgccggtgatccaggacaacccgtctggctggggaccatgcgctgtgcctgagcagtttagagatatgccctaccagcccttcagcaaaggagatcgcttaggaaaggtggctgactggaccggtgctacttatcaggataagaggtacacaaacaaatactcatcccagtttggcggcggctctcagtatgcctactttcacgaggaggatgagagctccttccagctcgtcgatactgcccgaacacaaaaaacggcataccagcggaatagaatgagatttgctcaacgcaacctgcgcagagacaaggatcggcggaacatgctgcagtttaacttgcagatcctcccaaaaagcgcaaaacagaaggagagggagcgcatcaggttgcagaaaaagttccagaagcagtttggggtgaggcagaagtgggatcagaaatcacaaaaaccaagggactcctctgtggaagtgaggagcgattgggaggtgaaggaggagtag

SEQ ID NO: 116309 - DNA, 498 bp, synthetic construct
  misc_feature 1..498: note = Description of Artificial Sequence: Synthetic coding sequence
  source 1..498: mol_type = other DNA
atggaggcaacctatataaaccataattttagtcaacagtgcctgaggatgggaaaggaacgttacaattttcctaatcccaaccccttcgtcgaagacgacatggacaagaacgagatcgccagtgtggcctacagatatcggaggtggaagctcggtgacgacatcgatttaatcgtccgctgtgagcatgatggagttatgaccggagctaatggcgaagtgagttttatcaatataaaaacattaaacgaatgggacagtcgccactgcaatggtgttgattggagacagaagctggactcacagcgcggcgcagtgatcgcaacagagctcaagaataactcctataagctggcacgatggacttgctgcgctctcttggcagggtcagaatacctcaagctgggctacgttagccgctaccatgtgaaagattcatcacgccacgtcatcctgggcacacaacagttcaagccaaacgagtttgccagctag

SEQ ID NO: 116310 - DNA, 1500 bp, synthetic construct
  misc_feature 1..1500: note = Description of Artificial Sequence: Synthetic coding sequence
  source 1..1500: mol_type = other DNA
atggctaaatttatgacccccgtgattcaagacaacccctctggatggggcccttgtgcagtgcccgaacaattccgggatatgccctaccagccattctccaagggtgataggctgggcaaagtcgccgactggacaggggcaacttatcaggacaagcgcaatctccgcagagataaagacaggaggaatatgctccagtttaatctccagatactccccaagtccgctaagcagaaggagcgggagcgaatccgcctgcagaagaagttccagaagcagttcggtgtgcggcagaaatgggaccaaaagtcacagaagccacgcgatagtagcgttgaagtgcgctcagattgggaagtgaaggaggagatggatttcccccagttgatgaaaatgcgctacctggaagtgtccgaaccacaggatatcgaatgctgcggcgctcttgagtactatgacaaggcgttcgacagaataactacacgtagcgagaagcctttgaggagtattaaacgtatctttcacaccgtgacaaccacagacgatccagtgattagaaagctcgctaagacacaggggaacgtgttcgccaccgatgctatcctggcaactctgatgtcttgtactcgctctgtgtatagttgggacattgttgtgcagagggttggatcgaaactgtttttcgacaaacgagataacagcgatttcgacctccttacagtttccgaaaccgcaaacgaaccccctcaggacgagggcaattcctttaatagccctcgaaacctggccatggaggcgacatacatcaatcacaatttctctcagcagtgtttaagaatggggaaggaacgctataactttcccaatcccaatccattcgtagaggacgatatggacaagaacgagattgcttccgtggcgtacagatataggaggtggaagctcggcgacgacattgatttgattgtccggtgcgagcacgatggggttatgacaggagctaatggtgaagtgtcattcatcaacatcaaaactctgaacgaatgggacagtcggcattgtaacggagtcgattggaggcagaaactggactctcaacgcggcgccgtaatcgcaacagagctaaagaacaatagctacaagctggcaaggtggacatgctgtgcgcttctggcaggaagtgaatatcttaagttaggatatgttagtagataccacgtaaaggactcctctcggcacgtaattctgggaacccaacagttcaagcctaatgagtttgccagccaaataaacctctccgtcgagaatgcgtggggtatacttcgatgcgtgatcgacatatgtatgaaacttgaagaggggaaataccttattcttaaagatccgaacaaacaggtcatcagggtctattctctgccggacgggactttttcctctgacgaggatgaggaagaggaagaagaggaggaggaggaggaagaagaagaggaaacatag

SEQ ID NO: 116311 - DNA, 1215 bp, synthetic construct
  misc_feature 1..1215: note = Description of Artificial Sequence: Synthetic coding sequence
  source 1..1215: mol_type = other DNA
atgttcacagagaagaccacgacctaccagtaccccagggccattcttagcgtggacctgtctggcgaaaacctttccgacgtcgacttcctggacgactctagcacggaatctctgctgctttccggtgacgaatacaatcaggactttgactcaacgaatttcgaggaaagccaagatgaagacgatgcccttaacgaaatcgtgagatgcatatgtgagatggacgaagagaatggcttcatgattcagtgcgaagagtgtttgtgttggcaacactccgtttgcatgggtctgttggaagagagtatccctgaacagtacatatgctacatttgcagggaccctcctgggcaaagatggtccgcaaaatatcgctacgacaaggagtggttgaataatgggaggatgtgcggactgtcattttttaaggagaactacagccacctgaacgcaaagaagatcgtgagcacacaccacctgctcgccgacgtgtacggagtgactgaagtgctccacggcctccaactcaaaatcggaatcctgaaaaacaagcaccaccccgatctgcacctttgggcttgtagtggcaagcggaaagaccaggatcagattatcgctggcgtggagaaaaagatcgcccaggataccgtcaatcgggaagagaagaagtacgtccaaaaccacaaggagccacccaggctcccgctgaagatggagggcacctacattacatcggagcactcctaccaaaaacctcagtctttcggccaagattgcaaatcacttgctgaccccggaagttccgacgacgatgatgtgagtagtctggaagaagaacaagagtttcatatgagaagcaagaattcactccaatactcagctaaggaacacggaatgccggagaagaatcccgcagaggggaacacagtcttcgtgtataacgataaaaaagggacagaggacccaggcgactcacacctgcagtggcaactaaatctgctgacccacatcgagaacgtccagaatgaagttactagccggatggacctcattgagaaggaagtggatgtattggaaagctggctggactttacaggtgaattagaaccaccagacccacttgctcggctcccacagcttaagaggcacatcaagcagcttctcatagacatgggcaaggtacagcagatcgctactctgtgttctgtgtag

SEQ ID NO: 116312 - DNA, 1074 bp, synthetic construct
  misc_feature 1..1074: note = Description of Artificial Sequence: Synthetic coding sequence
  source 1..1074: mol_type = other DNA
atggctacaccggccgtgccggttagtgctcctcccgccactccgactcccgtgccggccgccgctcctgccagcgtccccgctccgaccccagccccggccgccgctcctgtccccgctgctgcccctgcatccagtagcgacccagcagccgctgccgcagccaccgctgcccccggacagacaccagcttccgcccaggctccggcacagacacctgcccccgcacttcctggacctgccctccccgggccattcccgggtggaagggtggtgcgactgcacccagtgattctggcctcaatcgtggatagctatgagcgtaggaatgagggggctgcacgcgtcatcgggactctccttggtaccgtggacaagcattccgtggaggttacgaactgtttttctgtgccgcataatgagtccgaggacgaggtcgctgtggacatggagtttgctaagaacatgtatgaactgcacaaaaaggtgtctccgaacgagttgatcctgggatggtacgcaaccggccatgatatcaccgagcacagcgttctgatccacgaatattattctagggaagctcccaatcccatccatttgactgttgatacctccctccagaacggtagaatgagtataaaagcctatgtgtcaacacttatgggcgtgccagggcgcaccatgggggtgatgtttacaccactgacagtgaagtatgcctactatgatacagaaagaatcggggtggatttaataatgaagacctgcttcagccccaatcgcgtgattgggttaagtagtgaccttcagcaagtcggaggagcctcagccagaatccaggacgctttgtctactgtccttcagtacgctgaggacgtgctgagcggaaaggtatctgctgataacacagtcggccgctttcttatgagtttggtcaatcaggtgcccaagatcgtacccgacgatttcgagaccatgctgaattccaacattaacgatctgctgatggtgacctacctcgctaacttgactcagtctcaaattgccctgaacgagaaactggtaaatctttag

SEQ ID NO: 116313 - DNA, 627 bp, synthetic construct
  misc_feature 1..627: note = Description of Artificial Sequence: Synthetic coding sequence
  source 1..627: mol_type = other DNA
atggaattcgctaaaaacatgtatgagctccacaaaaaagtctcgccaaacgaattgatcctgggttggtacgctaccggccacgatatcaccgaacattcagtgcttattcacgagtactacagtcgcgaggctcctaatcccatacatctaacggtggatacaagcctgcagaacggacggatgtccatcaaagcgtacgtctccaccctgatgggtgtgcccgggcgtaccatgggggtgatgtttacccccctcactgtgaagtatgcctactatgataccgagaggatcggagtggacctgataatgaaaacgtgtttcagtcccaatcgggtgatcgggctctcaagcgatctccaacaggtcggcggcgccagcgcaaggatacaagacgccctgagtactgtgctgcaatacgcagaggatgtactgtccggaaaagtctccgccgacaacaccgttgggaggtttttgatgtcgctggtcaaccaggtgcctaaaattgtgcccgacgattttgagacaatgctgaatagcaacattaacgaccttctcatggtgacctacttggctaatctgacacagtcccaaatagccttgaatgagaaattagtcaacctgtag

SEQ ID NO: 116314 - DNA, 1074 bp, synthetic construct
  misc_feature 1..1074: note = Description of Artificial Sequence: Synthetic coding sequence
  source 1..1074: mol_type = other DNA
atggctactcccgctgtgcctgtctccgccccacctgccactcccacacccgtgccagccgctgctccggcctctgtcccagctcctacacctgcccctgcagccgcccctgtgcccgccgccgcgcccgcctcctcttcagatcccgcagccgctgccgccgctacagccgcgcccggccagaccccagcctctgcacaggctccagctcagacccccgcgccagcgctgcctggacctgccctccctggacccttccccggcgggcgtgtggtgcgacttcatcctgtgattctggcgagtatcgttgacagctatgaaagaaggaatgagggtgccgcaagagtaattggaacactgctgggtacagtggacaagcattccgttgaggtgacaaattgcttttccgtcccgcataatgagtcagaagacgaagtggcagtcgacatggagttcgctaagaacatgtatgagctgcacaagaaagtgtctccgaatgagctgattctggggtggtatgccacaggacatgacattacggaacattccgttcttatccacgaatattacagtcgagaagcgcccaaccctatacatctgaccgtggatacatctctacagaacggtcggatgtctattaaggcctacgtctcgaccctgatgggggtgcctggcaggaccatgggcgtgatgtttacaccgctaaccgtaaagtacgcttattacgacactgaacgcatcggggtggaccttataatgaagacatgtttctctcctaaccgcgtgattgggctcagcagtgatctgcagcaggtgggtggagcatctgcgagaatccaggatgcattgtctacagtattgcagtatgccgaggatgtgttgtcagggaaagttagtgccgacaacaccgtcgggaggtttctaatgagtctcgttaaccaggtccccaaaatcgtcccagatgattttgagaccatgctgaatagcaacataaacgatctcctgatggtaacgtacttagccaatctgacgcaaagtcaaatcgcactcaacgaaaagcttgtgaatctgtag

SEQ ID NO: 116315 - DNA, 1119 bp, synthetic construct
  misc_feature 1..1119: note = Description of Artificial Sequence: Synthetic coding sequence
  source 1..1119: mol_type = other DNA
atgaacgcagtgatttctgcctccgcgagcttctttctggataaaatggcgactcctgctgtgccagtctctgcgccccccgccaccccaacgcccgtgcccgctgcggcccccgcaagcgtgccagcacccacgcccgcccctgcagccgctcctgtccctgctgctgccccagcttcctccagcgatcccgccgcggctgccgcagctaccgcagccccaggccagacacctgctagtgctcaggctcctgcccaaacccctgcccccgctttaccagggccagcactgcccggcccttttcctggcggacgggtggtgagattacaccccgtcatcctcgcttctatagtcgactcatacgaaagacgcaatgagggcgctgcccgcgttattggaactctgctcggcaccgtggacaagcacagcgtagaggtgaccaattgttttagtgtgccacacaatgagagtgaagatgaagttgctgtggatatggagttcgccaagaacatgtatgagctgcataagaaggtgtctccaaacgagctcatcttgggatggtatgccacaggtcacgatattaccgaacacagcgtcctgatccatgaatactatagtcgagaggcccccaaccctatccatctgactgttgatacttctctgcagaacggaaggatgtcaatcaaagcctatgtgtccacacttatgggcgttccaggaaggactatgggagtgatgtttacacctttgacggtcaagtatgcgtactacgacactgagcggatcggtgtcgaccttataatgaagacctgcttttcaccgaaccgggtcatcggcctgagctccgatctccagcaagttgggggggcctccgccagaattcaggacgctctttccaccgtcctacagtatgcagaggacgttctgtctggcaaagttagcgccgataacaccgtgggcaggttcctgatgtcattagttaaccaagtgccaaagatagtacctgatgattttgaaacaatgcttaacagtaatataaacgatttgctgatggtcacataccttgcaaacctcacacagtcacagatagcgctcaacgagaaattggtgaatttatag

SEQ ID NO: 116316 - DNA, 924 bp, synthetic construct
  misc_feature 1..924: note = Description of Artificial Sequence: Synthetic coding sequence
  source 1..924: mol_type = other DNA
atggccacgccagccgtgcccgtgtccgcaccacccgccacccccacacccgttccagcggccgcccctgccccagctctacccgggcccgccctgccgggtccttttccgggcggaagggtcgtacgcttacatcctgtcatccttgcaagcatcgtggacagttatgaacgccgcaacgagggagctgctagggtgatcggcactctgctgggtacggtggacaaacactcggtcgaggtgaccaattgcttttctgttcctcacaacgaaagcgaggacgaggtggctgtcgacatggaatttgccaagaatatgtacgaactgcataagaaagtttcaccgaatgaactcatcctgggatggtatgcaactggccacgacattacagagcactctgtcctgatccacgaatactattccagggaagcacccaaccccatccacctgacggtggatacctcactgcaaaacggaagaatgtccattaaggcctatgtgtccactcttatgggcgtgcccggaaggaccatgggggtgatgttcacccccctgaccgtcaaatatgcgtactatgataccgaaaggatcggtgtcgacttgatcatgaaaacttgcttttctccaaacagggtgattggactgagtagtgatctgcagcaggtaggaggcgcttcagcgcgaatacaggacgcactgtctaccgtgttacagtatgccgaagatgtgctgtcaggtaaggtgtccgcagacaacaccgtgggtcgctttcttatgagcctcgttaatcaggttcctaaaatcgtgcctgatgactttgagaccatgcttaactctaatataaacgaccttctcatggtcacctatcttgcgaacttgacccaaagccagattgcgttaaacgagaaattggtgaacctatag

SEQ ID NO: 116317 - DNA, 963 bp, synthetic construct
  misc_feature 1..963: note = Description of Artificial Sequence: Synthetic coding sequence
  source 1..963: mol_type = other DNA
atgcctacaggagacttcgactctaagcccagttgggccgatcaggtggaagaggaaggcgaggacgacaagtgtgtcacttctgagctacttaagggaattccactggcaaccggcgatacctctccagaacccgagttactgcctggtgcccccttaccgcctccaaaagaggtcattaacggaaacattaagacggtcaccgaatataaaatagacgaagacggcaaaaagtttaagatagtgagaacctttagaatagagacaaggaaagcgtctaaagctgtggcaagaaggaagaattggaaaaagttcgggaactctgagttcgaccccccaggcccaaatgtggctacaaccaccgtttccgacgatgtgtccatgactttcatcacaagtaaagaggatcttaactgccaagaggaagaagacccaatgaacaagcttaaagggcagaagatcgttagctgccggatctgcaagggagatcactggactactcggtgcccgtataaggacactctaggtcccatgcaaaaggagttggccgaacagcttggtctttccaccggggaaaaggaaaaacttcccggggagctcgaacccgtgcaagcaacccagaacaaaaccggaaaatatgtgcctccatccctgcgtgatggcgcttcccgacgtggagaatccatgcagccgaatcgccgggctgacgataatgccactatccgggtgaccaatttgtctgaagataccagagagacggatctgcaagagctttttagaccatttggttcaatcagtcgcatttatctggccaaggataaaacaacaggtcaaagcaagggttttgcatttatcagcttccatagaagagaggacgcggcccgggcaatcgcaggcgtatcggggttcggctacgaccacttaatcctcaatgtcgagtgggccaagcccagcactaactag

SEQ ID NO: 116318 - DNA, 1101 bp, synthetic construct
  misc_feature 1..1101: note = Description of Artificial Sequence: Synthetic coding sequence
  source 1..1101: mol_type = other DNA
atgtattcccgccatgctcaaagaatccctccaggcaaaaaaatggcctcccgtaaggagggcacagggagcaccgctacttcttccagtagtactgctggtgccgctggtaaggggaagggcaaaggaggtagcggtgattctgccgtcaagcaggtgcagatagatgggctggtggtcctcaagattatcaagcactaccaagaggaaggccagggcactgaagttgtccaaggtgtgctcttggggctggtcgttgaggatcgcctggaaataaccaattgttttccatttcctcagcataccgaagatgatgcagattttgacgaagtacaataccagatggagatgatgaggagccttcgacatgtcaatattgaccacctacacgtggggtggtatcagtcaacgtactacgggtctttcgtcacacgagcactgcttgacagccagtttagctatcaacatgcaattgaagagtctgttgttctgatatacgatccaattaagacggcccagggtagtttgagccttaaggcttatcgccttacacccaagctgatggaggtatgcaaggagaaggatttcagtcctgaggccctcaagaaggccaatattacctttgagtacatgttcgaggaggtcccaatcgtaataaaaaattcccatctcataaatgtactgatgtgggagttggaaaagaaatcagcagtggccgacaagcacgagctcttaagcctagcgagtagcaaccacctcggcaagaacttgcagctgttgatggaccgcgttgacgaaatgtctcaggatattgtgaaatataatacatacatgcggaataccagtaagcagcaacaacagaaacatcagtatcagcagagacgccaacaggaaaacatgcagcggcagagtaggggcgagccaccgctccctgaagaggacttgtctaaactctttaagcctccccagcctccagctaggatggactccctgctgatcgcaggccaaatcaacacatattgtcagaatatcaaggaatttactgcccagaatttgggcaagctgttcatggcccaggcattgcaggagtacaataactag

SEQ ID NO: 116319 - DNA, 1059 bp, synthetic construct
  misc_feature 1..1059: note = Description of Artificial Sequence: Synthetic coding sequence
  source 1..1059: mol_type = other DNA
atggccagccggaaagagggtacaggaagtactgccacgagctcttctagcacagcgggcgccgcagggaaaggaaaggggaaggggggcagtggggatagcgcggtaaagcaggtccaaatagacggactggtcgtcctgaagatcatcaaacattaccaggaagaaggacagggaaccgaggtagtccagggggttctgttggggttggtggtggaggataggctggaaatcactaactgctttccttttccgcaacataccgaggatgatgcagattttgatgaagtgcagtaccagatggaaatgatgcgctcactgcgccacgtgaatatcgaccacctccacgtggggtggtaccagtccacctattacggctcctttgtgacccgggccctgctcgatagccagtttagttaccagcacgcgatcgaggagtcagttgtcctgatctacgatcctattaagacagcccaagggtctctgtcactcaaggcctaccgactgacccccaagctcatggaggtctgcaaagaaaaagacttctcccctgaagcacttaagaaagcaaacattacattcgaatacatgtttgaggaggtcccaattgtgatcaagaatagccaccttatcaacgtgctgatgtgggagctggagaagaagtccgccgttgccgacaagcatgagctcttaagcctggcctcttccaatcatctggggaagaacttacagctcctaatggaccgggtagatgaaatgagccaggacatcgtgaagtacaatacatacatgcgcaatacaagcaaacagcagcagcagaagcaccagtaccaacaacggcggcagcaggagaatatgcagcggcagtcaagaggcgagccacccctcccagaagaggatttgtcaaaactctttaagcctccacagcctcctgccaggatggacagtctgctaatagccgggcagatcaacacatactgtcagaacataaaggaattcactgcgcagaaccttgggaaactgttcatggcccaggcactacaggaatacaataactag

SEQ ID NO: 116320 - DNA, 378 bp, synthetic construct
  misc_feature 1..378: note = Description of Artificial Sequence: Synthetic coding sequence
  source 1..378: mol_type = other DNA
atgaagcctatcttgcttcagggccacgagcgttccatcactcagataaagtataaccgggagggtgatctgctgtttactgttgccaaggatcccatcgtaaatgtatggtacagcgtgaatggggagcgcctcggaacctacatgggccacaccggagcggtctggtgcgtggacgccgattgggataccaaacacgtcctgactgggagtgctgataactcctgccggctgtgggattgtgagaccgggaagcaactcgctcttctcaagaccaatagcgccgtacgcacctgcggattcgacttcggcggtaatatcatcatgtttagcactgataagcaaatgggttatcagtgctttgtgtcttttttttag

SEQ ID NO: 116321 - DNA, 978 bp, synthetic construct
  misc_feature 1..978: note = Description of Artificial Sequence: Synthetic coding sequence
  source 1..978: mol_type = other DNA
atgaagccaatcctcctgcaaggacacgagaggtccattactcagattaaatacaatcgagaaggagacctgctcttcactgtcgccaaggatcccatagtgaacgtctggtattcggtcaacggcgagcgactagggacctacatgggtcataccggagctgtgtggtgcgttgatgccgactgggacacaaagcacgtcctaacaggatcagccgataatagctgccgcctgtgggattgtgaaacagggaagcaactcgccctccttaagactaattccgctgttagaacatgcggtttcgattttggcgggaacattatcatgtttagcaccgacaaacagatgggatatcagtgttttgtgagcttcttcgacttgcgggaccccagccagatcgataataacgaaccctatatgaagattccttgtaacgatagcaagatcacgtcggcggtttggggaccgctgggggaatgtataattgcaggacacgagtccggcgagctcaaccagtactccgcaaagtctggagaggttctggtgaacgtgaaggagcacagtagacagataaatgatatccagcttagccgcgacatgactatgtttgtgactgcctcaaaagataacactgcgaaactcttcgacagcaccacgctcgaacaccaaaaaactttccgcactgagagaccggttaacagcgcagcactgtccccgaattatgaccatgtcgttttaggtggaggacaggaggccatggacgtaacaaccacctccacaaggatcggcaaattcgaagccaggttttttcacctcgcttttgaggaagaattcgggagagtcaaggggcactttggccccataaattccgtggccttccacccagacggaaagagctactctagcggcggagaagacggatacgtccggatccattacttcgacccccagtatttcgaatttgaattcgaggcttag

SEQ ID NO: 116322 - DNA, 777 bp, synthetic construct
  misc_feature 1..777: note = Description of Artificial Sequence: Synthetic coding sequence
  source 1..777: mol_type = other DNA
atggccgctgcagccgcagccgccggcgacagtgacagctgggatgccgacgctttttccgtggaggaccccgtccgaaaggtaggaggtggaggtaccgcagggggagatagatgggaaggtgaggacgaagacgaagacgtgaaggataattgggatgatgacgacgatgagaagaaagaggaggccgaggttaagcccgaagtaaagatatccgaaaagaagaagatagccgaaaagattaaggagaaggagcgtcagcaaaagaaacgtcaagaggagattaagaagcggttagaggagcctgaagagcccaaggtcctgacgccagaggaacagctagccgacaagttaaggctgaaaaagttgcaggaggaaagcgatcttgagttggccaaagagacttttggggtgaacaatgccgtgtatggcatagacgctatgaaccctagctcacgagatgatttcacagagttcgggaagttgcttaaggacaaaataacccagtacgagaaaagcttatactatgctagctttttggaggtcttagtgcgtgacgtatgcatctccttggagattgatgatctcaaaaagatcaccaacagtctgacggtcctgtgctccgaaaaacagaagcaggaaaaacagtcaaaggccaaaaaaaagaaaaaaggcgtggtgcccggtggtgggcttaaggctacaatgaaagatgatttggccgattatggcggctatgatggcggttacgtgcaggactatgaagatttcatgtag

SEQ ID NO: 116323 - DNA, 657 bp, synthetic construct
  misc_feature 1..657: note = Description of Artificial Sequence: Synthetic coding sequence
  source 1..657: mol_type = other DNA
atggctatgttcgagcagatgcgggctaacgtcggaaagttacttaaagggatcgatcggtacaatcccgagaacctagctaccctggagaggtatgtagagactcaagcaaaagaaaatgcttatgacctggaggcaaacctggccgtcctgaagctgtaccagttcaatcctgcgttctttcagactaccgtaactgcccaaattctcctcaaggccctgaccaacttaccacatacagacttcacactatgtaagtgcatgattgaccaggcgcatcaggaggagcggccaattaggcaaatattgtacctgggcgaccttctcgaaacttgccacttccaggcattttggcaggcgctcgatgaaaacatggatttgttggagggtataactgggtttgaagactctgtcaggaaatttatatgccacgtagtcggcattacgtaccagcatattgatcggtggctgctagctgagatgctcggcgacctcagtgattcccagctcaaagtctggatgtctaaatacgggtggtcagctgacgagtccgggcagatattcatctgcagccaggaagaaagtatcaagccaaaaaatattgtcgagaagattgacttcgattccgtctcctcaataatggcctcctcccagtag

SEQ ID NO: 116324 - DNA, 375 bp, synthetic construct
  misc_feature 1..375: note = Description of Artificial Sequence: Synthetic coding sequence
  source 1..375: mol_type = other DNA
atgatcgatcaagcacaccaggaagaacggcctatcagacagattttatacctaggcgatctgctggaaacctgccactttcaggccttctggcaggctctggacgaaaatatggacctgttagaaggaatcacaggctttgaggactccgtccgcaagttcatatgccatgtggtgggcataacatatcaacacattgatcggtggctgctagccgaaatgcttggcgacctctcggattcacaattgaaggtatggatgtcgaaatacggctggagcgctgacgaatctggccagattttcatttgctcccaagaggagagcattaagccaaagaacatcgtggagaaaatcgacttcgactcagaatggtag

SEQ ID NO: 116325 - DNA, 636 bp, synthetic construct
  misc_feature 1..636: note = Description of Artificial Sequence: Synthetic coding sequence
  source 1..636: mol_type = other DNA
atggcaatgttcgagcagatgagggccaatgtgggcaagttgctcaagggcatagaccgctacaaccctgaaaacctcgccaccttagagagatatgtggagacccaggccaaggagaacgcctatgatctcgaggcaaacctcgccgttctgaagctgtatcaattcaatccagcctttttccagacaactgttacggcccagatcttgcttaaagccctgaccaatctcccccacaccgactttacactgtgcaagtgtatgattgaccaggcacaccaggaggagcgtccgattaggcaaatcctgtacctcggtgacctcttagagacatgccactttcaagcattctggcaggcactggatgagaacatggatctgctggaggggatcaccggcttcgaggacagtgtcagaaagtttatatgccatgtggttgggattacctatcagcacatcgaccgctggctgctagctgagatgctgggcgacttgagtgattctcagctgaaggtctggatgagcaaatatggttggtccgctgatgagtccgggcaaattttcatttgcagccaggaggaaagcatcaaacctaagaatatcgtcgagaaaatagattttgacagtgaatggtag

SEQ ID NO: 116326 - DNA, 1125 bp, synthetic construct
  misc_feature 1..1125: note = Description of Artificial Sequence: Synthetic coding sequence
  source 1..1125: mol_type = other DNA
atgagtgtgcctgcttttatcgatatcagcgaggaggatcaggccgctgagcttcgtgcctaccttaaatctaaaggtgccgaaatttccgaggagaactccgaaggcggactgcatgtcgacctggctcaaatcatcgaggcctgtgatgtctgtctgaaggaagatgacaaagatgtagaatcagtgatgaacagtgtagtgtcgctgctgctcattcttgagcctgataagcaagaggcactgatcgagagcctgtgcgaaaaattagttaaattcagagagggcgaacggccatctctgcgcctgcagctgcttagcaaccttttccatggtatggacaagaacacacccgttcggtacactgtatactgcagcttgattaaagtggccgctagttgcggcgccattcagtacatccccacagaactggaccaggtgaggaagtggataagcgattggaacttgaccactgagaagaagcacacgctcctacgacttctgtatgaggcactagtggactgcaaaaaaagtgatgccgcaagtaaagttatggtagagttgttaggctcttacaccgaggataacgccagtcaagcgcgtgttgacgctcacagatgtattgtgcgggcactgaaggacccaaatgccttcctgtttgaccacttgctcacgcttaaacctgttaagttcttagagggtgaactaattcatgaccttctcactattttcgtttccgcaaagctggccagctacgtgaaattttatcaaaacaacaaggatttcatcgacagcctgggcctactccacgagcagaatatggcgaagatgcggctgttaactttcatggggatggccgttgaaaataaggaaatttcatttgataccatgcaacaggagctgcagatcggagcggacgacgtcgaggccttcgtgattgacgcagttcgaacaaagatggtgtactgtaagatagatcagacccagcggaaagtggtggtttctcatagcactcataggaccttcggaaagcagcagtggcagcagctgtatgacaccctgaatgcctggaagcagaatctgaataaggttaaaaactcactgctgagcctgtctgacacctag

SEQ ID NO: 116327 - DNA, 2724 bp, synthetic construct
  misc_feature 1..2724: note = Description of Artificial Sequence: Synthetic coding sequence
  source 1..2724: mol_type = other DNA
gtcgagtcagccattgccgagggcggggctagcagatttagcgcttctagcggcggcgggggaagtagaggagccccgcagcactaccctaagacagccggcaactctgaattcctaggaaaaacgccgggtcaaaatgcacaaaaatggatcccagccaggagtaccagacgggacgacaacagtgctgccaacaacagtgccaacgagaaagagaggcatgatgctatcttcaggaaggtccggggtattcttaacaagctgacccctgagaaatttgacaagctgtgtctggaactcctgaacgtgggagtggagtcaaagctaatcctgaagggagtgatcttactcatcgtggacaaagccctggaagagcctaagtattcctccctctacgcccagctctgtttgcggctggccgaggacgccccgaacttcgacggaccagccgctgagggccagccgggacaaaaacagagtacgaccttcagacgactgttgatttcaaaactgcaggacgagttcgagaatcgaactagaaacgtcgacgtctatgacaagcgggagaatcccctcctacccgaggaggaggagcagcgtgcgattgcaaagattaagatgctgggcaatataaaatttattggggagctgggaaaactagacctcatacacgagtctattctgcacaaatgtatcaagacattgctggaaaagaaaaagcgagtccaactcaaagacatgggcgaagacttagaatgtctctgccaaatcatgcggactgttgggcccaggcttgaccacgaacgcgcaaagtccctcatggaccagtactttgcaagaatgtgcagcttgatgcttagcaaagagctcccagccaggataaggttcctcttacaggataccgtggagctgcgggagcatcactgggtgccgaggaaggcttttctggataacgggccaaaaacaataaaccagatccgacaagatgccgtgaaggacttgggcgtatttattcctgcaccaatggcacagggcatgcggagcgacttttttcttgagggcccattcatgcctcccagaatgaagatggatcgcgacccgctgggtggcctggccgacatgtttggccagatgcccggctctggaatcgggacgggccccggggtgatccaggacaggtttagtccgacaatgggccggcacagatcaaaccagctctttaacggtcacggaggacacatcatgccccctacacaatcgcagttcggagagatgggaggcaagtttatgaagagtcaaggattatctcagttgtaccacaatcaaagtcaaggactcctgagccagctgcagggacagagtaaggatatgccccctagattttcaaagaagggccagctaaacgcagacgaaatttccctacgacccgcccagtcctttctgatgaacaaaaaccaggtgcccaagctgcaaccgcaaatcaccatgatcccaccatctgctcagcccccgaggacacagacccccccactgggccaaactcctcagctggggctgaagactaatcccccgttaattcaggagaagcctgcgaaaacatccaaaaaaccaccccccagtaaggaagaactgcttaagctgacagaaacagtcgtcactgagtatctcaactcagggaacgccaatgaggctgtaaacggggtgagggaaatgcgggccccaaagcacttcttaccagagatgctgagcaaagtaattatcctctccttggaccgtagcgacgaggacaaggagaaagcgtccagcctgatcagcctgctgaagcaagaagggatcgcgacctccgataacttcatgcaggctttcctcaatgtgctggatcagtgtccaaaattggaggtggatataccacttgtcaagagctatctcgcacagttcgctgcacgggcaataattagcgagcttgtgtctatctccgaactggctcaacctctggaatccggcacccatttccccctgttcttactgtgtctgcaacaacttgctaaactccaagaccgcgaatggctcacagagttatttcaacagagcaaagtcaacatgcagaagatgctgccagagattgaccagaacaaagatcggatgctggagatcctcgagggcaagggactgtctttcctcttccctttgctgaaactggaaaaggaattactcaagcaaattaagcttgacccttccccccagactatctacaaatggatcaaggataatatcagccctaagctgcacgtggacaagggctttgttaacattctcatgacctcattcttacagtatattagtagtgaggtgaaccccccgagcgatgaaaccgacagttccagtgccccttcaaaagagcagttggaacaagagaagcagctgctcctctccttcaagccagtgatgcaaaagttcctgcacgatcatgtggatctgcaagtttccgccctgtatgccttacaggtgcactgctacaactccaacttcccaaagggcatgcttctcagattcttcgtccacttctatgacatggaaatcatcgaggaagaggctttcctcgcctggaaagaggacatcactcaggagttcccgggcaaagggaaagcacttttccaagttaaccagtggttgacctggctagagacggccgaagaggaagaaagtgaggaggaggctgactag

SEQ ID NO: 116328 - DNA, 762 bp, synthetic construct
  misc_feature 1..762: note = Description of Artificial Sequence: Synthetic coding sequence
  source 1..762: mol_type = other DNA
atgcaggctttcttaaatgtcttagaccagtgccccaagctggaggtggacatcccgctcgttaaatcctaccttgctcaattcgcagctagggccatcatctccgagctggtttccatttccgagctggcgcagccacttgagagcgggactcattttccattgtttctcttgtgcctacagcaactggctaaactacaggatagagagtggctgaccgaattgttccaacagagtaaagtgaacatgcaaaagatgctccctgagatcgaccagaacaaagatcgaatgcttgagatcttagaaggtaaggggctatcattcttgtttcctctcctgaagttggagaaggagctgcttaagcagatcaaactggatccatctccgcaaacgatctacaagtggatcaaggacaacatatccccaaagctgcatgtggataaaggattcgtcaacattcttatgacatccttcttgcagtatatctcttcggaggtgaatcctccgtctgacgaaacagattcatctagcgctcccagcaaggagcagctggagcaggagaagcagctcctactctccttcaagccagtgatgcagaaattccttcacgatcacgtagaccttcaagtgagcgctctttatgctctgcaggtccactgttataattcgaacttccctaagggtatgctcttatttctttgtacctctatgacctggaagctcctgaagaaaaagttatcctggctgggaaaaaaaatttag

SEQ ID NO: 116329 - DNA, 2610 bp, synthetic construct
  misc_feature 1..2610: note = Description of Artificial Sequence: Synthetic coding sequence
  source 1..2610: mol_type = other DNA
gtggagtccgccattgcagaaggaggcgcatcaaggttttcagccagcagtggtgggggcggatcaaggggagcaccgcaacattaccccaagacagccggcaattctgagtttttaggaaagaccccaggtcagaatgctcaaaaatggatacctgctcgtagcacccgacgggatgacaatagcgccgccaacaattccgcaaacgagaaagagcggcacgatgctatttttcgtaaagtgagggggatacttaacaagttgaccccagaaaagtttgacaaactctgcctggagctgttaaacgtcggagtggaaagtaagctcatcctcaaaggagtgattctattaattgttgacaaagcgcttgaggaaccaaaatatagcagcctatacgcccagctctgtcttagactggcagaagacgcaccgaatttcgatggtccagccgctgagggtcagccaggacagaaacagtccactacctttcgaaggctgcttatcagtaaactgcaggatgagttcgaaaacaggactcggaacgtggacgtctacgacaagcgggagaatcctttgcttcccgaggaagaggagcagagggctattgcaaagattaaaatgctcggaaacataaaatttatcggagaactaggaaagctagacttgatacacgagtctattcttcacaagtgcatcaagaccctgctggaaaaaaaaaagagagtgcaactgaaggacatgggagaagacttggaatgcctgtgccagattatgagaacagttggtccaaggttggaccatgagagagcaaaatctctgatggatcagtatttcgcacggatgtgcagcttgatgctcagtaaagagttaccagcacggatcagatttctgctgcaggacacagtggaacttagagaacatcattgggtcccccgtaaggccttcctcgacaacggccctaagacaatcaatcaaatcagacaggatgcagttaaagacctaggagtgtttatcccagcaccaatggcgcaagggatgcggtcagatttcttcctggaaggaccatttatgcctcccaggatgaagatggacagagacccccttggtggactggctgatatgtttggccaaatgccgggctctggtatcggcacaggcccaggagtcattcaggatcggttcagccctaccatggggaggcatcggtccaaccagttgttcaatggccacggtggccatattatgccccccacccaaagtcagttcggtgaaatgggagggaaatttatgaagtcccaaatttctctcaggccagctcaaagcttccttatgaataagaaccaagtcccaaagcttcaaccccagataacgatgataccacctagcgcacagcctccccggactcagacgccacctctcggacaaaccccccagctcggactgaagactaatcccccgctcatccaagaaaaaccagccaagacatccaagaagccaccacccagtaaagaggaactgcttaagctcaccgagactgtggtcaccgagtatctcaactccggtaatgcgaacgaagcagtgaacggggtcagagagatgagggcgcccaagcactttctaccagagatgttgtcaaaagttatcatcctgagcctcgaccgcagcgacgaggacaaagaaaaggcctcttcacttatctcactcctgaaacaagaagggattgccacaagtgataatttcatgcaggcatttctgaacgtgttggatcagtgccccaagctagaggtagacattcctctggtcaaatcctatctggcccaatttgcggcaagggcaattatcagtgaacttgtatcaatcagcgagctggcccaaccgcttgaatccggcactcacttccctctctttctcctgtgcttgcaacaacttgcaaagctgcaagatagggaatggttgactgagttatttcagcaaagcaaggttaacatgcagaagatgcttccagagatcgatcaaaacaaagaccgtatgttggagattctagaagggaaaggcctgtctttcctatttccccttctgaagcttgaaaaagagcttctgaagcagatcaagcttgatccgagcccacagactatctacaaatggatcaaggacaacatctcgcctaagctgcatgtggacaagggatttgtcaatatcctgatgacatcctttcttcagtatataagttctgaggtgaatcctcctagcgatgaaaccgattcctctagcgccccttctaaggaacagctcgaacaagagaagcagctgttgctctctttcaaacccgttatgcagaagtttctccatgaccatgtggacctgcaggttagcgccttgtatgctcttcaagtccattgttacaactctaacttccccaaagggatgctgctgaggttcttcgtccacttctatgacatggaaatcattgaggaggaagccttcctagcttggaaggaagacatcactcaggagtttcccggaaagggcaaggccttgttccaagtgaatcagtggctgacttggctggagactgcggaggaggaggaaagtgaagaggaagccgactag

SEQ ID NO: 116330 - DNA, 2943 bp, synthetic construct
  misc_feature 1..2943: note = Description of Artificial Sequence: Synthetic coding sequence
  source 1..2943: mol_type = other DNA
atggccgggtggcctactcccgcgggcactaggccatggagaacagaggcaagactctgttcagacggggagggggcctggctgggaccgcttgccccgtggagagaggctcgtctggccagtcgcagaggaggaatctcattcttgctctcgccaccattgcccactccctccatcaacatcatcctgctgaaaatcctacgctgccaggctgctaaggtggaaagcgccatcgccgaaggtggtgcctcccggtttagtgcatcatctgggggtggcggctcccgaggcgctccacagcactatccaaagactgcgggcaacagcgagttccttggaaagacccccggtcaaaatgcccaaaagtggatcccagcacggagcaccaggcgcgacgacaattcagcagctaacaatagcgcaaacgaaaaagaacggcatgatgctattttccggaaggtgaggggtatcctgaacaagctcacgcccgaaaaattcgataaactgtgtttggagctgctgaacgtcggagtggagagcaagcttattttgaagggcgtgattctgctcattgttgataaggctttggaggagcctaagtactcaagtctgtatgcgcagctctgccttcgcctcgcagaggatgcgcccaattttgacggcccggccgcagaaggacagccaggacagaaacagtcaacaactttccgtcgtcttctcatttcgaagcttcaggatgagtttgagaatcggacccggaatgtcgacgtgtatgataagagggagaatcctctcctaccagaagaagaggaacaaagggctattgctaagataaaaatgctcggcaatataaaatttatcggggaacttggaaaattagacctgattcacgaatccatcctgcacaaatgcatcaaaactctcctcgagaaaaaaaagcgtgtccagctgaaggacatgggcgaagaccttgagtgcctatgtcaaattatgcgaacagtggggcctcgtcttgaccacgaaagagccaaatccttgatggatcagtacttcgctcgcatgtgctctctgatgctttccaaagagctccctgccagaatcagattccttttacaggatactgtcgagctgagagagcaccattgggtacctcgcaaggcattcctcgataatgggccaaaaaccatcaaccagatccgccaagatgccgtcaaagacctgggagtgttcatcccagccccaatggcgcagggaatgagaagtgacttcttcctcgaggggcctttcatgccacctcgaatgaaaatggacagagaccctctgggggggctggcggacatgtttggccagatgccaggcagcggtattggaactggtcctggcgttatccaggaccggtttagccctacaatgggccggcaccgttccaaccagctctttaacggacacggtggccacattatgcccccgactcagtcccagtttggggaaatgggcggaaaatttatgaagagccaaggtcttagccaactgtaccacaaccagtcacagggtctcctttcccagctgcagggtcagtccaaggacatgcctcctaggttctctaaaaaaggacagctgaatgcagatgaaatctctttgcgcccagctcaaagcttcctaatgaataagaaccaggtaccaaagctgcagcctcagatcacaatgataccaccatcggctcagccacctcggacacaaacaccaccattggggcagactccacagctgggcctcaaaacgaatcctcccctcattcaggagaagcctgccaaaacgtcaaaaaagccaccaccaagcaaggaggagctcctcaaactgacagaaacggtggtaaccgaatacctgaattccggaaatgcaaacgaggcagtcaacggcgtccgggagatgcgcgcgccgaagcattttttgccagagatgctttctaaggtcattattctgtcattggatcgcagcgacgaagataaggagaaagcttctagcctgatttctttgctgaagcaggagggcatcgccacttccgataattttatgcaagcattcctaaatgttctcgaccagtgtcctaaattagaagtggacatccccttggtgaaatcatacctggcccagttcgcggctcgcgcaatcatcagtgagcttgtttcgatctcagaactcgctcaacccttggaaagcggaactcattttccactgtttctactgtgtctgcagcaactggcaaagctgcaagatcgcgaatggttgacagagctgttccaacagtccaaggtgaatatgcagaagatgctgccagaaatcgatcaaaataaagatagaatgctggagatactggaaggaaagggattatcttttttgtttccactcttaaagctagagaaagaactgttaaaacaaatcaagctcgatcctagcccacagacaatctataaatggatcaaggataacatatcaccgaaacttcacgtcgacaaaggttttgtgaatatactcatgacctcattcctgcagtacatcagctccgaggtcaacccaccatccgacgagacagattcctcctctgccccctcgaaggagcagcttgaacaggagaaacagctgctcttatcttttaagcccgttatgcagaagttcttgcacgatcacgtggaccttcaggttagtgctctatacgcgctccaggtgcactgttataattctaactttccaaaaggcatgctgttgcgatttttcgtccatttctacgacatggaaatcatcgaagaagaagctttcctggcatggaaagaagatatcacacaggagtttcctggaaagggcaaggcattgttccaggtgaatcaatggctcacttggctggagaccgctgaagaggaggaatctgaagaggaggcagactag

SEQ ID NO: 116331 - DNA, 735 bp, synthetic construct
  misc_feature 1..735: note = Description of Artificial Sequence: Synthetic coding sequence
  source 1..735: mol_type = other DNA
gtggaatcagctattgctgaaggaggcgcttccaggttttccgcctcttctggcgggggtggtagtagaggcgccccacagcattaccctaaaaccgcgggaaactctgagttccttggcaaaacaccggggcagaacgcacagaagtggatcccagccagatctacacgcagggacgacaacagcgcggccaacaactcggctaacgaaaaggaacggcacgacgccatttttcgcaaagtgagaggcatccttaacaagctgactcccgagaagttcgacaaactctgtctcgagttgttaaacgtgggggtggagtcaaagctaattctaaagggagtgatcttactcatcgtagacaaagcacttgaggagcccaaatattcttctctgtatgcacagctctgtctcaggttggcagaagatgcacccaatttcgatggacccgctgcggaggggcagcctggccagaagcagtctaccacctttcggagactcctgatatctaagcttcaggacgaatttgaaaacagaactcgcaatgtcgacgtgtacgacaagagggagaaccccctactgcccgaagaggaagaacagcgtgccattgccaaaatcaaaatgctgggtaatattaagttcatcggcgagttgggcaagctcgaccttattcacgaaagcattctccataagtgcatcaagacattgctcgaaaagaagaaacgcgtgcagttgtag

SEQ ID NO: 116332 - DNA, 2724 bp, synthetic construct
  misc_feature 1..2724: note = Description of Artificial Sequence: Synthetic coding sequence
  source 1..2724: mol_type = other DNA
gtggagagcgctatagcggagggaggagcttctagattttcagcatcttcaggtggcgggggctccagaggggctccgcagcattacccaaagacagcaggcaatagcgaatttctgggcaaaacgccaggtcaaaacgctcagaagtggatccctgcccggtcaacgcggagggatgacaattcggctgccaacaattctgctaacgaaaaggagagacacgacgccatctttcggaaggtgcgcggcattcttaacaagctgacacccgaaaagtttgacaaattgtgcttggagctgctgaacgtgggtgtcgaaagcaagctcatcttgaagggcgtgatacttctaatcgtcgataaagccttggaggagcctaagtactcttccctctatgcacaactgtgtctgcgactggctgaagatgctcctaatttcgatgggcctgctgccgagggccagcccggacaaaaacagtcaactacgttccggcgcctcctcatttccaagctgcaggacgagttcgagaatcgaacacggaatgtggacgtttatgataagagggaaaacccacttctgcccgaggaagaagaacagcgtgcaattgctaaaatcaaaatgctggggaatatcaaattcatcggcgagctcgggaagttagatctgatccacgaatctattctccataagtgtatcaagaccctgctggaaaaaaagaagcgcgtgcagctgaaggatatgggagaggacctggaatgtctatgtcaaattatgaggactgtcggcccgcggcttgaccatgagcgtgctaagtccctgatggaccagtacttcgctcggatgtgttcgttgatgctgtctaaggaactgccagctagaataagattcctcctccaggacactgttgaattgagagagcaccattgggtcccacgcaaggctttcctggacaacgggcccaaaacaataaaccagattagacaggatgccgtaaaggacttgggagtgttcattccggctcctatggcacagggcatgcgtagcgattttttcttagaggggccatttatgccacctcgtatgaagatggaccgcgaccccctcggaggcctggcggatatgttcgggcagatgcctggctctggaatcggcaccgggcccggcgttatccaagacaggttctctcctaccatggggcgccaccgatccaatcaattgttcaacggccacggggggcacattatgcctccaacccagagccagtttggcgagatgggcgggaagttcatgaaaagccagggactctcacagctgtaccataaccagtcacagggtctcctgagccagcttcagggccagtcaaaggacatgccacctcgcttcagtaagaagggtcagttgaacgcagatgaaatctctctaaggcctgcacaatcctttcttatgaataagaaccaggttcccaaactgcagccacagattacgatgatacccccttcagcccaaccacctaggactcaaacccctcccctgggacaaacccctcagctaggtctgaaaaccaatcctcccttgatccaagaaaagccggctaagaccagtaagaagcctcccccatctaaggaagaactgctcaagctcacggagaccgttgtaacggagtacctgaactccggcaacgcaaacgaagctgttaatggagtgcgagaaatgcgggcgccaaagcattttctgcccgagatgctgagcaaggttatcattctctctttggaccgatcagatgaagacaaagaaaaggcctcttcgcttatttcactgttgaagcaagaggggattgccacttcagataacttcatgcaggccttcctcaacgtgcttgaccagtgcccgaagctagaggttgacatacctctggttaaaagctatcttgctcagttcgctgcccgtgcgattatctccgagctggtgtcaatttccgagctggcccagcctctggagagtggaacccattttcctctcttccttctttgcctccagcagttagcaaagctccaagaccgagagtggttgaccgagctgttccaacagtcgaaagtgaacatgcagaagatgctccctgagatcgaccaaaataaggataggatgctagaaatcctagagggcaagggactttcttttctgtttcctctcctgaagttggaaaaggaattgctgaaacaaattaagctggatccttctccgcagacaatctataaatggattaaggacaatatttcaccaaagcttcatgtcgacaagggctttgttaatatcctgatgaccagtttcttgcagtatatttcgtccgaagtgaatcccccgtcagacgaaaccgactcatcttccgccccttccaaagagcaactcgagcaggaaaagcagctgctgctgtcattcaagcccgtgatgcagaagttcctacatgatcacgtcgatctgcaagtcagcgctctgtatgctctgcaagtgcactgttacaactctaatttcccgaaaggcatgcttttaagattcttcgtacatttctacgacatggagataatagaggaagaggctttcctcgcttggaaggaggacatcactcaggagtttcctggcaagggcaaggccctgttccaagtgaatcaatggctaacgtggttggaaactgcagaagaagaggaatccgaagaggaagctgactag

SEQ ID NO: 116333 - DNA, 2724 bp, synthetic construct
  misc_feature 1..2724: note = Description of Artificial Sequence: Synthetic coding sequence
  source 1..2724: mol_type = other DNA
gtggagtctgctatagccgaggggggggctagcagattctccgcctccagcggcgggggaggatctagaggggcgcctcaacactatcccaagacagcaggcaacagtgaatttctcgggaagacaccggggcaaaatgcccagaaatggatacctgcccgtagtactcggagggacgataacagtgcggccaacaacagtgctaacgaaaaggaacgacatgatgccatcttcagaaaagtacgggggatactcaacaagctgacacctgaaaagtttgataagctctgcctcgagttgctgaacgtgggcgttgagtcaaaactgatcttgaagggagtgatccttctcatcgttgacaaggccctcgaggaacccaagtattcaagtctttatgcccagctatgtttgcggctagcagaggacgcgccgaatttcgacggcccagcagccgagggacagccggggcagaagcaatcaacgacatttcgcaggcttcttatctccaagctgcaggacgagttcgagaatcgaactaggaatgtggacgtgtatgacaagcgggagaaccccctgctgcccgaagaggaagaacagcgagccattgccaaaataaagatgttaggtaatattaaattcattggagagcttgggaagttagacctaatccacgaatctatcctgcacaagtgtatcaagaccctgctggagaaaaagaagagagtacaattgaaagatatgggagaggatttagagtgtctgtgtcagattatgcggacagtagggccaagactggatcatgagagagccaagtccttgatggaccagtactttgctagaatgtgtagcctgatgctatccaaggagctgccagctcggatcagatttttgttgcaagatactgtggaactccgggagcatcactgggtccctagaaaagccttcctggataatggacccaaaaccataaatcaaatcaggcaggacgcggtaaaggatcttggtgtgtttattccagccccaatggctcaagggatgcgttcagattttttccttgaaggacctttcatgcctcctcgaatgaagatggatagggacccgcttggcggtttggcggacatgtttggtcagatgccgggctctggcattgggaccgggcctggtgtgatacaggaccggtttagccccacaatgggccgtcacagaagcaaccagctcttcaatgggcatggtggccacatcatgcccccaacacaaagtcagttcggtgaaatgggggggaagttcatgaagtctcaagggctgagccagttgtaccacaaccagtcccagggtctactgtcacaactgcagggccagtcaaaggacatgccacccaggttctccaaaaaggggcagctgaacgccgacgaaatctcacttaggccagcccaaagcttccttatgaacaagaatcaggtgcctaagcttcagccccagatcacaatgatcccgccttccgcccaaccgccaaggacacagacgccaccactcgggcagacccctcagctcggactgaagactaacccaccactgattcaagagaaacctgcgaagacctccaaaaagccgcctcccagtaaagaagagctactaaaactcaccgaaactgtggttacagagtatctgaacagtggcaacgccaacgaggctgtcaacggcgtgagggaaatgcgcgcgcccaagcacttcctgcccgagatgctctctaaagttattattctttctctcgatcgcagcgatgaggacaaagaaaaggccagctctctcatttccctgctgaagcaagagggaatagccactagcgacaatttcatgcaagcatttctgaacgtactggaccagtgcccaaagctggaagtcgacatcccactggtgaagagctatcttgcacagtttgccgctagggctatcatttccgagctggtcagcatcagcgagttagcccagcctctggaatccggtacgcactttcccttgtttttgctatgcctccagcagctggccaagctgcaggatcgagagtggttgacagaactctttcagcagtccaaggtaaatatgcagaaaatgcttcccgagattgaccagaacaaggatcgaatgctggagatccttgaggggaagggcttgagcttcttattccctctgctgaaattggaaaaggagctgctcaagcagatcaaattggatcctagccctcagactatttataagtggatcaaggataatattagccctaaactccatgtagacaaaggctttgtgaatattctgatgacgagctttctgcagtacataagctcagaggtcaacccccccagtgacgaaactgacagcagttctgccccgtccaaagaacagctcgagcaggaaaagcagttattactaagctttaagccagtgatgcaaaagtttctgcatgatcacgtggatctgcaggtgtcagcattgtatgcactgcaggtgcactgttacaactctaactttccgaaaggcatgctgctgcggttttttgtccacttctacgacatggaaattattgaggaagaggcgttcctcgcctggaaagaggacattacccaggaattccccggcaaaggaaaggctctcttccaggttaaccagtggctgacctggctggagacagctgaagaggaggagtccgaggaggaagcagactag

SEQ ID NO: 116334 - DNA, 375 bp, synthetic construct
  misc_feature 1..375: note = Description of Artificial Sequence: Synthetic coding sequence
  source 1..375: mol_type = other DNA
gtcgagagcgccattgccgagggtggcgcttcccgattctcagcgtcgagtgggggggggggctcaagaggagctccccagcactatccgaagaccgccgggaattctgagttccttggcaagacacctggacagaacgcccagaaatggattcctgctagaagcacgcggagagacgataatagcgccgccaataatagtgccaacgaaaaggagcggcacgacgcgatctttcgcaaggtgcgcggcatattgaacaagttaactccggagaaattcgacaagttatgtctggagctgctgaatgtcggggtggagagcaagctgatcttaaaaggagtcatcctgctaatcgtggataaggccctggagtag

SEQ ID NO: 116335 - DNA, 339 bp, synthetic construct
  misc_feature 1..339: note = Description of Artificial Sequence: Synthetic coding sequence
  source 1..339: mol_type = other DNA
gtggagtctgccatcgcagaagggggagcttctcgcttttccgcgagttcaggagggggtggttccagaggcgccccccaacactatccgaaaacagccggtaattctgagtttcttgggaagacccccggtcagaatgctcagaagtggattcctgcgaggagtacccgaagagatgacaattccgctgctaataactctgcaaacgagaaggaaagacacgacgctattttccgcaaggtcagggggattctcaacaagttgacacccgagaagtttgacaagctatgcctggagctgttgaatgttggcgtggagtctaagctcattctgaaatag

SEQ ID NO: 116336 - DNA, 351 bp, synthetic construct
  misc_feature 1..351: note = Description of Artificial Sequence: Synthetic coding sequence
  source 1..351: mol_type = other DNA
gtcgaatccgccattgccgagggcggcgcaagtcggtttagtgcttccagcggcggtggaggctctcggggcgctccccagcattatcccaaaacagccggcaactccgagtttctgggaaaaactcccggacagaacgcgcagaaatggataccagcaaggtccacgagaagggatgacaatagtgctgcaaacaatagcgctaacgagaaggagagacatgacgccatttttcgaaaggtgcggggcatactaaacaaactgacccccgagaagtttgacaaactgtgccttgaactgctaaatgtgggcgttgaaagcaaactgatcctcaagggcgtcatcctctag

SEQ ID NO: 116337 - DNA, 1335 bp, synthetic construct
  misc_feature 1..1335: note = Description of Artificial Sequence: Synthetic coding sequence
  source 1..1335: mol_type = other DNA
gtcgaaagcgcgatagccgagggaggcgccagcaggttttccgcatcatctggtggcggaggatcaaggggcgcgccacagcattaccccaagaccgctggcaatagtgagtttcttggaaaaacccccggacagaatgcccaaaaatggatccccgctcgcagtacaagacgcgacgataactctgccgccaacaatagtgccaacgagaaggaacgtcatgacgctatcttccggaaagtgcggggtatactgaataagcttactcctgaaaaattcgacaagctgtgtctggagttgcttaatgttggcgtggaatccaaactgatactgaagggggtgattctgttgattgtagacaaagcgctggaggaacctaagtattcctcgctgtatgctcagctatgtttacgcctggccgaagacgcgcccaattttgatggtcccgctgcagaaggccaacccggccaaaagcaatcgacaacttttaggaggctgctgattagcaaactgcaggatgagttcgagaatcgcaccaggaacgtcgacgtgtatgataaacgtgagaacccactgttacccgaggaggaagaacagagagccatcgcaaaaatcaagatgctggggaatataaaatttatcggggagctgggcaaactggacctgattcacgagagtatcctccataagtgtatcaagacattgctcgaaaagaagaaacgagttcagctgaaggatatgggcgaggatctggagtgtctgtgtcagatcatgcgaacggtgggacctcgattggatcatgaaagagccaagtcccttatggaccagtacttcgctagaatgtgcagcctgatgctctctaaggagttgccagccaggatccgcttcctcttgcaggacacagttgagctgcgggaacatcattgggtgccccgcaaagcgttccttgataatggcccaaagacaattaaccagatccgacaggacgccgtcaaggatctgggagtgttcattcctgcgccaatggcccaggggatgcggtcagatttttttttggaggggccattcatgcccccgcgaatgaaaatggaccgggatccactgggaggtctcgccgatatgttcggccagatgcctggctctggtatcggaaccggtcccggtgtgattcaagaccgcttctcgcctacaatggggaggcaccggtcgaaccagctctttaatgggcatggcgggcatatcatgccaccaactcagagccagttcggtgagatgggcggcaagttcatgaaatcgcagatctctctcagacccgctcagtcgtttctgatgtag

SEQ ID NO: 116338 - DNA, 849 bp, synthetic construct
  misc_feature 1..849: note = Description of Artificial Sequence: Synthetic coding sequence
  source 1..849: mol_type = other DNA
gtggagtcagccatcgctgagggaggcgccagtagattcagcgcctcttccggaggcggaggcagtcgcggcgccccacagcattatccgaagaccgccgggaacagtgagtttcttggcaaaacaccaggccagaacgcccagaaatggatacccgccagaagcacgcgacgcgacgacaattccgccgcgaataattccgctaatgaaaaagagcgccatgacgcaattttccgcaaggtgcggggaatcctgaataaattaacacctgagaagttcgataagctgtgccttgagcttctgaacgtgggcgtggagtcgaaacttatactaaaaggtgtgatcctgctcattgtagacaaggccctggaggagcctaagtattcttcactgtatgctcagctgtgccttagactggctgaagatgcaccaaatttcgacgggcccgccgcggagggacagccgggtcagaagcagagtactacattccgcaggctgctcattagcaaattacaagacgaattcgaaaacagaactaggaatgtggacgtgtacgacaagcgtgagaatcccttgctgccagaggaggaggaacagcgggccattgccaagatcaagatgctgggcaacataaaattcatcggcgagttaggcaaactagatctaatccacgaatcaatcctccacaaatgcatcaaaacgcttctagagaagaagaaacgagtgcagctgaaagacatgggtgaggacctagagtgcctgtgtcagatcatgagaacagtggggccgaggctggaccacgaaagggccaagtccttgatggaccaatactttgcacgaatgtgctag

SEQ ID NO: 116339 - DNA, 393 bp, synthetic construct
  misc_feature 1..393: note = Description of Artificial Sequence: Synthetic coding sequence
  source 1..393: mol_type = other DNA
gtggagagcgccatcgctgaaggcggcgcaagcagattttctgccagtagcggtggtggaggtagtcggggtgcaccgcagcattatccgaaaaccgccggcaattcagaattcctcggaaagacccctggtcaaaatgcccaaaagtggattcctgcccggtcaacacgccgcgacgacaattctgctgctaataattcagcaaacgagaaagaaagacatgacgccatctttagaaaagtccgcggcattctaaacaagctgactcccgagaagtttgataaactgtgtctggaactactgaatgtgggggtggagagcaaacttatcttaaagggagttatcctgttgattgtggataaggcacttgaagaaccgaagtacagcagttag

SEQ ID NO: 116340 - DNA, 1221 bp, synthetic construct
  misc_feature 1..1221: note = Description of Artificial Sequence: Synthetic coding sequence
  source 1..1221: mol_type = other DNA
atgtctgctagccaagattcgcggtcaagggataacggccctgatggcatggagccagaaggagtaatcgagtcaaactggaacgagatcgttgactcctttgatgacatgaatctgtctgagtcactgctgcgcggaatttatgcctatggttttgagaaacctagcgctatccagcagcgagccatcttaccttgtatcaaaggctacgacgtgattgcccaggctcaatccggcacagggaagacagcaacatttgcaatctccatcttgcagcaaatagagctcgacctaaaggcaacccaggctctggtgctcgccccaacacgagaattagcacagcagattcagaaggtcgtgatggccctgggcgactacatgggagcgtcctgtcatgcatgtattggggggaccaatgtgcgtgctgaagtgcagaagttacaaatggaagcaccccatataatcgtgggtacacctggaagagtgttcgacatgctcaatcggagatatctttcacccaaatatataaagatgttcgtgcttgacgaagctgatgagatgctgtcccgcggttttaaggatcagatctatgatatatttcaaaagcttaatagcaatacacaggtggtgctcctcagcgcaaccatgccgtccgacgtgcttgaggtgaccaaaaaattcatgcgagatccaattcggatcctggtgaagaaggaagagctcacactggaaggcatcaggcagttctacatcaatgtggagcgcgaggaatggaagttggataccctttgtgatctgtacgagacattaaccataacccaggcagtgatcttcatcaacacaagacggaaggtggattggctcacagagaagatgcatgcccgggactttacggtatccgctatgcacggggacatggaccagaaggaaagagatgttattatgagagagtttaggtctggatcctccagggtgctgattaccacagaccttcttgcccgggggattgacgttcagcaggtttcattggttataaactatgacctgcccactaaccgggaaaactacatccacagaatcggccgcggaggccgtttcggcagaaagggagtggccatcaacatggtgacagaagaggacaaacgcacattgagagatattgaaacattttataacactagtatcgaagaaatgcctctgaacgtcgcagatttgatctag

SEQ ID NO: 116341 - DNA, 441 bp, synthetic construct
  misc_feature 1..441: note = Description of Artificial Sequence: Synthetic coding sequence
  source 1..441: mol_type = other DNA
atggagcccgagggcgtgatagagtctaactggaacgaaatcgtggactccttcgatgatatgaacctgagcgagtcccttctccggggaatctacgcttatggatttgagaaaccttcagcaattcagcaacgcgctattctaccctgtatcaaggggtacgacgtgatcgcgcaagctcagagcggcaccggtaagaccgccactttcgccattagtatccttcagcagatcgaacttgatctgaaagccacccaggcactggtcctggcgcctactagggaactcgctcagcaggttagagtagctagcattccctcttttagagctgatctcggcatgatgtcgatcatacaggggccagaaaaaagctctctgattactactctgggcggacgacatggctgccctaacactctggagacctgctgggtgaactag

SEQ ID NO: 116342 - DNA, 603 bp, synthetic construct
  misc_feature 1..603: note = Description of Artificial Sequence: Synthetic coding sequence
  source 1..603: mol_type = other DNA
atgtttgtgctggacgaggctgacgaaatgctgtcacgtggatttaaagatcagatctacgatatctttcagaaactgaatagtaacacgcaagtggtgctgctttccgcaaccatgccctccgatgttctagaggtgactaagaaatttatgagagatcccattaggatccttgtcaaaaaagaggaacttaccctggagggaattcggcagttttatatcaatgtggagagagaggagtggaagctggataccctctgtgatctgtacgaaaccctgaccataacacaagccgtaatatttattaacactcgccggaaggtcgattggctgaccgagaagatgcatgctagggacttcactgtgtccgcgatggtgtgcctccctgccgcctcgcttctctgggtatgccccagtgaggtctcctacctgaagcccggtttcttagaaccaagatgcctccctgggctgctgcacatctgcttcctgttccagcatggggatatggatcaaaaggagcgggatgtgatcatgagagagttccggagcggttcctctagagtgcttataacaacggacctgctggtgtccagagggaactag

SEQ ID NO: 116343 - DNA, 1026 bp, synthetic construct
  misc_feature 1..1026: note = Description of Artificial Sequence: Synthetic coding sequence
  source 1..1026: mol_type = other DNA
atgtccgccagccaggattcacgatcccgagacaatggacccgatggcatggagccggaaggagtgattgaatctaactggaacgagattgtagatagcttcgatgacatgaacctgtcagaaagcctgctgcgtggcatatacgcttatgggtttgagaaacctagcgctatacaacagcgcgctattttgccctgcatcaagggttatgatgtgatcgcccaggcacaatctgggacaggaaagacagccacttttgcaatatccatactgcagcaaattgagctcgacctaaaggcaacccaggctttagtactagcccctacaagagagttagctcagcagattcagaaagtggtaatggccctgggggactacatgggagcatcgtgccatgcttgtatcggaggaacaaacgtgagggcagaagtgcaaaagctgcagatggaagcaccacatatcatcgtggggactcctggacgggtgttcgacatgctaaaccggcgttacctgtccccaaagtatattaagatgttcgtgcttgacgaggcggacgaaatgctcagtcggggcttcaaggaccaaatttatgatattttccagaagttgaatagcaacactcaggtcgttctgctcagtgcgacaatgccatctgacgtccttgaggtgactaagaagtttatgcgcgatccgatcaggattctggtcaaaaaggaagaactcacactggagggaatacgccagttttacatcaatgtggaacgagaggaatggaaactggacactctttgtgatctgtatgagaccctgaccatcacccaggctgtaatcttcataaatacgagaagaaaggtggactggcttactgaaaaaatgcatgctagagacttcaccgtcagtgcaatgcatggagatatggatcaaaaggagcgggatgtcatcatgcgtgagttccggtcagggtcctcccgagttttaatcacgacagatctgctgaacaggtcccgctggactgtgtggccatag

SEQ ID NO: 116344 - DNA, 1224 bp, synthetic construct
  misc_feature 1..1224: note = Description of Artificial Sequence: Synthetic coding sequence
  source 1..1224: mol_type = other DNA
atgtcaggaggtagcgccgactataatcgggaacatggcggaccagaggggatggaccccgacggtgtcatcgaatctaattggaatgagatcgttgataactttgatgatatgaaccttaaggagtcccttctgcgcggaatatatgcatacggatttgaaaagcctagtgctatccagcaaagagctatcatcccttgtatcaaaggctatgatgtgattgctcaggctcagagcggcacaggcaagaccgcaacgtttgctatcagcatcctgcagcagctggaaatagaattcaaagagacccaggccctggtgctggcgccaactcgagaactagcccagcaaatccagaaagtcattctggcactgggagactacatgggtgcaacgtgtcatgcctgcatcggaggcacgaacgttcgtaatgagatgcaaaagctgcaggccgaggccccacatattgttgtcggaaccccgggacgggttttcgatatgctcaaccgccgatatctgtcgccaaagtggattaagatgttcgttctggacgaggcagatgaaatgttgagcaggggctttaaagatcagatttacgaaatatttcagaaactgaacaccagcattcaggtggttcttctgtccgccactatgccgaccgatgtcctggaggttacgaaaaaatttatgcgtgatcctatacggatcctggtgaagaaggaagagttaacactggagggcattaagcagttttacattaatgttgagagggaagagtggaagctcgacaccctgtgtgatttgtacgagaccctgacaataactcaggctgtgatatttctaaataccagacggaaggttgattggttaaccgagaaaatgcacgcacgagattttactgtttccgcgcttcatggagacatggaccagaaggaaagagatgtaataatgcgcgagttccgctccggatcaagtagggtgctgatcaccaccgatctgctagccagaggcatcgatgtgcagcaagtaagccttgtgatcaactacgatctccctactaatagggaaaattacatacatcggattgggaggggaggcaggtttggtcgcaagggagtcgccataaatttcgtgacagaggaagataagcgcattttgagagacatcgaaactttctacaataccacagtggaagagatgcccatgaatgtagccgacttgatttag

SEQ ID NO: 116345 - DNA, 939 bp, synthetic construct
  misc_feature 1..939: note = Description of Artificial Sequence: Synthetic coding sequence
  source 1..939: mol_type = other DNA
atgctaactgtgctgcgcagtcttccattgttttcccgggaacttctgtttcctgtgcttaagatacagaaagtgattttggcgctgggggattacatgggggcgacctgtcacgcctgcattggcggcactaacgttaggaacgaaatgcagaaactgcaagcagaagccccgcacatcgtagtcggaacccccggacgagtgttcgatatgctaaaccggagatatctgtcccctaagtggattaaaatgttcgttctggatgaagctgatgagatgctctctagaggatttaaggatcaaatctacgaaattttccagaaactcaacaccagtatccaagttgtgttgctttccgccacaatgcccacagacgttcttgaagttacaaaaaagtttatgcgagatccaataagaattcttgtcaagaaagaggaactgactctcgaagggatcaagcagttttacattaatgtagaaagagaggagtggaagctcgacaccctttgtgatctgtatgaaaccctgacgatcacgcaggcagtcatctttttaaataccagacggaaagtggactggctgacagagaagatgcatgctcgcgatttcacggtgtccgcattgcatggcgacatggaccagaaggagcgggacgttattatgcgcgaattccggtccggcagctctcgggtgttaattactacagatctgctcgctaggggcatcgacgtgcagcaagtgtcactagtgatcaattatgatttgcccacgaatagagaaaattacatacaccgcattgggcgcgggggccggttcgggcggaagggtgtggctattaactttgtcaccgaggaggataaacgtattctgagggacatcgagaccttctacaacaccactgtggaggaaatgcctatgaacgttgcggacctaatttag

SEQ ID NO: 116346 - DNA, 1227 bp, synthetic construct
  misc_feature 1..1227: note = Description of Artificial Sequence: Synthetic coding sequence
  source 1..1227: mol_type = other DNA
atgagcggaggctcagccgattataacagccgtgagcacggaggcccggaagggatggaccccgatggggtgattgaatcaaactggaatgaaatcgtggataacttcgacgatatgaatttaaaagagtccctgctccggggcatttatgcatacggattcgagaaaccaagcgctatccaacaaagagccatcatcccttgcattaaagggtatgatgtgatcgcacaggcccagagtggaacgggcaaaacagcaacctttgctatcagcatcctccagcagctcgagatcgaatttaaggaaacacaagcactcgtgttagcgcccacgagggagcttgcacagcagatacagaaggtcatcctagcactcggggactatatgggggccacctgccacgcctgtattggcggcaccaatgtccgcaacgaaatgcagaagctgcaggctgaggctccacacattgtagtgggcaccccaggccgggtgtttgatatgcttaaccggcgatacctgtcaccaaagtggatcaaaatgtttgtgttggacgaggccgatgagatgctgagtcgcggtttcaaggatcaaatttacgaaattttccagaagcttaatacgtcaatccaggtggtcttactaagcgccacaatgcccactgacgtgttagaggtgactaagaaatttatgagagaccctattcgcatcctagtgaaaaaagaagaactcacactagaaggcatcaaacaattttatatcaacgtcgagcgcgaggagtggaagctggataccctctgcgacctgtacgagaccctgacaatcactcaagcagtgatctttttgaacacccggaggaaggtcgactggctgaccgaaaagatgcacgcacgagacttcacggtgagtgcgctccatggtgatatggaccaaaaagagcgtgatgtgattatgcgggaatttcggagcggctcatcacgcgtgctgattaccacggatcttctggctcgcggcattgacgttcaacaggttagcttagttataaattacgatttgcccacgaatagagagaattatatccaccggattggtaggggtggaaggttcgggcgcaagggggtggccatcaatttcgtaacggaggaggacaagagaattctcagagatatagagaccttctataataccaccgtcgaagagatgccaatgaacgtggctgatctaatctag

SEQ ID NO: 116347 - DNA, 174 bp, synthetic construct
  misc_feature 1..174: note = Description of Artificial Sequence: Synthetic coding sequence
  source 1..174: mol_type = other DNA
atgtctggagggtccgccgattacaatagggaacacggcggtcctgaaggcatggatcctgatggggtcattgagtccaattggaatgagatcgttgacaatttcgacgatatgaatcttaaggagagcctcctgcgggggatatatgcttacgggttcgagaagccttcttag

SEQ ID NO: 116348 - DNA, 297 bp, synthetic construct
  misc_feature 1..297: note = Description of Artificial Sequence: Synthetic coding sequence
  source 1..297: mol_type = other DNA
atgagcggcggaagtgctgactataatagagagcatggagggcctgagggaatggatcctgacggcgtcattgagagtaactggaatgaaattgttgacaacttcgatgacatgaatctgaaagaatctctgctgcgaggcatatacgcctatgggttcgagaaacccagcgcaatccagcagagggcaattatcccctgcattaaaggttacgacgtgatagctcaggcccaaagtgggacagggaagactgcgacattcgcaatctcaatcctgcaacagctggagattgagtag

SEQ ID NO: 116349 - DNA, 363 bp, synthetic construct
  misc_feature 1..363: note = Description of Artificial Sequence: Synthetic coding sequence
  source 1..363: mol_type = other DNA
atgagcagtagcgccggcagcgggcaccagccttcccagtcccgtgcgatccctacacgcactgtggcaatttctgatgccgctcagctgccccatgattattgcaccactcctgggggaacattattcagcacgacacctggaggcactcggataatctatgatcggaaatttctcctggataggcggaactctcccatggcacagacccctccctgccacctgccgaatatccccggggtcactagtcccggcactctgattgaggattctaaagtcgaagtgaacaacctgaacaatctgaacaaccatgatcgaaaacatgccgttggggacgacgcacagtttgaaatggatatttag

SEQ ID NO: 116350 - DNA, 738 bp, synthetic construct
  misc_feature 1..738: note = Description of Artificial Sequence: Synthetic coding sequence
  source 1..738: mol_type = other DNA
atgaataacaaatttgatgccctaaaagacgatgattccggcgatcacgaccaaaatgaggagaacagcacccagaaagatggtgagaaggagaaaacagagcgcgataaaaatcagagcagctctaagaggaaagcagtcgtccctggtcccgcggaacatcctctccaatataattacactttctggtatagccgccgtacacctggcagacccacctcaagccagagttacgagcagaacatcaaacagatcggaacgttcgcctctgtggagcagttttggcgattctacagtcatatggtccggccaggagacttaaccggacattctgactttcatctctttaaggagggcatcaaacccatgtgggaagatgatgcaaacaaaaatggagggaagtggatcataaggctccgcaaagggcttgctagccggtgttgggagaacctcatccttgctatgttaggggagcagtttatggtcggtgaggagatctgcggagctgtggtctcagtgaggttccaggaggatattatcagcatctggaataaaactgcgagcgatcaagctacaactgctcggattcgtgacacactccggcgagttctgaatctgcctcctaacaccatcatggagtacaaaacccacaccgactctatcaaaatgccaggaagattaggcccccaacggctactctttcaaaacttatggaaaccaagactgaatgtgccctag

SEQ ID NO: 116351 - DNA, 705 bp, synthetic construct
  misc_feature 1..705: note = Description of Artificial Sequence: Synthetic coding sequence
  source 1..705: mol_type = other DNA
atgaacaacaagttcgatgcgctgaaggacgatgattccggcgatcacgatcagaacgaggagaattctactcagaaggatggggagaaagagaagaccgaacgggacaagaaccagtcaagtagcaagaggaaggcagtggttcctgggccggcggaacatcctctgcagtacaattacactttctggtactccagaagaacaccaggtaggcccacatcctcacagtcttacgaacaaaacatcaaacagatcggcactttcgcgtctgtcgaacaattctggcgcttctactcccatatggtgcggccaggggacctgaccggccacagcgactttcacctttttaaggaggggataaaaccgatgtgggaagacgacgcaaacaagaatggcgggaagtggatcattaggcttagaaaagggctcgcttcccgctgctgggaaaacctgatcctcgccatgctgggggagcaatttatggtgggagaagaaatttgtggcgcagtcgtctctgtgagattccaagaggatattatctcaatctggaataaaacggccagcgatcaggctaccaccgcacgcatacgcgatactctccgtagagtcctgaatctgcccccgaacactatcatggaatataagacgcatactgatagtattaaggacaatagctctttccgcaatactaagatcactctttag

SEQ ID NO: 116352 - DNA, 567 bp, synthetic construct
  misc_feature 1..567: note = Description of Artificial Sequence: Synthetic coding sequence
  source 1..567: mol_type = other DNA
atgaataataagtttgacgctctcaaggatgacgactccggggatcacgatcagaacgaggaaaactcgacccagaaagacggcgagaaggagaaaactgagcgtgacaagaaccagagctctagcaagcgtaaagtggagcagttttggagattctacagccacatggtgagaccaggtgacttgaccgggcacagtgacttccacttattcaaggaaggaatcaaaccaatgtgggaggacgatgcaaacaaaaacggcgggaagtggataattaggctcaggaagggtctggcaagccggtgttgggagaatctgatcctggcaatgctgggcgagcaatttatggtcggggaggagatctgtggcgcagtagtgtccgtcaggttccaggaggacatcatttctatatggaataagactgccagtgatcaagcaacgacagcccggatcagggatacactacgtcgggtactaaatctgccaccaaacaccattatggagtataaaacacataccgacagcattaagtatgtgcttggggggtacggaagaacatgcccttag

SEQ ID NO: 116353 - DNA, 357 bp, synthetic construct
  misc_feature 1..357: note = Description of Artificial Sequence: Synthetic coding sequence
  source 1..357: mol_type = other DNA
atgaggggggagcgcaggcctctgtgggaagaagagagtaacgcaaaaggcggtgtctggaaaatgaaagtccccaaagatagcacatccaccgtctggaaagagctgctactcgcaacgatcggagagcagtttaccgattgtgcagcagcagacgacgaggtgatcggcgtgtcggtttccgttcgggatagggaggatgttgtgcaggtctggaacgtgaatgcctccctcgtaggggaagccacggtccttgagaaaatctacgagctcctaccacatatcaccttcaaagccgtgttctacaagccacacgaggagcaccatgctttcgagggcggaagaggaaaacactag

SEQ ID NO: 116354 - DNA, 357 bp, synthetic construct
  misc_feature 1..357: note = Description of Artificial Sequence: Synthetic coding sequence
  source 1..357: mol_type = other DNA
atgcgcggcgagcgccgcccactctgggaagaagaaagtaacgctaaggggggagtctggaagatgaaggtgcctaaagactccactagcaccgtgtggaaggagctcctactggctacaatcggtgaacagttcaccgactgcgcagcggccgacgatgaagtgattggggtaagcgtgtcagtccgcgacagggaggatgtcgtccaggtatggaacgtaaacgccagcttagtaggtgaagctacagtgctggagaaaatctatgaactcctgcctcatataaccttcaaggccgtgttctataaaccccacgaagaacaccacgcgttcgagggaggtagagggaaacactag

SEQ ID NO: 116355 - DNA, 357 bp, synthetic construct
  misc_feature 1..357: note = Description of Artificial Sequence: Synthetic coding sequence
  source 1..357: mol_type = other DNA
atgagaggagaacgccggcccctgtgggaggaggagagcaacgctaaggggggtgtgtggaagatgaaggtccccaaggacagtacgtcaacggtgtggaaagagttgttacttgctacaattggggaacaatttaccgattgcgccgcggcagacgacgaggtgatcggcgttagtgtgtccgtccgggaccgcgaagatgtcgtacaagtgtggaatgttaacgctagcctggtaggcgaggccaccgttcttgaaaagatttacgagctacttccgcacatcaccttcaaggcggtcttctataagccccatgaggagcatcatgcctttgaggggggacggggaaaacactag

SEQ ID NO: 116356 - DNA, 675 bp, synthetic construct
  misc_feature 1..675: note = Description of Artificial Sequence: Synthetic coding sequence
  source 1..675: mol_type = other DNA
atggcgctgcctccagcagctgcaccacctgcgggtgcacgcgaacctccgggctcacgcgccgccgccgcagctgcagctcccgagccacccctgggactgcagcagctttctgcccttcagcccgaaccggggggtgttcctttacattcttcttggacgttctggctcgatcggagtctgcctggggccaccgcagctgagtgcgcatccaacctcaaaaagatctacactgtacagaccgtacagattttttggtctgtgtataacaacataccacctgtaacctcattgcccctgcgatgttcatatcacctcatgcgtggtgaacgcagacccttatgggaagaggagtcaaacgccaagggaggagtttggaaaatgaaagtgcctaaggacagcacctctactgtctggaaggagctgctactggcgacgattggcgagcagttcaccgattgtgctgctgctgatgatgaggtcataggagtgtctgtctctgttcgtgacagggaggatgtggttcaggtatggaacgtcaatgcttccctggtgggagaggctactgtgctcgaaaaaatctacgaattattaccacacatcactttcaaggcagtattctacaagcctcatgaagagcatcacgcatttgagggcggacggggaaagcattag

SEQ ID NO: 116357 - DNA, 357 bp, synthetic construct
  misc_feature 1..357: note = Description of Artificial Sequence: Synthetic coding sequence
  source 1..357: mol_type = other DNA
atgcggggtgaaagacgccctctttgggaggaagagtctaatgcgaaaggcggagtatggaagatgaaggtcccaaaggatagtacgtccacagtgtggaaggaactgctgctagctactattggagaacaatttaccgattgtgccgccgccgacgacgaagtaattggagtgagtgtatctgttcgcgaccgggaggacgtggtgcaagtatggaacgttaacgcatccctggtgggggaggccactgtgctcgagaaaatctatgaacttttgccccatattacattcaaggccgtgttctacaagccgcatgaggagcaccacgctttcgaagggggtaggggaaaacactag

SEQ ID NO: 116358 - DNA, 135 bp, synthetic construct
  misc_feature 1..135: note = Description of Artificial Sequence: Synthetic coding sequence
  source 1..135: mol_type = other DNA
atgcgtggggagcgccgtcccctctgggaggaggagtcaaatgcgaaggggggtgtttggaagatgaaggtgcccaaggattctacaagtaccgtctggaaggaactcctactggctacgatcggggagcaatag

SEQ ID NO: 116359 - DNA, 156 bp, synthetic construct
  misc_feature 1..156: note = Description of Artificial Sequence: Synthetic coding sequence
  source 1..156: mol_type = other DNA
atgaggggggaacggaggccactttgggaagaggagagtaacgccaaaggcggagtatggaagatgaaagtgcccaaggattctacttctacagtgtggaaagaacttcttctggccacaatcggcgaacaatttaccgattgtgcggctgcgtag

SEQ ID NO: 116360 - DNA, 282 bp, synthetic construct
  misc_feature 1..282: note = Description of Artificial Sequence: Synthetic coding sequence
  source 1..282: mol_type = other DNA
atgcgaggcgagcgacggccgctctgggaggaggaatccaatgcaaaaggcggagtgtggaaaatgaaggtcccaaaggactccacatcaactgtgtggaaagaactgcttctggctactatcggtgagcagttcacagattgtgcagcagctgatgacgaggtgattggtgtcagcgtctcagtacgagatagagaggatgtggtgcaggtctggaatgtaaacgcgtctttagtgggtgaggccacggtgctggaaaagatttatgagctgctcccgtag

SEQ ID NO: 116361 - DNA, 2958 bp, synthetic construct
  misc_feature 1..2958: note = Description of Artificial Sequence: Synthetic coding sequence
  source 1..2958: mol_type = other DNA
atggataggcggagtatgggagagaccgaatccggcgacgcttttttggacctgaaaaagccccctgcctctaagtgtccacacaggtacaccaaagaagaactgttggacatcaaggaacttcctcactcaaagcagagaccttcctgcctgtcagaaaagtacgacagcgacggggtgtgggatccagaaaagtggcacgcatccctgtatccagcctcaggaaggagcagtcctgtggagtcactgaagaaggagcttgacaccgaccgtcccagcctggttagaagaatagttgatccacgcgagagagtgaaggaggatgacctggatgtggtgctcagccctcagcgccgctcttttggcggcgggtgtcacgtcaccgcagccgtgagctctagaaggtccgggtctcctttggagaaagactcggatggtcttcgtcttttgggcggtaggaggattgggtctgggcggattatttccgctcggacttttgagaaggatcaccggctaagcgacaaggacctccgcgatctccgagatcgggacagagagcgggatttcaaagataaacgattccggcgagaatttggtgactctaaacgcgttttcggtgagcggaggcgcaatgacagttacacggaagaagagcctgagtggttctcggcggggccaacctctcagtccgagacaatcgaattaaccggctttgacgataaaatactagaagaggaccataaggggaggaaaagaactaggagaagaaccgcatccgtgaaggagggtatcgtagaatgtaatggtggtgtggctgaggaggatgaggttgaggtgatactggcgcaggagccagctgctgaccaggaagtaccacgcgacgccgtcttgcccgaacagtctccaggcgacttcgattttaacgaattttttaacctggataaagttccatgcttagccagcatgattgaagatgttttgggtgaaggctccgtctctgcaagccggttctcgcggtggttctccaacccaagcagaagtggaagtaggagtagcagtctgggatcaaccccccacgaggagctagaaaggctggccgggctggagcaggcgatcctgtctcccgggcagaactctgggaattacttcgcccctatccctctcgaagaccacgctgagaacaaagtggatatccttgaaatgctgcaaaaagccaaggtggacctgaagcccctgcttagctcattgtccgcaaataaagaaaagctgaaggaaagttctcattccggtgtggtgctttccgtggaggaagtggaagccgggctcaagggtctgaaagtggaccaacaggttaagaactcaactccattcatggccgagcacctcgaagagaccctgagtgccgtaacaaataataggcagcttaagaaggacggggatatgactgcgtttaacaagttggtttccacaatgaaagcatcaggcactcttccaagccagccgaaggtctctcgaaacctggagtcacatctgatgagtcctgccgaaataccaggacagcctgtgcccaagaatattctgcaggagcttctgggccagcccgtgcagcgacctgccagctccaacctgctgtccggccttatgggttctttagagcccaccacatccctgctgggccagagagccccctctcccccactatcacaggtgttccagacccgcgccgcgtcagcggattacttgcgcccccgaattccatcacctattgggtttacaccaggtccacaacagcttttaggcgatccctttcagggcatgcgcaagcccatgtcaccaataacagctcaaatgtctcagctcgaactgcagcaagccgccctcgaagggctggccctgccccacgatctggctgttcaggccgccaacttctatcagcccggcttcggtaagcctcaagttgataggacgcgcgacggttttcgtaatagacagcagagggtcactaagtcaccggcccctgtgcatcgtggtaactcttcgtcccccgccccggcagcgtccattacctcaatgttatccccaagctttactcctaccagcgttatacggaagatgtacgagagtaaggagaaatctaaagaagagcccgcctcaggaaaagcggctctgggcgattcaaaagaagatactcagaaagcctccgaggagaatctgctttctagctcttcagtgccatccgcagatcgagactcctctcccacaactaatagtaaactgtccgcactacagcgctcatcttgcagcacacctttaagccaggccaaccggtacaccaaggagcaagattacagacctaaggccaccggccgcaagaccccaacactcgcctcacctgtgcccaccacaccatttctaaggcctgttcaccaggtgcctcttgtcccccatgttcccatggtgaggcccgcccaccaactgcaccctgggctcgtccaacgcatgctggcccagggggtccacccccaacatctgccttcactgctgcagaccggcgtgctaccaccggggatggatctctcacacttacagggaatttcaggcccgatccttgggcagcctttttaccctctgccagcggcgtctcacccactgttgaatcccaggcctggcaccccactgcatctcgctatggtgcagcaacagctgcagagatccgtcctgcaccctcctggctccggttctcacgctgcggccgtatccgtgcagaccacaccccaaaatgtgccttcccggagtggcctgccccatatgcactctcaattagaacaccgcccctcacagaggtcttcctctccggtgggactcgcgaagtggtttgggtcagacgtactgcagcagcctctgccgagcatgccagcgaaagttattagtgtggatgagcttgaataccgccagtag

SEQ ID NO: 116362 - DNA, 2436 bp, synthetic construct
  misc_feature 1..2436: note = Description of Artificial Sequence: Synthetic coding sequence
  source 1..2436: mol_type = other DNA
atggacaggcgtagtatgggggagacagaatcaggcgacgcatttcttgacttgaagaagcctccggccagtaagtgtccgcaccgctacaccaaggaagagttgctggacataaaggagcttcctcactcaaaacagcgtccttcctgcctctcagagaaatatgactccgatggagtatgggatccagaaaagtggcatgcctctctgtacccggcctccggtcgcagctccccagtcgaaagcctcaagaaggagctggatactgacagaccatctttggtgcggcgaattgtgggcatagtggaatgcaacggaggggtggccgaggaggatgaggtggaggttatcttggctcaggagcctgctgctgaccaggaggtgcctagagatgccgtccttccagagcagagcccaggtgacttcgacttcaatgagttcttcaacctcgacaaggtcccgtgcctcgcatctatgattgaagatgtgctgggtgaaggatcggtgtcagccagcagatttagccggtggttctccaacccctctagaagcggctctcgttcttcgtccttgggttccaccccccatgaagaattggagagactggctgggctggagcaggccatcttgtccccgggacagaactccggaaactattttgcccccatcccactggaggatcacgctgagaataaggtcgacatactcgagatgctgcaaaaagctaaggtcgacctgaaacctctcctctcctccctaagcgcaaataaagaaaagttgaaggaatctagccattccggagtagtgttatccgtggaagaagtcgaggctggtcttaaggggctcaaagtggaccagcaggtcaagaatagtacccccttcatggccgagcacttggaagagactttgtctgctgttacaaacaatcggcagcttaagaaagatggcgacatgaccgcgttcaacaagctcgtgagcacaatgaagagaaatttagagtcacacctgatgtcccccgccgaaatccctgggcaacctgtgccgaaaaacatcctgcaagaattgctaggtcagccggtccagcgaccagcctcatctaatctgctgagtgggctgatgggttccctggagccgacgacatcactgttgggccagcgcgccccaagtcctcctttgagccaggtgttccagacgcgcgctgcaagcgccgactatctaagacccagaataccctcgccaattggatttacacccggcccacagcagctgttaggcgaccccttccaaggaatgaggaaaccaatgtctccgatcacagctcagcagatgagtcagcttgaacttcagcaggctgcactcgagggcttagcacttccccacgacctggcggtccaggccgccaatttctatcagcccgggtttgggaagccccaggtcgaccgtactcgtgatggttttcgaaatcggcagcagcgcgttaccaaatccccagccccggtgcaccgaggtaacagcagttcacctgcccccgccgcgtcaattacctctatgctgtccccttcttttaccccaacttcagtgattcgtaaaatgtacgaatctaaagagaagagcaaggaagagcccgccagcgggaaggccgccctgggagatagcaaggaagatacacagaaagccagcgaagaaaacctgctgagcagctcttcagtgccttcagctgatagagactcgagcccaacgaccaacagcaaactgagcgccctccagcgcagcagctgcagcacccccctgtcccaagctaaccggtacactaaagaacaggattaccggccgaaggccactggtaggaagacaccaaccctagcgagccccgttcctaccacccctttcctccgacccgtacaccaagtgcccttagtccctcacgtgccaatggtacgaccagcacaccagctccatcccggactggttcaaagaatgctggctcagggcgtccatccacagcacctgccttcactgctacaaacgggggtgcttcctcccggaatggacctatcccaccttcaaggcatcagcgggcccattcttggtcagcccttttatcctctgccagcggcctctcatccgctcttaaacccgcgacccgggactcctttgcatttagctatggtgcagcaacagctacagcgatccgtcttgcacccccctggttccggatcgcacgccgccgcagtctctgtgcaaaccactccacagaatgtgccaagccgctccggtctcccccacatgcactcacagcttgagcacagaccttctcagcggagtagcagcccggtcgggctcgccaagtggttcgggtcagacgtgctccagcaacctctgccctctatgccggcaaaggtcatttcggtggacgagctcgagtataggcagtag

SEQ ID NO: 116363 - DNA, 1923 bp, synthetic construct
  misc_feature 1..1923: note = Description of Artificial Sequence: Synthetic coding sequence
  source 1..1923: mol_type = other DNA
atgatcgaggacgttctgggagagggctccgtgagcgcaagcagatttagtagatggttttcaaacccaagcagatcaggatcccgttcttccagcttaggaagcacaccacatgaagaattggaaagactggccggactggagcaggctatcttatctccagggcagaacagcggtaattatttcgcccccattcctctcgaagaccacgcagagaacaaggtagacattttggaaatgctccagaaggcaaaggtggatttgaagcccctgctcagctccctaagcgctaataaggaaaaactcaaagaaagctcacactctggcgtggttttatcagtcgaggaagtggaagccgggctaaaggggctgaaagtagatcagcaggtgaagaatagtactccattcatggctgaacatctagaggagacgctgtcagcagtgaccaacaatcggcagctgaaaaaagacggcgacatgacagcgttcaacaagctggtcagtaccatgaaagcctcaggaacactgcccagccagcctaaggtgtccgagctgctcggccagccagtgcagaggcctgccagctccaacttgctgtctgggctcatgggctctctggagcccactacttctcttctcggccagagagcccctagtccgcctttgagccaggtcttccagacaagggctgcttccgccgactatcttagacctcgtatcccttctcccatcgggttcacacctgggccacagcaactgctgggcgatccctttcagggaatgagaaagccaatgagcccgattaccgcccaaatgtcccagttggagttacagcaggcagccctggaggggctggccctacctcatgatcttgcagtgcaagcggccaacttctatcagcctggatttggaaagccccaagtcgacaggacccgcgacgggttcagaaaccggcagcagcgggtcactaaatctcctgctccagtacatagaggcaattcctctagccctgcgcccgctgcttccattacatctatgttatcaccgtcttttacacccacgtccgttataaggaaaatgtatgaatccaaggagaagagtaaagaagagcctgcatctggaaaggccgcactcggcgacagcaaggaggacacacagaaagcctccgaagagaatctcctgagctcttctagtgtaccgtccgctgacagggacagcagcccaacaacaaattcaaagctctccgcactccaacgtagctcttgctctactcctctgtctcaggcaaacagatacacgaaggagcaagattaccgccccaaggccactgggcgtaaaacaccgactctggcttcccctgtcccaactacgccctttctgcgtcctgtccatcaggtgcccctagtgcctcacgtccctatggtgcgccctgctcaccagcttcaccctggactggtgcaaaggatgctggcccagggggtgcacccgcagcacttaccctcactgctgcaaactggggtgctgcctccaggcatggacttgagccatctgcagggaatatcaggacctattctgggccagccgttctacccactcccagctgcatctcacccgctcctcaacccacggccaggcaccccgctacaccttgccatggtccaacagcagctgcaacggagcgtcctgcacccccccggttctggatcacacgcagccgctgtgtcagtacaaacaacaccccagaatgtgccgtcccgtagcggcctgcctcatatgcatagtcagctggagcacagacccagtcaacggtcatcttcccccgtggggttagcaaagtggtttggctctgacgtattgcagcaaccactaccatctatgcccgcaaaagtcataagtgtcgatgaactggagtataggcaatag

SEQ ID NO: 116364 - DNA, 192 bp, synthetic construct
  misc_feature 1..192: note = Description of Artificial Sequence: Synthetic coding sequence
  source 1..192: mol_type = other DNA
atggataggcgctcaatgggggagaccgagtcaggtgacgccttcttggatctaaaaaagccaccagcctctaagtgcccccatagatatactaaggaggagttgcttgatatcaaggagctgccccacagcaaacagcgcccctcctgtttgtctgaaaagtacgatagcgatggtgtgtgggacccctag

SEQ ID NO: 116365 - DNA, 192 bp, synthetic construct
  misc_feature 1..192: note = Description of Artificial Sequence: Synthetic coding sequence
  source 1..192: mol_type = other DNA
atggacaggaggtcaatgggagagactgagtctggcgatgcctttctggatcttaaaaaacctccggcctcaaaatgtcctcatcggtatactaaagaggagctgctggacatcaaggaactgccgcattccaagcagcggccctcctgcttgtcggagaaatacgattcagatggcgtgtgggacccctag

SEQ ID NO: 116366 - DNA, 2886 bp, synthetic construct
  misc_feature 1..2886: note = Description of Artificial Sequence: Synthetic coding sequence
  source 1..2886: mol_type = other DNA
atggataggagatcaatgggggaaaccgagtccggggacgccttcttggacctgaagaagcctcccgctagcaaatgcccccatcgctacacgaaagaggagctgctcgacataaaggaactcccacatagcaagcagcggccgtcttgtctgtctgaaaagtacgactctgacggtgtgtgggaccctgagaagtggcacgcatcactgtatccagccagtggtcgttcttctccagtcgaatccctgaaaaaagaactggacactgaccgcccttccttagtccgccgtattgtggacccacgcgaacgcgtgaaggaggacgatttagacgtagtgctgagtccccagcgacgctccttcgggggcgggtgccacgtgactgccgcagtcagttcaagacgcagtggttcaccattggagaaggactccgatgggctgaggttgctgggcgggaggcgaattggttccggacgcatcatcagcgcccggacttttgaaaaggaccatcggctctccgacaaggacctgcgagaccttagggatagggatcgggaacgcgactttaaagataagaggttccgtagggagtttggtgactcaaagagagtgttcggcgagcgtaggcgtaatgactcatacactgaggaggagccagaatggttttccgccggccccacgagccagtctgagacgattgaattaacaggcttcgatgataaaatcttggaggaagaccacaaaggtcgaaagcgcacccgcaggcgcaccgcctccgtgaaagaaggaatcgtcgagtgcaacgggggagttgccgaggaggatgaggtggaagtgatcctcgctcaggagcccgccgcagaccaggaggtccctcgcgatgccgtattgcccgaacagtcaccaggtgattttgatttcaatgagtttttcaacctggataaagtgccatgcctggcctctatgattgaagacgtgctgggggaaggctcagtcagtgcatcaagattctctcgttggtttagtaatccgtcccgttccggaagtcggagcagctctctgggatccaccccacacgaagagcttgagcggctggcaggcctggaacaggcaatcctgtcgcctggccagaatagcgggaactatttcgcaccgattcctctcgaggatcacgcagaaaacaaggttgacatcctggaaatgcttcaaaaagcaaaagtggatctcaaacccttgctcagtagtctttcagcaaacaaagagaaattaaaggagtcttcccacagtggcgttgtcctgtcagttgaagaggtggaggccggcctaaagggtctgaaagtggaccaacaagtaaaaaacagcactccctttatggcggagcacctcgaggagacactgagcgccgtgacgaataatcggcagcttaagaaggacggagacatgacagccttcaataagctggtatcaaccatgaaggcctctggaacattgcccagtcagcctaaggtttccgaacttttgggtcagcctgtccagcgcccggcgtcgagcaacctgctgtccggattgatgggctcactggagcccaccacatccctgttaggtcaaagggcaccctcacccccactctcccaggtgtttcaaacaagagctgcaagtgccgattacctcagacctcgcattccttcacctataggatttacgcctggcccccagcaactcctgggggatccattccagggaatgcgtaagcccatgtcaccaatcactgcacagatgtcacagctagagctacagcaggcagcactcgagggccttgcacttcctcacgacttagccgtgcaggcagcaaacttttaccagccaggttttggaaagcctcaggtcgataggacaagggatgggtttcgcaaccggcagcaaagggtcacaaagtccccagcgccagtgcaccggggcaactcaagttcaccagcacctgcggctagcataacgtctatgctgtcaccctcattcaccccaacctctgtgatcagaaagatgtacgaatccaaagaaaaatcaaaggaggaacccgcctctgggaaggcggcgctgggggattctaaggaggatacccaaaaggcctccgaagaaaacctcctctccagctcaagcgtcccaagcgccgatcgcgacagctctcctaccacaaactcgaaactgtccgccctgcagagaagctcttgttcaacccctctctctcaggccaaccgctatacaaaggaacaggactataggcccaaggcgactggaagaaaaactcccacactggcctcccccgtacccaccactccttttctgaggcccgtgcaccaggttcctctggtcccgcatgtgccaatggttcgccccgcacaccaattgcacccaggcctcgttcagagaatgctcgcccagggggtgcaccctcaacatctcccctcattgctccagactggcgtgctgccccctggaatggaccttagtcacctccagggaatcagtggaccaatactcggccagccattctacccattgcccgcagcttcccatccgctgttgaaccctcgccccggaaccccacttcacctggctatggtccagcagcagctgcaaagaagtgtgctccacccaccggggtcaggcagccatgctgcagctgtttcggtgcagaccacaccgcagaacgtcccatcccgcagcgggcttccgcacatgcactctcagctggaacacagacctagtcagagatcatcctccccagtgggactggctaagtggttcggttccgacgtcctgcagcagccgctgccgagcatgcctgccaaagtcataagcgtcgatgagctcgagtacagacagtag

SEQ ID NO: 116367 - DNA, 2958 bp, synthetic construct
  misc_feature 1..2958: note = Description of Artificial Sequence: Synthetic coding sequence
  source 1..2958: mol_type = other DNA
atggatcgaaggtcgatgggtgagacagaaagtggcgatgcctttctcgatctaaagaaacctcccgccagcaaatgccctcacagatacaccaaagaagaactcctggacattaaggaactccctcactcaaaacagcgccccagttgtctatccgaaaagtacgattctgacggagtttgggacccagagaagtggcatgcctcactttatcctgccagcgggcgctccagcccagtggaaagtctgaagaaagagttggacacggatcgaccaagcctcgtccgcaggattgtggatccgcgggaacgggttaaggaagacgacctggatgtcgtgttatcccctcagaggcggtcattcggcggggggtgtcacgtgaccgcagcagtaagctcaagacgaagcggaagtcctctggagaaggatagcgacggtctgcgcttgctgggcggaaggaggattgggagcggcaggattatctcagcgagaaccttcgagaaggatcaccgcctgagtgacaaggacttgcgcgacctgcgggacagggatcgcgaacgtgactttaaggacaagcggttccggagggagtttggtgacagtaaaagggtgtttggcgaacgaaggaggaatgactcctatacagaggaggagcccgagtggttcagcgccggccctacatcacagagcgagactatagagctgacgggcttcgatgacaagatcctggaagaagatcataagggacgcaagagaactcgacgtaggactgcaagtgtgaaagagggcatcgtggagtgcaatggaggcgtggcagaggaggatgaagttgaggtgattttggcccaagagcccgccgccgatcaagaggtccccagggacgctgtgcttcccgaacagtctcccggagactttgattttaacgaattcttcaacctggataaggtgccttgccttgcgtccatgattgaggacgtcttaggggagggctcagtgtccgcctcccggttcagccgctggttcagcaatccctcaaggtctggcagtcgcagctcttccctcggatcaaccccccacgaggagctcgagagactggccggcctggagcaggccatactgagtccaggccagaattctggcaattattttgcacctatccctctcgaggaccacgctgagaacaaggtcgatatacttgagatgcttcaaaaagcgaaggtggacctgaagcccctcctcagttcactttcggccaacaaggagaagcttaaagaatcctcccattcaggcgttgttctgtctgtggaggaggtggaggccggactgaagggcctaaaagtggaccagcaggtgaaaaattccacccctttcatggctgagcatttggaagaaacactctcggccgttacaaataacaggcagctcaagaaagatggcgatatgaccgcttttaacaagcttgtgagtacaatgaaggcctccggaactcttccctctcagccaaaggtaagcaggaacctggaatcccacttgatgtctcccgcagagatcccgggtcagcccgtgcctaaaaatattctgcaggaactcctcggccaacccgttcaacggcccgcctcttctaatctgctttctgggctaatgggcagtctggaaccaacaacaagcctgctggggcagcgagctccttccccgcccctgtcgcaagtcttccaaacccgagcagcatccgcagattacttgaggcctagaatccccagtcccattggttttacccccgggcctcagcagctactcggcgatccttttcaggggatgcgcaagcccatgagccctatcacagctcagatgtctcagctcgagctgcaacaagcagccttggagggactagctctgcctcacgatctcgcagtgcaggccgcaaatttctaccagccgggcttcggtaagcctcaagtcgaccggactagagatgggttccggaaccgacagcagcgagtgaccaaatctcccgccccagttcatcggggtaattcatcttcccctgcccctgccgcctccattacgtccatgctgagcccctcgttcacgcccacctccgtgattcggaaaatgtacgaatcaaaagagaagtccaaggaggaacccgcttctgggaaggctgcacttggtgattccaaggaggacactcagaaagcatctgaggaaaatctactgtcatcctcaagcgtcccgagtgcagaccgcgactcaagccctaccactaattccaaactatcagcactgcagcgcagcagctgcagcactccccttagtcaggcgaaccgttatacaaaggagcaggactatcgacccaaggctaccgggcgcaaaacacccacgttagccagccccgtgccgaccacccccttcttgcgaccagtgcatcaggtgcccttagttccccatgtgccaatggtacgccctgcacatcaactccaccccggtctcgtgcagcgcatgttggcgcaaggagtgcatccccagcatctgccttctctgctccagaccggcgtccttccacccgggatggacctctcacatttgcagggcataagcggaccgatactggggcagcctttttatcctttgccagccgcttcgcacccgctgctgaatccaagacctggtactcctctgcatcttgccatggtgcaacaacagttgcaacgaagcgttctgcaccccccgggtagtgggagtcatgcagccgccgtctcagtgcagaccactccacagaatgttccctctagatcggggctcccccacatgcactctcagttggagcatcggcccagccagagatcttcttctcccgtcggtttggccaagtggttcggatctgacgtcctccagcaacctcttccttccatgccagccaaggtgatttctgtggacgagctggaatacagacaatag

SEQ ID NO: 116368 - DNA, 1311 bp, synthetic construct
  misc_feature 1..1311: note = Description of Artificial Sequence: Synthetic coding sequence
  source 1..1311: mol_type = other DNA
atggatcgcaggagtatgggcgaaaccgagagcggcgacgccttcctggacttaaagaagccgcctgcttcaaagtgtccccaccggtatactaaagaagaattacttgatattaaggaactgccgcatagtaagcagcggccgtcatgtctttccgagaagtatgatagcgacggagtgtgggatcctgaaaagtggcatgcaagtctgtaccccgcttccggacggagctctcctgtggagagcctcaagaaggagctggacaccgatcggcccagccttgtgcggcgcatcgtggatccacgggagcgcgtaaaggaagatgacctagacgttgtactcagcccacagagaaggtcattcgggggtgggtgtcatgtcactgcagccgtgagctctcgtagatccggctctcccttggagaaggactccgatggcctgaggctcttgggcggacgtagaataggtagcgggaggataatcagcgccagaaccttcgagaaggatcaccgccttagtgacaaagatctgagggatcttcgggatcgggaccgcgaacgagactttaaagataagcgcttccgtagggagtttggcgattcgaaaagggtgttcggggagcgtaggcgaaacgatagttataccgaggaagaaccggagtggttttccgcaggccctacaagtcagagtgagaccatcgagttgacgggatttgatgataagattctggaagaggatcacaaggggaggaagcgtacccgtaggcgtacagcctcagttaaagaaggaatagttgagtgtaacggtggagtggccgaagaggacgaggtcgaggtcatccttgcccaggaacctgccgccgaccaggaagttccccgcgatgctgtgttgcctgagcagtcaccgggagacttcgatttcaatgagttttttaacctcgataaagtcccatgtttagcctcgatgattgaagatgttttgggcgaagggtccgtaagcgccagccggttttctcggtggttctcaaatcccagccggtctggctctcggagctcatctttggggagtacacctcacgaggaactggagaggctggctggcctggaacaggccatcctaagccctggccagaattctggaaactatttcgcacctatacctctggaggaccacgctgaaaacaaggtggacatcttagagatgcttcagaaagcaaaagtcgacctgaaacccctcctgtctagcctgtccgcaaacaaagagaaactgaaggagagcctgcgtctgagtccgaagaagaaaaaaaagtag

SEQ ID NO: 116369 - DNA, 567 bp, synthetic construct
  misc_feature 1..567: note = Description of Artificial Sequence: Synthetic coding sequence
  source 1..567: mol_type = other DNA
atggacagacggagtatgggcgaaactgagtcgggggatgctttccttgacttaaagaagccccccgcgtcaaaatgtcctcatcgatacaccaaagaggagctgttagatatcaaagagcttccccactcaaagcagcggccttcttgccttagcgagaagtatgacagtgatggggtatgggatcccgaaaaatggcatgctagtttgtatccagcatccggacggtcctctccggtggaaagcctgaagaaagaactggacacagatcgtcctagcctagtccggaggatcgtagatccacgagaacgcgttaaggaggatgacctcgatgtggtgttgtctccccagcggaggtcatttggcgggggatgtcacgttacagcggccgtatcgtcgagaaggagtggctccccacttgaaaaggattcagacggcctcagactactggggggcaggaggattgggtccggccggattatcagcgccagaactttcgagaaagatcacagattatcagataaggacctgcgggacctccgtgatcgagaccgggagcgggactag

SEQ ID NO: 116370 - DNA, 747 bp, synthetic construct
  misc_feature 1..747: note = Description of Artificial Sequence: Synthetic coding sequence
  source 1..747: mol_type = other DNA
atggctgattttgacacttacgatgatagggcgtactcctcattcgggggtggccgagggtcacggggatcagcaggcggccacggaagcaggtctcagaaggagctacctaccgagccaccttatactgcctacgtgggtaatcttcccttcaatacagtgcagggagatatcgatgctattttcaaggacctgtccattaggagtgttcgcctggttagggataaggacaccgataagtttaagggcttctgctatgtggagttcgatgaggttgattcactgaaggaggccctcacctacgacggtgctctcctcggcgaccggagtctacgcgttgacatcgccgagggcaggaagcaagacaaaggaggctttggctttcggaagggaggaccagatgaccggggaatggggagcagtcgggaatcccgcggcggatgggacagcagggacgacttcaactctggatttcgcgacgacttcctcgggggaagaggtggaagccgccctggtgaccgaaggactggacctcctatggggtcccgttttagggacggccctcccctgcgcggcagcaacatggactttcgcgaacctacggaggaggagcgcgcccaaagaccgcggttgcagctcaaacctagaaccgtagccacaccccttaatcaggtcgctaaccctaattctgccatcttcggaggcgctcgcccacgggaggaagtggtccagaaagaacaggaatag

SEQ ID NO: 116371 - DNA, 687 bp, synthetic construct
  misc_feature 1..687: note = Description of Artificial Sequence: Synthetic coding sequence
  source 1..687: mol_type = other DNA
atggctgacttcgacacatacgatgaccgagcatattctagtttcggggggggccggggttctcgtggatcggcgggcggccacggctcgcgcagtcagaaagagctaccaacagaacctccttatacagcctatgtggggaacctgccctttaataccgtccagggtgatatcgatgctatattcaaggacctgagtataaggtccgtgcggttagtgagggacaaagacactgacaaattcaaggggttttgctacgttgagtttgatgaggttgactccctgaaggaggcgctgacgtatgacggggccctactaggggataggtcactgcgggtggacatcgccgaggggaggaaacaggacaaaggaggttttggcttcagaaaagggggacccgacgaccgtgggtttcgagatgattttttgggggggcggggtgggtctaggcctggggacaggagaacagggccacctatgggaagtcgtttcagggacgggccccccctccgggggtccaacatggacttccgcgaacctaccgaggaggaaagagcccagcgaccccggctccagcttaaacctcggaccgtagctacacccctcaaccaggtggctaatccaaattccgctattttcggaggagcccggcctcgtgaggaggtggtgcagaaggaacaggagtag

SEQ ID NO: 116372 - DNA, 1050 bp, synthetic construct
  misc_feature 1..1050: note = Description of Artificial Sequence: Synthetic coding sequence
  source 1..1050: mol_type = other DNA
atggaggctcacaacgcatctgctccattcaactttactttgccgccaaactttggcaaacgaccaactgatctcgctcttagcgtgattcttgtgtttatgctcttcttcattatgcttagcctgggctgtaccatggagttcagcaagattaaggcgcacctgtggaaacccaaaggccttgcaattgctcttgtggcccagtacggaatcatgcctttgaccgctttcgtcttagggaaggtcttccgcttaaagaatatcgaggcattagccattctggtgtgcggttgcagcccaggcggtaacctttcgaacgtcttttcccttgcaatgaaaggcgacatgaatctgtccatcgtcatgacaacctgcagtacattctgtgccctggggatgatgccattacttttgtacatatacagtagggggatatacgatggggacctcaaggataaggtgccttataaaggtatagtcatttcacttgtgctggttctgattccatgtactatcggtatcgtgctgaagagcaagcgccctcagtatatgcgttatgtgatcaagggagggatgatcatcatactgctctgctccgtcgcagtcactgtgctgtctgccattaatgtcgggaagtccatcatgtttgccatgactcccctgctaattgccactagctcactcatgccattcatcgggttccttctgggatacgtactctcagcccttttctgcttgaacgggcggtgtagacgcactgtatccatggagacagggtgtcaaaacgtccagctgtgttctaccatcctgaatgtggctttcccaccagaggtaatagggcccttgtttttcttccctctactatatatgatatttcagcttggagaggggctattactcattgcaattttttggtgttacgaaaaattcaagacgcccaaggacaagactaagatgatctacactgcggctaccactgaagaaacaattcccggggctctgggaaatgggacttataaaggggaggattgctcgccatgcaccgcatag

SEQ ID NO: 116373 - DNA, 1296 bp, synthetic construct
  misc_feature 1..1296: note = Description of Artificial Sequence: Synthetic coding sequence
  source 1..1296: mol_type = other DNA
atgtctgtcaatgtgaaccgctccgtctccgaccaattctacagatacaaaatgcccagactaatcgccaaagttgaggggaagggcaatgggataaagactgtaatcgtgaatatggtggatgtggcgaaagccctcaatcgtccaccaacctacccgacaaagtacttcggttgtgagttgggtgctcagactcagttcgatgtgaaaaatgatcgatatattgtaaacgggtctcatgaagcaaataagctgcaggacatgttggacggatttatcaagaaatttgttctatgcccagaatgtgaaaatccagagactgacttgcacgtgaatcctaaaaagcaaaccatcggaaattcatgtaaagcttgtggctaccgtgggatgctcgatacccaccataagctgtgcaccttcatcctgaagaaccccccagagaactcggactccggcaccggcaagaaagaaaaggagaagaaaaatcgaaagggaaaagacaaggaaaacggtagtgtctcaagctctgagacaccccctccccctcctcctcctaacgaaatcaacccaccgcctcacactatggaagaggaagaagacgacgattggggcgaagacaccactgaggaggcccagagacgaaggatggacgagatctcagatcacgccaaagtgctcacactttccgacgacctcgagaggactattgaggaacgggtgaatatcctgttcgatttcgtcaagaaaaagaaggaggaaggtgtcatagacagtagcgacaaggaaattgtcgcagaagccgaaaggctggacgtcaaggccatgggaccccttgttctgaccgaggtgctcttcaacgagaaaattcgtgagcagattaaaaagtatcgacggcactttctacgcttctgccacaacaataaaaaggcacaaagatatctcctgcatggcctggagtgcgtagtggccatgcatcaggcccagctcatcagcaagatcccgcatattctgaaggaaatgtatgatgccgacttattggaagaggaggtgattatttcatggagcgagaaagcctccaaaaaatatgtgagcaaggagctcgctaaggaaattcgagtcaaagctgagcctttcatcaagtggctgaaggaggccgaagaggaaagctctgggggagaggaagaggacgaagatgaaaatatagaagtggtctactctaaggcagcttcagtgccaaaagtggagaccgtcaagtctgataacaaggacgacgacattgatatcgacgccatttag

SEQ ID NO: 116374 - DNA, 603 bp, synthetic construct
  misc_feature 1..603: note = Description of Artificial Sequence: Synthetic coding sequence
  source 1..603: mol_type = other DNA
atgtctgttaacgtgaataggtcagtcagtgatcaattttacaggtataagatgccacggctgatcgccaaggtcgaggggaaggggaacggaatcaagacagtgatagtgaacatggtggacgtggccaaagctctgaaccggccacctacctatccaacaaagtattttggctgcgagttaggagctcaaactcagttcgatgttaagaatgaccgatatatagtcaatggcagccatgaggccaacaagttgcaggacatgttggacggcttcattaagaaattcgtgctctgtcccgagtgtgagaaccccgaaacggaccttcatgtgaatcctaaaaagcagaccatcgggaattcttgcaaggcatgcgggtatagagggatgctggatacccaccacaagctgtgcacatttattctcaaaaacccgccggagaactcagattcaggtaccggtaaaaaggaaaaggagaagaaaaaccggaaaggaaaggacaaggaaaacggtagcgttagtagcagtgagaccccacccccgcctccaccccccaatgaaatcaatccccctccacacacgatggaggaggaggaggactag

SEQ ID NO: 116375 - DNA, 441 bp, synthetic construct
  misc_feature 1..441: note = Description of Artificial Sequence: Synthetic coding sequence
  source 1..441: mol_type = other DNA
atgagcgttaatgttaaccgcagcgtttctgaccagttctatcgatacaagatgcctcgcttaatcgcaaaagtcgaggggaagggcaacggaataaagaccgtaatcgttaacatggtggacgttgcgaaagcactgaatcgccctcccacataccccacaaagtacttcgggtgcgagcttggagcccagactcaattcgatgtaaagaacgataggtacattgtcaacggatcgcacgaagccaacaaacttcaggatatgctcgacggattcatcaagaagttcgtcctttgcccagaatgtgagaatccggagaccgaccttcatgtgaatcccaaaaagcagactatcgggaactcctgcaaagcctgtgggtatagaggcatgcttgatacacaccacaagctttgcacctttatccttaagaatccaccgtag

SEQ ID NO: 116376 - DNA, 1296 bp, synthetic construct
  misc_feature 1..1296: note = Description of Artificial Sequence: Synthetic coding sequence
  source 1..1296: mol_type = other DNA
atgtccgttaacgtgaacagaagtgtgagcgatcagttttaccgctacaagatgcctagacttattgccaaagtagaaggcaagggaaacggtattaaaaccgtcattgtcaacatggtggatgtggccaaggccctcaaccgccctcccacctacccaacgaagtacttcgggtgcgaattaggagcccagactcaatttgacgtgaaaaacgataggtatatcgtgaatggctcacacgaggccaataagctgcaggacatgctggacggcttcatcaaaaaattcgtgttgtgccctgaatgtgagaacccagagacagatctccacgttaatcctaagaagcagactattggaaactcctgcaaggcttgcgggtacaggggtatgctagacactcatcacaagctctgcactttcattttaaagaatcccccggagaacagtgacagcgggactgggaagaaggagaaggaaaagaagaaccgcaaaggcaaggacaaagagaatggatccgtgtcatcaagtgaaacacctccacctcccccccctccgaatgagattaacccacctccgcacacgatggaggaggaggaggatgatgactggggagaggacaccaccgaagaagcgcagaggagacgtatggacgaaatatcagaccacgcaaaagtcctcacgttgtcagacgacttggagcggaccatcgaggagcgggtgaatattttgttcgactttgtaaagaaaaaaaaggaagaaggcgtaatagattctagcgataaggaaatagtggccgaggcggagcgactagatgtgaaagccatggggccattagtcctaaccgaggtgcttttcaacgaaaagataagagagcaaatcaagaagtacaggaggcacttcctgagattctgccataacaacaagaaggctcagcgctatcttcttcacggattagagtgcgtggtggctatgcatcaagcccagttaatcagcaaaatccctcacatcctcaaggaaatgtatgacgcggacttactggaggaggaagtgattatcagctggtccgagaaagccagcaagaagtacgtttcgaaagagttggcaaaagaaataagggtaaaagctgaaccgtttattaagtggctgaaggaagccgaagaggagagcagcggtggagaagaggaagatgaggacgagaacattgaggttgtgtactccaaggcggcctctgtccctaaagtggagacggtgaagagtgacaacaaggatgatgacatcgacattgatgcaatttag

SEQ ID NO: 116377 - DNA, 210 bp, synthetic construct
  misc_feature 1..210: note = Description of Artificial Sequence: Synthetic coding sequence
  source 1..210: mol_type = other DNA
atgtcagtgaacgtgaacaggagtgtttcggatcaattttatagatacaaaatgcctcggctgatcgccaaggtggaggggaagggcaatggtataaagacagtgattgtgaatatggtggacgtggctaaagcactcaaccggcctccaacatatccaactaaatacttcggatgtgaactgggggcacagactcaattcgacgtttag

SEQ ID NO: 116378 - DNA, 330 bp, synthetic construct
  misc_feature 1..330: note = Description of Artificial Sequence: Synthetic coding sequence
  source 1..330: mol_type = other DNA
atgagcgtgaatgtaaatcgctccgtcagtgaccagttttacaggtataaaatgcccaggttgattgcaaaagttgagggcaagggtaacggcattaaaaccgtgattgtgaacatggtggacgtggcgaaagccctgaaccggcccccaacatatcctactaaatattttggttgtgagctcggcgcgcagacacagttcgacgtgaagaatgaccgatacatcgtgaacggcagccacgaagctaataaactccaggacatgctggacgggttcatcaagaagtttgtcctatgtccagagtgcgagaatccagaaaccgatctctag

SEQ ID NO: 116379 - DNA, 306 bp, synthetic construct
  misc_feature 1..306: note = Description of Artificial Sequence: Synthetic coding sequence
  source 1..306: mol_type = other DNA
atgagcgtgaatgtcaatcggtccgtgtcagaccagttctatagatataagatgcccaggttaattgccaaagtcgaagggaagggaaatggaattaagactgtaatcgtcaatatggtcgacgtcgccaaggcacttaacaggcctccaacgtatcctacaaaatactttggctgcgagctgggagcccaaacccaatttgacgtcaaaaacgaccggtatatcgtgaacggcagccacgaggcaaacaaactgcaggacatgctggacggctttatcaaaaaattcgtgctgtgccctgaatag

SEQ ID NO: 116380 - DNA, 156 bp, synthetic construct
  misc_feature 1..156: note = Description of Artificial Sequence: Synthetic coding sequence
  source 1..156: mol_type = other DNA
atgagcgtgaacgtcaaccgaagcgtcagcgaccagttctaccgatataaaatgcctaggctcatcgctaaagtcgagggaaagggtaacgggataaaaactgtgatcgtgaacatggtggacgtggccaaggcccttaaccgcccaccaacatag

SEQ ID NO: 116381 - DNA, 330 bp, synthetic construct
  misc_feature 1..330: note = Description of Artificial Sequence: Synthetic coding sequence
  source 1..330: mol_type = other DNA
atgtctgtgaacgtcaataggagcgtcagtgaccagttctatagatacaaaatgcccaggttgattgctaaggtggagggcaaagggaatgggatcaagaccgtcattgtcaacatggtcgatgtggcgaaggccctcaaccgacctcctacctatcccacaaagtacttcggttgcgagttgggcgcacagacgcagttcgacgtgaagaacgatagatacatcgtcaacggtagtcacgaagcgaataagttgcaggacatgcttgacgggttcattaaaaaattcgtcctttgccccgaatgtgagaatcccgagaccgatctgtag

SEQ ID NO: 116382 - DNA, 555 bp, synthetic construct
  misc_feature 1..555: note = Description of Artificial Sequence: Synthetic coding sequence
  source 1..555: mol_type = other DNA
atgtgtgggactggaggaacggacagtaagacgagacgccctccccacagagcttcttttctgaagaggctggagagcaaacccctgaaaatggcggatgatctggactttgagaccggagacgctggagcatccgctaccttccctatgcaatgtagcgccctgcgaaagaatggtttcgtggtgttgaaggggagaccatgcaaaattgttgagatgtctactagcaagaccgggaaacatgggcacgccaaggtgcacctcgtcgggatcgatatatttacagggaagaagtacgaggacatctgcccctcaactcacaatatggacgtgccgaatattaaacgtaatgattttcagcttattggaatccaagacggctacctctctcttttgcaggattctggagaggtaagagaggacttgcgactgcctgagggagatttagggaaagagattgagcaaaagtatgattgtggagaagagatcttaataaccgtactgagcgccatgaccgaggaggctgccgtcgccattaaagccatggctaagtag

SEQ ID NO: 116383 - DNA, 465 bp, synthetic construct
  misc_feature 1..465: note = Description of Artificial Sequence: Synthetic coding sequence
  source 1..465: mol_type = other DNA
atggctgatgacttggacttcgaaaccggggacgccggtgcgagtgcaactttccccatgcagtgttctgcacttagaaaaaacgggtttgtcgttctgaagggacggccttgtaagattgtcgagatgagcacgtcaaagacaggcaagcacgggcacgctaaggtccacctcgtggggatcgacatttttacgggaaagaagtacgaagatatttgtccttccacccacaacatggatgtcccaaacatcaaacggaacgatttccagcttatcggcattcaagatgggtacctgtcccttctgcaggattccggcgaagttcgtgaggatttgagactgcctgaaggcgatcttggcaaggaaatcgagcagaaatacgattgcggagaggagattttgatcaccgtactttccgcaatgacagaagaagccgctgttgcaatcaaggctatggccaagtag

SEQ ID NO: 116384 - DNA, 645 bp, synthetic construct
  misc_feature 1..645: note = Description of Artificial Sequence: Synthetic coding sequence
  source 1..645: mol_type = other DNA
atgacttggacgtcccggcaggaaatgcagggacctcagcctccttcccagtgctctgctcagcattacgtcaggatggctttatggtgttcaaaagccggccatgtccggtcatcacggtgcctcttgagacgattagccagtaccgccacaccacgcctggaattccatctgcgtatattgccctccccatgcctccagtacttatggaggtctcaacagcaggccgctaatagtgctgacttccccctcactctgctacttctatcagactgcttctgcctagccctgtccctccacacccactctgacaattatacgtgctcaccagtgtttagcctgttttgtggttatccttcggtgccagcctcgttctcggggagtccaagcgtgtcaccagccctgtgccagtccctgcagttcattggactctatgcgttggccatccagctattactcccctattcctggttctctctgtttttgtcgagtcttgagccgcttttgtcagggtgctttcatcatgttgcgcagggattctccaacagcactccctcccccggaggaacgcccgcttctatcctgtcatttcaggtgacactgctcctaagatcgcccgtcctggccttcccgctcgaactctag

SEQ ID NO: 116385 - DNA, 465 bp, synthetic construct
  misc_feature 1..465: note = Description of Artificial Sequence: Synthetic coding sequence
  source 1..465: mol_type = other DNA
atggcggacgatctcgatttcgaaacgggggatgccggggcctccgcgacattccccatgcagtgtagcgctctgcggaagaacggcttcgtggtcctcaaagggcggccctgtaaaatcgtggaaatgtcaacgtctaaaacggggaaacacggccacgccaaggtccacctcgtcggcatcgacatttttaccgggaaaaaatatgaagatatttgtccctcaacccacaatatggacgtgcctaatatcaagcggaatgactttcagttgattggaattcaggacgggtatctgagcctgctgcaagacagcggcgaagttcgggaagacctgagacttcccgaaggtgatttgggcaaagagattgagcagaaatatgattgcggtgaggagatactgatcaccgtgttgagcgctatgacggaggaggccgccgtagctattaaagccatggccaagtag

SEQ ID NO: 116386 - DNA, 465 bp, synthetic construct
  misc_feature 1..465: note = Description of Artificial Sequence: Synthetic coding sequence
  source 1..465: mol_type = other DNA
atggctgatgatctagacttcgaaacgggggacgccggtgcctctgccactttcccaatgcagtgttcagccctacgaaaaaacggctttgtagtactaaagggacgcccttgtaagatcgtcgagatgtccactagcaaaacaggaaagcatgggcacgcaaaagtgcacctggttggcatagacatcttcaccggcaaaaaatacgaggatatttgtccctccacacataacatggatgtccccaatatcaagagaaacgacttccaattgataggcatacaggatgggtacctttcattgctccaggactctggtgaggtcagagaagatttgaggctgcccgagggtgaccttggaaaagaaatagagcagaaatacgattgtggtgaggaaattcttattacagtgctgtccgctatgactgaggaggctgcagtggcaatcaaagctatggctaaatag

SEQ ID NO: 116387 - DNA, 462 bp, synthetic construct
  misc_feature 1..462: note = Description of Artificial Sequence: Synthetic coding sequence
  source 1..462: mol_type = other DNA
atggctgatgaaatcgattttacaaccggagatgccggcgcgtcatctacataccccatgcagtgttctgccctcaggaagaacggattcgtggtgctgaagggcagaccatgcaaaatcgttgagatgtccaccagtaagaccggcaagcacggacatgctaaagtccaccttgtgggaatcgatattttcaccggcaagaagtacgaagacatctgcccttcaacccacaacatggacgtgcccaacattaagcgaaacgactaccagcttatttgcattcaggacggctacctttcgctgctgaccgaaaccggcgaggttcgagaggacctaaagctgccagagggcgaactcgggaaagagatcgaaggcaagtacaacgccggggaggatgtccaagtgagtgtgatgtgcgccatgagcgaggagtatgccgtagcgattaaaccttgtaagtag

SEQ ID NO: 116388 - DNA, 738 bp, synthetic construct
  misc_feature 1..738: note = Description of Artificial Sequence: Synthetic coding sequence
  source 1..738: mol_type = other DNA
atggccgtcagagcatcatttgaaaataactgtgagatcgggtgcttcgccaagctcactaacacatactgcctggtggccataggggggagcgaaaatttttattctgtttttgagggagagctatccgatacaatccccgtcgtacacgcctcaatcgcagggtgtcgcattatcggacgcatgtgtgtgggcaataggcacggtcttctggtgcctaataacacaactgatcaggaactccagcatatccgaaactctctgcccgacactgttcagatcaggcgcgtcgaggaacggctgtccgccctcggcaatgtcaccacctgtaacgattacgtggccctggtccatcctgacctggatagagaaaccgaggagattctggcggatgtccttaaggtggaggtgtttagacagaccgttgccgatcaagtgcttgtcgggtcttactgtgtgttcagtaaccaaggtggactggtccacccaaaaacctcaattgaagatcaggacgagttatccagcctccttcaagtgcccctggtcgccgggaccgttaaccgcgggtccgaggttatcgctgctgggatggttgtcaatgattggtgcgcattttgcgggctggacacaacgagcacggagctctctgtggtggagagcgtgtttaaactgaatgaggctcagccatccaccatagcaacatctatgcgtgattccctgatcgattcactgacatag

SEQ ID NO: 116389 - DNA, 681 bp, synthetic construct
  misc_feature 1..681: note = Description of Artificial Sequence: Synthetic coding sequence
  source 1..681: mol_type = other DNA
atggcagtgcgtgcgagcttcgagaataactgcgaaataggatgcttcgcaaaattgaccaatacctattgtttggtggccattggtggttccgaaaatttttatcgctgtggcgggtcacctggcgcctatggcggcggagaagcctgtgcaggggtcaaatcaagcggttccgggcgcgtgcctgcacccctgccccgacatcatcgcgtacatgtaccgacggtctgcagtcgggcctcctcacccatcccaagcccttggtgcacccggctgagtcccgcagccgcctcttcgggcgcatgcgtttgggagacagaggaaattctagctgatgtacttaaggtcgaggtgttccggcagactgtggccgaccaggttttggttgggtcatactgcgtcttttcaaaccaaggaggtctcgttcacccaaagaccagtattgaagatcaggacgagctgtcgtccttattgcaagtcccactcgtcgcaggaacagtcaatagggggtctgaggtgatcgccgctggaatggtggtgaatgattggtgcgccttttgcggccttgacaccacctcgactgagctgtccgtggtggagtcagtcttcaagctcaatgaagctcagccctctacaatcgcaacctcgatgcgtgacagtctcatcgacagtctgacatag

SEQ ID NO: 116390 - DNA, 738 bp, synthetic construct
  misc_feature 1..738: note = Description of Artificial Sequence: Synthetic coding sequence
  source 1..738: mol_type = other DNA
atggccgttcgtgcttctttcgaaaataattgcgaaataggatgctttgcgaaactgacaaatacctactgtttggtagccatcgggggctcagagaatttttacagcgtgttcgagggagagctttcggacaccataccagtggtgcacgcaagcattgccggctgtcggattatcggccggatgtgtgtagggaacagacatggcctgctagtgcctaataacactaccgaccaggaactgcagcatatccgcaattcccttccggataccgttcaaatcaggagggtagaagagcggctgtcagcgctgggtaacgtcacgacgtgtaacgactacgtggcactggtacatccagaccttgacagggaaactgaggaaattctagcagatgttctgaaggtagaagtgttcaggcaaaccgtggccgaccaggtcctcgtcgggtcgtactgcgttttctctaaccagggaggtcttgtgcatcctaaaacctctatcgaggaccaagatgagctgtcaagtctgttacaagtccctctcgtggctggcaccgtgaacaggggcagcgaggtgattgccgcaggcatggtcgtgaacgactggtgcgctttttgtggcctggacactactagcacggagttgtccgtcgtggagagcgtttttaaactcaacgaagctcagcccagtactattgcgacatctatgcgcgattctttgattgatagccttacctag

SEQ ID NO: 116391 - DNA, 327 bp, synthetic construct
  misc_feature 1..327: note = Description of Artificial Sequence: Synthetic coding sequence
  source 1..327: mol_type = other DNA
atggccgtgcgcgccagcttcgagaacaactgcgaaattgggtgttttgcgaagctaactaatacctactgcctggtcgcaatcggcggaagcgaaaacttctatagcgtatttgaaggcgaacttagtgacactatcccggttgtgcatgcctctattgcaggttgtagaatcattgggcgtatgtgcgtggggaataggcacggtctgctggtcccaaacaacactaccgatcaggaacttcagcacattcgcaattcgctccccgacactgtgcagatcagacgcgtcgaggaaagactgagcgccctggggaacgttacatag

SEQ ID NO: 116392 - DNA, 1314 bp, synthetic construct
  misc_feature 1..1314: note = Description of Artificial Sequence: Synthetic coding sequence
  source 1..1314: mol_type = other DNA
atggccgacgatccgtctgctgctgacaggaacgtggaaatttggaagattaaaaagttgatcaagagcctcgaggccgctcggggaaacggaacatccatgatctctctgattattccacctaaagatcagatctctagggtggccaaaatgctagcagatgagtttggcacagcctccaatatcaaaagtcgcgtgaacagactttcggtgctgggggctatcacgagtgtgcagcagcggctgaagctgtacaacaaggtcccccccaatggtctggttgtgtactgtggcactattgtcacagaggaaggcaaggagaaaaaagtaaacattgattttgaacccttcaaaccgattaataccagcttatatttgtgcgacaataagtttcacaccgaggctcttaccgcactcctctccgacgatagcaaatttgggttcattgtgatcgacgggagtggagcactgttcggcacgctgcagggtaatacgagggaggtgctgcacaaatttactgtggacctgcccaagaagcatggcaggggaggccagtccgctctgagatttgccaggttgcgcatggaaaaaaggcataactacgtgagaaaggtggccgagactgcagtgcagctattcatttctggagacaaagtgaacgtggctggtctggttctggccgggagcgcggatttcaaaaccgaactgtcccagagcgatatgtttgatcagagactccagtccaaggtcctcaaacttgtggacatttcatatggaggcgaaaacgggtttaaccaagctattgagcttagcaccgaagtgctcagcaatgtcaaatttattcaggagaagaaactgatagggcggtattttgatgaaatctcccaggacaccggaaaatattgctttggtgttgaagataccctgaaagcattagaaatgggtgccgtggaaattctgatcgtgtacgaaaatctggacatcatgaggtacgtactgcactgccaggggactgaggaagaaaagatattatacctaacgcccgagcaagagaaggataagagccacttcaccgataaggagaccggtcaggaacatgagctcattgaatcgatgccgctgctagagtggttcgcaaacaattataagaagtttggcgccaccctggagattgtgacagataaaagtcaagaaggaagccaattcgttaaggggttcggcggcattggaggcatcctgcggtacagagtagacttccaggggatggagtaccagggtggggacgacgaattctttgatctcgatgattactag

SEQ ID NO: 116393 - DNA, 1215 bp, synthetic construct
  misc_feature 1..1215: note = Description of Artificial Sequence: Synthetic coding sequence
  source 1..1215: mol_type = other DNA
atgatctctctgattattccacccaaagaccagatctcacgagtcgcaaaaatgctcgcagatgaatttgggacagccagcaacattaagtctcgagttaaccgcctcagtgtcctgggggctatcacatctgtccagcaacgcctgaaactgtacaataaggtgcctcccaatggtctggttgtgtattgcggcacaattgtgaccgaggagggaaaagaaaaaaaggtgaatattgacttcgaacctttcaagccaattaatacatcattatatctttgtgacaataaattccacactgaagccttaaccgccctgctctccgatgacagtaagttcggtttcatcgtcatagacgggagcggcgccctgttcgggaccctgcagggcaatactcgggaggtcctacacaagttcaccgtggatttacctaagaagcacggaagaggcgggcagagtgccctgcgtttcgctaggttaaggatggaaaagcgccacaattatgtgcggaaggtggccgagacggcagttcagctttttattagcggcgacaaagtaaacgtggccgggctcgtgctcgccggaagtgccgatttcaagacagagctctctcaaagtgacatgttcgaccaacgcctacagtccaaggtgttgaaactcgttgatattagttatgggggggaaaacggattcaaccaggcaatagagttatcaacggaggtcctcagcaacgtgaaatttatccaggaaaagaaactgattgggagatatttcgacgaaattagccaggataccgggaaatactgcttcggcgtggaggatacgctgaaagccctcgagatgggggccgtggagatattgatagtttacgagaacctggacataatgcgttatgtgctgcattgtcagggaacggaggaagagaaaattctctaccttaccccagagcaggagaaggataagtcccacttcacggataaggagaccggccaggaacatgagttgattgaatcaatgcctctgttggaatggtttgcaaacaattataaaaaattcggagcaaccctcgaaatcgtgaccgacaagagccaggagggttctcagttcgtaaagggttttggaggaattggcgggatattacggtaccgtgtagacttccagggaatggagtatcaggggggcgatgacgaattcttcgacctggatgattactag

SEQ ID NO: 116394 - DNA, 1272 bp, synthetic construct
  misc_feature 1..1272: note = Description of Artificial Sequence: Synthetic coding sequence
  source 1..1272: mol_type = other DNA
atgaagcaagatgtgctgaattgtacagaaggccccattcattccaacggaacgtccatgatttccctgataatccctcccaaagaccagatttctcgagtggcaaagatgctggccgatgaatttggcaccgcctccaatattaagtctagggtcaaccgactctctgtcctaggtgccatcacttctgtccagcaacggttaaaattatacaataaggtgccacccaacggtttagtggtttactgtggaacaatagtcactgaagaaggaaaagagaagaaggtgaacatcgactttgaacccttcaagccaatcaatacatcattatatctatgcgacaataaattccatacagaggctctcacggcactgctcagcgacgacagtaagtttggcttcatagtgattgacgggtctggcgccttgtttggcacccttcagggtaacaccagagaagtgctccacaagtttaccgtggacctgccaaaaaaacatggccgtggcggccaatcagctctgcgattcgccagactcaggatggaaaagaggcataattacgtgaggaaagtggcagagaccgctgtgcagctgttcatctctggtgacaaggtgaatgtcgcaggtttagtactcgccggatccgcagactttaaaaccgaactgagccaatcagacatgttcgaccagaggcttcagtcgaaggtgcttaagctggttgatatttcttacggcggggaaaatgggttcaatcaggccatcgagctgagcacggaagtgctctctaacgttaagttcattcaagagaagaagctgatcggccgatattttgacgagattagccaggataccggaaagtactgtttcggggtggaggacactctgaaagcattggaaatgggagctgtggagatcctgattgtgtacgagaacctggacattatgcgatacgtgcttcactgccagggcactgaggaggagaagattttgtacttaacacccgagcaggagaaagataagagtcactttacagacaaggagactggacaggaacacgagttaatcgagagcatgcctctcttggaatggtttgccaataattacaaaaagtttggagctactctggaaatcgtcactgacaagagtcaggagggaagtcagtttgtaaaaggatttgggggcatagggggtattctgaggtaccgcgtggatttccaggggatggagtatcagggaggggatgacgagtttttcgacttggacgactactag

SEQ ID NO: 116395 - DNA, 1224 bp, synthetic construct
  misc_feature 1..1224: note = Description of Artificial Sequence: Synthetic coding sequence
  source 1..1224: mol_type = other DNA
atggagagtaggaaagatatggtggtattcctggatggtggccagctgggaaccctggtcggaaaaagagtgagtaacctctccgaggctgtcgggtcgcctctgccagagccacctgaaaagatggtgcctcgaggttgtttaagtccacgggccgtcccaccagctactagagagagaggaggtggcgggcccgaggaggaacctgttgacggacttgcagggtcagctgcaggcccgggtgctgaaccgcaggtggctggcgcagccatgcttggtcccggtcctccagctccttcggtcgactctctgtccggccagggccagccgagcagctcggatacagagtctgacttctacgaggaaatagaagtgagctgcacaccagactgcgcaactggcaacgctgagtaccagcactccaaagggagtggcagtgaagccctcgtggggagtcctaacgggggctctgaaaccccgaagagtaatggcggcagcggcgggggcgggtcacagggcaccctcgcctgctctgcctccgaccagatgaggcgctacaggaccgccttcacgagggagcagatcgcccgtttggaaaaggagttctaccgggagaattacgtaagccgtcctcgcagatgcgagttggccgccgcgctgaacctcccggaaacaaccattaaagtttggttccagaaccgaaggatgaaggacaagagacagcggctggccatgacatggccacaccctgcggatcccgccttctatacctatatgatgtctcatgccgctgctgccggcgggctgccttatcccttccctagtcatcttccactcccttactatagccctgtaggcctcggagcagcctccgccgcttccgcagccgcctcgcccttctcaggatccctgagaccactggacacctttagagtgttatcccagccctatcctcgccctgagctgctctgtgcttttcgccatccccccctgtatccggggcccgcccatggactcggggcttctgctggcggtccctgcagctgcctcgcctgccattcgggccccgcaaacggtctcgccccacgggccgctgccgcatccgacttcacatgcgcttctactagtcgctccgattcattcctgacctttgccccctccgttctatccaaggcttcgagcgtggcactcgaccagagagaggaggtccccctcacacggtag

SEQ ID NO: 116396 - DNA, 678 bp, synthetic construct
  misc_feature 1..678: note = Description of Artificial Sequence: Synthetic coding sequence
  source 1..678: mol_type = other DNA
atgcggcgctacaggacagccttcacgagggagcaaatcgcaagactcgaaaaggagttctatagggagaactatgtaagtagacctcggcgctgtgaactcgcggccgccctgaatctgccggagacaaccatcaaggtctggttccagaaccggcgcatgaaagataagcgtcagcggctggccatgacatggccgcaccctgcggaccccgccttctacacgtacatgatgagccatgcagcagcagctggcgggctgccttaccccttccctagccacctgcccctcccctactacagccccgtcggcctgggtgccgcgtccgccgcctctgccgccgctagccccttttctggaagcctacgccctcttgatacttttagggttcttagtcaaccttatcccagaccggagctcttatgtgctttccgtcatccacctttgtacccgggtcccgcccacggactcggagccagcgccggcggcccttgttcatgcctggcctgtcattcgggccctgcaaatggacttgctccacgggccgcagcagcttctgactttacctgtgcctctacatccagatccgactcattcctgacttttgctcctagcgtgctcagtaaagcaagctcagtagctctcgaccaacgcgaagaggttccacttactaggtag

SEQ ID NO: 116397 - DNA, 1431 bp, synthetic construct
  misc_feature 1..1431: note = Description of Artificial Sequence: Synthetic coding sequence
  source 1..1431: mol_type = other DNA
atgatggagagaatcagaaaagagatgattctgatggagagggggttacattcgcccacagccggtaagcgcttctccaatctttctaacagcgccggcaacgcagtcctggaagccctagagaatagccagcatcccgctaggctgtcacctcgacttcccagtgctcccctccattcagcactgggagaactcccagcaaaagggaaatttgaaatagataccctcttcaacttacagcacactggcagcgagtcaaccgtgtcctccgagattagctcggccgccgaatccagaaagaaaccaggtcactattcagaggctgctgccgaagccgatatgtccagcgacgtggaagtcggttgtagtgcgctccggtcacccggcggactgggagccgcgcagttaaaggagaataacggtaaaggctatgcagaaagtggctcagccgcaggtactaccacctcagcaagtgggtccggcctggggagtctgcacggcggaagtggagggtcgggtgggtctgccgccctaggcggtagcggaagcggtgcagatcaagtgaggcgatatcgcacggctttcacgagggaacagatagcccgcctcgaaaaagagttctatcgagaaaactatgtgagtcgtcctcggagatgcgagcttgccgcagcgctcaacttaccagaaacaaccatcaaggtatggtttcaaaaccgtagaatgaaagacaagcgccagaggctggctatgagttggccgcaccccgccgaccccagcttctacacatatatgatgactcatgcagccgctaccggaagtctgccataccccttccatagccacgtgcctctgcattactaccctcacgtgggcgtgaccgcagccgctgcggccgcagccgctagcggggcagccgccgcagcctcttccccctttgccacgagcatcaggcccctggatacatttcgagctctcagtcacccttattcaaggcccgaactgttgtgctctttccgtcatcccgggctttatcaggccccagcagctgccgcaggactcaacagcgcggcaagcgccgccgccgctgctgccgccgccgccgccgcagccagctcagccgcagctgccggggcccctccctccggagggtctgccccctgcagttgcctaagttgtcattcctctcagtctgctgccgccgcagcagctgcagccgcggccgcactcggatcacggggaggcggagggggcggaggtggtggcggaggagggggtgggggcggggctggagccggaggaggtagtgactttgggtgttcagcggcagcgcctagaagcgagtcaggctttcttccctacagcgccgccgttctatccaagacagccgtaagtccaccggaccaacgggatgaggcccctctgactcgatag

SEQ ID NO: 116398 - DNA, 2781 bp, synthetic construct
  misc_feature 1..2781: note = Description of Artificial Sequence: Synthetic coding sequence
  source 1..2781: mol_type = other DNA
atgtcacggaggaggaagcacgatgattcgcctagccccaaaaaaaccccacacaagactgtagcggctgaagaatgcgggtcagttgttgaacccggcaggagacgactgagatcagctaggggatcctggccatgtggcgcccgcgaaggcccacccggccccgtacggcagcgcgaacagccaccgacagcagcactctgctccaagagtaaccctgaagagagatacgagacccctaaaagggccctgaagatggactccctcagttctagcttcagcagcccgaatgaccccgatggccagaacgatattttttgggaccagaacagccccctaacaaaacagctcgggaaggggaggaagaagcagatctatactaccgacagtgatgagatcagtcacatagtgaaccgtatagccccacaggatgaaaagcccactaccaattccatgctggacatgtggattggagaaacggcgatcccctgtaccccctctgtcgccaagggtaaaagcagagctaagatttcttgcacaaaactgaaaacacaatcccaggaggaggaactcatgaaattggctaaacagttcgataagaacatggaagaactggatgtgatccaggagcagaacaagagaaactacgattttacccagatgatctccgagaccgaaatcttgagcaattataaggacaacatccagatgtggtctttgcacaacattgtgccagaaatcgataatgctacaaaaaagcccatcaagggaaacacaaagatatccgtggctaacaaccagaactcctcccagaaacccttcgatcagattgcggaggctgccttcaatgccatcttcgacggcagcacacagaagtgttcaggacagctgagccaggagctgcccgaagccttttggtctacgtctaatacgaccttcgtgaagacaaatgcattaaaagaggaaaagataattaccaatgaaactctggttatcgagaagctttctaataagactccgcgaagtctcagcagccaggtcgacactcccattatgaccaagtcatgcgttacttcttgtaccaaagaaccagagaccagcaacaagtatatagacgctttcaccacttctgatttcgaggacgattgggaaaatcttttaggctccgaaccattcgccatgcagaatatcgacatgccagagctattccctagcaagaccgcacacgtgaccgatcaaaaggagatctgtacttttaactctaagactgtgaagaatacctcaagggccaacacctctcctgacgctagactaggtgactctaaggttctgcaggatttatccagtaagacatacgacagggagctcatcgatgccgagtataggttttcaccgaactccaacaagtctaataagctgagcaccggcaacaagatgaagttcgaaaattcctctaataaaatcgtgatccaggatgagatacagaactgcatcgttacctctaatcttactaagatcaaagaggatatacttacgaacagtactgaggccagcgagcggaaaagcgccctcaatacacggtactccaacgagcagaagaacaagtgcatcctgaaccagagtatcaaggctccagtaaacactgacttgtttggcagcgctaacctgggttcgaaaacgtcggtgagcaatcccaaccagacctccgcatcaaaagtcgggtcattctttgacgattggaacgatccttcttttgccaatgagatcattaaagcctgccatcaactcgacaacacctgggaagccgacgatgtggacgacgatctgctgtatcaggcgtgtgacgacatcgagcgactcactcaacagcaggatatcaggaaagactcaaagacgtccgagtctatttgcgaaattaataacaactccgaacacggcgcgaagcttactcagcagcaggacatcaggaaagacagcaagacctctgagtctatttgtgaaatcaacaataatagcgagcacggagccaagaacatgttcgccatctccaagcagggcagtaacctggtgcagagcaaacacctcaatccaggaagcatttctgttcagacatccctgacaaatagctcccagatcgataaacccatgaagatggaaaagggcgagatgtacggcaacagtccacgcttcctaggtgctaccaatttgaccatgtactccaaaatctccaattgtcaaattaacaacctccacgtttcctacaccaacactgacgtaccaatccaagtgaactcctctaagttggtgctgcccggctcttctagtctaaatgtcaccagcgatcacatgaacactgagattacaacctacaaaaagaagctgagcaccaaccaaccctgtcataaaaccgtcacagatgaggctcagagcaatctgaacacgaccgtaggcttctcaaagttcacattcacccggatgaaaaactcacagattctgtcacagtttaatcagaattgtataacaggttccatgagcgacaccaaaatcacccagggtgtggaaaaaaagaagggtgtaaaccctctcctggaggaagctgttggtcagcaatcacttgtgaagctgtccgagagcctgaaacagtcctcaaaggaggaagaagagaagaacagaaagtgtagtccagaagaaatacaaaggaaaaggcaagaggctctggtccgaaggatggccaaggctagagcctctagtgtgaatgccgcaccgacttcctttctgtag

SEQ ID NO: 116399 - DNA, 2349 bp, synthetic construct
  misc_feature 1..2349: note = Description of Artificial Sequence: Synthetic coding sequence
  source 1..2349: mol_type = other DNA
atgggaaagcgcgacagggccgacagggataagaaaaaatcccgaaagcgtcactacgaggatgaagaggatgatgaggaagatgccccggggaacgatccccaagaagccgtcccttccgcagccggcaaacaggtggatgaaagcggcactaaagtggatgagtatggagccaaggactaccggctgcagatgccgcttaaggacgatcacacaagccgcccactgtgggtggccccagatgggcacatttttctagaggcattcagtccggtttacaaatacgcccaggacttccttgtggccatagccgagcctgtctgccgtcccacacacgtgcatgaatacaaactgacagcctatagtctgtatgctgccgtaagtgtgggccttcagaccagcgacatcacagagtatttacggaaactttcaaagacaggggtcccagacgggattatgcaatttattaagctgtgcaccgtgagttatggcaaggttaaactggtgctgaaacataatcggtattttgtggagagttgtcatccagatgtcatccaacatcttttacaggacccggtgattcgcgagtgtagattgcgtaatagcgagggggaggcaaccgagctgattaccgagaccttcacatccaaatcagcaatatctaagactgctgagtcctcgggtggtccttccacctctcgagtcaccgatccgcagggtaagtcagatatcccaatggacctctttgacttctacgaacagatggacaaagacgaggaagaagaggaggaaactcagaccgtctcttttgaggttaaacaagagatgattgaagagctgcagaagagatgtattcacctggaatatccactgctggccgagtacgacttccggaatgattcagtaaacccagatataaacatcgatttgaagcctaccgccgttctcagaccctatcaggaaaagagcctccggaagatgttcggcaacggacgggcccgcagtggggtcattgtgctgccatgcggagctggcaagagcctggttggcgtaaccgccgcctgcaccgtcagaaagcgctgcttggtgctgggcaattccgcagtcagtgttgagcagtggaaggcccaatttaagatgtggtcaaccattgacgactcccaaatttgcagatttacttctgatgcaaaggacaagccaatcggctgttccgtggcaatcagtacgtacagtatgttagggcacacaacaaagagaagctgggaggctgaacgagtgatggagtggcttaagacccaggagtggggcttgatgattctggacgaggtccatactatcccagccaagatgtttagaagggtgctgacgattgtgcaggctcattgcaagctgggactcacagctacattggtgagggaggatgataagatcgtcgacttaaactttctcataggtccaaaactgtatgaggccaactggatggaactgcagaacaacggttacatcgctaaagtgcagtgtgccgaggtgtggtgtccaatgagccctgaattttacagagaatatgtggccatcaagaccaaaaagaggattctgctgtacacaatgaatccgaataaatttagggcctgtcagtttctgatcaaattccatgagcggcgcaatgacaagataatagtgtttgctgataacgtctttgccctcaaggagtatgccatccgacttaacaaaccatatatctacgggcccacttcccagggggagcggatgcaaatcttgcagaacttcaagcataacccaaagatcaatacaatatttatttccaaggtgggagataccagcttcgatctcccggaggcaaatgtcctcattcagatttcctctcacggcggatcccgaagacaggaggcccaacggctgggacgggtgctccgtgccaagaagggtatggtcgcagaggaatacaacgcgttcttttacagtcttgtttcccaggacacccaggagatggcgtactcgacaaagcgccagcggttcctggtagaccaaggctatagtttcaaagtcatcacaaagctagctggcatggaggaggaggaccttgccttttccaccaaagaggagcagcagcagctgctgcaaaaggtcctagctgctacagatctcgacgccgaagaagaagtcgtggctggcgagttcggctcgcgaagctctcaggcatctcgacggttcgggaccatgagctccatgagtggcgcagacgataccgtgtacatggagtaccactcatctagatccaaagcacctagtaaacacgtccaccccttattcaagaggtttagaaaatag

SEQ ID NO: 116400 - DNA, 2157 bp, synthetic construct
  misc_feature 1..2157: note = Description of Artificial Sequence: Synthetic coding sequence
  source 1..2157: mol_type = other DNA
atgcccctgaaagatgatcacactagcaggcctctgtgggtcgcacccgatgggcatatttttttggaggccttcagtccggtgtacaagtatgcacaggattttttggtggctattgcggagcccgtctgccgccctacccatgttcacgagtataaactcaccgcttacagcctctacgcagccgtctccgtcggcttgcaaacatctgacattaccgagtacctgcgcaaactgagcaagaccggggtgccggacggtattatgcagtttataaaactgtgtacagtctcatatggtaaagtaaaactggtgctgaagcataaccgctatttcgtcgaatcgtgccaccccgacgtcatacaacacttgctgcaggacccagttataagggagtgccgcctgcggaatagcgaaggtgaagccacagagttgatcacagagaccttcacaagcaagtcagccatatctaagaccgctgaatcgtcggggggaccttctactagccgcgtgacagatccgcagggtaaaagtgacataccaatggatcttttcgacttttatgaacaaatggataaagacgaggaggaagaagaagaaactcagactgtttcgttcgaagttaaacaggaaatgattgaagaattgcagaagcgctgcattcacctggaatatcctctgctggcggagtatgacttcaggaacgacagcgtcaatccggatattaacattgacctgaagccaactgctgtacttagaccatatcaggagaaaagtctgagaaaaatgttcgggaatggccgcgcacgcagcggagtcattgttctgccctgtggagctggtaagtctctcgtgggtgtgactgctgcgtgcacagtgagaaagcggtgtttagtgctcggaaattccgctgtctccgttgagcagtggaaggcgcagttcaagatgtggagtacaatcgacgactcccagatttgccggttcacgagtgatgccaaagacaagcccatcggctgcagtgttgccataagcacatattcaatgctcggacacactaccaagcgaagctgggaagctgaacgggtgatggagtggctgaagacccaagaatggggcctaatgattctcgacgaagttcatacaatccctgccaaaatgttccgccgtgtgctcaccatcgtccaagcacactgtaaacttggcctgactgctaccttagtcagggaagacgataagattgtggatttaaactttctcattggaccaaagctgtacgaagctaattggatggagctacagaataacggctacattgccaaagtccagtgtgcggaggtgtggtgtcccatgtcgccggagttctatcgtgaatatgtcgcaattaagacaaaaaagagaattctgttatacacaatgaaccccaacaagtttagggcttgccaattcttgatcaaatttcatgagcgaagaaatgataaaatcattgtctttgctgacaatgtgtttgcattaaaggaatatgctatcaggcttaataaaccttacatttacggacccacatctcagggagagaggatgcagatcttgcaaaactttaagcataaccccaaaatcaatactatcttcatctcaaaggtgggcgacacatccttcgacctgcccgaggctaacgtgttgatccagatttcttcccatggcgggagcaggcgccaggaggcccagcgtctggggcgggtcctgcgcgctaagaaagggatggtggcggaggagtataacgcattcttctattctctggtgtcccaggatacacaggagatggcctattcaacaaagcgccagcggtttctagtggatcagggctattcctttaaggtgatcaccaagctcgcaggcatggaggaggaagaccttgccttttccactaaggaagaacagcagcagctcctccagaaggtgctcgccgcaaccgacctagacgctgaagaagaggtcgtggccggcgagttcggatcaagatcctcccaggcctccagaaggttcggcacaatgtctagcatgtccggggccgatgatactgtatatatggagtaccactcgagtcggagtaaggccccaagcaagcacgttcacccactgttcaaacggttccggaagtag

SEQ ID NO: 116401 - DNA, 3753 bp, synthetic construct
  misc_feature 1..3753: note = Description of Artificial Sequence: Synthetic coding sequence
  source 1..3753: mol_type = other DNA
atggaggcgagccgacggtttcctgaagccgaagccctaagtcctgaacaagctgcccactacctgcgttacgtgaaagaagccaaggaagccacgaagaatggagacctcgaggaagcattcaagctttttaaccttgcaaaagacatcttcccaaacgagaaggtgctgagcagaatccagaagattcaggaggcccttgaggagctggcagagcagggcgacgacgaattcacagatgtatgtaacagcgggctgcttttatacagggagcttcataaccaactgttcgagcaccagaaggaagggatcgctttcttgtactcactgtacagagacggccgtaagggcgggatcctggccgacgatatgggccttggaaagactgtccagataatcgcctttctatctggtatgttcgatgcatccctggtcaatcacgtgctgttgattatgcccactaatctgattaatacctgggtcaaggaatttatcaagtggacccccggcatgagagtgaagaccttccacgggccaagcaaggatgagcggacccgtaatttaaatagaatccaacagaggaacggcgtcataattaccacttaccagatgctgattaacaattggcagcaactatcttcattccgtggacaggagtttgtatgggactacgtgatcctggacgaggcgcacaagatcaaaacatcctccactaagagcgctatctgcgcacgggcaattcctgccagtaatcggctgctcctgactggcacgccgatccagaacaacctccaggagctatggtcgctgttcgactttgcgtgtcaagggtcacttttgggaaccttaaagactttcaagatggagtacgagaatcccatcaccagggcgagggaaaaagatgctaccccaggcgaaaaagccctgggtttcaagatttcagaaaacctcatggccataatcaaaccctatttccttcgcaggaccaaggaggatgtgcagaagaagaagagctctaacccagaggcccgcctgaacgaaaaaaatcccgatgtggacgctatctgtgaaatgcctagtttgagcagaaaaaatgacctcatcatttggatccggcttgtgccgctgcaggaggagatttaccggaaattcgtgagcctggaccatattaaggagttgcttatggaaacgaggtctccactggctgagctcggcgtgctgaaaaaattgtgcgatcacccgagactgctgtctgcgagggcatgctgtctgttgaatctcggaactttttcagcccaggacggcaacgagggagaggacagccccgatgtcgatcatatcgaccaagtcaccgatgacaccttaatggaggagtctggcaaaatgatattccttatggatttgctcaaacggctgagggacgagggccaccagactcttgttttttcacagagtagacagatcctgaacattattgaaagactgctgaagaatcgccacttcaagactctgcgcatagatggtacggttactcatctgctggaacgcgaaaagaggattaatttgtttcaacagaataaggactatagcgtgttcctcctgaccactcaggtaggaggtgtcggccttactcttactgctgccaccagagtggtgattttcgacccttcctggaaccccgcaactgatgcacaggcagtggaccgcgtgtataggatcggacagaaggaaaacgtcgtcgtgtacaggctcatcacttgcggaacagtcgaagagaagatttacaggcgccaggtgtttaaggactctctcattagacaaacaacgggggagaaaaagaacccattccggtacttcagcaagcaggaactgagagagctgttcaccatcgaggatctccagaatagcgtaacacagctccagctgcagagtctccatgccgcgcagcggaaatccgacattaagctggatgaacacatcgcctatctccagtccctcggaattgctgggattagtgaccacgacctgatgtacacgtgtgacttgagcgtcaaagaagaacttgacgtggttgaagaatctcactatatccagcagcgggtgcaaaaggctcaattcctggtcgaatttgagagccaaaacaaagagttcctgatggaacagcagcgaacacgcaacgaaggagcttggctccgcgaaccagtttttccctcctcgacaaaaaagaaatgccccaagctaaacaaacctcagccacagccaagtcccttattatcgactcaccatacacaagaggaggatatttccagcaagatggctagtgtggttatcgatgatttgccaaaggagggcgagaagcaggacctcagctctataaaggtgaacgtgacaacactgcaagatgggaagggtaccgggtctgccgactccattgccacacttcctaaaggatttggatccgtcgaggaactgtgcacaaattccagtttaggaatggagaagtccttcgctactaagaatgaggcagtgcaaaaggagaccctccaggaaggacctaagcaggaggcgctgcaggaagacccactggagtcattcaattatgtgctttcaaagtcaacgaaagccgacataggcccaaacttggaccagctcaaggacgacgagatcctgcgacactgtaacccctggccaattatcagcattacaaatgagtcccagaatgctgaaagtaatgtaagtatcatcgagattgcagacgacctgagcgcatcacactctgccctgcaggacgctcaggcctccgaagctaagctggaggaggagcctagtgctagttcaccccagtacgcgtgtgactttaatctgtttttggaggattccgcggacaatagacagaatttctcttcacaatctctcgagcacgtggaaaaggagaattccctttgcggcagcgcccctaattccagggcaggttttgtgcacagcaagacttgcttaagctgggagttttccgagaaggacgacgagcctgaagaggtggtggttaaagcgaagatccggtcaaaagcaagacgaatcgtgtcagatggcgaagatgaggacgattcgttcaaggacacaagctctattaatcctttcaacactagtctctttcagtttagcagcgttaagcagttcgatgctagtacccccaagaatgatatctcccctcccggaagattcttctctagccagattccaagctcagtgaacaaatcaatgaatagtcgtaggtccttagcttcccgtaggtcactgatcaatatggtgctggatcacgtagaagacatggaagagcgtctggatgacagttctgaagcaaagggcccagaagactatcccgaagagggggtggaagaaagcagcggggaagcgagcaagtataccgaagaggacccaagcggcgaaaccctgtcaagcgaaaacaagtcctcctggctgatgacctctaaacctagcgccctcgcccaggagacctccctcggcgcccccgagcccctgtccggagagcagctggtgggatctcctcaggataaagcagccgaagctactaatgactacgagacgctagttaaaaggggtaaagagctgaaagaatgtggcaagatccaggaagcactgaactgtcttgtcaaggctcttgatatcaagagtgccgatcctgaggtgatgctgctgactctaagcctgtataagcagctgaacaacaactag

SEQ ID NO: 116402 - DNA, 2685 bp, synthetic construct
  misc_feature 1..2685: note = Description of Artificial Sequence: Synthetic coding sequence
  source 1..2685: mol_type = other DNA
atgaccgcgattaaacacgccctgcaaagagatatctttacccccaacgatgagaggttgcttagtatagttaatgtctgcaaagcagggaagaaaaagaaaaattgtttcctctgcgctacagtgactactgagaggcccgtgcaggtgaaggttgtgaaggttaagaagagcgacaagggtgatttctataagcggcaaatagcatgggctctgagagatctggccgtggtggacgccaaggacgccattaaagaaaacccagagtttgacctgcatttcgagaaaatctacaaatgggtggcttcttccacagcagaaaaaaatgccttcatatcttgcatatggaaactaaatcagcgatatctgcggaagaagatagattttgtcaatgtctccagccagctcctagaagaatcagtaccttctggcgaaaaccaatctgtcacagggggcgacgaggaagtggtagatgagtaccaagaattgaacgcgcgggaggaacaggatattgagattatgatggagggatgcgaatatgccatctctaacgcagaagcttttgccgaaaagctgtctagagagctgcaggttctggatggcgcaaatatccagtccattatggccagtgagaagcaggttaacatccttatgaagctgctggatgaggccttgaaggaagtggaccagattgagctgaagctgagctcttacgaagaaatgctgcaaagcgtaaaggaacagatggaccagatctcagagtcgaaccacctgattcatctcagcaacacgaacaatgtcaagttactgagtgagattgagttcttagtgaatcatatggatctcgccaagggccatattaaggcactccaggaaggggacctggcatccagtcgcgggatcgaagcttgcacaaacgcagccgatgcgctgctgcagtgcatgaatgtcgcgcttcggcccggccacgatctgcttctggctgttaagcagcagcaacagagattcagcgacctgagggaactatttgctaggcgactggccagccatctgaataacgtcttcgtgcagcagggccacgaccaaagcagtacattggctcagcactcagttgagttgaccctccctaaccatcatccatttcaccgtgacctgttgagatatgctaagttgatggaatggctcaagagcaccgactacggcaaatatgagggattgaccaagaactatatggattacttgtctaggttatacgagcgcgaaattaaggatttctttgaggtggctaaaataaaaatgacaggaaccacgaaagagtctaagaaatttgctaccctgcctagaaaggagagtgcggtgaaacaagagacagaatcactgcatggctcatctggaaaactaactggaagcacctcgtccctaaataagctgagcgtgcagtcatccggaaatcggcgctcacaaagcagctccttacttgacatgggaaatatgagtgcgtctgacctggatgttgctgatcggacgaaatttgacaaaatcttcgagcaggtcctctctgagctggagcctctttgcctggctgaacaagattttatctctaagtttttcaagcttcagcagcaccagtccatgccgggaacgatggccgaggctgaggatctcgatggaggaaccctctcccggcaacacaattgcggtacgcccttgcctgtctcctccgagaaagatatgatccgacaaatgatgattaagatcttcagatgcattgaacccgaactgaataacctgatcgcgttgggtgacaaaatcgattcattcaactctctctatatgttagttaaaatgtcccatcacgtgtggaccgcccagaatgtggatcctgctagcttcctgtcaacaaccttgggtaatgtccttgtgacagttaaaaggaacttcgataaatgcattagtaaccagatcaggcagatggaagaggtaaagatttctaagaaatctaaagtggggatcctgccattcgtggcggagttcgaagagttcgccggtcttgccgagagcatttttaaaaacgccgagaggcgcggggacctggataaggcatatacaaagctcattcgcggtgtttttgtcaatgtcgaaaaggtggcaaatgaatcacagaagacaccccgtgacgtggttatgatggagaattttcatcacatcttcgccaccctgtctcgcctcaagatcagctgcctggaagcagagaaaaaggaggccaaacagaaatacacagatcacttgcagtcttatgtgatatatagcctgggccagccactagagaagcttaatcatttttttgaaggggttgaagccagggtggcgcagggtattagggaggaagaggtatcctatcaattggccttcaataaacaggagctgcggaaagtcattaaggaataccccggaaaggaagtgaagaaaggattggacaatttgtataaaaaggtcgacaaacacctgtgtgaggaggagaatctccttcaggtcgtgtggcatagcatgcaggacgaattcatccgccagtacaagcactttgagggcttgattgccaggtgctaccccgggagtggagtaaccatggaatttacgatccaggatatcctcgactactgcagctctattgcccaatcccactag

SEQ ID NO: 116403 - DNA, 2640 bp, synthetic construct
  misc_feature 1..2640: note = Description of Artificial Sequence: Synthetic coding sequence
  source 1..2640: mol_type = other DNA
atgacggccatcaagcatgctctacagagggacatctttactcccaacgacgaacgtctgcttagtatcgtcaacgtctgcaaagctggtaagaagaagaaaaactgttttctatgcgccactgttacgacggagcgcccggtgcaggtaaaggtagtgaaggtaaaaaagtctgataagggggatttttacaagcggcagatcgcttgggccctgagggatcttgcggtggtggatgcaaaggatgccattaaagagaatccagaattcgatctacacttcgagaagatctataagtgggtggcctcctctaccgccgagaagaacgctttcatctcctgcatctggaaactgaaccagcggtacttgcgcaaaaaaatcgattttgttaacgtgagctctcagttgctggaagagtctgtaccaagcggggagaaccagagcgtgacgggaggcgatgaagaggtggtggacgagtatcaagaattaaacgcacgagaggagcaggatatcgaaataatgatggaggggtgtgagtatgctatttcgaatgctgaagcctttgctgaaaaattgagtcgcgaactccaggtgctcgatggagcaaatatacagtccataatggccagcgagaagcaagtcaacattctgatgaagctgttggacgaagcactgaaggaggtggatcaaatcgaactgaagctgtcgtcctatgaagagatgctgcagtcggtcaaagagcagatggaccaaatatctgagagcaatcacttgatccacctatccaacaccaataacgtgaagctgctatcagaaattgaattcctcgtgaaccacatggacctcgccaaaggacacatcaaagcacttcaggaaggcgacctggccagcagccggggtatagaagcttgtaccaacgcagctgacgctcttctacagtgcatgaacgtggccttacgtcctgggcatgatctcctcctcgcagtaaagcagcaacagcagagattcagtgatttgcgcgaactctttgcaagacgcctggctagccatctgaacaatgtctttgtacagcaagggcatgatcagtcctccacgctggcccagcattctgtggagctgacactgcccaatcaccacccgttccacagggacttgctgaggtacgcaaagctgatggaatggttgaagagcactgattatgggaaatacgagggcctgactaagaactatatggattacctgagtagactgtacgaacgcgagattaaggatttcttcgaagtggctaaaattaagatgaccgggacgaccaaagagtccaagaaatttggtctgcacggcagttcaggcaagctcactggaagcacctcttcactgaataagctaagcgtccagtcatccggcaatcgacgctcacaatcaagttccctactggatatggggaacatgagcgcgtcagatttagatgtggctgatcggacaaagttcgacaaaatatttgagcaggtgctctcagaactagagcctctgtgcttagctgagcaagactttattagtaaattcttcaaattacaacaacaccaatccatgccagggactatggccgaggcagaagacctggatggaggcaccctcagtcgacagcataattgcgggactcccctgcccgtgtcctccgaaaaggatatgattagacagatgatgatcaaaatctttagatgcatcgaacctgagctgaacaatctcatcgctctcggggataaaatagatagtttcaattcattgtatatgctggtaaagatgagccatcacgtgtggaccgcacagaacgtggatcccgcatccttcttaagtaccactttagggaacgtcctggttacagtgaaaagaaactttgataagtgcatctcaaatcagatcagacagatggaggaagtgaagatatccaaaaaatcgaaggtaggcatccttcctttcgtagccgagttcgaggagtttgcaggactagcggaatcaatctttaagaatgcggaacggcgcggagacctcgataaggcatacaccaagttaatccgtggagttttcgtgaatgtggaaaaggtagcaaacgagtctcagaaaacacctagagatgtggttatgatggagaatttccaccatatcttcgctacgctgagccgcctcaagatttcttgtctggaagctgagaaaaaggaggctaagcagaaatacactgatcaccttcaatcatacgtgatatactcgttgggccagcctctggaaaagctcaaccatttttttgaaggcgtcgaggcaagagtggcccaggggatcagagaagaagaagtgtcctaccagctagcgtttaacaagcaggaactcaggaaagtgatcaaggagtatcccgggaaggaggtcaagaagggtttagacaatctctataagaaggttgataagcatttatgcgaagaagagaaccttttacaagtggtgtggcattccatgcaagacgaatttatccgtcagtataaacacttcgaaggcctaatagctaggtgctaccccggctccggagtcaccatggagttcaccatccaagatatcttagattattgcagctccattgcccagagtcactag

SEQ ID NO: 116404 - DNA, 2685 bp, synthetic construct
  misc_feature 1..2685: note = Description of Artificial Sequence: Synthetic coding sequence
  source 1..2685: mol_type = other DNA
atgactgcgattaaacatgccctgcagagggatatatttacgccgaatgatgagcggctattgtccattgtcaacgtatgtaaggcaggaaaaaagaagaagaactgtttcctctgcgccaccgtgactactgaaaggcccgtgcaggtcaaggtggtcaaggtcaagaaatccgataagggggacttctacaaaaggcagatcgcgtgggcgctcagagacttggccgtcgttgatgctaaggatgccattaaagagaacccagaatttgacctgcattttgagaagatatataagtgggtcgcgagttctaccgccgaaaagaacgccttcatatcatgtatttggaaactgaaccagcggtatctgcggaaaaagatagacttcgtgaatgtctcatcccagctgctagaagagagtgtcccaagtggcgagaaccagtcagtcaccggcggcgatgaggaggttgtcgatgagtatcaggagctcaatgccagagaagaacaggatattgaaatcatgatggagggctgtgagtacgctatcagtaatgcggaggctttcgccgagaagctgtcccgggagctgcaagtgctcgatggtgctaacatacaatctataatggcatctgaaaagcaggtcaacatactcatgaagttgcttgatgaagcccttaaggaggtggatcaaatcgaactaaaacttagctcctacgaggagatgctacagagcgttaaggaacagatggatcagatcagcgagagcaatcaccttattcatttgtccaacaccaacaatgtgaaactgctgtccgaaatcgagttcctcgtcaaccatatggacctcgcgaaaggtcatattaaagccttgcaggagggcgacctcgcctcatcccgggggattgaagcttgtactaacgcagctgatgcgctgctccagtgcatgaacgtagcactgcgacctggacatgaccttctgctggctgttaagcagcagcaacaaaggttcagcgatctgcgtgagctgttcgcaaggcgcctggctagccacctgaataatgtcttcgtacaacagggtcatgatcagagcagcacccttgcccagcactcagttgagttaacccttcccaatcatcatcccttccacagggacctcctgagatatgctaagctgatggaatggcttaagagcaccgactatggtaaatatgaaggcctcacaaagaactatatggattaccttagccgtttgtacgagcgcgaaatcaaagattttttcgaggtcgcaaagataaagatgactggtactactaaagagagtaagaagttcgccacactgccccggaaggagtccgcggtcaagcaggaaacagagtcccttcacggctcctccggaaaactaacagggtccacttcctcactgaacaaactgtcagtgcagtcctcagggaatcgccgcagtcagagctcatcactactggacatggggaatatgtctgcaagcgatctggacgtggccgataggactaagttcgacaagatcttcgagcaagtgcttagtgagctcgagcctttgtgcctggcggagcaggactttatctctaagttttttaagctgcaacagcatcagtcaatgcccggcacaatggccgaagcagaggatctggatgggggaactctgtcccgacaacataactgcgggacacctctgcccgtctcttccgaaaaggacatgatcaggcagatgatgattaagatcttcaggtgcatcgaacctgaactcaacaacctcattgcattaggcgataagattgactccttcaactccctctatatgctcgtgaagatgtcccaccatgtctggaccgctcaaaatgtcgatcctgcctcatttctgagcaccacgctcggtaatgtgctggtgactgtcaagagaaatttcgataagtgtataagcaatcaaattagacagatggaagaggtgaagatctccaagaagtccaaggtggggatactcccctttgtcgccgagttcgaggagttcgccggactggccgagtctatctttaaaaacgctgagaggcgcggcgatctggataaagcatatacaaaattgatacggggtgtttttgtgaatgtcgagaaggtcgccaatgaatcccagaaaacccctagggatgtggtgatgatggaaaatttccatcatatatttgccaccctgtcccgcctgaaaatatcttgtcttgaggctgaaaagaaggaggccaaacaaaagtacaccgaccatctgcaatcatacgtgatctactccctgggccagccactggagaagctgaatcacttctttgaaggcgtcgaggctcgggtggcccaaggtatcagggaagaagaagtgagttatcagctggccttcaacaagcaggaactcagaaaagttatcaaggagtaccccggcaaagaggtaaaaaaggggctagacaacttatataaaaaggtggataagcatctgtgtgaagaagagaacctccttcaggtggtctggcattctatgcaggacgaattcatacgccaatacaagcactttgaggggctgattgcaaggtgctacccaggatctggcgtgacaatggaatttacgatccaggacatcctggattattgtagtagcatcgcgcagagtcattag

SEQ ID NO: 116405 - DNA, 2238 bp, synthetic construct
  misc_feature 1..2238: note = Description of Artificial Sequence: Synthetic coding sequence
  source 1..2238: mol_type = other DNA
atgaaagagacggaccgtgaagctgtggcgaccgccgttcagagggttgccgggatgctgcagaggcccgaccagctggataaggtcgagcagtatcggaggagggaggcacgcaagaaagcgagtgtagaagccaggcttaaagctgccatacagagccagcttgacggtgtgcgcacaggcctgtcacagctgcacaacgccttaaatgacgttaaggacatacaacagtctttggctgacgtctctaaagattggcgtcagtctattaacacgatagaatcgctcaaggatgtgaaggatgcagtggtacagcactcccagcttgcagccgcagttgagaacttgaagaatattttttctgttcctgaaatcgtgagagagacccaggatctgatagaacagggggctctgttgcaggcccacaggaagcttatggaccttgagtgtagccgggacgggctcatgtatgaacagtatagaatggacagtggcaacacaagagatatgaccctcattcatggctactttggatcaacccagggactctctgacgaactggcaaagcagttgtggatggtcctgcagaggtcgctcgtaaccgtgcgacgggatccgaccctgctcgtgtctgtggtgaggatcatagaaagagaagagaagattgaccggcgcattctggatcggaagaaacagacagggttcgtccctccaggccgtccaaagaactggaaggagaagatgtttacaatcctggagaggaccgtaactacaagaattgagggcacacaggccgacacgcgggaaagcgataagatgtggctggtacgtcacctggagataattcggaagtacgtgctggacgatctcattgtggcaaagaatcttatggtgcaatgtttccccccacactacgaaatattcaagaacctacttaatatgtaccaccaggccctctctacgagaatgcaggatctcgcatctgaagacctcgaggcaaatgagatcgtcagcctgctgacttgggttcttaatacttatacgagtactgaaatgatgaggaacgtggagcttgccccggaggttgacgtgggaaccttggaacctcttctgagcccacatgtggtgagcgagctgctggacacttacatgtccacactgacctcgaatataattgcttggctgcgcaaggccctcgagacggataaaaaagattgggtgaaggagactgagccagaggctgatcaggatggttactaccagaccacccttcccgcaatagtgtttcaaatgttcgagcagaacctccaggtcgcagcacagatcagcgaagacctgaagacgaaggtcttagttctttgcctgcaacagatgaattctttcctgagccggtacaaggatgaagcccagctttataaagaggaacacctgagaaaccggcaacaccctcactgttacgtacagtacatgatcgctatcataaataattgccagacctttaaggaatctatcgttagcctgaaaaggaagtatttgaaaaatgaagtggaggagggggtgagccctagccaaccttccatggatgggattctggacgcaatcgccaaggagggctgttcggggctgcttgaggaggtgttcctggatctggagcaacatctgaatgaacttatgacaaagaagtggttgttagggtctaacgccgtagacattatttgtgtgaccgtggaagactatttcaacgacttcgccaaaattaagaagccgtacaagaaacgcatgaccgccgaagcccatcgaagagtggtggttgagtacttgagagctgtcatgcagaagaggattagcttccgctctcctgaagagcggaaagagggggcagagaaaatggttagagaggctgagcaacttcggtttcttttccgcaaactagcttctggcttcggagaggatgtggacggatactgtgatactattgtcgctgtggctgaagttattaagctcaccgatccttcccttctctatctcgaagtgtccacacttgtgagtaagtaccccgacatcagggatgaccatattggggcattgctggctgtaaggggggacgcttctcgcgatatgaagcaaacaatcatggaaacactggagcagggaccggcccaagcttccccatcttacgtgccgttgtttaaggacattgttgtcccgtccctgaacgtggccaagctgttgaaatag

SEQ ID NO: 116406 - DNA, 1923 bp, synthetic construct
  misc_feature 1..1923: note = Description of Artificial Sequence: Synthetic coding sequence
  source 1..1923: mol_type = other DNA
cagtgcgaagatagtacgtcattctttaccatgaaggagacagatcgtgaggccgtcgccacagccgtgcagagagtggctggaatgttgcaaagaccagatcagctggataaggtggagcaatatcgacgacgcgaggcccggaagaaggccagcgtggaggccaggctgaaggcagcgatccagtcgcagctggacggcgtgcggacaggtctctcccaactccacaatgctctgaatgacgtaaaagatatccagcagtcactcgctgacgtatccaaggactggcggcaaagcattaacacgatcgagtctttaaaggatgtgaaggacgccgtggtgcaacacagccagctcgccgccgccgtcgaaaacctgaagaacatcttcagcgttccggagatagtccgagaaacccaggacctgattgagcagggtgctttgctgcaggcacaccggaagctgatggacctggagtgttctagagatggactgatgtacgagcagtatcgtatggacagtggcaatacacgcgatatgaccctgatccacggatacttcgggagcacacaggggctgagcgatgaattggccaagcagctgtggatggtcctgcaaaggagcttggttacggtgcgccgagatccaaccctgctggtatcggttgtgcggattatagagagagaggagaagatcgaccgccgcattttggatcgcaagaagcagacgggcttcgtgcctcctgggcggccaaagaactggaaagaaaagatgttcactatactcgaacgcactgtgacaactcggatagagggaacacaggctgataccagggaaagtgacaaaatgtggctggtgcgtcacttggaaattatccgcaagtacgttctcgacgatctcatcgtcgctaaaaacttgatggtgcaatgctttcccccacattatgagatctttaaaaatctcctcaacatgtatcaccaggcactgtccaccaggatgcaagatctggcatccgaggatctggaagctaacgagatcgtgtctctgttgacttgggtcttgaacacatacacacgatataaagacgaagcgcagctttataaggaggagcatttacgcaacagacagcatccacattgctatgtgcaatacatgatcgcaatcattaacaattgccagacgtttaaggagagcatcgttagcctaaaaagaaagtatctcaagaatgaggtggaggagggagtaagccctagccagccatccatggacggtatcctcgatgcaatagccaaggaaggctgtagtggcctgttagaggaagtcttcttagacctcgagcaacatctgaacgagctgatgactaaaaaatggctgctgggctccaacgctgtcgatataatctgcgtcacggtggaggactatttcaacgactttgccaagattaagaagccatataaaaaacggatgaccgcagaggctcatcgaagggtagtggtcgaatacctcagggccgtgatgcaaaaaagaatatcattccggtcaccagaggaaagaaaagaaggagcggaaaaaatggttcgggaggctgagcagctccgcttcttgttcaggaagctagccagtgggttcggggaagacgtcgacggatattgtgacacaatcgtggctgtggcggaagtgattaagctcacagatccatcattactctatttggaggtcagtaccctcgtgtccaaatatccggatatccgtgatgatcatatcggagcactcttggctgtgaggggtgatgcctcaagggacatgaaacagaccatcatggaaaccctggagcagggcccagcccaggctagccctagttacgtgccgctgttcaaagatatcgtcgttccatcattgaatgtggccaaactgctgaaatag

SEQ ID NO: 116407 - DNA, 210 bp, synthetic construct
  misc_feature 1..210: note = Description of Artificial Sequence: Synthetic coding sequence
  source 1..210: mol_type = other DNA
atgaaggagactgatagagaggccgttgccaccgccgtccagagggtagcaggcatgctgcagaggccagaccagctggataaagtcgagcagtatagacgccgcgaagcacgcaaaaaagcatccgtagaagcacggttgaaagcggctattcaaagtcagttagacggagttcggaccgggctaagccaactacataatgccctgtag

SEQ ID NO: 116408 - DNA, 2238 bp, synthetic construct
  misc_feature 1..2238: note = Description of Artificial Sequence: Synthetic coding sequence
  source 1..2238: mol_type = other DNA
atgaaagagactgatagagaagccgtcgcaaccgctgtccagagggtggccgggatgttacaaagaccagatcagctggataaggtggagcagtatcggagaagagaggcacggaagaaggcaagtgtcgaggcacgcctgaaggccgccatccagagccagctcgatggcgtgcgcaccggcctctctcagctccacaacgccctgaatgatgtcaaggacattcaacaatcgttggcagatgtatcaaaggattggagacaatccattaatactatagaatcactgaaggacgttaaggatgccgtcgtgcaacacagtcaactcgccgccgccgttgagaatctcaagaatatattctctgtccctgaaatcgtccgggagactcaggatctaatcgagcagggggcgctgcttcaggcacaccgaaagcttatggatctggaatgttcacgggacgggctcatgtacgagcagtataggatggactctggcaatacccgcgatatgacgttgattcacgggtatttcgggtcaacacaaggtctcagtgacgaactggctaaacagctgtggatggtgctccagcgatccttagtgaccgttcgccgggatccgaccctgcttgtgagcgtcgtccgcatcatcgaaagagaggagaaaattgaccggcggattttagatagaaaaaagcagaccggatttgtgcctcccggccgtcccaaaaactggaaggagaagatgttcaccattttggaaagaaccgtgacgacccgtatcgaggggacccaggctgataccagggaaagtgataaaatgtggctggtgcgtcacctggaaataattcgcaagtacgtgttagatgaccttatcgtggctaagaatcttatggtgcagtgcttcccccctcactacgagattttcaaaaacctcttgaacatgtatcaccaagctctgtcaacccgaatgcaggacctggctagcgaggatctggaagccaacgaaattgtcagcctcctgacttgggtgctgaacacctacacatctacagaaatgatgcgcaacgtagagcttgctcccgaggtcgacgtggggaccttagagcccttgctgtctccccatgtggtcagcgagctgctggatacctacatgagcactctgacatcaaacattatcgcctggctgcggaaggcccttgaaacagacaaaaaagattgggtgaaggagaccgagcccgaagctgaccaggatggctattaccagacaacactgccagctatcgtcttccaaatgttcgaacagaaccttcaagtagcagcacagattagtgaggatcttaagacaaaggttctcgtcctatgcctgcaacagatgaattcattcctgagtagatacaaagacgaggcacagctgtataaggaggagcacctcagaaaccgccagcatcctcattgctacgtgcaatatatgattgctatcatcaacaattgccaaacctttaaggagtctattgttagcctgaagaggaagtacctcaagaatgaagtggaggagggagtttctccatcccagccctcaatggatggaatattagacgccattgccaaggaggggtgctcaggcctacttgaggaagtgttcctggatctggaacagcaccttaacgagctgatgactaaaaagtggctcttaggtagtaatgccgttgacattatttgtgtgaccgtggaagattacttcaacgactttgcaaaaatcaagaaaccttataaaaaacgtatgaccgccgaagcccatagacgtgtcgtcgtggaatacctcagggcagtgatgcagaagcggatatccttccgctccccggaagaacgcaaagaaggcgccgagaagatggtgcgggaagccgaacagctgaggttcctcttccgcaagcttgccagcggcttcggtgaagacgtggatggttattgcgatactattgtagccgtggccgaggtaattaaactgacagacccatccttgctatacctggaagtctcaacactggttagcaaatatccagatattagagacgaccatattggcgcactgctggctgttcggggagacgcttcccgagacatgaagcagacgatcatggaaacactcgagcagggtcctgctcaggcttctccctcctatgttccgcttttcaaggacattgtggttccctctttaaatgtggccaaactgttaaagtag

SEQ ID NO: 116409 - DNA, 2034 bp, synthetic construct
  misc_feature 1..2034: note = Description of Artificial Sequence: Synthetic coding sequence
  source 1..2034: mol_type = other DNA
atggacagcgccgccaaggatgagatgcagccagcactaagccccggctctagttttcctggaccggagtggcccgaacaggaaagagcagaacaactggcccgaggggccgccttgaaatgggcctcagggatattttataggccagaacagctcgccagactggggcagtacagaagccgggaagtgcagcgcacctgttccctcgaatcacgcctaaagtcggtgatgcagtcatatttggagggggttcagaccgtgcctgcggccgtaagccatacccagactttaatagacggccagcaatttctcgaggcatacgtgtctttaagagaactggagcagctacgggaggatacgtgggctcctcttgggggtctggagcttcccgtgttccagggactcgacttactgtttgaagctctgggacaggcggttgaggctgccgccggggcagcaggtaaacttgccagagaagacccggcattgctagtcgcagctgtgcgcgtcgccgaagtcgagaccgggagaacaacacctcttggccaggtgcctagggattggcggcagcgctgtttgagggcactgcaggaaggacttgaacaggcccactttggttcccctctcttacctgctccaggagccttaccgggctggctcgaggctctgcgcgtagctctcccagtggaacttgccacagccgaagccctggtggccccttgctgtcccccgcagtacaacgtggttcagctatgggcccacaccctgcatagtggtcttaggcggtccctgcagaatttgctggctggccccgagctcgaggctgctgacgcgttcgctctcctgcactgggctctccacgtttacctgggccaggagatgatgggctccctggagctgggcccggaagccgacgtgagtcagctggagccactcctgaccctggagaatattgaacagttagaggccacttttgtcgcaaacatccagatcctggaggagaacatccgggtcgctagcctggtctctgagagccttcaacagcgggtccacggcatggctctctctgagcttggaaccttcctaagaagctttagcgatgcgctgatccgcttcagtcgtgatcacttcagagggaagagcatggcgcctcattacgtgccctacctactggcggccctgaatcacaaaagcgccctttcaagcagtgtgtcagtcctgcagttagacggagctccaagcggggccctggctcctgtggaagctgcgctagatgaactgcagcgcagaatctacaggctcgtcctggaagccctacaggctgagttacagcccctcttcgccgatcttccctcccgtcagtggttgagtagccctgaactgctgcagtcagtgtgcgaacgcacgggaagattttgtcgtgatttctggagagttaggaaccctaccgtgcagctacttctcgccgaggccgagcgggccgtggttctacagtacctgagcgctctcatgcaaggacgcttggtgtgccgcggggccgacgagcgcactcaggctgcagagcgattgcggcatgacgctgctcagcttcagcaactcttcctgagtctggtaagggccagttgggccggtcgccgcgcccgagtgtccgtcgcaggctgggagaggggcctcgcccgcgacccaacgcccacatgttccggtcctgggggagaacgggccctgagggcaggggcggcgcggcctgaaggtgctgccaagcctccccggccacgcgccgctggcccgggaggcggctggcccgccgccaccatttcaaggagggagcgcggtccgaggctacggcccctgggtcccgcacgggggctggtgccgggcgccgcacccgggagggcccagttgccagctggatgcgcggccgccgttgctccgcgggaaccccctaggcccctgcagccttccgcaagggcaagagctccggcgagttgtcttcctagtgggtcctgcgcacgggccctcctgttggccgagtag

SEQ ID NO: 116410 - DNA, 2241 bp, synthetic construct
  misc_feature 1..2241: note = Description of Artificial Sequence: Synthetic coding sequence
  source 1..2241: mol_type = other DNA
atggattccgccgcgaaagatgagatgcagccagccctgagcccgggccccgagtggcctgaacaggaacgcgctgagcaattagccaggggagccgcactcaaatgggcatccggcattttctaccgccccgaacagctcgcccgcttaggccagtacagatcccgtgaggtccagcgcacgtgctcactcgaatctaggctgaagtctgtgatgcaatcctatttggagggagtccagactggagtttggcaactggcccaggctattgaggtagttcaggggacgcgcgaagccctgagtcaagcccgagggcttctccaagggatgagccaagcattacagaccttggaacctttgcgggaacgggtggcacagcataaacagctgcaagctctcagccacctcctgccaagactgcgagctgtgcctgcagccgtgagccatactcagacacttatagatggacaacagtttctcgaggcctacgtctccctgcgggaactcgaacagctccgggaagacacatgggccccattgggtggcttagagcttcccgtattccagggacttgatctgctgtttgaagccctgggacaggcagtggaagcagcagcgggcgccgcaggtaaactcgcccgtgaggatccagcactgctggtcgcggcagtgagggttgctgaagtagaaactggcagaaccactcctttaggacaagtgcccagagactggagacaacgatgcctccgggccctgcaggaggggcttgaacaggcacattttggaagccctctgctccctgctcccggcgcgctgccagggtggttggaagctttgcgtgtcgcgctcccggttgagctggccactgccgaggccctagtcgccccgtgttgtccgccccaatacaatgtcgtccaactttgggctcatacgctgcactccggactgaggcgctctctgcagaacctgctcgccggaccagagctggaggctgctgacgcgtttgccctattgcactgggccctgcatgtgtatcttggccaggaaatgatgggttccctggaactgggtcccgaagctgacgtgtcgcaactcgagccattgttgacactagagaatatagagcagctcgaagcgacatttgtggcaaatatccaggcatccgtgtcccagtggcttcagaacgccctcgacggtgaggtcgccgaatgggggagagagcacggtcctaacacagacccgagtggttcctactacagccctatgcccgccattgtgctgcaaattcttgaggagaacatccgggtggcatctcttgtgtccgagagcctccaacagcgggttcacggaatggcactgtccgagctagggaccttcttgagaagcttcagtgatgccctgatccgtttttctagagatcacttccggggaaaatctatggccccccactacgttccatacctcttggcagcactcaatcacaaaagcgctttgtccagctccgtctctgtgctgcaactggacggtgccccctccggagcactggcaccagttgaagctgctttggatgaactgcaaaggcggatttataggctggtcctggaagcgctgcaagccgagctccagcctctgttcgcagacctgcccagcaggcagtggctgtcaagccccgagctactgcagtccgtttgtgaacgcaccggccggttttgcagagatttctggagagtgcgcaacccaaccgtgcagctactcctagcagaagccgagcgggctgtggttctgcagtacttgagcgctctgatgcagggcagactcgtgtgtagaggcgctgatgaaaggactcaggctgccgaacgacttcgccacgacgctgcacaactgcagcagctatttctctctctgggactggaggagaacgctcactgtgcccccgttcttctggcattgcgcgaattgctcaacctgcgcgaccccgccctgctgggattagaagtggcaggactgcgacagcaatttccagatgtcagcgaggatcacgtgagcgcactgctcggcttgagaggcgacctcagccgggagcagcatctcgccgcgttgtcatctctacaagcagcactgcctccttccccaagggcgagccggagagttctcttcagtttggtacccgcgccggccctggcccctgccagctgtcttcctagtggatcttgtgcgcgcgccctccttctcgcggaatag

SEQ ID NO: 116411 - DNA, 2040 bp, synthetic construct
  misc_feature 1..2040: note = Description of Artificial Sequence: Synthetic coding sequence
  source 1..2040: mol_type = other DNA
atggactctgccgccaaagacgaaatgcagccagctctgtctcctgggcctgaatggcccgagcaagaaagggcggaacaactggctcggggcgctgccctgaagtgggcttcaggcattttctacagacccgagcagctggccagactcgggcagtaccggagcagggaggttcagcggacatgctcccttgaaagtcggctgaagagcgtcatgcagagttacctcgagggtgtacagactgtacccgctgccgtgtcacatacgcaaaccctgatcgatggacagcaatttctggaagcttacgtctctctgagagagttagagcagctgagagaggacacctgggcacccttggggggtctggagctgccggtattccagggactggatctactgttcgaggcgcttgggcaagccgttgaagccgccgccggggctgcaggcaaactggccagagaagaccctgctctgctcgtggcggcagtccgcgtggcagaagtggagacaggccgcaccacccctcttggtcaggttccacgggactggaggcagcgctgcctgcgcgcgttacaggagggactagaacaggcccacttcggttccccactgctcccggctcccggagcgcttcccggatggttggaagcgttgagggttgctctacctgtggagttggcaactgccgaggccctggttgctccgtgctgcccacctcagtataatgttgtgcagctgtgggcacacacactccactctggactgagacgctctctgcaaaatcttctggctggccctgaattggaagccgctgatgctttcgctctcttgcactgggcccttcatgtttacctcggccaggagatgatgggcagcctagaattgggtcctgaggcagacgtgtcacagctggaacctcttctgacactcgaaaatatcgaacagttggaggctacttttgtcgccaatatacagatcctggaggagaacattcgtgtcgcatccttggtctcagagtccctccagcagagggtgcacggcatggctttatcagagctgggaactttcctaagatctttctcggacgccttaattaggtttagcagggaccactttcgcgggaagtccatggcaccgcattatgtgccttacctgctggctgcgttgaatcacaagtcggcactttcatcctctgtgtctgtcctgcaactcgatggggccccatccggagcattggccccagttgaggcggccttagacgagcttcaaagaagaatctacaggttagttttggaggctctgcaggccgagctgcagccactcttcgctgaccttcccagtcggcaatggctgagtagcccggaacttttacagtccgtgtgcgagcgaactggacgattctgccgagatttttggcgtgtgagaaatcccaccgtccaacttctcttagccgaggccgagagagccgttgtgcttcaatacctctcagccctcatgcaaggtcgcctcgtgtgcagaggagctgacgagagaacccaggccgcagaaaggctgcggcacgacgccgcgcaactgcagcagctctttttaagtcttgtccgggcctcctgggccgggcgaagggcccgcgtgagcgtagcaggatgggagcgaggactcgctcgggaccctaccccaacctgttcaggccctgggggcgaaagggccttgagagctggggcagctaggcccgagggggctgcaaaaccgccgaggccccgggccgccggcccaggtggcggctggccggctgcaaccatctccaggagggagagagggccccgcctgaggccacttgggccagctcgggggctggtgccaggggccgctcccggccgtgctcagctcccagccggctgcgccgcagcagttgcacctcgggagccacccagaccattgcagccttccgcaagggctcgggccagggcaggccttctcccagctctcggggtcttaagaccttcccccgcagccaggcgaataaaccacggctgcaggtag

SEQ ID NO: 116412 - DNA, 2925 bp, synthetic construct
  misc_feature 1..2925: note = Description of Artificial Sequence: Synthetic coding sequence
  source 1..2925: mol_type = other DNA
atggcggccgaggcagcgggcggcaagtacagatcaacggtgtccaaatcaaaagatccatctggattactgatctctgtcattcgcaccctttctacatctgacgatgtagaggacagagagaacgaaaagggtcgcttggaagaagcatatgaaaaatgcgaccgagacctagacgaacttatagtgcagcattacactgaattgaccactgcgatcaggacttatcagagcatcactgaacgcattaccaactccagaaacaaaatcaagcaggtcaaggaaaatctactcagctgcaagatgctgctgcactgcaaaagagatgagcttcgtaaactgtggatcgagggcatagaacacaagcatgtgctcaacctgctggatgagatcgagaatataaagcaggtgcctcagaagctcgagcaatgcatggcttcaaagcactacctgtctgcaaccgacatgctcgtgtcagccgtcgaaagcctggaaggccctctgctgcaggttgaggggctgagcgacctgcgcctggagctgcactctaagaagatgaatcttcatttagttcttatagatgagttgcacaggcatctgtatatcaagtctaccagtagggtagtccagaggaacaaagagaagggcaagatttcaagccttgtgaaggacgcctctgtcccactcattgacgtcaccaaccttcctactcccagaaagtttctggacacttcccattatagcactgccggctccagttcagtgcgcgaaatcaacctccaggacattaaggaagaccttgagcttgaccccgaagagaactccacactctttatgggcatcctaatcaagggcctcgctaagctgaaaaagattccggagacagtgaaggctattatcgagcgactggagcaagaactgaaacagatagtcaaacgcagcaccactcaagtagccgattcaggctatcagcgtggggagaatgtcaccgtggaaaatcagcctcggttgctattagagctcctcgagctcctgttcgacaagtttaatgctgtggccgccgctcatagtgtagtcctgggatatctccaggatactgtagtgacacctctgactcagcaggaggacattaagttatatgatatggccgatgtctgggtcaagatacaggatgtcctccagatgcttcttacagagtatctggatatgaaaaataccagaacagcctctgagccatcggctcagctgagctatgcatccaccggtagagaattcgctgctttcttcgccaagaagaaaccgcagagaccgaagaacagtctgtttaagtttgagtccagcagccatgcaattagcatgagcgcttatctgcgtgagcaaagaagggagctgtacagtaggagcggagagctgcagggcggcccagatgataatctgattgaaggcgggggtacaaaattcgtgtgtaaacctggtgcccgcaatataaccgtgatttttcatccactgctcaggttcattcaggagattgagcacgccctggggctgggcccagccaaacagtgccctctgcgcgagttccttacagtgtatattaaaaatatattccttaaccaggttctcgcggagatcaacaaagagattgagggcgtgactaagacatctgaccccctgaagattctggccaatgctgataccatgaaggtgctgggcgttcagaggccactccttcaatccaccattattgttgagaagacagtgcaggatttgctcaatctcatgcacgatctgtccgcttattcagaccagttcctgaatatggtatgtgtaaagttacaggagtacaaggatacgtgcacggctgcttaccgtggtatcgtgcagtctgaggagaagcttgtcatctctgcatcttgggctaaggacgatgacatcagtcgcctgctgaagtcactgcccaactggatgaacatggcccagcctaagcaactgcgaccaaagcgcgaagaagaagaggattttattcgcgcagcatttggaaaggagagcgaggtactgatcggcaaccttggagacaaacttattccgccacaggacatcctacgcgatgtgtccgacctgaaggccctagcaaacatgcatgaatccctggaatggctggcatctcggacaaagtccgccttttccaatctgagtacctctcagatgctgagccccgcccaggacagccataccaacaccgatctgcctcctgtgagcgagcaaatcatgcaaacacttagtgaactggccaaaagcttccaggacatggctgatagatgtctcttggtactccatttagaggtgcgggtgcattgcttccactacctgatcccactcgcaaaagaaggcaattatgcaatcgttgcaaatgtcgagagtatggattatgacccactggtggtgaagctgaacaaggatatttcagcaattgaggaggcaatgtctgcctctctgcagcagcacaagtttcaatatatcttcgaaggtctcggccatctgatctcctgcatactaatcaatggcgctcagtacttcaggcgcatatccgagtcaggaattaaaaaaatgtgcaggaatatctttgtcctgcagcagaacttgacaaacattaccatgtccagggaagcagacctcgatttcgctcgtcagtactatgagatgttgtacaatacagccgacgagctcttgaatctggtggttgatcaaggggtgaaatatactgagctggagtacattcacgccttaacattattgcacaggtcgcagaccggagtgggtgagctgacaacacagaacacgcggctccagagattgaaagaaataatttgtgagcaggccgccatcaaacaggccacgaaagataaaaagatcacaaccgtgtag

SEQ ID NO: 116413 - DNA, 1422 bp, synthetic construct
  misc_feature 1..1422: note = Description of Artificial Sequence: Synthetic coding sequence
  source 1..1422: mol_type = other DNA
atggcagccgaggccgcgggcggcaaataccgaagtaccgtgagcaagtctaaagacccgagcggtttgttgatttccgtcatcaggaccctgagcacgagtgatgatgttgaagacagggagaatgagaaaggccggctagaggaggcctatgagaaatgtgatagagatttagacgagttgatcgtgcagcattacacagagttaaccacagctattaggacctaccagtccatcaccgagaggatcaccaattcccggaacaaaataaagcaggttaaggagaatttactcagctgcaaaatgctgctccactgcaagcgtgacgagctgcgcaagctctggattgagggtatcgaacacaagcatgttctgaacctgctggatgaaatcgaaaatatcaagcaggtcccccagaagctggagcagtgcatggcaagcaaacattacctatccgccaccgacatgctggtgagtgccgtggagagcttggagggaccgcttcttcaggtggaaggtctgtcagatctgcgtctcgaattgcactcaaagaagatgaatctccacctggtcctgattgatgaactacaccggcacctgtatatcaaaagtacatccagggtagtgcagagaaataaggagaaggggaagatctcctcactggtcaaggacgcctccgtgcccctaattgatgtgaccaacctcccgaccccaagaaaatttctcgacacaagtcattatagcacagcgggctcgagttctgtcagggagatcaatttgcaagatatcaaggaagatttggaactcgacccagaggagaatagtaccttgtttatgggcatcctgattaagggacttgccaagcttaagaagatcccggaaacagtaaaggccatcattgagcgactggaacaggagctcaagcagattgtcaagcggagtactacgcaggtggctgattctggatatcagaggggtgagaatgtcaccgtagagaatcaacctcgccttctgcttgagcttctggaactgctgtttgataaatttaatgcagtagccgccgcccattcagttgtactgggctatctgcaggacactgtagtcacacctctcactcaacaggaggatattaagttatacgacatggccgacgtgtgggtgaaaatccaggacgtgctgcaaatgctactaaccgagtacctggatatgaagaacacaaggactgcttctgagccttccgctcagctctcgtacgcatccacgggccgcgagttcgcggcgttttttgcaaagaagaagccacaacggccgaaaaattccctatttaagtttgaatcttcttcccacgctatcagtatgtccgcttaccttcgggaacagaggcgggaattgtacagcaggtccggagaactgcagggctag

SEQ ID NO: 116414 - DNA, 2622 bp, synthetic construct
  misc_feature 1..2622: note = Description of Artificial Sequence: Synthetic coding sequence
  source 1..2622: mol_type = other DNA
atgttactgcactgtaagcgggacgaacttcgcaaactttggatcgagggcattgagcacaaacacgtgctgaaccttttggatgagatagagaacatcaaacaggtgcctcagaagctggagcagtgcatggcctcaaagcactacctctctgccaccgacatgctggtgtccgcggtggagtcactggaaggcccactgctccaggtggagggtctcagcgatctgagattagagcttcatagcaagaaaatgaatctccacctagtgttgatagacgagctccacagacatttgtatattaagagcactagtagggttgtgcagcgcaataaagaaaaggggaagattagctcgttggtgaaagatgcaagcgtgccactcatcgatgtgacaaatctcccaacgcctagaaaatttctcgatacctcacactactcaactgctgggtctagtagtgtccgcgaaataaacctacaggacataaaagaagatctggaactggatccagaggaaaacagcacgctgtttatgggtatattaatcaagggcttagccaagctaaagaagatcccagaaacagtgaaggccatcattgaacgcctagaacaagagctcaaacagatcgtgaaacgcagtactactcaagtcgctgattccggatatcaacggggtgagaatgtgacagttgagaaccagccccgattgctgctagagctcttagaactattatttgataagtttaatgccgttgccgcagcccacagcgtagtcctgggatacctccaggataccgttgtgacgcccctgactcaacaggaggatataaaactttatgatatggccgacgtgtgggtgaaaatccaagacgtgctgcagatgctgctgaccgagtatctcgacatgaagaatacgagaacagcgtctgagccaagcgcccaactctcatacgccagcacaggccgcgagtttgccgctttcttcgcaaagaaaaaacctcaacggcctaaaaactccttatttaaatttgaaagtagtagtcacgcaatttcaatgtcagcatatctgcgagagcaacgtcgggagttgtactcacgcagtggcgagctgcaggggggccccgacgacaacttgatcgaagggggaggaaccaaatttgtgtgtaaacctggcgcccgcaatataaccgtgatctttcatcctctgctccggttcatccaagagatcgaacatgccctcggactgggaccggccaagcagtgcccgctgagagagttcctcacagtgtacattaagaacatctttctgaaccaggttctggccgagataaataaggagattgaaggggtgaccaagacttccgatccactgaaaatactagctaatgcagatactatgaaagtcctcggagtccagcgacctctcctgcagtcgaccattattgtggaaaaaactgtgcaggacttgcttaaccttatgcatgacttgagtgcatactccgatcagtttttaaatatggtgtgcgtgaagttacaggagtataaggacacatgcactgcagcctatcgtggcatcgtgcagtccgaagagaagctcgttatctctgcaagctgggccaaagatgacgatatttctcggctgctgaagtccttgccaaactggatgaacatggcacaaccaaaacagctgaggccaaaacgagaggaggaggaggactttatccgggctgccttcggcaaggagagcgaggtgcttattggcaatctcggggacaagctgataccaccacaagacatccttcgggatgtttcagatcttaaagctttggccaacatgcacgaatccctggagtggctggcctcccgcacaaagtctgctttttcaaacctgtcgacgagtcagatgttatctccagcacaagattcacatactaatacagacctgccaccagtctcagagcagattatgcagacactcagtgagctcgctaaaagttttcaggacatggcagatagatgcctcttagttctccacttggaggtgcgcgtgcactgtttccattacctgattccactggcaaaagaaggcaactacgccattgttgccaatgttgagtctatggattatgatccgctggtagtgaaacttaacaaagacatctctgctatcgaggaagccatgtccgcatctctccaacaacacaaatttcagtacatctttgaaggactcggccacctgatcagctgcattctcattaatggggctcagtacttcaggcgtatctctgagtcaggaatcaaaaagatgtgtaggaatatctttgtattacagcaaaatcttacaaacatcactatgagtcgtgaggctgatctcgacttcgccagacaatactacgagatgctctataatacggcagatgaactgcttaacctggtcgtggaccagggcgtaaagtacaccgagctggaatacattcacgcgctaaccctgttacaccgaagccaaaccggggtgggggagttaaccactcagaacacgagactgcagaggctcaaggagatcatttgcgaacaggcggccataaagcaggccaccaaggacaaaaaaatcaccactgtgtag

SEQ ID NO: 116415 - DNA, 789 bp, synthetic construct
  misc_feature 1..789: note = Description of Artificial Sequence: Synthetic coding sequence
  source 1..789: mol_type = other DNA
atgcacgagagcctcgaatggctcgcatctaggaccaagagcgcctttagcaatctgtctacttcccagatgctgtccccggcccaggatagtcacactaacacagacttaccccccgtatccgagcaaataatgcagaccctctctgagttggcgaagagttttcaggacatggccgataggtgtttgctggtattgcatctggaagtgcgcgttcattgtttccattacctcatccctctggcgaaggaaggtaactatgccatagtagccaacgtggagtcgatggattatgacccgttagttgtgaaattgaacaaggacatttccgccatcgaagaggctatgtcggccagcctgcagcagcacaagtttcagtatatttttgaggggttgggccacctcatttcatgtattctgataaacggagctcagtatttccggcgcatctccgagtccgggatcaagaagatgtgtcgcaatattttcgtgctgcagcagaacctgactaacattaccatgagtagagaggcagatttggactttgctcgccagtactacgagatgctctacaacactgcagatgagctcctcaacctcgtcgtcgaccagggcgtgaaatacaccgagctggaatatattcacgcgctcaccctgttgcatcggtcccagaccggcgtcggcgaattgaccactcagaatacccgacttcagaggcttaaagaaatcatttgcgagcaggccgcaatcaaacaggccaccaaagataaaaagatcaccacagtgtag

SEQ ID NO: 116416 - DNA, 1755 bp, synthetic construct
  misc_feature 1..1755: note = Description of Artificial Sequence: Synthetic coding sequence
  source 1..1755: mol_type = other DNA
atggcgaatctcgtgacagctagtaagaccaaaatgtcgaagggcgaggacccgaacaatcccaggagcattaagcggatatcccaggggggtagggacaaccatctagcgatcgccaagtgcgacttgacacagctgaagaaaaaacagagcgaggtctccaatggcagcagagagacgatcagtatgaagacatgttgccaacacggcgatcggggctactggtctactgggtactactggagaggaggccccgatgacaacctcatcgagggggggggcactaagtttgtctgtaaacccggcgcacgcaacattacagtcatttttcaccccttgcttcgcttcatccaagagatcgagcacgctctggggctcgggccagccaaacagtgtcctctgcgcgagttccttacagtgtacattaagaatatattcctgaatcaggtgctcgcggagattaataaagagatcgagggggttacgaagacttctgacccattgaagattctggctaacgcagataccatgaaagttctgggcgtgcaacgaccattacttcaatccactatcatagtcgagaaaacagtgcaggatcttctgaatctgatgcacgacctgtccgcctactctgatcagtttttgaatatggtgtgcgtgaaactgcaggagtacaaggacacttgtaccgcggcatacaggggaattgtgcaaagcgaagagaagttggtcatctctgcatcatgggctaaagatgatgatatcagcaggctgttgaagtcactcccaaattggatgaatatggcccaacccaaacagcttagacccaaacgcgaagaggaggaggacttcattagagccgctttcggcaaagagagtgaggtcttaatcggcaatttgggcgacaagttgattccgcctcaggacatactacgcgatgtgtccgatctaaaggccctcgcaaatatgcatgagtccttggagtggctcgccagtcgtacaaaatccgcttttagtaatctttcaacatctcaaatgctatcaccggcgcaagattcccatacaaacaccgaccttccacccgtgagtgaacagattatgcagactctgagcgagctggctaagtcttttcaggacatggccgacaggtgcctgttggtattgcacctggaggtacgggtccactgtttccactaccttatccctctcgcaaaagaggggaattatgccatcgtcgccaatgtcgaaagtatggattatgaccctctggtcgtcaagctgaacaaggacatttctgccattgaagaggctatgagcgccagtcttcaacaacacaaatttcaatacatcttcgaggggctcggccaccttatttcctgtattcttatcaatggtgcccagtattttagaaggatatctgagagcgggattaaaaaaatgtgtcggaacatctttgtcctgcagcagaacttaactaatattacaatgtcaagggaggctgacctggacttcgcaagacaatactacgagatgctgtacaatactgcagacgagctgctgaatttagtcgtggaccagggagtgaaatacaccgaactggagtatattcatgcgctgaccctgttgcatcgaagccaaacaggggtgggggaattaacaacacagaacacccgcctgcaacgcctcaaggaaatcatctgcgagcaggccgccatcaagcaagccacaaaggacaaaaagataacgaccgtgtag

SEQ ID NO: 116417 - DNA, 1782 bp, synthetic construct
  misc_feature 1..1782: note = Description of Artificial Sequence: Synthetic coding sequence
  source 1..1782: mol_type = other DNA
atggctgacgtctgggtgaaaatacaggacgtcctgcagatgctgctcactgagtatttggatatgaagaacaccagaactgcttccgagccctcagctcaactgtcatatgcttccaccggtcgggagtttgcagcatttttcgctaagaagaagccccagcgccccaagaattctttgtttaagtttgagagctctagtcacgctatttctatgagtgcctatctcagggagcaacgtcgggagctctacagcagaagcggcgagttgcagggggggcctgacgataacctaatcgaaggaggtggcactaagttcgtgtgtaaaccaggtgcaagaaacattaccgtcatcttccaccctctgctgcggtttatccaggagattgagcacgcgctcggcctcggccccgctaaacagtgccccctgcgcgaattcctgaccgtatacataaagaacatatttctgaatcaggtccttgcagaaattaataaagagattgaaggggtaaccaagacaagtgacccactgaagatactggccaacgctgatactatgaaagttctgggtgtacagcgcccactactgcagtctaccatcatagtggagaaaaccgtacaggatttattgaacctcatgcacgatctctccgcctattccgaccagtttctaaatatggtttgtgtcaaactacaggagtacaaagacacttgcaccgctgcttacagaggcatagtgcagagcgaagaaaagttggtgatctccgcctcctgggctaaagatgatgacatctccagactgctcaaatccctacctaactggatgaacatggcacagccgaaacagctccgacccaagcgggaggaggaagaggattttattagagccgcctttgggaaagagtctgaagttctcatagggaatctaggagacaaacttatcccaccgcaggacatcctgcgggacgtgagcgacctgaaggcactggcaaatatgcacgagtctctggagtggttggcaagtcgtacgaaaagcgcattctccaatctctccactagccagatgctatccccagctcaggactctcacaccaacaccgacctcccgcccgtgtcagagcagatcatgcaaacattgtctgaactcgccaaaagttttcaagacatggccgaccggtgcctgctggtactccacctagaagtcagggtgcactgttttcattacctgatcccgctggccaaggaaggaaactacgcaatcgtggccaacgttgagagcatggactacgacccattggttgtgaaactcaacaaagatatctctgctatcgaagaagccatgtctgcatcactgcaacagcacaaattccaatatatattcgaaggcttggggcatctcatcagctgcatacttattaacggcgcacagtattttcgaaggatctccgaatccgggattaagaagatgtgtaggaacatcttcgtcctccaacagaatctaaccaacattacaatgagtcgtgaagcagatctggactttgcacgccaatactacgagatgttatacaacacagcagatgagttgctgaacttggttgtcgatcagggggtaaagtatacagaactggaatatatccacgccctcactctcttgcaccgctcacagactggcgtgggtgagctgactacccagaacacacggcttcaaaggctgaaggaaatcatctgcgaacaggccgcgattaagcaggccaccaaagacaagaaaatcaccacagtgtag

SEQ ID NO: 116418 - DNA, 1932 bp, synthetic construct
  misc_feature 1..1932: note = Description of Artificial Sequence: Synthetic coding sequence
  source 1..1932: mol_type = other DNA
atggctaccactgcagagctctttgaggagcctttcgtagccgacgaatacattgaaaggctggtgtggaggactcccggagggggttctcgtggcggccccgaagcctttgacccaaagcgtttgctggaagagtttgtgaaccatatccaagaactgcagataatggacgaacggatccaaaggaaagttgagaaactggagcagcagtgccagaaggaggcaaaggagttcgccaagaaggtgcaggagttacagaaaagcaatcagatcaaagaggccgctgacattatccagaaactgcatctgatcgcccaggaactacccttcgaccgtttcagcgaggtgaagagcaagatcgcgtccaagtaccatgatctggagtgccagctgatccaggagttcacgtcagcccagcgtcggggtgagatctctcggatgcgcgaggttgctgcagtccttcttcacttcaaaggatacagtcactgcgtggatgtatatatcaaacaatgccaagagggagcttacctcaggaatgatatatttgaggatgcagggatattgtgccagcgagtaaacaagcaggtcggagacatcttcagcaaccctgagaccgtgctggccaaactcattcaaaatgtcttcgagatcaagctccaatctttcgtaaaagagcagcttgaagagtgccgcaagtcagacgccgaacagtacttgaagaacttgtacgacctttatacaaggactacaaacctgagctccaagttgatggagtttaacttgggtaccgacaaacagacgtttctctccaagttaattaaatctatattcatcagctacttggagaactatatcgaggtcgagacggggtacctcaagtcgagaagtgccatgattctgcagagatactatgacagcaagaaccaccagaaaaggtccatcggtactggcgggatccaggaccttaaggagagaattcggcaaagaacaaaccttccactgggccccagcattgatactcacggcgagacgtttttgtcccaagaggtggtagtcaacctcctgcaggagacaaaacaggccttcgagcggtgtcacagattgtccgatccaagtgatctccccagaaacgctttccgaattttcaccattctggtggagttcctttgcatcgagcacattgattatgcgctggaaacaggcctggcagggattccatcatcggactctaggaatgctaatctgtacttcttagacgtcgtgcaacaggccaacactatctttcacctatttgacaagcagtttaacgatcacctgatgcccctcattagttcctctcctaaactatctgagtgcctccaaaagaagaaagaaataatagaacagatggagatgaagctagacaccggcatcgataggacgctcaactgtatgattggccagatgaagcatattctggccgcggaacaaaagaagaccgactttaagcctgaagacgagaacaacgtgttaatccagtatacaaatgcctgtgtgaaagtgtgcgcctacgtgcggaaacaggtagaaaagatcaaaaatagcatggacgggaaaaatgttgataccgtgttgatggagctcggcgtgcgttttcatcgcttgatctatgaacacctccagcagtactcttactcttgcatgggaggtatgctggctatctgcgacgtagccgagtatcggaaatgcgcaaaggattttaagattccaatggtgctgcatctgttcgataccctccacgcattgtgcaatctgctggtggtagcccccgataacctgaagcaagtgtgctcaggcgagcaattggctaatttagacaagaatatccttcacagctttgtacagctcagggcggattatcgatccgcacgtttagctcgacatttctcttag

SEQ ID NO: 116419 - DNA, 2127 bp, synthetic construct
  misc_feature 1..2127: note = Description of Artificial Sequence: Synthetic coding sequence
  source 1..2127: mol_type = other DNA
atggctacaactgctgaactcttcgaagagccattcgtcgccgacgaatacatcgaacgcctagtttggcgtactccagggggcggctcacgtggcggccccgaggcctttgatcctaagaggttgctggaggaattcgtcaatcacatccaggagctgcagattatggatgaaagaatccaacgaaaagtggaaaaactagaacagcagtgtcaaaaggaggccaaggaattcgctaaaaaggtgcaggagttacaaaaatcaaaccaggtggcattccagcatttccaagaactcgatgagcatattagctacgtcgcaaccaaagtctgtcatctgggagaccaactggaaggagtgaacacaccgcgccagagggcggtcgaagctcagaagctgatgaaatattttaacgaatttttggatggtgagctcaaaagtgatgtgttcacgaactcagagaaaataaaggaagcagctgatattattcagaaacttcacctgatcgcccaggaacttccatttgacaggtttagtgaggtaaaatctaagatcgctagtaaatatcatgacttggaatgccaactcattcaggaatttacttccgcacagaggcggggggaaatttctcgcatgcgagaggtggcggccgtgctcctgcattttaagggctacagccactgtgtggatgtctatattaagcaatgtcaggagggagcttatctacggaacgacatattcgaggatgccgggattctttgccaacgcgtaaacaagcaagttggcgacatcttttccaatcccgaaactgtgctcgcaaagttaatccaaaacgttttcgaaattaaactccagtcctttgtgaaggaacagctagaggagtgcaggaaatccgatgccgagcagtacctgaaaaatttatatgatttgtacacacgcaccactaatttatccagtaagctaatggagttcaacctgggcaccgacaagcaaaccttcctgtccaaactcatcaaaagtatcttcatttcatatcttgaaaattacatagaagtagagacaggatatctgaagtcacggtctgccatgattcttcagcgctactacgactccaagaatcatcagaagcggagcatcggcacagggggcatacaggatctgaaggagagaatccgacagcggacaaatctgccactgggcccctccatcgacactcatggggaaacttttctgagccaagaggtggtggttaacctgctgcaagagactaaacaggcattcgagagatgccaccggctttctgacccctcagacctcccccggaatgctttccggatattcacaattcttgtggaattcttgtgcatagaacacattgactacgctttagagactgggcttgccggaatcccctcctccgacagtaggaacgcgaacctctactttttggatgttgtgcaacaagcaaataccatcttccatctgttcgacaagcagtttaacgatcacctgatgcctttaatctcatctagcccaaaactgtccgagtgtttgcaaaagaaaaaggagatcatcgagcagatggagatgaagttagacaccggcattgacagaactttgaactgtatgatcggacagatgaaacacattcttgctgccgaacagaaaaagacagatttcaagccagaggacgagaataatgtactgatccagtacacaaacgcttgcgtgaaagtctgtgcctatgtaaggaagcaagtcgagaagatcaagaattccatggatggcaagaacgttgacacagtgttgatggagttaggcgtcagatttcatcgtcttatctacgagcatttacagcagtattcgtacagttgtatgggcggaatgcttgccatttgcgacgtcgctgagtaccggaagtgcgccaaggacttcaagattccaatggttctccacttattcgacaccttgcacgcactatgtaatctacttgtggtagcaccagataacctgaagcaggtatgctcaggcgaacagttagctaacttggacaaaaacatactccattcatttgttcagctccgagcagactataggagcgcaagactggcccgccattttagctag

SEQ ID NO: 116420 - DNA, 2415 bp, synthetic construct
  misc_feature 1..2415: note = Description of Artificial Sequence: Synthetic coding sequence
  source 1..2415: mol_type = other DNA
atggctgagaacagtgagtcactgggaactgtccccgagcatgagaggatccttcaggaaattgaaagcactgataccgcgtgtgtaggccccacgcttcgcagtgtctatgacgaccaacccaatgcgcacaagaaattcatggagaagctggacgcgtgtatccgaaaccatgacaaagagatcgaaaaaatgtgtaatttccaccaccaggggttcgtggacgctattaccgagctattgaaagtccggaccgacgctgagaaactgaaagtacaggttacagacacaaaccgccgcttccaagatgccggaaaagaggtcatcgtgcacaccgaggacatcattcggtgtaggatccaacagagaaacattactactgtggtagagaaactccagttatgtctgccagtcctggagatgtacagcaaactgaaagagcagatgtctgcgaagcggtattacagcgcactgaagactatggaacaactggagaacgtgtattttccttgggtgagtcaataccggttctgtcagctgatgattgagaacttacccaaattgcgcgaggacatcaaggagatttctatgtcagaccttaaagacttcctcgaatctatccgaaagcatagtgataaaatcggagaaaccgctatgaagcaggcacagcaccaaaaaaccttttctgtgagtttgcagaagcaaaacaagatgaaattcggcaagaacatgtacatcaaccgtgatcgaattcccgaggaaaggaacgagacagttctgaagcattccctggaggaggaggatgagaacgaagaggagatactgactgtacaggatctggtggacttctcaccagtgtatcgctgcctccacatttactcagtgttgggcgatgaagagacatttgagaattattacagaaaacagaggaaaaagcaggcccgtcttgtgctacagccacaatctaatatgcacgagactgtggacggctaccggcgctacttcacacagatcgtggggtttttcgtggtcgaggaccacatccttcacgtcacgcagggattggtgacaagggcctacaccgacgaactgtggaatatggctctctccaagataatcgcggtcctacgggcccattcatcatactgcaccgatcccgatctggtgctggaattaaagaaccttaccgtcattttcgctgacactctacagggttatgggtttcctgtcaatcggctgttcgatctcctttttgagatccgagatcaatacaatgaaaccctgctgaagaaatgggcgggggttttccgagacatttttgaggaagataattactcacctatacctgtggtgaatgaggaggaatacaaaatcgtcatctctaagtttccattccaggacccagatttagagaaacaatcttttcctaaaaaattcccaatgtcacagtccgtcccacacatttacatccaggttaaggaatttatttacgcctctttgaagttcagcgagtctctacacagatcttctactgaaatcgacgatatgttaagaaagtcaaccaaccttctgcttacaaggacactgtcttcttgcctgctgaacctcatacgcaaaccacatatcggtttaacagaactggtgcaaattattatcaataccacgcatctggaacaggcatgcaagtacctggaggactttattaccaatattaccaatatttcccaagagacagttcataccacccggctgtatggcctgagcactttcaaagatgctagacatgccgccgagggtgagatctacaccaagctgaatcaaaagatagacgagttcgtgcagttggcagactacgactggaccatgagcgaacccgatggacgcgcctccgggtacttgatggacctcattaatttcttgcgctcaatatttcaggtgtttacccacctcccaggtaaggttgcccaaaccgcttgcatgagcgcctgtcagcacttgagcacttctctaatgcaaatgttgctggatagcgaacttaagcagatcagcatgggagctgtgcagcagtttaacctcgacgtaatccagtgcgagttgtttgcatcaagcgagccagtgcctggattccagggcgatactttgcagctggcctttatcgacttgaggcaactgttggacctgttcatggtctgggactggtccacctaccttgcagattacggccagcctgcttctaagtacttgcgagtaaaccctaacaccgctctaacacttttggaaaagatgaaggacacgtcaaaaaagaataatatttttgcccagttccgtaagaatgatcgagacaaacagaaattgattgagactgttgttaaacagctcaggagcctggtcaacggaatgagccagcacatgtag

SEQ ID NO: 116421 - DNA, 462 bp, synthetic construct
  misc_feature 1..462: note = Description of Artificial Sequence: Synthetic coding sequence
  source 1..462: mol_type = other DNA
atggctgagaactccgagagccttgggaccgttcctgagcacgagagaattctacaggaaatagaaagtactgatacagcctgtgtaggccctaccctgaggagcgtgtacgatgatcaacctaacgctcataaaaagtttatggagaaattggatgcttgcatccgcaatcatgacaaggagatagaaaagatgtgcaatttccatcaccaaggatttgtggacgccatcacagagcttctgaaggttagaaccgacgccgaaaaactaaaagtgcaggtcacagataccaatcgcagattccaggacgccgggaaagaggtgatcgttcataccgaagatatcattcggtgcaggattcagcaacgcaatattacgactgtcgtcgaaaaactgcagttgtgcctccctgtgctcgagatgtactctaagctcaaggagcaaatgagtgctaagagatag

SEQ ID NO: 116422 - DNA, 2463 bp, synthetic construct
  misc_feature 1..2463: note = Description of Artificial Sequence: Synthetic coding sequence
  source 1..2463: mol_type = other DNA
atgtgctgcgtcgggggcgcaggcagctgttccgacacagggaagttgggtgcatgcagggctatgctggaggaagagaccgaccagacctatgaaaacgtgctagccgagatccaaagcttcgagctccccgtcgaggccaccctgcggagcgtatacgacgatcagcccaatgctcacaaaaagtttatggaaaaactggatgcatgcattcgcaaccacgacaaggagatcgagaaaatgtgcaactttcatcaccaaggcttcgtggatgccattaccgagctcttaaaagttagaactgacgcggaaaaactcaaggtacaggtgaccgataccaaccggaggttccaggatgcaggaaaagaggtgatcgtgcacaccgaggacatcatccggtgtagaatccagcagcgcaacatcaccacagtggtggaaaagctgcagctttgccttcccgtgcttgagatgtacagtaaattgaaggaacagatgagcgctaagcggtactactccgccctgaaaaccatggagcaactggagaatgtctattttccctgggtgtcacagtaccgcttctgtcaactgatgatcgagaatctgcccaagctgcgggaagatattaaagaaatctccatgtccgatttaaaagactttcttgagagcattagaaaacattctgataagatcggcgagaccgccatgaagcaggctcaacaccagaagacattttctgtgagcttgcagaagcagaacaaaatgaaatttggtaaaaacatgtatatcaacagagatagaatccctgaggagagaaacgagaccgtcctaaagcatagcctggaggaagaggatgaaaatgaggaggagattcttacagttcaggaccttgtggatttctcacctgtgtaccgctgcctccacatctactcagttctgggagacgaagagacattcgaaaactattatagaaaacaacgcaagaaacaggctagactcgtgttgcagccacagagtaatatgcatgaaaccgtagacgggtacagacggtattttactcagatcgttggattctttgtggtcgaggatcatatcttgcacgttactcaaggattggttacccgcgcctatacagacgaattgtggaatatggccctgagcaagattatagctgtgctcagggcccattcttcctattgtactgaccccgatctcgtcctggaattgaaaaacctgaccgtcatcttcgccgacacgctgcagggatatggcttccccgtgaaccggctgtttgacttgctctttgagattcgggatcagtacaacgaaacgctgttgaagaagtgggcaggtgtgtttagagatatatttgaggaggacaattacagtcccatccctgtcgtgaatgaggaagagtataagattgtgatttcaaagttcccatttcaagatcccgatctcgaaaaacaatctttcccaaagaagtttcccatgagccaaagtgtccctcacatctacatccaggtcaaggagtttatctatgccagccttaagttcagcgagagccttcaccgctccagcacagagatcgacgacatgctgcggaaaagcactaatctccttctgacccggactttgtccagctgcctactgaatctcatacgcaagccacacatcgggcttactgagctggtccaaatcataattaacaccacacacctggagcaagcatgcaagtatctggaggattttatcacaaacatcacaaatatctcccaggaaaccgtacacactacccgtctgtacgggctgagtactttcaaggatgctaggcatgcggcggaaggggagatatacactaagctgaatcaaaaaatcgatgaattcgtccaactggcagactatgactggactatgagtgagccagatggacgagctagtggttaccttatggacctgatcaacttcctgcggtcgatatttcaagtcttcacgcacctccccgggaaggtggcccaaacggcgtgcatgtccgcctgccagcaccttagcacttccctgatgcagatgctcttggactcagaattgaaacagatcagcatgggggctgtccagcagtttaatctcgacgtaatccagtgcgagctgttcgcttcctccgagcctgtgcctggctttcagggcgacaccctccaacttgcgtttatcgaccttagacagcttctggacctattcatggtgtgggactggtcaacctatctggccgattacggacagcccgcgtctaagtatctgagagtcaatcctaacactgcccttactttgctcgaaaagatgaaggatacctctaaaaagaataatatctttgcccagtttcgaaagaatgacagggacaaacagaaactgatcgagaccgtcgtcaaacagctgaggtcactggtcaatgggatgagccagcacatgtag

SEQ ID NO: 116423 - DNA, 2400 bp, synthetic construct
  misc_feature 1..2400: note = Description of Artificial Sequence: Synthetic coding sequence
  source 1..2400: mol_type = other DNA
atgctagaggaggagacggatcagacttacgaaaacgtactggctgaaattcagtcctttgagttgcctgtcgaggccactctccgtagcgtgtacgacgaccaaccaaatgcgcataaaaagtttatggaaaaattagatgcctgcatccgcaatcacgacaaggagatcgaaaaaatgtgcaacttccaccaccagggattcgtcgatgccattacagagctgttgaaagtccgaaccgacgccgagaagctcaaggttcaggtgactgataccaatagacgcttccaggatgccggcaaagaggtcatcgtgcatactgaggacattattcgctgtcggatccaacagcgcaacattacgacagtggttgagaaactgcaactctgtctgcctgtactggagatgtactctaagctgaaagagcagatgagtgctaagcgctactactccgccttgaagacgatggagcagctggaaaatgtttacttcccctgggttagccaatatcgtttttgccagctgatgattgaaaacttgcctaagttaagagaggacatcaaagaaattagcatgtcggacctgaaggacttcctagagagcataagaaaacactcagataagattggggaaactgccatgaagcaggcgcagcatcagaaaaccttttcggtatctcttcagaagcagaataaaatgaaattcggcaagaacatgtatattaacagggatagaattccagaggaacgtaacgaaaccgttctgaagcacagtctcgaggaagaggatgagaatgaagaggaaatccttacggtgcaggaccttgttgacttttcccctgtctataggtgtcttcacatttatagtgtactaggtgacgaggagacatttgagaactactatagaaaacagcgaaagaagcaagctcggcttgttctgcagccccagtccaatatgcacgaaaccgtcgatggataccgccggtatttcacacagattgttggattcttcgtagtcgaagatcacatcctccacgtgacacaggggctggtgactcgcgcttacaccgatgaactgtggaatatggccctctctaagatcattgctgttctaagagcgcacagtagctactgcactgaccctgacctggtactcgagctcaagaacctcacagtcatcttcgcagacactctccagggctacggctttcctgtcaatcggctgttcgatctactcttcgagatacgagatcagtataatgagacactgctgaaaaagtgggctggtgtatttcgcgacatcttcgaggaagacaattacagcccaatccccgtggtgaatgaggaggagtataagatcgtgattagtaaatttccattccaggatcctgacctggaaaagcagagtttcccaaaaaagttccccatgtctcaaagcgtcccacacatttacatccaggtcaaagagttcatatatgcctctctcaagttctctgaaagtctgcaccggagcagcacagagatcgacgatatgttgcggaaaagcacaaatcttttgctgaccaggaccctttcttcttgcctgctcaatctgatccggaaacctcacatcgggctgaccgagctggtgcaaatcatcattaacacaacgcacctagagcaagcctgcaaatatctggaggattttatcacgaacatcacaaacatctcccaagaaacggtccatactacacgcctttacggcctgtcaacattcaaggatgcacgtcacgctgcagaaggcgagatttatacaaagctgaaccagaagatcgacgaattcgtgcaactggcagactacgattggacaatgagcgagcccgatggccgggccagcggatatctcatggacctcattaatttcctgagaagcatctttcaggtgtttacccatctccctggtaaagtggcgcaaacagcatgcatgtccgcttgtcaacacctaagcaccagtctgatgcagatgctcctggacagcgagctgaagcagatatcgatgggagctgttcagcagttcaacttggacgtgatccagtgcgaactgtttgcctcctcagaaccggtcccggggttccagggggacacactccagctggcgttcatagatctgagacaactcttagacctcttcatggtgtgggactggagcacttacctcgccgactatggccagcccgcatcaaagtatttacgagtgaacccaaatactgctttgaccctcctggaaaagatgaaagatacatccaaaaagaacaatatctttgcacagttccggaagaatgacagggacaagcagaagctaatcgaaactgtggtgaaacagttgagaagccttgtcaatgggatgagccagcatatgtag

SEQ ID NO: 116424 - DNA, 2106 bp, synthetic construct
  misc_feature 1..2106: note = Description of Artificial Sequence: Synthetic coding sequence
  source 1..2106: mol_type = other DNA
atggccgagaactcagagtctctgggaacagtgcctgaacacgaacggatactgcaggaaattgaatccactgataccgcctgcgtggggcccacactgaggtccgtgtacgatgatcaacctaatgcacacaagaaattcatggaaaagctggacgcctgtatccgcaaccatgataaagaaattgaaaagatgtgtaactttcatcatcagggtttcgtggacgccatcactgaactgctcaaggtgcgcactgacgctgagaagctgaaggttcaagtgactgatacgaacagacggtttcaggacgcagggaaagaggtcattgtacacaccgaagatataatacggtgtaggatccaacagagaaacatcacaaccgtggtcgaaaagctacagttatgcctgcctgtgctggaaatgtacagtaaactgaaggagcagatgtcagccaagcggtactatagcgcactgaagactatggagcaactcgagaacgtgtactttccgtgggtcagccagtacaggttttgccagctaatgatagagaacctaccaaaacttcgggaggatatcaaagaaatctcaatgagcgacctgaaagattttcttgagagcatcagaaagcacagcgacaaaataggagaaaccgccatgaaacaagcccagcaccaaaaaaccttcagtgtgagcttacaaaagcaaaacaaaatgaagttcggaaagaacatgtatattaatcgtgatcgcatccctgaagaaaggaacgagactgtgctgaaacatagcctcgaagaagaagacgaaaacgaagaggagggtgacgaggagacgttcgaaaactattatcggaagcagagaaaaaaacaagccaggctggtgctgcagccgcagagtaacatgggctatgggtttcccgtgaatcgtctatttgacctcttatttgagattcgtgaccagtacaacgaaaccctcctgaagaaatgggcaggcgtttttcgggatattttcgaagaagataattacagccctatacccgtagtgaacgaggaggagtataagattgttatctccaagttccccttccaggatcccgatctggagaagcagagtttcccgaaaaaatttcccatgagccagagcgtgccgcacatatacattcaggtgaaagaattcatttatgcatccctcaagtttagtgaatctctgcatcggtctagtactgaaattgatgatatgttgaggaagagcaccaatcttttgctaacacgcaccctgagcagttgtctactgaacctgattagaaagccccatatcgggctgactgagctagtgcagatcatcatcaacactacccacttagaacaggcatgtaagtatttagaggactttataacaaatataaccaacatttcacaagagacagtgcacacaacccggttgtatggattgtcaaccttcaaggacgcccggcacgcagcggaaggcgagatatacactaaattaaaccagaagatcgacgaattcgtgcaactcgctgattatgactggacaatgagtgagccagatggccgcgcttcaggctaccttatggatctgattaatttccttcgttcaattttccaggtatttacacacctgcctggtaaggtcgcgcagacggcctgtatgagcgcgtgtcagcacctgtctacctctctgatgcagatgctgttggactctgaactgaagcagatcagcatgggcgctgttcagcagtttaatcttgacgtgatacaatgtgagctgtttgcctcttcggagcccgtgcccggattccagggggacaccttacaactcgcgttcatagacctgcgccaactgctcgacctcttcatggtgtgggactggagtacgtatttggccgattacggacagccagcaagcaaatacttacgcgtcaatccaaacaccgctctgacactccttgagaagatgaaggacacaagcaagaaaaacaatatatttgctcagttcaggaaaaatgacagagataaacagaaactgatcgagactgtggtaaagcagctgcgatctcttgttaatggaatgtcacagcatatgtag

SEQ ID NO: 116425 - DNA, 219 bp, synthetic construct
  misc_feature 1..219: note = Description of Artificial Sequence: Synthetic coding sequence
  source 1..219: mol_type = other DNA
ggcaaggttgcacagacagcttgcatgtcagcatgtcagcacctttccacttctctgatgcagatgctgttagacagcgagcttaaacagatctcaatgggcgcggttcagcagttcaacctagacgtcatccaatgtgagttatttgcttcatccgagcccgtgcctggatttcagggcgacaccctgcagttggcattcatcgacctgaggcaatag

SEQ ID NO: 116426 - DNA, 2436 bp, synthetic construct
  misc_feature 1..2436: note = Description of Artificial Sequence: Synthetic coding sequence
  source 1..2436: mol_type = other DNA
atggaacgtggcaagatggcggaggctgaatccctcgaaaccgccgctgagcatgaacggatcttgagagagatcgaatccactgatactgcttgtataggaccaacgctgagatcagtgtacgatggggaggagcatggccgattcatggagaagcttgagactcgaattcgcaatcatgacagggagattgagaagatgtgcaactttcactaccaaggcttcgtggactcaatcaccgagctccttaaagtacggggcgaggctcaaaagctgaagaaccaggtaacagatacaaatcgtaagctgcaacacgaagggaaggagttggtgatcgctatggaggagctaaagcaatgtcgcctgcagcaacgaaacatcagcgcaaccgttgataagctaatgttgtgtctacctgtactggaaatgtactccaagctgcgtgatcaaatgaaaaccaagagacattacccagccttgaagaccctggaacatttggagcacacctacctaccacaggtttcgcattataggttttgtaaggtgatggtggataatatcccaaagcttcgggaagaaatcaaggacgtctctatgtctgacctgaaggacttcctggaatcaatcaggaagcattccgataagattggggagacagctatgaagcaggctcagcagcagaggaacctggataatatcgtgctacagcagccccgcatcgggtcgaagcggaagtcaaaaaaggatgcatatattattttcgacactgaaatagaaagtacgtctcccaaatctgaacaagattcaggaatcctcgacgtggaggatgaggaagatgacgaagaggttccaggcgcacaggatctggtggatttctcccccgtgtaccggtgtttgcacatttatagtgtgcttggagcacgtgagacctttgagaattactatcggaagcagaggaggaagcaagcccgactggtgcttcagcctccctcaaacatgcacgagactctggacggttaccggaagtacttcaatcaaattgtgggcttttttgtggtggaggaccacatcctacacaccactcagggattagttaaccgggcttacatcgacgagctgtgggaaatggcactaagcaagacgattgcagcgctgaggacccacagttcctactgctccgatccaaacctggtgcttgacctgaagaatctgatcgtgctgttcgcagacacgctgcaggtgtacgggttccccgttaatcagctgttcgatatgctccttgagattcgcgatcaatatagcgaaaccttgctgaaaaagtgggctgggatttttagaaatatcctagacagcgataattactcacccataccagtgacatcagaagaaatgtacaagaaggtggttggtcagttcccttttcaggacatagagctcgagaagcagccgttcccgaagaagtttcctttttctgagttcgtgcccaaagtgtataaccaaatcaaggaattcatctatgcttgtctgaagttttcagaggacctgcatctgtcatctaccgaggtagacgacatgattcggaaatccactaatcttctgctcaccagaaccttatcgaatagtctacagaatgtgatcaaacgcaaaaatattgggctgaccgaactggtgcagattatcataaacaccacgcacttagaaaagagctgcaagtacctggaagagtttattaccaatattacgaacgttctcccggaaacagtgcacactaccaagctgtacggtacaactaccttcaaagacgcacgccacgccgcagaggaagagatttatacaaatctaaatcaaaagattgaccagttcctgcaacttgccgattatgactggatgaccggcgatcttggcaacaaggcgagtgattacctggtcgatctcattgcctttctccgttcaacttttgctgttttcacccacctccccggaaaggtagcccaaactgcctgcatgtctgcatgcaaacacttagctacaagcctgatgcaacttctgctggaggcagaagttcgtcagctgactctgggtgccctgcagcagtttaacctggacgttcgagagtgcgaacagttcgctagatccggtcccgtcccggggttccaggaagataccctgcagctagcgtttattgatctgcgtcagcttctagacctctttattcagtgggactggtccacatatctcgcggattatgggcagccaaactgtaaatatctgagagtaaacccagtaacagcattaactctgctcgaaaaaatgaaggacacctcccggaagaacaacatgtttgcccagtttcggaagaacgagagagataagcagaaattgatcgacaccgttgctaaacagcttcgagggctgatctccagccaccacagttag

SEQ ID NO: 116427 - DNA, 2016 bp, synthetic construct
  misc_feature 1..2016: note = Description of Artificial Sequence: Synthetic coding sequence
  source 1..2016: mol_type = other DNA
atggaaaggggaaagatggccgaggccgagtcccttgagactgcagccgagcacgagagaattctaagggaaattgagtctacagacaccgcctgtattggtcccacactccggagtgtgtacgatggcgaggaacatggcagatttatggagaagctcgaaacccgcatccgtaatcatgaccgggagatagaaaagatgtgtaactttcactaccaggggtttgtcgactccatcacggaattgctgaaggtccgcggcgaggcgcagaagctaaagaatcaagtgactgacacaaatcgcaaattacagcacgaggggaaagagctggtgatagctatggaggaactgaagcaatgtaggctgcagcagaggaacatttccgccactgtggacaagttgatgctttgcctgccagtgctggagatgtattccaagctgagagaccagatgaagactaaaagacattaccctgctcttaaaacactagagcatctggagcacacctacctgcctcaagtgtcacattataggttctgtaaggtcatggtggataacattcctaaactcagagaggaaattaaagacgttagcatgtcagacttaaaagatttcctggaaagcataaggaagcactccgataagattggggagactgctatgaagcaagcacagcagcagcggaacctggataacattgttttacaacaaccccgcatcggaagtaagcgcaagtctaaaaaagacgcctacatcattttcgatacagaaattgagtcaacttcaccaaaatccgagcaggattctggtattctggacgtggaggacgaagaggacgacgaggaagtgcccggtgcccaggacctcgtggactttagcccagtgtaccggtgtctccacatctacagcgtattaggggcaagggagacttttgagaattattatcgcaagcagcggaggaagcaagcaaggttggtgctccaaccaccgagtaacatgcatgaaactttggacggttacagaaagtatttcaaccagatcgtaggttttttcgtggtggaagaccatatattgcacaccacacagggcctggtaaaccgggcctacatagatgaactttgggagatggctctcagcaagacaatcgctgcactgcgcacacactctagttattgcagtgatccgaatctggtgctagatcttaagaacttaattgtcctgtttgctgacactctgcaagtgtatggtttccccgtaaaccaactgtttgacatgttgctcgaaattcgggatcagtacagtgagactctactgaaaaagtgggccgggatatttcgcaacatactagattccgacaattactcacccatccccgttacatccgaggagatgtataagaaagtggttggtcagtttccatttcaagatattgaactcgaaaagcagcccttccccaagaagtttcctttttctgagtttgtgcctaaagtctacaatcagattaaggagtttatctatgcctgtcttaagttctcagaagatttacacttatcatccacggaagtggacgacatgattcggaaatccaccaatctcctgttgacgaggacgctttctaactcactacagaacgtcattaagaggaaaaatattggccttaccgaactcgtacagataataatcaatacaacccatctggaaaagtcctgtaagtacctcgaggaatttataacaaatatcactaatgtgctcccagagacagtacacaccaccaagctgtacggtacaacaacctttaaagacgcccgccacgctgccgaagaagaaatttatactaacctaaatcagaaaatcgaccagttcctgcaacttgccgactacgactggatgactggcgaccttggaaataaggcaagtgattatcttgttgaccttatagcattcctgaggtctacctttgctgtcttcactcatctgcccgtatctgggtcttgctattttgttttgtatatatag

SEQ ID NO: 116428 - DNA, 5970 bp, synthetic construct
  misc_feature 1..5970: note = Description of Artificial Sequence: Synthetic coding sequence
  source 1..5970: mol_type = other DNA
atgacaaaagtcccccctgccttcgacttctctttcctcaatgacgaagaggctcgcaagatactgcaggttttagagcggaatgaggaactgcagcgagccgaaaaggatcgaatcagtaaactgcagaaaactaagcgcgatatacgctggttgcagggcgtgacaggtgagtggttcgaggaaatccagaggaagaaattttgtaatgagacagacgtgagccagatgcttaagcaaccccttacctatagactgtctaaggaaatggcgaaaaatgacccgattgagctgcccacatcgagaagcaagaatgtgacaaaccagaaaaaaccaacgcccttttcatcaagaatgtccttccgaagttccttcgccagtctgttcagtttccggaaatccgggaaggagacaagcaaattacccagcctggggcaaaaagggtgcgacggtcatgctggtcctccaatgcccgtccgcggcgcagcagtgcaagctaagatctacaacagtcctctcgaaaaccacttggtcgatagcaccttcgtccccaagcccgccgtgatgcgcgaggaatctggcatgccccccccctgggacgcatctctgctagaaaacgagtttttccaagtcttggacgacctcgattcaaagcttgcccaggagcaatcagcaagctccgtgaatacacgcacaccccttaattacggtagtaggacccagttcggccacttttattcatctggcaaccggcacggcaatatcacagaacggcacaagaagcactacaatgagacatctaacatgagtatttacgacatcctgcggcctggtactccgagagaaggtttcaaaaccttctccccgcgtacttcaaccatctacgacatgtatcggacacgcgaacccagggtgttcaaggaggactatgttcagaaaaatacctttggttctacatccttgtgcttcgattctcgacagaggtctgctctccccgcaactgggcactttaccgctagatccctgcatttccctgccacaacgcaatccaagtctgggtttatcccccctcgccaccagcaatcaccaaaacggacccccctgagtagtattatttggaacaggtccgatagctcccgcgatagagaaaatcaagaagagtttcttcgagccccctccccgatggagatagatccagcagacaagtacgtgtatcctcgcggttttcaggagaataaacgttacgaaagctaccactcccagaacgtataccagcgggtatcactaaacgcacccatggagaacgccatgagtccagacacatttgagaattctgaaaatatgcccttctaccatcaatcaaatacctttacccggtcgtttttctctaatacatttggtcgatccggcgaacaacgtagattcggccaaggtccattctgggggcaggaaaaaggtcatagcttctggtctgatttccataggtctaggaagtcgttctcctcctccgacagggacttcgagatgatatcaatggaggccaacagcgtctcagcgatccatggacacaatgtttcttccgagcattgggagagtttcagcagtggctatgggactgacgtttctcgagggcaggaggagcctcacccttggcagttcgattttcagcggtctactctggatagcatggttgtgagtcacggtaatgagacacaattgacaccccacttcggcacgcctaatgtctgcagcatgacgggcagttcttatcacgtcaagtccagcgaactggtgagtcagcaagattcctccccagtagaggtgcacataaacaaagaggcttccagctttggcatcgcacagacccttgcgtcatcatttaagacttctttttcccagatctcagacgacagaaggaaccctcaatctccgaatctccagaatcctaccgtcacactccagaaaatctttccaaataagcccgctagtcatccgatgcgaagccacacggaagtgaccgtaacctccagcaactccgtggactccttgcctctcgccaagtcgcagccaaacatattagtgactgaggtgaataacgagaaggatctgaatgaaagcatatcagaagaagacaagcagctcagtaagatggatcagacaaataaagcaggagaaatccctcagccagtgagccagaccggtatcagtaattctctgcccgactttcagaatcccctgtctcaggattccgcaaaaagcaacggcttcggttttaatgcgagtacaattatctcgagcaaaaaatccccccgagtttttagcaggaaagacacctccaagatgtacataccacacacagacaaatccaacgacatcaagcaggacaagcgtttcacagagaacagaaagctcggctccaccgcctcattgccattcatacaggaacatcggacgccaccgagcttcccccggaccgaccagggatgtcaccaagagctgacggtcaacaacgaggatataagccggatcattactaacaaccactggtctagcgccctcacagatacacagaacgcccagtattccaagtgcaagctgactcccgggcataaaactagttgcgattcgctggatctgtcctcagcggctcttcccgacagctcaccctccaagaattctagtttggatgcaccggtggtcccttctaccaccgttttttcgcggaggtcacctagcgacaaggacccttccctgggagagcgcgaggaaaaggacaatgccggaaaaaaccagaagaaccaatttatcgtgtcccatagcgaaaatcaggagcgtaatgacagcccagtgcccacgcacgatgaagtggtggacgtgaagtgccacagccattcccccttcaggaacgagagagggaagggtaagattcggcatcatatatcatgcatcgaaaaactctcaaagactgaaagtatctccgtgcctacctccgatcataggagcctgatagaagccaaccagtctaattctaaggtaagtgagctcgatactatttattgtaccctgcctcgaaagtcttctagctttctgattcatggaaggcagagcggatcgaagataatggcagcttcactacgaaacgggccaccccccttccaaattaaaaacaacgttgaagacgccatgggcaactacatgttaaacaagtttagcccctcgtctcccgagagtgctaatgagtgcagtaaggtcctgtctgattccgcactggaggcaccagaagctaccgagcgtatgactaatgtaaaatcttccggatctaccagcgtgcggaagggacccttgccttttttaattaatagggcgatgtcgtgccctagtggcgagcctcacgccagcactggaagggagggccgcaagaaaccacttacctccggtatggatgcgtcagaactgacccccagagcctgggaacgcataatttcccctgtggagagtgactcctctgtgcgcgattgttcgctgactaaacgccagcaccaaaaagagaattttcaggagtatacagaaaaggaagggaagatggcagcgtcgaggagatcggtgtttgccctaagcaacgaggaccctttaccgttctgctctgacctgtccggcaaagagaggggtaaaactctgcacaaagtgaagaccacgtcaactttctcagtttctggcgatgaggacaacgtcaaatgcctggaagtcgtatccatctactatactcttccaagaaagcctagcaaaaaattttgtaacttgcttcagcagtacacacagaatacgaatttgttaatcgaaagcccccaggtcgagaccgagacatttcccaacgccctagaaaaggataagcagaactacagcacaagagagcaatcaggcacacccagttgcgaaaatctgaaaatgagtgtaaactccgaccagaccctgaccacagaaaatatgacagccttccggctaagtaaccggggtccactggcccctaccctgcaggaaatggcatcagtcgaggccgcagtgtctctgccagaggaggaatcaaaggcgcgggagatctttagtgataatctggctaagactcccctgggagattctgagaacaaaaaagagcgcggcaaaaagcttcagtcggagactctgcacaccagtctgatgttgcagaggaaaaatgtgtcagaggagaagtcggaaaactgtcagcagagcatcaactcctccaattccgggcctagctccttgccagccctgagcgaggtgaatatcggtaattctcaaacacgtaggagctcctgggagtgcaccggatccgggcgagccatccccttcaccgggtccggaaaatgccctcagaaggatcacacgtcgacggccgtgggcgatggatcatcaggaagtcagccccgggaagggaggggcgacatcggaactaactgtcagaaaatgacaaacaaaacgctcagccactctgagagccaggtgttcgctctcacccctgcactgcataaactgcagcttggagaggagacccagtcggatgaacctaacttggaatccctccaatccgagccccgcgagttgcctcaaagatctcaggaggcgaatatgactgagtcccggaaggcggaagatgagatgcaaaaatccgcgtgggatcagccttctttgccagaggggaacaaaaataagaccaatttggatgatttggtgaagggcgaaaaccgcagttcagttaagcacagattagctgccatgtcaaaggccagccgcaaatttcctgccaaggatgtgagtccaagaagacatgttgccacaatctttccccagtccggaagccgatctggcttcgaccatctgagcttaggaaccgtggaatgtaatcctctcttcccagagccaacccccaagtcagcagagagcattggtgagagccgtctgtcggagaatggcaagcatgtgaaaaagagcgagaatctcctgcccataaccgtgttgccaaaccgggaaccttccacccacgtatcaaatcagaagtctaacagcatcagtcaacgccaccagaacgaatttaaaaacgtgtccgaaagcccatccaaacacgaaaacagcaaggatgtaacagccgcacaaaacctggtgagggaaagcggtgctcccagtcccatcacattcacctccttgcgagaggctgagttctcagacaatcaacgcaggttgtcaccacctttccctctagaaccggctcaaaaatcacgggtttcttcaccgcttgcgagctttctgcagcagcaacgctcagcctccagtctggaatgggaacctgaacctcacctctacaggagcaagagcctgaaaagtattaacgtgcacggggacctgctgagaaagtcacatccgccgaaggtcagagaaaggcacttcagcgagtccacctcaattgacaacgccctgagccggttaacacttggaaatgagttctccgtaaataatgggtacagccggcgcttccggagtttttcagagcttcccagctgtgacggcaacgaatcatgggcctataggtccggcaccaagaccgggccacgtagtgccataagcatttaccggcccattgactacggaattttcggcaaggagcagcagttggctttcctagaaaacgtcaagcggagcctgacacaaggtagactgtggaaaccgtcattcttgaagaaccccgggtttctcaaggacgatctgagaaacccgcccaatccatcagagtcattatcttcaaattccccatctagtcaggtccccgaggacggcctctctccaagtgaacccctgaacatttatgaagatgatcctgtcgactcaaactgcgacaccgacaccacaacagatgatgagtactacctggacgaaaacgacaaagagtcagaactttag

SEQ ID NO: 116429 - DNA, 5742 bp, synthetic construct
  misc_feature 1..5742: note = Description of Artificial Sequence: Synthetic coding sequence
  source 1..5742: mol_type = other DNA
atgctgaaacaaccgctcacctatcggctaagcaaagaaatggcaaagaacgaccccatcgaattgcctaccagcaggtccaaaaatgtgaccaatcagaaaaagcctacaccattctcctcccgtatgagttttagatcctcttttgcatcactgttttcatttcgaaagagtggcaaagaaacgagtaaactcccttccttaggacagaaaggctgcgacgggcacgccggccccccaatgcccgtgcggggggcagcagtacaggccaagatctataatagtccactcgagaaccacctggtggactccactttcgtgcccaagccggctgttatgagagaagagtcaggcatgcctcctccatgggacgccagcctcttggagaatgaattttttcaagtcctggacgacttggattccaagcttgcccaagaacagagtgcatcctcagtcaatacaagaacgcctctgaactacggctccagaacacagtttggacacttctatagttccgggaaccgacatgggaatatcacggaacgtcacaagaagcactataacgagacgtcaaacatgtcgatttatgatatcctccgccctggaacccctagagaggggttcaagaccttttcaccgaggacttccaccatatatgacatgtatagaactagagagcctagggttttcaaggaggattatgtgcaaaagaataccttcggtagtacatctctctgttttgacagcagacaacgtagcgcattgccagctacagggcatttcaccgccaggtccttacattttccggcaacaacacagagtaagagcgggtttatccctcctaggcatcagcagagcccaaagcggactcctctgtcgagcatcatctggaatcgatctgacagttcaagagacagggagaatcaggaggaatttctgcgggccccttctcctatggagatcgaccccgccgataagtatgtgtaccctaggggctttcaggaaaataaacggtacgagtcttatcactctcagaatgtgtaccagcgggtttctctgaacgccccaatggagaacgccatgtctccggacacgtttgaaaactctgagaacatgcctttttatcaccagagcaacacctttactaggagcttttttagtaacacctttggaagatcgggcgaacagcggcggttcggtcaaggacctttctggggccaggaaaaaggtcatagcttttggagtgactttcataggtctcggaagtctttcagctcctcggatcgggacttcgaaatgataagcatggaggctaacagcgtgtccgcaatacacggacataatgtcagctccgagcattgggagtctttctcctccggttatggaaccgatgttagccggggccaggaagagcctcacccatggcagttcgacttccagcggtcgaccctggatagtatggtcgtttcccacggaaacgaaactcagctaactccacactttgggacccctaatgtctgctccatgaccgggagctcctatcacgtgaagagctctgagctcgtttctcagcaggatagttccccagtcgaggtccacatcaataaggaggcatcatcattcggaatcgctcagaccttggcgtctagctttaaaaccagtttctctcagatctccgatgacagaagaaacccccaatcgcctaaccttcaaaatccaacagtaacactccagaaaattttccctaataagcccgcctctcacccaatgaggtcccatacagaggtgaccgttacgagctcaaattccgtggacagtctcccgctggcaaagtctcagcccaacatccttgtgacagaggttaataatgaaaaagacctgaacgaatcaatctctgaggaagacaagcagctgtccaagatggaccagacaaataaagcaggagaaatccctcagcccgtatcccagaccggtatctccaactcgttacctgattttcagaaccccttaagccaggattcagccaaaagtaacgggttcggattcaatgccagtaccatcatctcaagtaagaaaagcccccgcgtgttcagtcggaaagacaccagcaagatgtatatcccacatacggataagtctaacgatatcaagcaggataagcgcttcaccgaaaataggaagttggggtccacggccagtctccccttcattcaggaacatagaacgccgccatcttttcctagaaccgaccagggttgccatcaggagctcaccgtcaataacgaggacatttctcggatcatcaccaacaatcactggtcttccgccctcaccgatacccagaatgcccagtattcgaagtgtaaactgacccccggccacaagacctcctgtgactctctcgatctgtcatcggcagctttaccagactcatctcccagcaaaaacagtagcctagacgcgcccgtggtgcctagtaccactgtgttttcgagaaggagtccttctgataaggacccatccctgggggaaagagaggagaaggacaatgcaggaaaaaaccaaaagaaccagtttattgtaagccatagtgagaaccaggaaagaaacgactctcctgtccctacacacgatgaagtcgtcgacgttaaatgtcatagtcactcaccctttcgcaacgagagggggaaaggtaagatcaggcatcatatcagttgcatagagaagttgtctaagacagaatcgatctcagtcccgaccagcgaccaccgcagcctaatagaagcaaaccaaagcaactctaaagtgagtgaactcgatacaatttattgtacacttccacgcaagagctcctccttcctgatacacgggagacagtccggcagcaagattatggccgccagtctcaggaatggcccaccgcctttccagattaagaacaatgttgaggacgccatggggaattatatgctcaacaagttttccccgtcgtctcccgaatctgctaatgagtgctctaaagtcctttccgatagcgccctcgaggccccggaggcgactgaaagaatgaccaacgttaaaagctcaggtagtacgtccgtgcgaaaaggccctttaccttttttgataaatagggccatgagctgcccatccggcgaacctcacgctagtactgggcgtgaaggacgcaagaaacccctgacctccggtatggatgcaagcgagctcaccccacgtgcctgggagcgcatcatctctcctgttgaatccgattcctccgtcagggactgcagcctgacaaagcggcagcaccagaaggaaaatttccaggagtataccgaaaaggagggtaaaatggctgccagtcgtcgatctgtgtttgctctttccaatgaagatccactccccttttgctctgacctctcaggcaaagaacggggcaagacactccacaaggtaaaaactaccagcaccttctctgtctccggcgacgaagataacgtcaaatgtctggaagtcgtgtcaatttactataccctccccagaaaaccctccaagaaattttgtaatctcctgcagcagtatactcagaatacaaacctgctcatcgagagccctcaggtcgaaaccgagacatttcccaatgctcttgagaaagacaagcaaaactactccacccgcgaacagtccggaacacccagttgtgaaaacctcaagatgtccgtgaactcggaccagaccctcacaacagaaaacatgaccgctttcaggttgagcaatcggggacctttggcccccacactccaggaaatggcaagcgtggaggcagccgtttctcttccggaagaagagtccaaggccagagagatcttctctgacaatctggctaagactcctctgggagactctgagaataaaaaggaacgtggtaaaaaactgcagagtgagaccttgcacacttccctgatgctccaacgcaagaacgtctccgaagaaaagtcagaaaattgccaacaatccatcaacagttctaactcaggacccagtagcctgccggcgttaagcgaggttaatatcggcaattcccagaccaggcggtcgtcatgggagtgtacaggcagcggtcgggccatcccattcaccgggagcggcaagtgcccacagaaggaccatacgagtacagctgtgggcgacgggtcgagtggttcccagccacgcgagggacggggagatataggcacaaactgccagaaaatgaccaacaaaaccctcagccattcagaaagtcaggtgttcgccttgactccagctctgcataagctgcagctgggtgaggaaacacagtccgacgaacccaatctcgaaagtctgcagagcgagccacgagaacttccccagcggagccaagaagctaacatgacagagagtagaaaagccgaggacgagatgcaaaagtccgcatgggatcagccttctttacccgaaggtaacaaaaataaaactaatctggatgacttggtgaagggtgagaacaggtcctcggtgaagcaccgcctagccgctatgagcaaagcctcccgcaaattcccagctaaagacgtaagcccgaggagacacgttgccaccatcttccctcagagtggatcaaggtccggctttgatcacctatcgctgggtaccgttgagtgcaatcctctgttcccagaacccacacccaagagtgccgaatccattggggagtccaggttgagcgagaatggaaagcatgttaagaaatctgaaaatctcctgcctattaccgtccttcctaacagagagccatcaacacatgtctcgaaccagaagagcaattctattagtcagagacaccaaaacgaattcaaaaatgtgtccgagagcccatcaaaacacgaaaacagcaaagatgtgaccgcagcgcagaatctggtgagggagtcgggggccccaagtcccataactttcacttccctcagagaagcagaattcagtgataatcaacggcggctgtccccacccttccccctggaacccgctcagaagagccgtgtgtctagccctcttgctagcttcctccagcagcaacgcagcgcgagttcactcgaatgggagccagaaccacatttgtaccgttctaaaagcttaaaaagtattaacgtacatggagatctgctgaggaagtcccatccacccaaagtgcgcgaacgccacttctccgaaagtacatcgatcgataacgcacttagccggctgaccttaggaaatgaattcagtgttaacaacgggtatagcagaaggtttcgtagcttctcagagttgccttcttgcgacggcaatgaaagctgggcttatcgatccgggacaaagactggcccgcggtcagctatttctatttacagacccattgattacgggatttttgggaaggagcaacaactcgcttttctggaaaatgtgaaaaggagtcttactcaaggccggctatggaagccctcatttctcaaaaatccgggcttcctaaaggacgacctaaggaacccccctaacccgtctgagtcattatcctcaaattcaccctctagccaggtccctgaggatggcctgagcccctcagagcccctgaacatatacgaggatgatccggttgatagcaactgcgataccgacaccacaacagatgacgagtattatctcgatgagaatgataaggagtcagagctgtag

SEQ ID NO: 116430 - DNA, 2460 bp, synthetic construct
  misc_feature 1..2460: note = Description of Artificial Sequence: Synthetic coding sequence
  source 1..2460: mol_type = other DNA
atgcctgtgagaggggccgccgtgcaagccaagatctacaacagtcccttggagaatcatctggttgacagcacatttgttcccaagcctgctgttatgagggaggaatcagggatgccaccgccctgggacgcaagtctcctggaaaacgagttttttcaggtcctggatgatctggattccaaactcgctcaagagcaaagtgcaagttctgtcaatacacggactcctttgaattacgggtctcgcacccaattcggccatttctactcttccggcaatagacacgggaacattacagaaaggcacaagaaacactataatgaaacctcaaacatgagtatctacgatatacttcgccctggtacaccaagagaagggtttaagacattcagccccagaacgtctaccatttacgacatgtacaggactagagagcctcgggtttttaaagaggattatgtgcagaaaaacaccttcggctcaactagcctgtgtttcgactcccgccagcggtcagcgctcccagccaccggtcattttaccgcccggagtctgcacttcccggcgaccacacagagcaaatcaggcttcattccccctaggcatcagcaaagccctaaaagaacgccactaagcagcatcatctggaataggagcgactctagccgcgatagggagaatcaggaagaattcttgagggctccaagccctatggagatagatccagccgacaagtatgtctacccacggggatttcaggagaacaagcgctacgagtcctatcactcccaaaatgtgtaccagcgggtctctctcaatgcccccatggagaatgctatgagcccagatacctttgagaatagtgagaacatgccattctaccatcagagcaacaccttcacaagatcgttcttctcgaacacgtttggaaggtccggtgagcaacggcgatttggtcagggtccgttctggggacaggagaaaggtcactccttctggtctgacttccatcgttcccgaaagagcttttcttcttctgacagagactttgaaatgatttccatggaagcgaattctgtgtcagctatccacggccataacgtttcaagcgaacactgggaaagtttctcctcaggctatggaacagatgtcagtcggggacaagaggaaccccacccgtggcagttcgatttccaaaggtcgactttggattccatggtggtgtcccatggaaacgaaactcagctcactccgcactttggcactcccaatgtgtgcagtatgacgggtagtagttatcatgtgaaaagttcagagttggtcagccaacaggactccagtcccgtggaggtgcacatcaacaaagaggccagctcattcggcatcgcccagaccctcgcgtctagcttcaagactagctttagtcagatttccgatgatcgcaggaacccccaatctccaaacctgcaaaaccctactgttacactccagaaaattttccctaacaagcccgcctctcacccaatgcgaagccacaccgaggtcactgtgacatcctctaatagtgtggactctctaccgctggcgaagagccagccgaacatcctggtcactgaagtcaacaatgaaaacagcaaggacgtgaccgccgcccagaacttggtccgggaaagtggggcacccagtccaatcacttttacttctctgcgagaagcagagttcagtgataatcagcgtaggctcagtcctcccttcccccttgaacctgcacagaaatctcgcgtgtccagtcctcttgcttcattcctccagcagcagcgctccgcgagcagcctcgagtgggagccggaaccccacctttatagatccaaatccctgaagtcaatcaacgtccatggagacctgctgcgaaagtcacacccgccaaaggtgcgggagcggcacttcagtgaatccacgtccattgacaacgcactgtccaggctcaccctaggtaatgagtttagcgtgaacaacggctatagtagacggttccgatcctttagtgagttacctagctgcgatggtaatgaaagttgggcctaccgctcaggcaccaaaacgggcccgcggagtgctatatctatttaccgacctattgattacgggatttttggaaaagagcagcagcttgccttccttgaaaatgtgaagaggtccttgacacagggtcggctgtggaagccaagcttcctgaagaatcctggattcctgaaagacgacctccgcaaccctcctaaccccagcgaatccctctcttcgaattcaccgtctagtcaggtccctgaggacgggctgagtccaagtgaacctctcaatatctatgaagatgaccccgtcgattcgaattgtgacacagataccaccacagatgacgagtattacctggatgagaatgataaagagtccgaactgtag

SEQ ID NO: 116431 - DNA, 5406 bp, synthetic construct
  misc_feature 1..5406: note = Description of Artificial Sequence: Synthetic coding sequence
  source 1..5406: mol_type = other DNA
atgcgagaagagagcggaatgccccccccttgggacgccagcttgctggagaatgaattctttcaggtgcttgacgacttagacagcaaattggctcaggaacagtctgcgagcagcgtgaatacgaggacacccctcaattatggcagcaggactcaattcggacacttctattcctccggcaataggcatggcaatatcaccgaacggcataagaaacactataatgagacgtcaaatatgagcatttacgacattcttcggcccggtacgccacgggagggttttaagaccttttcgcctcgaacatctacgatttatgatatgtaccgcaccagagagccccgagtgttcaaggaggactacgtgcagaagaacacctttggatctactagcttatgcttcgatagtaggcagcgcagcgccctccccgccacagggcacttcacagccagatccctccacttccccgcaactacacagagcaaaagcggctttatccctccacggcaccagcagtcccctaagagaacacctctgagctcgatcatttggaataggtcggactccagccgcgatcgcgagaaccaggaagaatttctccgggcgccatctccaatggagatagacccggccgataagtatgtgtatcccagggggtttcaggagaataaacggtacgagtcataccactcccagaacgtctaccagcgcgtgagcttgaacgcacctatggagaacgcgatgtcaccagacacattcgagaattctgagaacatgcctttttaccaccagtcaaataccttcacacggagcttcttctccaacacgttcggtcggagtggggagcagcgccggtttggccagggcccattctgggggcaagagaagggccactcattctggtccgacttccatcgctcgaggaagagcttctccagttctgaccgcgacttcgagatgatctcaatggaggcgaatagcgtgtccgctattcatgggcacaacgtgagctcggagcactgggagagcttttctagcggctacggcacggacgtgtcacgcggtcaggaagaacctcacccttggcagttcgattttcagcgctctactctggactcaatggtggtaagtcacggaaacgagacccagctcaccccccattttgggacgccaaatgtatgtagcatgaccggatcaagctaccacgtcaaatcatccgagctggttagtcagcaggactcatccccggtagaggtgcacatcaacaaagaggcaagctcttttggcatcgcacagacgctggcctcatcattcaaaacctccttttcacagatctccgacgacagaagaaacccacagtctcccaacctccagaatccaactgtcacactgcagaaaatctttccaaacaaacccgcttcccaccctatgaggtcccacactgaagtaacggttacatcatcgaatagtgtagattctctgcctctggccaaatctcaacctaatattttggtaactgaagtgaataatgaaaaagacctgaacgagtcgattagcgaggaagacaagcagctttctaaaatggatcagaccaataaggccggcgagattccccagcccgtgtctcagactgggatctccaatagtctgcctgactttcaaaaccctctgtctcaggacagtgcaaagtctaacgggttcgggtttaacgccagcacaatcatatcaagtaaaaagtctccacgggtgttcagtcgcaaggatacctccaagatgtacatacctcacacggacaagagcaatgatataaagcaggataagcggtttacagagaatcggaagctggggagtaccgcgtccctaccctttattcaagagcataggaccccacccagctttcctcgcactgaccaaggatgtcatcaagagctgacggtcaacaacgaggacatctctcgtatcattaccaataatcattggagtagtgctcttacggatacacagaacgcccagtacagtaagtgcaaacttacccctggccacaagacatcctgcgattccctggatctgagcagtgctgcattaccggatagcagcccttccaaaaattcctctctggacgctcctgtagtgccttccaccacagtgttctcacgccggagccccagcgacaaggatccttctcttggagagagagaggagaaagacaacgccgggaagaaccagaagaatcagttcattgtgagccattccgaaaatcaagaacgaaacgattcccctgtgcccactcacgatgaggttgtcgacgtgaagtgccacagccactctccgtttcggaatgagaggggaaagggaaagatccgacaccatatttcatgcattgagaaactgtccaagaccgagagtatctccgtgccgacttcggatcatcgtagcctgattgaggcaaatcagagcaacagcaaggtgagtgagctggatacgatctattgcaccttgcctcgcaagtcttccagtttcctcatccatggacggcaatctggttcaaaaattatggcggcctctctgcgaaatggtccccctcctttccaaattaagaataatgtggaggacgccatgggcaactacatgttgaataaattttctcctagttctcctgagagcgccaatgaatgttcaaaggtactgtcagattcagcactcgaggcccccgaggccacggagaggatgacaaatgtgaaatccagtggctctacttcagtaaggaaaggtccactgccctttttaataaacagggcgatgtcttgcccctctggagaaccccatgcctcaactggcagggaagggagaaagaagcctctgacatctggaatggatgcctctgaactgaccccccgcgcatgggagcgcatcattagccccgtcgaatctgactcgagcgtacgggactgctctctgacaaagagacaacatcagaaggagaattttcaggaatacacagaaaaggaggggaagatggctgcaagtcgccgcagtgtcttcgccctcagtaatgaagaccccttgcccttttgttcagacttgagcggaaaagagagaggtaaaaccctccacaaagttaagacgacgagcaccttctccgtatctggcgatgaggacaatgttaagtgcctcgaggtggtatcgatctattatacactgccacggaaaccttccaaaaaattttgcaacctgctgcaacagtatactcaaaataccaatctgctcatcgaatcgcctcaagtggagaccgagactttccccaatgctctcgaaaaagataagcagaactactctaccagggagcagagcgggacccccagctgtgaaaacttaaaaatgagtgtgaatagcgatcaaaccttgacaactgagaacatgactgcctttagactgtccaatagaggcccactagctccaactctgcaggagatggcttctgtcgaagctgccgtgtcattacctgaggaggaaagcaaagctcgggagatcttttccgacaatttggccaagacaccgctgggcgattctgagaacaaaaaggagcgcggcaaaaaactacagagtgagacactgcatacatcgttgatgttacagagaaagaatgtaagcgaggagaagtctgaaaattgccagcaaagcatcaacagctctaatagcggccctagctcactgcccgccctgagcgaggtaaatatcggcaattctcaaaccaggcgaagctcctgggagtgcacaggaagcggcagggctatcccattcactggaagcggaaaatgcccacaaaaggatcatactagtacagctgtgggagacggctctagcggctcccagcctagagagggacgtggagacattgggacgaactgccagaaaatgacaaacaagacattgagccactcagagtcacaagtcttcgctctcactcctgcgcttcacaaattacaattgggcgaggaaactcagtccgacgagcctaacttggagagtttgcagtcagaaccacgagaactcccacaacgctcacaggaagctaatatgacagaatcaagaaaggccgaagacgagatgcagaaatctgcgtgggaccagccctctttgcctgagggtaacaagaacaagacgaatcttgacgacctggtaaaaggggaaaatcgctcgagcgtgaagcatcgtctggcagcaatgtccaaggcttctcggaagttccctgccaaggacgtgtcaccccggagacatgttgccaccattttcccccaatccgggtctaggagtgggttcgatcatctatcgctcggcacagtcgagtgtaatcccttgtttcccgagccaacacccaagagtgcagaaagcatcggagagtcacgcctgtctgagaatggcaagcacgtgaagaaatctgaaaacctgctgcctatcacagtcctccctaaccgcgagccgtcgacccatgtgagtaaccaaaaaagcaactccatctcgcagcgtcaccagaacgagttcaaaaacgtcagcgagtccccatcaaagcacgaaaactcgaaggacgtgacagctgcccagaatctggtccgggaaagcggggcccctagtccgattacgttcactagcctccgggaagctgaattctctgataaccagcggagactgtcccctccattccccctggagcccgcccagaagtcacgcgtaagctcaccactcgcaagcttcttgcagcagcagaggtccgcgagttctctagaatgggaaccggagccgcacctctaccgctcaaaatccctcaaatcgataaacgtccacggtgatctgttgcgcaagagtcatcctcctaaagtcagagaaagacacttttctgagtcaactagcatcgataatgccctgtctagactgactcttggtaacgagttctcagtgaacaacggatacagtcggcgcttccgctccttctccgagctgccctcctgtgatggcaacgagtcctgggcctaccgctcgggcaccaaaaccggacccaggagtgcaatctccatatacagaccaatcgattacgggatctttggaaaggaacagcagctggcctttctcgaaaatgtcaaaagatcactgacccagggaaggctctggaagccttctttcttaaagaatccgggctttctgaaggacgatctgcgcaacccgcccaacccttctgaatccttatcaagcaatagcccatctagtcaggtgccggaagacgggctcagcccatctgagccattgaacatctacgaagatgacccagtggattcgaactgcgatactgacaccactacagacgacgaatactacctggatgagaacgacaaggaaagtgagttgtag

SEQ ID NO: 116432 - DNA, 5949 bp, synthetic construct
  misc_feature 1..5949: note = Description of Artificial Sequence: Synthetic coding sequence
  source 1..5949: mol_type = other DNA
atgtcattgtcatttctcaatgatgaagaggcaaggaagattctgcaggtgttggagaggaatgaggagctgcagcgggcggagaaagacagaatcagtaagctccagaaaactaaaagggacatacgatggttgcagggggtgactggcgaatggttcgaagaaattcagcgcaagaaattttgtaacgaaacagatgtcagtcaaatgctcaaacagcctttgacctacagactgtcaaaagaaatggccaaaaatgaccctattgaactgcctacctccaggtccaaaaacgtaacaaaccagaagaagccaaccccgttctcttccagaatgagttttcgcagtagctttgccagcctgttttcttttcgaaaatccgggaaagagacgtccaagcttcccagccttgggcagaaggggtgtgatggacacgcaggcccaccaatgcctgttaggggcgcggccgtacaggcgaaaatctacaacagcccgctggagaatcacttagtggacagcaccttcgtgcctaaacccgccgtgatgagggaagaatctggcatgcctccgccatgggatgccagtctgcttgaaaatgagttcttccaagtccttgatgatctggattctaagctcgcccaggagcagtcggcttccagcgtcaacacacgaaccccgctgaactatggatcccggactcagttcgggcacttctatagcagcggaaaccggcacggcaacattaccgagaggcataagaagcactataacgaaacttccaatatgtctatctatgatatcctgcgacctggcacaccaagggagggctttaagaccttctctccgcgcacctccaccatctatgacatgtaccgcacaagagaaccccgcgtgtttaaagaggactacgtgcagaagaacacatttggctccacctccctctgcttcgactcaagacagaggtcagcgctgcctgcgacgggccactttactgccaggagtctgcattttcctgccactacccaatctaagagcgggtttattccgccgagacaccagcagtctcctaagcgcactcctctctcatccatcatctggaatcgatcagactcctcacgggaccgagagaatcaggaagaattcctgcgggcccccagccccatggaaattgaccctgctgacaagtacgtttatccgcgcggcttccaggagaataaacgctatgagtcctatcattcccagaatgtgtaccaacgggtatcccttaatgcacctatggagaacgccatgtcccccgacacatttgaaaattccgagaacatgcccttctaccaccagtccaacacctttaccagatcctttttctccaatacctttggacggtccggagaacagaggcggttcggccagggacccttttggggacaggaaaaaggccattcgttttggtctgattttcataggtccagaaaatccttttcctcctctgatcgcgatttcgagatgatcagcatggaggccaatagtgtctctgccattcacgggcacaacgtgagttccgagcattgggagagcttttccagcggatacggtaccgacgtgagccgaggacaagaggagccacacccctggcagttcgattttcagcgctccaccctagacagtatggtggtctcccatgggaacgaaacccagctcactccgcattttggaactccaaatgtgtgcagcatgacgggcagcagttaccatgtgaaatcttccgaattagtaagtcaacaggatagctcccccgtggaggtgcacatcaacaaagaggccagcagtttcggaatcgcccagaccctagcatccagctttaagacaagtttctcacagatttccgatgacagaagaaatccccagagcccaaacctgcagaaccccaccgttacactgcagaagatcttccccaacaagccagcttcccaccctatgcgttctcatactgaggtgactgtcacttctagcaacagcgtggattcccttccactcgccaagtcccagccaaatattctcgtaaccgaggtgaataacgaaaaggatctcaacgagtcaatatcagaggaagacaagcagttatcaaagatggaccaaacgaacaaagcaggcgagatcccccagccggtaagccagacaggcatatccaacagcctgcccgatttccaaaaccctctgtcccaggattctgctaagtcaaatggctttggattcaacgcatctacaataatatcatctaagaagagtcctcgagtcttcagcagaaaggacacctccaaaatgtacatcccccataccgataagtccaatgacatcaagcaggataaacggttcaccgagaaccgcaagctcggatcaactgcaagcctgccctttatccaggagcaccggacacccccgtcttttccccgaacagaccagggctgtcatcaggaactcactgtcaacaacgaggacatatcaaggatcatcacgaataaccactggtcatctgccctgactgacactcagaacgctcagtacagtaagtgtaaacttactcctgggcacaaaacctcatgcgactcgctcgatctatctagcgctgccttgcccgactcatccccctcaaaaaactctagtctggatgctcctgttgtgccttcaacaaccgtcttctccaggagatcgccttcagataaggacccatctctgggagaaagggaagaaaaagacaacgccggaaagaaccagaaaaaccagtttattgtgtcccattcagaaaaccaggagcggaacgattccccagtgccaacacatgacgaggtagttgacgtgaaatgccatagccactcccctttccgaaacgagaggggaaaaggtaaaattagacaccacatttcctgcatcgagaagctgtctaagaccgaaagcatttctgtgcctactagcgatcacaggtctctgatcgaagccaatcagagtaactcaaaggtatctgagttagacaccatctactgtactctcccaaggaaatcctcctcttttctgattcacggtaggcagagtggaagtaagattatggccgcctctttgaggaatggtcctccgcctttccagatcaaaaacaatgtggaagacgccatgggcaactacatgcttaataagttcagccccagtagcccagaaagtgccaacgagtgtagcaaggtcctgtcggactcagcactagaagctccggaagctacagaacggatgactaatgtgaaaagctccggaagtaccagtgttcggaaggggccactcccttttttgataaacagagcaatgagctgccccagtggagagccccacgcaagcaccggacgcgaaggccggaagaagcccctcacttcaggcatggacgctagcgagctgacaccgagggcttgggagagaattatcagccccgtggagtccgacagttcagtgcgcgactgcagcctgacgaagcgccagcatcaaaaggaaaactttcaggaatacactgaaaaggagggcaagatggccgcgagtagaagatcagtttttgccctgtctaatgaagacccgctacccttctgcagcgaccttagcggcaaggagagggggaaaaccctgcacaaagtcaagacgacatccacattctctgtcagtggggatgaagacaatgtgaagtgtctggaggtggtttccatatattacacgctgccccggaagcccagcaagaaattttgcaacttattgcaacagtatacacaaaacaccaacctcctgatagagagccctcaggtggaaaccgagactttcccaaatgcattagaaaaggataaacagaactattctacacgggaacagtccggaacaccttcttgtgagaacctaaagatgagtgtgaacagtgaccagaccctcactacagaaaatatgaccgcttttcggctgagcaatagaggaccacttgcccccacgctgcaggaaatggcctctgtggaagctgccgtcagccttcccgaggaggagtctaaggctcgtgaaatatttagtgataacctcgctaaaacacctctgggagactccgagaacaagaaggagaggggaaagaagctgcagtctgaaacactgcacactagtctcatgcttcaacggaaaaacgtttccgaggaaaagagcgaaaactgccaacagtcaattaactcaagcaactcggggccgtcttctctgcccgcacttagtgaggttaacattgggaacagtcagactcggcgaagtagttgggaatgcacgggttccggtagagcaattccatttacaggcagcgggaagtgtccacagaaggatcacacctcgacagcagtaggagacggatcaagtgggtctcaacctcgggagggccgcggagatattgggactaattgccagaagatgactaataaaacattgtcacacagcgaaagccaggtgtttgccctgactcccgcactccacaagctgcagcttggagaagagacccagagcgacgaacctaatttagaatctctccagtcagagcctcgcgagttacctcaacggtcccaggaagcaaacatgaccgaatcgcgtaaagcagaggatgagatgcagaagagcgcctgggatcagccaagcttgcccgaaggcaataagaacaaaaccaatctggatgacctggtcaagggggaaaatcgcagtagcgtcaagcatcgcctagctgccatgtctaaagcttccagaaagttccctgctaaggatgtatccccgcgcaggcacgtcgcgaccatcttccctcagagcggatcccgcagtggattcgatcatctttctctgggcacggtcgagtgtaaccctttgttccccgagcccactcctaaaagtgctgaaagtattggcgaatcccgactgagtgagaacggcaagcatgtgaaaaaatccgaaaatctgctgcccatcactgtgctaccaaatcgagagccctccacgcacgtgagcaaccagaagtctaattctattagccagcgccaccaaaacgagttcaagaacgtatccgaaagcccctctaaacacgaaaatagcaaagacgtgactgccgcccaaaacctagtgagggagtctggggctcccagccccattacctttaccagcctgcgagaggcggaattctctgacaaccagcgtagactgtctcccccattcccactggagcccgcccaaaagagtagggtaagtagcccactggcgtcctttctacagcagcagaggtccgcaagttctctggaatgggagccagaaccgcatctgtaccggagcaaaagcttaaaatccatcaatgtacatggtgacttgctgagaaaaagtcacccccccaaagtgagagaaagacactttagcgaaagcacctcgattgacaacgcccttagccgactcacattgggtaacgagttctctgtcaacaacggctatagtcggcggtttcggtcgttttccgagcttccctcctgtgatggcaacgaatcttgggcctacaggagcggaaccaaaaccggcccccggagcgcaatttctatttataggccaatcgactacggaatctttgggaaggaacagcaactggccttcctggaaaacgtgaaaaggtccttaacccagggtcgtctgtggaagccgtcattcctcaagaatccgggctttttaaaagatgacctgcgtaaccccccaaacccctcagagtccttatcatctaattcccctagctctcaggtgcccgaagacgggctttccccttcggagccactgaatatttatgaggacgatccagtggatagtaactgcgatactgacacgactactgacgacgagtattacttggacgagaacgacaaagagagcgaattatag

SEQ ID NO: 116433 - DNA, 2583 bp, synthetic construct
  misc_feature 1..2583: note = Description of Artificial Sequence: Synthetic coding sequence
  source 1..2583: mol_type = other DNA
atggcccctccttccacaagagaacctagagttctgtctgctactagcgctacaaaatccgacggtgagatggtgctgccgggttttcccgacgcggactccttcgtcaagttcgcgctgggctcagttgtagcggtgaccaaggcttcaggcggacttcctcagttcggcgatgaatacgatttctatcggtcattcccaggatttcaggccttttgtgaaacgcagggcgacagattgttgcagtgtatgagtagagttatgcagtaccacggttgtcgttctaatattaaagatcggtctaaagtcactgaattggaagacaagttcgatctcctggtggacgccaacgatgtgattctggagagggtgggaattctcttggacgaagccagcggcgtgaataagaatcagcaacccgtactccccgctggcttgcaggtgcctaaaactgtggtgagttcctggaaccgtaaggccgcagagtatggaaagaaggccaaaagcgagacttttcgactcctgcacgcaaagaacatcatccggccacagctgaaatttagagaaaagattgacaacagtaacaccccatttttgcctaaaatctttatcaagcctaacgcccagaagccactgccacaggccctgagcaaagaacgacgggagagaccccaggatcgcccagaagatctggacgttccaccagctctcgccgattttatccaccagcaaaggacacagcaggtcgagcaagatatgtttgcccatccatatcagtacgaattaaaccactttacacctgcggatgccgtgctccagaagccgcagcctcagctttaccggccaatagaagagaccccctgccacttcatatcctcactggatgagctggtggagctcaacgaaaagctgttaaactgtcaggagttcgctgtggacctggagcaccactcctaccgttcattcctcggattgacttgcctaatgcagatcagtactagaacagaagactttattattgacacccttgagcttaggagcgacatgtacatattgaacgagagcctgacagatccggcaatcgtgaaagtgttccacggcgcagattctgacatcgaatggctacagaaggactttggcctctatgtggtcaacatgttcgacacacatcaggcggcacggctcctcaacttgggacgccactccctggatcatctcctgaaactgtactgcaacgtcgattctaacaagcagtaccagctcgccgactggcgcatcagaccgctgccagaggagatgctgtcttatgcgcgagacgacactcattacttgctgtatatttatgacaagatgcgcctagaaatgtgggagcgcggtaacggacagccggtgcagttgcaggtggtgtggcagaggagtagagatatctgcctgaaaaagttcattaagccaattttcaccgacgagtcctacttagaattgtatcgaaagcagaaaaagcatttgaacacccagcagctgactgcgttccagttattgttcgcatggcgagataaaacagccaggagagaagatgagagctatggatacgtcctccccaaccatatgatgcttaagatagctgaagagctgcctaaagagccccagggaataatcgcctgctgtaatccagtgccaccccttgtacgccagcagatcaacgaaatgcatcttttgattcagcaagccagggaaatgccacttttaaagtctgaagtggccgccggggtgaaaaagagcggacccttaccgagcgccgagcgattggagaacgtgctgtttggtccacacgattgcagccacgcgccaccagacgggtaccccataatccccacatcaggctccgttccagtgcagaaacaggcaagcctcttccctgatgagaaagaggataatctgctgggtacgacctgccttatcgcgaccgccgtgattactcttttcaacgagccgagcgctgaagatagcaagaagggcccactaacagtggctcagaagaaggcccagaatattatggaaagcttcgagaacccatttagaatgatttcaaacaggtggaagctggctcaggtccaggtgcaaaaggattccaaagaggcggtgaaaaagaaggcggcagagcaaacggccgcacgtgaacaggctaaggaggcttgtaaagctgctgccgagcaagccatcagcgtgcggcagcaggtggttttagagaatgccgccaaaaagagggaaagagccaccagtgaccccagaactacagagcagaagcaggaaaaaaaaagactcaaaatctcaaagaagccaaaggaccctgagcccccagagaaagagttcaccccttacgactactctcaatctgacttcaaggcatttgccggcaattccaaaagtaaagtgtccagtcagttcgaccctaacaaacaaaccccctccggaaaaaaatgcattgctgctaaaaagatcaaacagtcggtgggaaacaaaagtatgtccttcccaactggcaagtccgataggggctttcgttacaactggcctcaacggtag

SEQ ID NO: 116434 - DNA, 2658 bp, synthetic construct
  misc_feature 1..2658: note = Description of Artificial Sequence: Synthetic coding sequence
  source 1..2658: mol_type = other DNA
atggctcccccaagtactcgggagccacgcgtcctaagcgctactagcgctacaaagtccgatggggaaatggtgctccccgggttccccgatgctgattcgttcgtgaagttcgccctcggttccgttgtagctgtgaccaaagctagtggcggactgccccagtttggtgacgagtatgacttctaccggtccttccccgggtttcaggctttctgcgagacccagggtgaccgcctactgcagtgtatgtccagagtgatgcaataccatggctgccgttctaatatcaaggacaggtctaaagttacagaattagaggataagtttgacctattggtggatgcaaacgacgtgatcctcgagcgggtagggattctcctggatgaagcctctggtgtcaataagaatcaacagcctgtgctgccagcagggttgcaggtgcccaaaaccgtggtgtctagctggaacagaaaagcggcggaatacggaaagaaggcaaagtcagaaacatttcgcctgcttcatgcgaagaatatcattcgaccacagctcaaatttcgagaaaagatcgacaacagcaacacccccttcttgcccaaaatcttcatcaagccgaacgcacagaagcctctccctcaggccctgtctaaggagcgccgagaacgaccacaggacagacctgaagacctggatgttccgccggccctggccgacttcatacatcaacagcgaactcaacaagttgagcaagacatgtttgctcatccttaccaatacgaactgaatcatttcacacccgcggatgcagtcctgcagaagcctcagccccagctctacagacccatagaagaaacaccatgccactttatttccagcctggacgaactcgtggagctgaatgaaaagctgttaaattgccaggaatttgcagtggatctagagcatcattcataccggtctttcctagggctcacctgtctcatgcagattagtacccgaaccgaagactttattatcgatactctggagctcagatccgatatgtacatactgaacgagagtctgaccgatcctgcaattgtcaaagtgttccatggggccgattcggatatcgagtggttgcaaaaggactttggcctgtacgttgtaaatatgttcgacactcaccaggccgccaggcttctgaacctgggacggcactcacttgaccatttgctgaaactgtactgtaatgtggacagtaataaacaatatcaactggctgattggagaattcgaccccttccggaggagatgctgtcctatgcaagggacgacacccattatctcctctatatatatgataagatgcgtcttgaaatgtgggagcgcggtaacggccaaccagtgcagcttcaggtggtgtggcaaaggtcgcgcgacatttgtctgaaaaaattcattaaacccatcttcacagatgaaagttacttggagctttacagaaagcagaagaagcacctcaacacccaacagctcacagcttttcagctgcttttcgcctggagagacaagacggctaggcgggaggatgagtcatatggctatgtcttacccaatcacatgatgctgaagatagccgaagagctacccaaagagcctcaagggataattgcctgctgtaacccagtcccacccctcgttcgtcaacaaataaacgagatgcatctcctgattcagcaggcacgtgaaatgccgctcctcaaatcagaagtggccgccggtgtgaaaaaatctgggcccctgccgagtgcagaacgactggagaacgtactctttggacctcacgattgctcacacgcccctcctgacggctaccctattatccccacctcagggagtgtgcctgttcagaagcaggctagcctctttcccgatgagaaggaggataatttactggggacaacatgcctgatcgcgacagcagtcatcaccttgttcaacgagcccagcgcagaggattcaaaaaaaggcccccttacagtcgcacagaaaaaggcgcagaatataatggagtcctttgagaaccccttccgcatgtttttaccctccctcggccacagggctcctgtctcccaagcagcgaagtttgacccatccaccaagatctacgaaatctccaatcgatggaaactcgcgcaggtgcaagtccagaaagacagcaaagaagccgtgaaaaaaaaagctgccgagcagaccgccgcaagagagcaggctaaggaggcttgcaaagctgcggccgagcaagctatttccgtaaggcagcaggtcgtcttagaaaatgccgccaagaagcgcgagagagccacttctgatcccaggacgactgaacagaagcaagagaagaagaggctgaaaatatcgaagaagcctaaagaccccgagcctcccgaaaaggaatttacgccgtatgactattcgcaatccgattttaaggcttttgccggcaatagcaagagcaaagtttcatcacagttcgaccctaataaacagacacccagcgggaaaaaatgcattgcggctaaaaaaatcaaacagagcgtggggaacaagtctatgtcattccctactgggaagtctgacaggggattcagatacaactggcctcaacgctag

SEQ ID NO: 116435 - DNA, 2040 bp, synthetic construct
  misc_feature 1..2040: note = Description of Artificial Sequence: Synthetic coding sequence
  source 1..2040: mol_type = other DNA
atggcgcccccaagtacccgggaaccccgcgtactcagtgccacaagcgctaccaagtccgacggagaaatggttctgcctggattccccgacgctgacagttttgtcaagttcgccctgggttccgtagtcgccgtgacaaaagcaagcggaggcctaccacaatttggagatgagtatgatttttatcggtccttcccgggcttccaggccttctgtgaaacccagggagaccgtctgttgcagtgcatgtctagagtcatgcaataccacggttgcagatcaaacataaaggaccgtagtaaagtaacagagttggaagacaaatttgacctactagttgatgcaaatgatgttatcctcgaacgggtaggtatcctgctggacgaggcatctggcgtgaataaaaatcagcagccagtgctgcctgcaggcctgcaggtgccaaagactgtggtttcttcttggaaccgcaaagccgccgaatatggaaaaaaggccaaatcggagacttttcggttactacacgctaagaatatcatccggccgcagctgaagttcagagagaagatcgacaactccaacacccctttcttgcccaagattttcattaaacctaatgcacaaaagcccctgccccaagcgttatcgaaagagagacgggagaggccacaggatcggcctgaggacttggatgtcccacccgccctggctgatttcatccatcagcagcggacgcagcaggtggagcaagacatgttcgcgcacccttaccagtacgagcttaaccactttaccccagctgacgccgtattgcagaagcctcagcctcagctctaccgccctatcgaagagaccccctgtcacttcattagttcgttagacgagctcgtggagctgaacgagaagctcttgaattgccaggaattcgccgtggatttggagcatcactcatatcgcagctttctggggttgacctgtctaatgcagatctcaactcggaccgaagacttcattattgacactctcgagctgcgcagcgatatgtatattttaaatgaatccttgacagaccctgcaatcgtgaaggtgttccacggggccgattccgatatcgagtggcttcagaaggatttcggtctatatgtggtcaacatgttcgacacccaccaagctgcgcgcctactgaatcttggcagacatagccttgaccatcttcttaagctatactgcaatgtggattcgaataagcaatatcagttggccgattggcgcattcgaccactccccgaggaaatgctgtcatacgctcgggacgatactcactacctgctttacatctacgacaaaatgcgcttggagatgtgggaaagaggcaacggacagcctgtgcagctccaagtggtgtggcaacgctccagagacatttgccttaaaaaatttattaaaccaatttttacagacgagagctatctggagctttaccggaagcaaaaaaagcaccttaatacccagcagctgacagctttccaactactattcgcatggcgagacaaaaccgcccgcagggaagacgaaagttacgggtacgtcctcccaaaccacatgatgctgaaaatagctgaggagctgcctaaggaacctcaggggattatcgcctgctgtaaccccgtgccacccctggttcgacagcaaataaatgagatgcatctgttgatacaacaagcaagagagatgccactcctaaaatccgaagtagcagcaggtgtgaagaaatcaggccctttgcctagcgcggaagtggagtgcagaatatgcttcctgcctcaggagggaaagagacaggttaccgccagtgcatctacccctctgacggaagcctgtgctgattcttggcagaaggccacagccggcctgcacgtgctgcatgcatccctcttggtttccttcaacgccgagatcggtgagtgctccctgtggacctcaagactgctcccttgcccaagtgggtggctctcaaaccacccgaatcagtggtag

SEQ ID NO: 116436 - DNA, 747 bp, synthetic construct
  misc_feature 1..747: note = Description of Artificial Sequence: Synthetic coding sequence
  source 1..747: mol_type = other DNA
atggctgctggctttaaaaccgtggagccactcgaatattacaggaggttcttgaaagagaactgccgtcccgatggtcgagagcttggggagtttagaaccaccacggtgaacattggctccatttccacagcagatggctccgccctggtgaagttggggaatacaactgttatatgtggggtgaaagcattcaggtcagggcctcccggcgaagaggcacaggtggcttctcaattcattgctgatgttatagaaaatagccaaattatacaaaaggaagatctctgtatcagtcctggcaaattggtgtgggtgctctattgcgacttaatctgccttgattacgacggcaatatcctagacgcctgtaccttcgccctgctggctgctttgaagaacgtacagctacctgaggtgacaatcaatgaagagacagctctggccgaggtgaatctcaagaagaaatcttacctaaatatccggactcacccagtggcgacatcattcgcagtgttcgatgacacactgttgatcgtggaccctactggtgaggaggaacacctggccaccggcacactgacaatcgtgatggatgaggagggtaaattatgctgcctgcacaaacctggtggatctggccttaccggcgccaagctgcaggattgtatgtcgcgagcagttacgagacataaagaagtgaaaaagcttatggatgaagtgataaagtccatgaaacctaagtag

SEQ ID NO: 116437 - DNA, 831 bp, synthetic construct
  misc_feature 1..831: note = Description of Artificial Sequence: Synthetic coding sequence
  source 1..831: mol_type = other DNA
atggcagccggctttaagacggtagagcccttagagtattaccgccgtttcttgaaggagaactgtagacccgacggtcgcgaacttggggagtttcgaaccaccaccgttaacattgggagcatctctaccgccgacggctccgccctagtgaagctcggtaataccaccgttatatgcggcgttaaagctgagtttgctgcaccctccactgacgcgccagacaagggatatgtggtccccaatgtggatctccctccactctgttcctcccggtttaggtccggaccacctggggaagaggcgcaggtggcaagtcagttcatagcagatgtcatcgaaaactcccagatcatccagaaagaggacctgtgtattagcccaggtaaactggtgtgggtgctctattgcgacctgatctgcttagattatgatgggaatatcctggacgcatgcacatttgcattattagccgccctgaagaacgtgcaattacctgaagtgacaataaatgaggaaacggccctggccgaagtcaaccttaagaaaaagagctacctgaatatccggacccatcccgtggcgaccagctttgccgtttttgacgacacgttactgatagttgaccccaccggagaggaagagcatttggccactgggacattgaccatcgtaatggacgaggaaggcaaattgtgctgcctgcacaagccgggcggttctggcttgactggggctaagctgcaggattgcatgtcacgggcagtgacaagacacaaagaggttaagaagctgatggacgaggtaatcaaaagcatgaaacctaagtag

SEQ ID NO: 116438 - DNA, 1320 bp, synthetic construct
  misc_feature 1..1320: note = Description of Artificial Sequence: Synthetic coding sequence
  source 1..1320: mol_type = other DNA
atgaaggagacgccacttagcaattgcgagaggcgctttctgcttcgagccatcgaggagaagaaacgacttgatgggcgccaaacctacgactaccgaaatatacgaatcagtttcggcaccgactatgggtgctgtatcgtggagctaggcaagacaagggttctcggtcaggtctcctgtgagctggtgagtccaaagctgaacagagccacggaaggcatcctattcttcaacctggagctgtcccagatggccgcccccgccttcgagcccggccggcaatctgatctgctagtcaaactgaataggctcatggaacgctgtctaagaaactcaaagtgcatcgacaccgagtccctgtgcgttgtcgcaggggagaaggtctggcaaatcagagtggatctccacctgcttaatcacgacggaaacatcatcgatgcggcatctattgccgccatcgttgctctttgccacttccggcgcccagatgtgagcgtgcagggcgatgaagttaccctctacacccccgaggaacgagatccagtgcctttatccattcatcacatgcctatttgtgtctcatttgctttcttccagcaggggacctatttgctggttgatcccaatgagagagaggagagggttatggacggccttctggtcatagccatgaataagcaccgcgagatttgtacaatacagtcctccggagggattatgctgcttaaagatcaggtgctgaggtgctctaagattgccggcgtcaaggtcgctgagataactgaactgatacttaaggcattggagaacgatcaaaaagtcagaaaagaaggaggcaaattcggcttcgcagaatcaatagcaaaccagagaatcaccgcattcaagatggaaaaggcgccaatcgataccagcgatgtcgaagagaaggcagaggagattatcgccgaagctgaacctccttctgaggtggtgtcaacacccgttctatggacgccaggaaccgctcagatcggcgaaggagtggagaattcctggggcgatttagaggattcagagaaggaagacgacgaaggcggcggggaccaggctatcattttggatggaatcaagatggataccggtgtggaagtcagcgatatcggctcccaagacgcacccatcatattatccgacagcgaggaagaggaaatgatcattctcgaacctgacaagaatcctaaaaagattcgcactcaaaccacatctgccaagcaggaaaaggcaccttctaaaaagcccgttaaaaggcgtaaaaagaaacgggctgcaaactag

SEQ ID NO: 116439 - DNA, 1371 bp, synthetic construct
  misc_feature 1..1371: note = Description of Artificial Sequence: Synthetic coding sequence
  source 1..1371: mol_type = other DNA
atgaaagagacccccctgtcaaactgcgagagaaggttcttactgcgcgccatcgaagaaaaaaagaggctcgatggcagacagacctatgactatcggaacatacgaatctccttcgggacagactatgggtgctgcatcgtcgaacttggcaaaacgcgtgtgttgggacaggtgtcctgtgagttggtgagccccaaactaaaccgggcaaccgaaggtatactgttttttaatctggagctgtcacaaatggcagctcccgcctttgaacccggaaggcagtctgaccttctggtgaaactgaacagactgatggagaggtgcctcagaaattccaaatgcatagacaccgaaagtctgtgcgttgtcgccggagaaaaggtgtggcaaatacgagttgacctacacctgctgaatcatgatgggaacataattgatgcagcttccattgcagcaatcgttgccctctgccacttccgccgcccggatgtgtctgtccaaggagacgaggtcaccctctatactcccgaggagagggacccagttccactcagcatccaccacatgcccatttgtgtgtcctttgccttcttccagcaggggacctatcttctggtggacccaaatgagagagaagagagggtgatggacgggttactggttatcgctatgaacaaacatcgtgagatctgcacaatacaaagctctgggggtataatgctcttgaaggatcaagtcctcaggtgctctaagattgccggggtgaaggtcgcagagatcactgagctcatattaaaagctttggaaaacgatcagaaggtgcgcaaggaggggggcaagttcggtttcgcggagtctatcgctaaccaacgaataacagcctttaaaatggaaaaggctcccatcgatacgagcgatgtggaggaaaaggctgaagagatcatcgctgaagccgagccgccatccgaagtcgtcagcacaccagtcctgtggacacctggcacagctcaaatcggtgaaggtgtggagaactcatggggggatctagaggactccgagaaagaagacgacgaaggcgggggagatcaggccatcatcctggatggcatcaagatggacacgggagttgaggtctccgatatagggtcacaagaactcggcttccaccacgtcggccagactggactggaattcctgacgtccgatgcaccgattatcctaagcgactctgaggaagaggaaatgatcatcctcgagcccgataagaaccctaagaaaataaggacacagaccaccagtgcaaaacaggaaaaagccccaagcaagaagcccgtaaaaaggcgcaagaagaagcgggcagccaattag

SEQ ID NO: 116440 - DNA, 2031 bp, synthetic construct
  misc_feature 1..2031: note = Description of Artificial Sequence: Synthetic coding sequence
  source 1..2031: mol_type = other DNA
atgcagtcctggcgtagacggaagagcctttggctcgccctctctgcctcatggttgctgctggtacttttaggcggtttttccctcctgcggctcgctctgccacctaggcccagaccgggggcatcccaaggttggccccggtggctggatgccgaactcctgcagtcatttagccaacctggcgaactgccggaggacgccgtcagcccacctcaggccccccatggtggaagctgcaactgggaaagctgtttcgacacctcaaaatgtagaggcgacggacttaaggtgttcgtttatccagccgtggggaccatcagtgaaacacataggcggatcttggcctcgatcgaagggtcacggttctacacattctcacctgcaggggcctgccttctgctgctactgagcctagacgcccagaccggcgagtgtagttccatgcctctgcagtggaataggggccgcaatcatctggtgctccgcctgcacccagcgccttgtccacggacttttcagctaggacaggctatggtcgccgaggcctcgcctaccgtggacagcttccgaccggggtttgacgtggccctgccttttttaccagaggctcatcctttgcgtggcggagcccccggacagttaagacaacactccccccagccgggtgttgctctcctggctctagaagaggaacgcggcggctggcggacagccgataccggcagtagtgcttgcccatgggatggcaggtgcgaacaagaccctggcccggggcagacacagagacaagaaacactgccaaacgcgaccttttgtctgattagcgggcatcgccccgaggctgcctctagattcctccaggcactgcaggcgggttgcattcctgtgcttctgtcacctagatgggaattgccatttagtgaagtaatcgactggaccaaagcagccatcgttgccgatgagcgtctgccacttcaggtgctggccgcactgcaagagatgtctccggcacgggtgctggcgttgcgacagcagacccaatttctttgggacgcatatttttcttctgtcgagaaggtgatccacaccactctggaagtaatacaggaccgtatattcggcacaagcgctcaccctagcctcctctggaacagtccaccaggggccctgctcgccctatcaacctttagcacttctccacaggacttcccattctactatctgcagcagggctcacggcccgagggaagattctctgcgctgatctgggtgggaccccctggtcagcctcctctcaaacttatccaggctgtggctggctcccagcactgtgctcagatcctcgttctgtggtcaaatgaaaggcctctcccatcacgctggcccgaaaccgctgtcccactcaccgtcatcgatggacacagaaaggtgtctgaccggttctacccttactcgacaattagaaccgacgctattctttctctggacgccagatcaagcctgagcacctcagaggtggatttcgcttttctcgtttggcagtcttttcctgaaaggatggtgggctttctcacttcgtctcacttttgggacgaggcccatggaggatggggctacactgctgagcggacaaatgagttctccatggtccttaccaccgccgccttctatcaccggtattaccatactctgttcacccattctctgcccaaggcactaaggactttggccgatgaagcccccacctgtgtagacgtgctcatgaactttattgtggccgccgtaaccaaattgccaccgatcaaggtcccatacgggaagcagcggcaagaagctgctcccttggctccaggagggccaggaccacgccccaagccccccgccccggctccggattgtattaatcagatcgcggcagcatttggtcacatgcctcttctcagctcacgactgcggctcgatccggtgttatttaaggaccccgtgagcgttcaacgcaaaaagtaccggagtttagaaaagccttag

SEQ ID NO: 116441 - DNA, 993 bp, synthetic construct
  misc_feature 1..993: note = Description of Artificial Sequence: Synthetic coding sequence
  source 1..993: mol_type = other DNA
atgaggtgctgccacatatgcaaacttccgggccgggtgatgggaatccgcgttcttcggctcagcctggtcgtcattctggtcttgctgcttgtagcgggcgccttgaccgccctcctcccaagtgtgaaggaagataagatgctgatgctcaggagggaaatcaagagtcaaggcaagagcaccatggattccttcactctcataatgcagacatacaataggaccgacctgctgctgaagttgctgaaccactaccaggccgtccccaacttacacaaagttatcgtggtctggaataacatcggtgaaaaggcccctgatgagctctggaacagcctcggcccgcacccaatcccagtaatcttcaagcagcaaacagcaaacagaatgcgaaatagacttcaggtgttcccggagctcgagaccaacgccgtgttgatggtggacgatgatactcttattagtaccccagacttggtctttgcgttctctgtctggcagcagttcccagatcagatcgtcggatttgtgcctaggaagcacgtgagcacctctagcggaatctatagctatgggtcattcgaaatgcaggcccccggatctggaaacggcgaccagtacagcatggtcctgatcggagcgagcttcttcaatagtaaatacctggagctctttcagcgacagccagccgcagtccatgccttgatcgatgacacccagaattgcgatgatattgcaatgaacttcataattgctaagcacattggaaagacctctggcattttcgtgaagcctgtgaacatggataacctcgaaaaggagaccaattccggctacagtggaatgtggcacagagctgagcacgcactgcagaggtcttactgcatcaacaagttggttaatatttacgactcgatgcctctcagatactctaatattatgatctctcagttcggttttccttatgcgaactataagagaaaaatctag

SEQ ID NO: 116442 - DNA, 993 bp, synthetic construct
  misc_feature 1..993: note = Description of Artificial Sequence: Synthetic coding sequence
  source 1..993: mol_type = other DNA
atgagatgctgtcacatttgtaagctgcccggacgggtgatgggaattcgagtgctcaggctttctttggttgtcattttggttctgctgctggtggctggagcccttacggcccttcttccttcagtgaaagaggataaaatgctgatgcttagaagggaaatcaagtctcagggtaagtccaccatggattcattcacgctcatcatgcaaacctacaaccggaccgacctgctgttgaagctgctcaatcattatcaagcagtgccgaatctccataaggtcatcgtggtttggaataatattggtgagaaagcacccgatgaactctggaactccttgggcccccaccctatcccggttattttcaagcagcaaaccgccaaccggatgcggaatcgactgcaggtgttccccgagttggagacgaatgccgtgctgatggtggatgacgataccctaatatccactccagatctggtgttcgccttctccgtatggcagcagtttcccgaccagatagtgggattcgtgccacggaagcacgtgtccacctcatcaggaatttactcctacggatccttcgaaatgcaggcccccggttctgggaatggcgaccaatatagcatggtcttaatcggggctagtttctttaactcaaaatacttggaattgttccaacggcagcccgcagccgtgcacgctctgatcgacgatacccagaattgtgacgatattgcgatgaatttcattatcgccaaacacattggcaagacatcaggtatctttgtgaagccagtgaatatggacaatttagaaaaagagactaatagcggctattctggtatgtggcaccgagccgaacacgccctccaacgaagttactgcataaacaagctggtaaatatctacgattcaatgcctctcaggtactccaacatcatgatctcacagttcggttttccttacgcaaactacaagagaaagatctag

SEQ ID NO: 116443 - DNA, 354 bp, synthetic construct
  misc_feature 1..354: note = Description of Artificial Sequence: Synthetic coding sequence
  source 1..354: mol_type = other DNA
atggggatccgggtgcttagactgagtctggtggtgatattggtactgctgcttgtggcaggagccctgaccgccttattaccgtccgtgaaagaagacaagatgctcatgctccgccgagagatcaaatcccagggcaaaagtaccatggattctttcaccctcattatgcagacctataaccggaccgatctgctgctcaaattattaaaccactatcaggcagttcccaacctgcacaaagtgattgtggtatggaacaatataggggagaaggcacctgacgaattgtggaacagtcttgggccccaccccattccagtaatttttaagcaacagaccgccaaccggtag

SEQ ID NO: 116444 - DNA, 801 bp, synthetic construct
  misc_feature 1..801: note = Description of Artificial Sequence: Synthetic coding sequence
  source 1..801: mol_type = other DNA
atgcggacatggaattccggtggaactaagtgctgccacatttgcaagctgcctggaagggtgatgggtattcgcgtgctccgcctgtctctggtggtgattttagtgctcttactcgttgccggtgctctgaccgccttactcccgtcagtgaaagaggacaaaatgctgatgttgaggagagagatcaagtctcagggcaagtcaacgatggattccttcacactcatcatgcagacatataaccgtacagacttactgctgaagctgctgaatcattaccaggctgtgcctaatctgcataaggtcatcgtggtgtggaataatattggagagaaggctccagacgaactatggaactcactcggtccccatccaatccccgtgatctttaaacaacaaacggccaacaggatgagaaacaggctgcaagtgtttccggaattagaaacgaatgccgtcctaatggtggatgacgatactctcattagcacccccgatctggtttttgccttcagcgtgtggcaacagttccccgaccagatcgtcggctttgtgcctcgcaagcacgtctctacatcttctggcatatacagctacggttcatttgagatgcaggctcctggtagcggaaatggggaccaatatagcatggtgctgatcggggcttcattctttaacagcaaatacctcgaattgttccagcgacagcccgccgctgtccatgccctgatcgacgatactcagaattgcgacgatatagctatgaatttcatcatcgccaaacacatcgggaaatag

SEQ ID NO: 116445 - DNA, 954 bp, synthetic construct
  misc_feature 1..954: note = Description of Artificial Sequence: Synthetic coding sequence
  source 1..954: mol_type = other DNA
atgggaatacgtgtcctgcggttgtcactcgtagtgattctcgttttgctccttgtagccggcgctctgacagcactgctaccttctgtcaaggaagataagatgctcatgctgcgccgcgagattaaatcacaaggcaaaagcaccatggacagctttacgctgataatgcagacatataaccgtaccgatctgttgttaaagcttcttaatcattaccaggctgtgcccaacctgcataaggtgattgttgtgtggaataatatcggtgagaaggcgccagacgaactctggaactccctcggacctcatcccattcctgtcatctttaaacagcagacagccaaccggatgaggaaccgtcttcaagtttttcctgaactggaaacaaacgctgtgttgatggtcgacgacgacacactgatctctactccagacctagttttcgctttcagcgtttggcaacagtttcctgaccagatagtgggctttgtgccacgtaagcacgtgtccacatcttccggcatctattcgtatggtagcttcgagatgcaggcgcctggctctggaaacggagatcaatactccatggtgttaatcggagcttcatttttcaattccaaatacttggaactgttccagaggcagcccgctgccgtgcatgcccttatcgatgatacccagaactgtgatgatatcgcgatgaacttcataattgctaaacacatcggcaaaacctcaggcatcttcgtgaaaccagttaatatggataatcttgagaaggagactaatagtggctattcaggtatgtggcatagagctgagcacgctttacagcgaagttactgcatcaacaaattggtgaatatttacgattctatgcctcttcggtactcaaacattatgatctctcagttcggctttccatatgcaaactataaaaggaagatttag

SEQ ID NO: 116446 - DNA, 519 bp, synthetic construct
  misc_feature 1..519: note = Description of Artificial Sequence: Synthetic coding sequence
  source 1..519: mol_type = other DNA
atgagcgtgcccggtccttcaagcccggatggagccctcacccgtccaccatattgcctcgaggccggcgaacccaccccagggctgagtgacaccagcccagatgaggggctgattgaagacctgacgatcgaggacaaggcagtagagcagctcgccgaggggctcctctctcattatctaccagatctgcagcgcagcaagcaggccctgcaggagcttacgcagaaccaggtggtgctgctagataccttggagcaggagatcagcaagttcaaagagtgccactcgatgctggatatcaatgccttgttcgcagaggctaaacattatcatgccaagcttgtcaatatccgcaaagagatgctcatgctccatgagaaaacatcaaaactaaaaaaacgggcattaaaactccaacagaagaggcagaaagaagagttggagcgcgaacagcagagggagaaagagttcgagagggaaaaacaactgactgctcgccccgccaagaggatgtag

SEQ ID NO: 116447 - DNA, 1608 bp, synthetic construct
  misc_feature 1..1608: note = Description of Artificial Sequence: Synthetic coding sequence
  source 1..1608: mol_type = other DNA
atgctccacaagtccgaagaaggacgggttctcgttgaattcacatgtaagaatcagcctaaacctagcctgccaacagaatgggccctgtgtggcgaacgtgaggacagactggagttgctgaagctcagtacattcgccttgataataacacccggtgacccacgccttgtcatatccagcgggtgtgctacaaggctctttgaggccctcgaggtgggcgcagtgcctgtggttctgggggaacaggtgcagcttccttaccaggacatgcttcagtggaatgaggcggcacttgtcgtgcccaagcctagggtgactgaggtccacttcctcttaagaagcctgagcgattcagatctgctggccatgcggaggcagggcaggttcctctgggagacatatttttctaccgccgacagtatcttcaacacagtgttagctatgattcgaaccagaatccagatccctgcagccccaatccgagaagaagcagccgccgaaatcccacatagatctggtaaggccgcaggaacagatcctaacatggccgataacggggatctcgaccttggaccggtggagacggaacccccctatgctagccccaggtacctcaggaatttcactctcacagtgaccgacttttaccgttcatggaactgcgcccctggcccgttccacctcttccctcacactccttttgatccagtgctgccttctgaagcaaagtttttaggaagcgggacaggcttccgccctattggcggcggcgcagggggatctggtaaagagttccaggcagctctagggggtaacgtgccccgcgagcaatttactgtggtcatgctgacttacgagagagaagaagtccttatgaattcacttgagcgcctcaatggactcccatacctcaataaagttgtggtcgtgtggaacagcccgaagctcccaagtgaggacctgctctggccagacatcggtgttcccataatggtcgtgagaaccgagaagaactcccttaataaccgtttcctcccctggaacgagatcgaaactgaagccatactgtctattgacgacgacgcccacttgaggcatgacgagattatgttcggttttcgagtgtggcgagaagcaagggatcgcatcgtcggttttcctggcagataccatgcttgggacatcccccaccagagttggctttacaatagtaattacagctgcgagctgagcatggtgcttaccggagcagccttttttcacaaatactatgcctacctttactcatatgtaatgcctcaggctatccgcgatatggtcgatgaatatataaactgtgaagatatcgccatgaactttctggtgagccacatcaccagaaaacctcctatcaaagtaacatcacgctggacctttaggtgcccaggctgcccgcaggcattaagtcatgacgactcccatttccatgaaagacacaaatgcataaacttctttgtcaaggtgtatggttacatgcctctcctctatacccagttccgggtggacagcgtgcttttcaagaccagactgccgcacgacaagaccaagtgtttcaaattcatctag

SEQ ID NO: 116448 - DNA, 3216 bp, synthetic construct
  misc_feature 1..3216: note = Description of Artificial Sequence: Synthetic coding sequence
  source 1..3216: mol_type = other DNA
atgcctgctatcatgaccatgctggcggaccacgctgctcgacagttgcttgatttttcgcagaaactggatataaacctcttggataatgttgtgaactgtctgtatcacggagagggggctcaacagaggatggcccaggaggtgttaactcatctgaaggaacaccccgacgcctggactcgcgtggacactattttagagttctcccagaacatgaatactaaatactatggtttgcagatcctcgagaatgtaatcaagacacgatggaaaatcctacctcgcaatcagtgtgagggcatcaagaaatacgtcgttggtctgatcataaaaacctcttccgacccaacgtgcgtggaaaaagagaaagtgtatatcggcaagctgaatatgattctggtccagattctaaaacaggagtggccgaaacattggcctacctttatcagtgatattgtcggcgcctctaggacatctgaatcactctgtcaaaacaacatggtcatccttaaactgctctccgaagaagtgtttgactttagttcgggacagatcacacaggtcaagagcaagcatttaaaggactcaatgtgcaacgaattcagccaaattttccagttatgccagttcgtgatggaaaattcacagaacgctccgttagttcacgccactctagaaactcttctgagatttctcaattggatccctctggggtatatattcgaaaccaaactgatttccacactgatttacaaatttctcaatgtacccatgtttcgcaatgtgtctctcaagtgcctaaccgaaatcgcaggcgtaagcgtgagtcagtacgaagaacagttcgtcacactgttcaccctgaccatgatgcagctgaagcaaatgctgccgctgaacactaatataagattagcttatagtaatgggaaagatgacgagcagaactttattcagaatctgtccttgtttctgtgtacatttctcaaggaacacgatcagctgatcgaaaaaaggctgaatcttcgcgagacactgatggaagccctgcattacatgctattggtttccgaagtggaggagactgagatttttaagatctgtttggaatactggaatcatcttgccgctgagttgtatcgcgaatccccattctcgacaagcgcatcgcctctactttcagggagccagcatttcgatgtacctcctcgccgtcagctgtacttacccatgttgtttaaagtgaggttactgatggttagccgcatggcaaagcctgaggaggttctggtcgttgagaacgatcagggagaagtggttagagagtttatgaaagacacagatagcataaatctatataagaacatgcgcgaaaccctggtctacctgacacacttggactacgtagataccgagagaattatgacggaaaagcttcataaccaggtgaatggcaccgaatggtcctggaagaacctcaacacgttatgttgggccatcggctcaatctcgggcgctatgcatgaagaagatgagaagaggtttttagtcacagtcattaaggacctgctgggcctgtgtgaacagaagcgaggcaaagacaacaaggctatcattgcctctaatataatgtatatagtcggccagtacccccgctttcttcgggcccactggaagttcctaaagaccgtggtcaacaagttgttcgaatttatgcacgaaacccacgacggagtccaagacatggcatgtgatacattcataaagatcgcccagaaatgccgccggcacttcgtccaggttcaggttggggaggtgatgcctttcatcgatgagatcttaaataatattaatactattatttgcgacctgcagccacagcaggtgcatacgttttacgaagccgtcggctatatgataggcgcccaaactgaccagacagttcaggagcacctcattgaaaagtacatgctgttgccaaaccaggtttgggactctatcatacagcaggcaactaagaatgtggacattctgaaggaccctgaaactgttaagcagctgggaagtatcctcaagacgaatgtacgagcgtgtaaagcggtggggcatcctttcgtgatccaactaggtcgaatttacctagatatgctgaacgtgtacaagtgtctgagtgaaaacatttctgcagccattcaagcaaatggagaaatggtgacgaagcagccgctcatcagatctatgagaacggtcaagcgagaaactctgaagctgatttccggctgggtttcacgctctaatgatccacagatggtcgccgagaactttgtgccgccactcctggacgctgtgttaatcgattaccaacggaacgttcccgccgcccgtgaacctgaagtcctgagcacgatggctatcatcgttaataaactgggaggccacatcactgcggagatcccacagattttcgacgccgtgttcgaatgtacgttaaacatgataaacaaagatttcgaagagtatcccgagcatcggaccaatttcttcctcctcctgcaggcagtgaattcgcattgcttcccagcattcttggcgatcccaccaacacaatttaagctggttctagatagcataatttgggccttcaagcacacaatgcgaaacgtagccgacactggactgcagatcctgtttacactactgcagaacgtggcacaggaggaggccgctgcccagagcttctatcagacttacttctgcgacatcctgcaacacatatttagtgtcgtaacagacacttctcacacagcaggactgaccatgcacgcaagcatccttgcctatatgttcaatctggtagaagagggcaagattagcacatcgctcaacccagggaatcccgtgaataaccagatctttttgcaggaatacgtggcaaacttgcttaagtctgctttcccgcacctgcaagacgcccaagtgaaactctttgtcaccgggctgttctctctgaaccaggacattcctgcttttaaggagcatctgcgtgacttccttgtacagatcaaggagtttgcaggggaggacactagcgatctgtttctagaggagcgggagatagccctgcggcaggcagatgaggagaaacataaacggcagatgtccgtgcccggaatttttaaccctcacgaaattccagaggaaatgtgtgattag

SEQ ID NO: 116449 - DNA, 3216 bp, synthetic construct
  misc_feature 1..3216: note = Description of Artificial Sequence: Synthetic coding sequence
  source 1..3216: mol_type = other DNA
atgcccgccataatgactatgcttgctgaccatgctgcgcgccagctgctcgatttcagtcagaagttggatattaatctccttgacaatgtggtcaactgcctgtatcatggagagggcgcccagcagcggatggcccaagaggtccttacacacctgaaagagcacccggatgcatggactcgtgtcgacacaatcctcgaattcagtcagaatatgaacacaaagtactatggacttcaaatactggagaatgttatcaaaaccaggtggaaaattcttccccggaatcagtgcgagggaatcaaaaaatatgtcgtcggattgattatcaagacctcttcggaccccacctgcgtggaaaaagagaaagtatacatcggcaaactgaatatgatcctggtccagatcctgaagcaggagtggcctaaacattggcctacttttattagcgacatcgtcggggcgtctagaacaagtgagagtctgtgccaaaacaatatggttatactcaaactcctgtctgaggaagtttttgattttagttctgggcagatcacgcaggtgaagagcaagcatttgaaggacagcatgtgtaacgaatttagtcagatttttcaactgtgccagttcgtaatggagaactcccaaaatgctcccctcgtacacgccacccttgagacgcttctgcggttcctaaattggatcccccttgggtatattttcgaaactaagctgatatctacactaatttacaagttcctcaacgttccgatgttccgaaatgtgtccctgaagtgcttaaccgaaatcgctggggttagtgtaagccagtacgaagagcagtttgtgacgctgttcaccctgacaatgatgcagctaaagcagatgctgccactgaacactaacatcaggttggcatattctaatggcaaagacgacgaacagaatttcattcagaacctatctctgttcctgtgcactttcctgaaagagcatgatcaactgattgaaaaaagactgaacctgcgggagaccctgatggaagcgttacactatatgctactcgtgagtgaagtcgaagagacagagattttcaaaatttgcttggaatactggaatcacctggctgccgagctctatagagaaagtccattcagcaccagcgccagccctctgttgtccgggtctcagcactttgacgtgcctccgcgcagacagctttacctgcctatgctctttaaggtccggctgttaatggtaagccggatggcaaagccagaggaggttctggttgtggaaaacgaccagggcgaggttgtccgcgagttcatgaaagacactgacagtattaacctgtataaaaatatgagagagaccctggtatatctgacccacctcgattacgtcgataccgagaggatcatgacggagaagctgcacaaccaggtcaatggaacagaatggtcttggaagaacctaaatactctatgttgggccattggcagcatcagtggggccatgcacgaagaggacgagaaaagatttctagtgacagtgattaaggacctgctgggattgtgcgaacagaaacggggcaaggataacaaggccatcatcgcatctaacatcatgtatatagtgggccagtatcccagatttctgagggctcattggaagttcttgaaaacagtggtcaataagctgtttgaatttatgcacgaaacacacgatggtgtgcaggacatggcctgtgacacattcattaaaatagcccagaagtgtagaagacacttcgtacaggtccaggtgggcgaagttatgcctttcatcgacgaaattctcaacaatatcaacaccataatttgcgatctgcaaccgcagcaagtccacaccttctacgaagccgttgggtatatgatcggagcccagacagatcagactgtgcaggaacatttaattgagaaatacatgcttctgccaaatcaggtgtgggattcaataatccagcaggcaactaagaatgtagacatcctgaaggatcctgagactgtgaaacaactcggatcaatcctcaaaaccaacgtcagagcgtgcaaagccgtcggtcacccttttgtgatacagcttggcagaatttatctggacatgcttaacgtgtacaagtgtctgagtgagaacattagcgctgccatccaggctaatggagagatggtaaccaaacaaccgctgattaggagcatgcggaccgtcaagagagagaccttaaagttgataagcggttgggtgtcacggagcaatgatccacagatggtggccgagaatttcgtcccgcctctgttagatgcggtgctgatcgactatcagaggaacgttccagctgcccgcgagcccgaggtcctgtccacgatggctatcatagtcaacaaacttggcgggcacatcaccgctgagattccacagatttttgatgcagtcttcgaatgcaccctgaatatgattaacaaggactttgaggagtaccctgagcaccggacaaacttctttctgctgttgcaagctgtgaacagccactgctttccggcattcctggctattccgccgactcagtttaagctggtgcttgattcaattatttgggccttcaagcacaccatgcggaacgtcgctgatacaggactgcaaatcctgttcacactgcttcagaatgtggcacaagaggaggccgccgctcagtctttctatcaaacctacttctgtgatatcctgcagcatattttctccgtggtgaccgatacctctcacaccgcaggactgacaatgcacgcatcaatcctggcctacatgtttaacttagtggaagagggaaagatctctacaagccttaaccccggaaaccctgtaaataatcagatcttcctgcaggagtatgttgcaaacctacttaaaagtgctttcccacacctccaggacgcccaagtgaagttgtttgtgacaggtcttttctccctcaaccaggatattcccgccttcaaagagcaccttcgcgattttctcgttcagattaaagagttcgcgggagaggacacatcagacttgttcctggaggaaagagagatcgcactacggcaggccgatgaagaaaagcacaagagacagatgtctgtacctggcatattcaaccctcatgaaatcccagaagagatgtgtgactag

SEQ ID NO: 116450 - DNA, 3216 bp, synthetic construct
  misc_feature 1..3216: note = Description of Artificial Sequence: Synthetic coding sequence
  source 1..3216: mol_type = other DNA
atgcctgcgattatgacaatgctcgccgatcacgcagcccgccaactgttggatttctctcagaaactggacatcaacttgttagacaacgtcgtgaactgcctgtaccacggtgagggggcacagcagcggatggcccaggaggttctaacgcacttgaaagagcatccggacgcctggaccagggtcgacaccatcctggaattttcacagaatatgaacaccaagtattacgggctccaaattctggagaatgtgattaaaactcgctggaaaattttacccaggaaccagtgtgaaggaatcaaaaagtatgtcgttggcctcattatcaaaaccagctccgatcccacttgtgtcgagaaagaaaaagtgtatataggcaaacttaacatgatcttggtccaaatcttaaaacaggagtggcctaagcactggccaacctttatcagtgacatcgttggcgcctcccgtactagtgagtccttatgccagaataacatggtgatcctgaaattgctgagcgaagaagtattcgattttagttcaggccagattactcaggttaagtccaagcatctaaaggactcgatgtgcaatgagtttagccaaattttccagctttgtcagttcgttatggagaacagccagaatgcgcccctcgtccatgctactcttgaaactctgctgaggttcctgaactggatcccccttggttacattttcgagacaaagctgataagtacactgatatacaagtttctgaatgttcccatgttcaggaatgtttcactaaagtgtctgacggaaattgccggcgtttcagtgtctcaatacgaggagcagtttgttacattgtttactttgactatgatgcaactgaagcagatgctgccactaaatacaaatatccggctggcttacagcaacggtaaagacgatgaacaaaactttattcagaatctgagcctatttttatgtactttcctcaaggagcacgaccaactgatcgagaagcgcctaaacctgcgggaaactttgatggaagctctgcattatatgctgctcgtgagcgaggtcgaagaaacagagatctttaaaatttgcctggagtactggaatcacctcgcggcggagctgtacagagaaagtccattttcaacaagtgcgagccctcttctctctgggagccagcacttcgatgtgcctccaaggcgccagctgtacctccccatgctgtttaaggtacgactactgatggtctccagaatggccaaaccagaagaggtgctggtcgtggagaacgatcagggcgaggtcgtgagagagttcatgaaggataccgacagcatcaacttgtataagaatatgcgggaaacactcgtatatctgacacatttggactacgtggacactgaacgaatcatgactgaaaagcttcacaaccaggtgaatgggaccgaatggtcttggaagaatcttaatacactctgttgggcaattggatcgatatcgggagctatgcacgaggaggatgagaagcggtttctggtcacagttattaaagatctgttaggtctgtgtgagcagaaaaggggcaaggacaataaggccattatcgcctccaacataatgtatattgtgggacagtacccccgattcctgagagcccattggaagttcctgaagaccgtggtaaacaaattgttcgaattcatgcatgaaacacacgatggggtgcaggacatggcttgtgacacattcattaaaatcgcgcagaagtgcaggaggcacttcgtgcaggtgcaggtaggagaggtgatgccattcattgacgagattctgaataacataaacacaattatttgtgacttgcagcctcagcaggttcacacattttacgaggccgtcggttatatgatcggagcccagacagaccagacagtgcaggagcatctgattgaaaagtacatgctgctcccaaatcaggtatgggattctattattcagcaggctactaagaacgtcgatatcctgaaggaccctgagacggtcaagcagctgggaagtattttaaagaccaatgtccgtgcctgcaaagctgttgggcaccccttcgtgatacagttagggcgcatctatttggatatgctgaatgtttacaagtgcctttccgagaatatatcggccgcaatccaggccaatggggagatggttacaaaacagccgttaatcaggtctatgcggactgttaagagggaaactctgaagctgatatccggctgggtttctagatccaacgacccgcagatggtggccgagaattttgtacctccactgctggacgccgtcctcatagattaccagcggaacgtgcccgccgctcgggagcccgaagtactgtccaccatggccatcatcgtgaataagctaggagggcatatcaccgcagaaatccctcagatcttcgacgctgtgttcgagtgtaccctgaacatgatcaacaaagacttcgaagagtacccagagcacagaacgaattttttcctgctcctccaggccgtcaactcacactgcttcccagcgttcctggcaatcccccccacccaatttaaacttgttcttgattctattatctgggctttcaagcacacaatgaggaatgtggctgacacaggattacagatcctctttacgctgctgcagaacgttgcacaggaagaagctgccgcccagtcattctaccagacttacttctgcgatattctccaacatatatttagcgtggtgactgacacttctcacacagcagggcttaccatgcacgcatctattcttgcctatatgttcaatctcgtggaagaggggaaaatcagcacgagtctgaatccagggaatccagtaaataaccagatctttctgcaggaatacgtagccaatcttcttaaatccgcattcccccacctgcaggatgcccaagtcaagttattcgtgacaggcctttttagtttaaaccaggatatcccagcctttaaggagcacctacgcgatttccttgtacagattaaagagttcgcgggtgaggatacgagtgatctgttcctggaggagcgcgagatagcgcttcggcaggctgacgaagagaaacacaaacggcaaatgagtgtgcctgggatcttcaatcctcacgagataccggaggagatgtgtgattag

SEQ ID NO: 116451 - DNA, 303 bp, synthetic construct
  misc_feature 1..303: note = Description of Artificial Sequence: Synthetic coding sequence
  source 1..303: mol_type = other DNA
atgccagcgattatgaccatgttggccgatcacgcagcccgtcagctattagatttctcgcagaagctcgatattaacctgcttgataacgtcgtcaattgcctctatcacggcgaaggcgcccagcagcgcatggcccaagaagtactgacacatctgaaagaacaccctgatgcatggaccagagtcgacaccatcctggagtttagccagaacatgaacaccaagtactacggcctccagatcttggaaaacgtgataaagactcgatggaagatcctgcctcgtaaccagtgcgagtag

SEQ ID NO: 116452 - DNA, 288 bp, synthetic construct
  misc_feature 1..288: note = Description of Artificial Sequence: Synthetic coding sequence
  source 1..288: mol_type = other DNA
atgcccgccatcatgactatgctggctgatcacgcggccagacagctactggatttttcgcagaagctggacataaacctgttagacaatgttgtaaactgcttgtatcatggggaaggggctcagcagcggatggcccaggaggttctcacccatttaaaagagcaccccgacgcatggacgcgcgtggacaccatcttggaattcagccagaatatgaatactaaatattatggattgcaaatactggagaatgtaattaagaccagatggaaaatcctgccatag

SEQ ID NO: 116453 - DNA, 180 bp, synthetic construct
  misc_feature 1..180: note = Description of Artificial Sequence: Synthetic coding sequence
  source 1..180: mol_type = other DNA
atgcctgcaattatgacgatgctagctgatcacgccgcccgacagttgctagacttctctcagaaactggacattaatctcttagacaacgtcgttaattgtctctaccacggtgaaggcgcacagcaacggatggcgcaagaggtgctcacacatctaaaagagcaccctgatgcttag

SEQ ID NO: 116454 - DNA, 399 bp, synthetic construct
  misc_feature 1..399: note = Description of Artificial Sequence: Synthetic coding sequence
  source 1..399: mol_type = other DNA
atgccagctatcatgactatgcttgctgatcacgctgcccggcaattgttagatttcagtcagaaactcgacattaacctcctagataacgtggtcaactgcctgtaccatggtgagggggctcagcagagaatggcccaggaggtcttaacacacttaaaggagcacccagatgcctggactcgagtggataccatcctggaattctcccagaacatgaacacgaagtactacggcctgcagatcctggagaacgtgatcaaaacccgctggaaaattcttcccaggaaccaatgcgagggtattaaaaaatatgtcgtgggactcatcataaagacatcatctgaccctacttgcgtggaaaaagaaaaagtctacatcggaaagcttaacatgtag

SEQ ID NO: 116455 - DNA, 189 bp, synthetic construct
  misc_feature 1..189: note = Description of Artificial Sequence: Synthetic coding sequence
  source 1..189: mol_type = other DNA
atgcctgccataatgaccatgttggccgatcacgcagctcgccagctgttggacttctctcagaagctcgatatcaatctgttagataacgttgttaattgcctgtatcacggagaaggggctcaacaacgaatggctcaggaggtcctaactcatttgaaagaacacccggacgcctggacccgatag

SEQ ID NO: 116456 - DNA, 540 bp, synthetic construct
  misc_feature 1..540: note = Description of Artificial Sequence: Synthetic coding sequence
  source 1..540: mol_type = other DNA
atgccagcaatcatgactatgctggctgaccatgcggccagacagcttctggacttcagccaaaaacttgacataaatttactcgacaatgtggttaactgcctataccacggagaaggagcccagcagcggatggctcaggaagtgttgacacacctgaaggaacaccctgatgcatggaccagggtggacactatcctcgagtttagccagaacatgaatacaaagtattacggcctgcagatcttagagaacgtaattaagactagatggaagattcttcctcgtaatcagtgcgagggaatcaagaaatatgttgtgggattaattataaaaacctctagcgacccaacgtgtgtcgagaaagagaaagtgtacatcggcaagctaaatatgatcctcgttcaaattttaaagcaggagtggccaaagcattggcctacctttatcagcgatatcgtgggcgctagtcggacgagtgaatcattgtgtcagaataacatggtgattcttaagttactaagtgaggaggtgttctag

SEQ ID NO: 116457 - DNA, 285 bp, synthetic construct
  misc_feature 1..285: note = Description of Artificial Sequence: Synthetic coding sequence
  source 1..285: mol_type = other DNA
atgcccgcaatcatgacaatgttggcagaccatgccgctcggcaacttttagatttcagtcagaaattagacattaacctgctggacaacgtagtgaactgtctttatcatggggaaggtgcccagcaaaggatggcccaggaggtgctgacccatttgaaggaacaccctgatgcttggactcgtgtggatacaatcctggagttcagccagaacatgaatacaaagtactatggactgcagatcctggagaatgtgattaaaaccaggtggaagattctgtag

SEQ ID NO: 116458 - DNA, 3615 bp, synthetic construct
  misc_feature 1..3615: note = Description of Artificial Sequence: Synthetic coding sequence
  source 1..3615: mol_type = other DNA
atggctatggatcaagtcaatgctctttgtgaacagctagtgaaggccgttacagttatgatggacccgaatagcacccagcgctaccgactggaagccttgaagttctgtgaggagtttaaggaaaaatgtcccatctgcgtgccctgtgggctgaggcttgccgaaaaaacacaagtggcgattgtgcggcacttcgggctgcagattctagaacatgtagtcaagttcaggtggaacggaatgtcgcgcctagaaaaggtgtacttgaaaaactctgttatggagctgatcgcaaatggcactttgaatatcctagaagaagagaaccacattaaagatgctctctctagaatcgtggttgaaatgataaagagagaatggccccagcattggccggacatgctgattgaactcgatacattgagcaagcagggagagacgcagaccgaactggtaatgtttattctgttgcgcctagccgaagatgtcgtgactttccaaaccttgcctcctcagcggcggagggacattcagcaaaccctcacccagaacatggagcggatcttttcatttttgcttaatactttacaggagaatgtaaataagtatcagcaggtgaagacagatactagtcaggagagcaaggctcaggctaattgcagggttggagtggccgcattgaatacactggccggctacatcgactgggtgagcatgagccacattacagcagagaactgtaagttactagagatcttatgtctcctcctaaacgagcaggagctgcagctgggcgctgccgaatgtctgctaatcgcagtgtctcgcaaaggtaagctggaggaccgaaaaccgctcatggtgctgttcggcgacgtggccatgcattacatcctgagtgcagcccagacagctgatggaggcggactggtggagaaacattatgtttttttgaaacggttatgccaggttctgtgcgctctggggaatcagctctgtgctctgctgggagccgattccgacgtggagacacccagcaatttcggaaagtatctcgagtcctttctggccttcacgacgcacccctcgcagttcctgcggtcttcgacacagatgacttggggcgccctgtttaggcatgagatcctgagccgagaccctctgctgttggccatcatccctaagtacctccgcgcaagcatgaccaacctggtgaagatgggcttcccttcaaagaccgattcacctagttgtgaatacagccggttcgacttcgacagtgacgaagatttcaatgctttctttaactcctccagagctcagcagggagaagtaatgaggctggcctgccgacttgaccccaagacttcatttcagatggctggtgagtggctgaagtatcaactctctacatttctggacgcaggtagtgtaaattcttgctctgctgttggcaccggtgagggtagtctgtgtagtgtgttctctccctcctttgttcaatgggaggcaatgacactgttcctcgagagcgttattacccaaatgttccgcactctcaaccgcgaagagattccagtcaatgatggcatcgaactcctccaaatggtgttgaatttcgataccaaagacccactgatactgtcttgtgtccttacaaacgtaagcgcacttttccccttcgttacatatcgacccgagttcctgccacaggtcttcagcaaactctttagcagtgtgacatttgaaacggtggaggaatcaaaggcaccccgcactcgcgccgttagaaacgtgagaaggcacgcctgctctagcataattaaaatgtgtagggactacccccagctcgtgttgccaaattttgacatgctctacaaccacgtgaagcagctcctgtcgaatgaactgttgctgacccagatggagaagtgcgccttaatggaagctttagtgcttatctccaaccagtttaagaactacgaaagacagaaggtcttcttagaggagctgatggctcccgtggccagcatctggctgagccaagacatgcatcgcgtcctaagtgacgttgacgcatttattgcttacgttggtacagatcagaaatcatgcgatcctgggctggaggatccttgtgggctcaacagagcccgcatgtctttttgtgtatactcaatcctgggcgtggtaaagagaacctgctggcccactgatctcgaagaagccaaagcaggcgggtttgttgtgggctatacctcatcaggtaaccccatctttagaaacccctgtacagagcagattctgaagctgttggacaacctactggctctaattagaacacataacacactgtacgctcccgagatgctcgccaagatggcggaaccttttaccaaagcactggacatgctggatgccgaaaagtcagccattctgggcctgccccagcctttgcttgaactgaatgactcacctgtattcaagaccgtgcttgaaaggatgcagcgcttcttcagtactttatatgagaactgttttcacatcctggggaaggcaggccctagtatgcagcaggatttttacactgtggaagacctagccacacaactgctgagctcggcatttgtcaaccttaacaatatccctgattatagactgcgccctatgcttcgtgtgtttgtgaaacccctagtccttttctgcccaccggaacactacgaagcactggtctcccctattctcgggcctctcttcacctacctgcacatgcggctctctcagaagtggcaggttatcaaccagcgctctttgctttgtggtgaggatgaggccgccgatgagaacccagagtctcaggagatgctcgaggaacagctggtccgcatgctgactcgagaggttatggacttgatcactgtctgttgcgttagcaaaaaaggcgctgaccattccagcgcgccacccgctgatggagatgacgaggaaatgatggccaccgaagtgacaccatccgctatggccgaactgactgacttgggcaagtgtcttatgaagcatgaggacgtctgtacggcactgctgataaccgcgttcaatagtctggcgtggaaagacaccttaagctgccagcgtactacctcccagctgtgttggcccctgctcaagcaagtgctatcaggaactctgcttgccgatgcagttacatggctgtttacttcggtgttgaagggtctgcagatgcatggccagcacgatggctgcatggcaagccttgtgcacctagcctttcagatctacgaggcactaaggccaaggtatcttgaaatcagggctgtcatggaacaaattcccgaaattcagaaggactccctcgaccaattcgattgcaagttgcttaacccctccctgcagaaggtggccgacaaacgacgcaaggaccaattcaaacgcctcattgcagggtgtataggaaaacctctgggcgaacagtttcgaaaagaggttcacattaagaacctgccttcccttttcaagaagaccaagcctatgctagagacggaagtactggacaacgacggcggaggactcgcaaccattttcgaaccctag

SEQ ID NO: 116459 - DNA, 513 bp, synthetic construct
  misc_feature 1..513: note = Description of Artificial Sequence: Synthetic coding sequence
  source 1..513: mol_type = other DNA
atggccggggagtggttaaaatatcagctgagtacatttctggatgccggctctgtcaacagctgttcggctgtgggaactggtgaggggtcgctctgcagcgtgttcagccctagtttcgtgcagtgggaagccatgactttattcttagagtctgtaatcacacagatgttccgcacactgaacagagaagagataccagtaaacgacggaatcgagttgttacagatggtcctgaatttcgacactaaggacccacttattttgagttgcgttttgaccaatgttagcgccctattccctttcgtgacctaccgccctgaatttttaccccaagttttctctaagctgttcagctcagtgacattcgagactgttgaagagtctaagcccccacacttcccacctctgtctgcgtggaaagagatccaggtctggtcttggagagagcaggcgctatgtcggacaaggtccaattacaccaaggtaagccgcaaaggcgtgagagcgtag

SEQ ID NO: 116460 - DNA, 2166 bp, synthetic construct
  misc_feature 1..2166: note = Description of Artificial Sequence: Synthetic coding sequence
  source 1..2166: mol_type = other DNA
atggcaggggagtggctgaagtaccaactgtcaacctttctggatgccgggagcgtgaactcctgcagtgcagtcgggacaggcgagggaagcttatgcagcgttttctccccctccttcgttcagtgggaggcaatgaccctatttctggagtcagtaatcacccagatgttccggaccttaaatcgagaggagatcccggtgaatgacgggatcgaactactgcagatggtgctcaacttcgatactaaggatccattaatattatcttgcgtccttactaacgtttccgctctgttcccctttgttacctaccgccctgagtttttacctcaggtcttctctaagctgttttctagcgtgaccttcgaaactgttgaggaaagcaaggcccccaggacacgggcagtgcgaaacgttcgtcgacacgcctgctctagtatcattaagatgtgtcgtgattatccacagctcgtcctacccaattttgacatgctttacaaccacgtgaagcagcttctcagcaacgaactcctgctcacccagatggagaaatgtgctctaatggaagccctggtgctaatctctaaccagtttaaaaactacgaaaggcaaaaggttttcctggaggagctgatggcccccgtcgctagcatctggttaagtcaagatatgcatcgcgtcctctctgacgtggatgcttttattgcttacgtggggactgaccagaagagttgcgatcctggactcgaggacccgtgtgggctgaatcgcgcaagaatgagcttttgcgtatacagcattcttggcgtggtcaagcgcacctgttggcccactgacctggaagaagccaaagcaggaggtttcgtagtgggctacacatcaagtggcaaccctattttcaggaatccttgcacggagcagattttaaagcttttagataacctgctcgcgctgattaggacccataacaccctctacgcccctgagatgttagccaaaatggctgaacccttcaccaaggccttggatatgctcgatgccgagaaaagcgcgatccttggtttgcctcaacccctgctggagctaaacgactctccagtgtttaaaaccgtgctagagcggatgcagcggttcttctcaacactctacgagaattgtttccatatacttggtaaagccggtccatccatgcagcaggacttctataccgtggaagaccttgccactcaactgctgtcctctgccttcgtcaatcttaataatatcccagactacaggttgagaccaatgctgcacatcttgagcaagcccctggtcctgttttgtcctcctgaacattatgaagcactcgtatcccccattctcggccccctctttacatacctccacatgaggctttcacagaagtggcaggtgatcaatcagcgaagcctgctttgtggcgaggacgaggcagctgacgagaaccccgagagtcaggagatgctggaggaacaactggtaagaatgctcacacgcgaggtgatggacctgattacagtgtgctgcgtttcaaagaagggcgccgatcatagcagtgctcccccagctgatggagacgacgaggaaatgatggctaccgaggtaaccccaagcgccatggccgaactgaccgacctgggaaaatgcctcatgaaacatgaggatgtgtgtacagccctattgataaccgctttcaactccctagcctggaaggacacattgtcttgccagcgcactacttctcagttgtgctggccattgctgaagcaagtgctctctggcaccctgcttgcagatgccgtgacatggttattcacaagtgtcctgaaggggctccagatgcatggtcagcacgacggctgcatggcctcactcgtgcacctggccttccagatctacgaagctctccggccgcgatatttagagattagggcagttatggaacagatacctgaaatccagaaagactcgttggaccagttcgactgcaaactcctgaacccatccttacagaaggtcgcggataaacggagaaaggatcagttcaaacgcctcatagccggatgcataggtaagccacttggggaacagtttcgtaaagaggtgcacattaaaaatctcccctttgtggctgacctctag

SEQ ID NO: 116461 - DNA, 2211 bp, synthetic construct
  misc_feature 1..2211: note = Description of Artificial Sequence: Synthetic coding sequence
  source 1..2211: mol_type = other DNA
atgcattacatcctctccgccgctcaaacagcggatggcggcggtctggtggagaagcactatgtctttctcaaaaggctatgtcaggtgctgtgcgcccttggcaaccagctgtgcgctctgttgggcgccgattccgatgtggagactccctcgaatttcggcaaatatctggagtcattcttggcgtttactacgcatccttctcagtttctgagaagttccacacagatgacttggggtgccctgttcaggcatgagattctgtcaagggaccctcttctgctagcaataattccgaagtacctgagggcctccatgactaatctggtgaaaatggggttcccctcgaagacggattctccctcctgcgagtattcacggttcgacttcgattcagacgaagacttcaatgccttctttaactcaagcagggcgcaacagggggaagttatgcgccttgcctgccgactggaccctaaaacatccttccagatggcaggggaatggctgaagtatcagctctcaaccttcctggatgctggctcagttaattcctgttcagccgtagggacaggggagggatccctatgtagcgtgttcagtccatccttcgtccaatgggaggccatgacattgtttttggagagtgtaatcacacagatgttccggacactgaaccgagaagagatccccgttaacgacggaatcgagttattgcagatggtactgaacttcgacaccaaggatcccctgatcctttcatgtgtcctaactaatgtttccgctttgtttccatttgtaacttatcgccccgaattccttccacaagtgttctctaaactctttagctccgtgactttcgaaacagtggaagagtctaaagcaccgcgcacgcgagccgtgaggaacgtgagaagacatgcgtgtagttctataatcaagatgtgtagagactatccgcaactggtgctgccaaatttcgacatgctgtataatcacgtgaaacagctgctgagcaatgagcttttgttgactcaaatggaaaaatgtgctctgatggaagccctagttctaatctctaatcaattcaaaaactatgaaaggcaaaaggtttttctggaagagctgatggctcctgtagccagtatatggctgtcccaggatatgcatcgggtgctttccgatgtggacgctttcattgcttatgtggggacagatcagaagtcttgcgatcctggtcttgaagatccttgcggcttgaatcgcgcccgtatgtcattttgcgtgtactcgatcctgggcgtggtcaagcgtacatgttggcccacagatttggaagaagcaaaggccggaggattcgtggtgggttatacctcaagcggaaatccaatcttcagaaatccatgcacagagcaaatcttaaaactgttggacaacttgctggccctaattcgaacacacaataccttgtacgctcccgaaatgctggctaagatggctgaacctttcaccaaggcactggacatgttggacgccgaaaagagcgcaattctgggtctgccccagcctctcctggagctgaacgattcccccgtgttcaagactgtattagaacgcatgcagaggttcttcagtacgctatatgagaactgttttcacatcctgggaaaggctggcccctcaatgcagcaggacttctataccgtcgaggatttggctacccagttactctcctcagcatttgtgaatttgaataacattcctgactatcgcttgagacccatgctgcacatcctttccaagccactggtgctcttctgcccccctgagcactatgaggctttggtctcacccatattggggccccttttcacctaccttcatatgagactgagccaaaaatggcaggtgatcaaccagagaagcctcttgtgcggcgaggacgaggcagccgacgagaaccctgaatcccaggagatgttagaagaacaactggtgagaatgcttacaagggaggtcatggatctcattaccgtatgttgcgtgagcaagaaaggcgcagaccatagtagcgcaccacccgctgatggagatgatgaagaaatgatggccaccgaagtgacccccagcgcaatggccgaactaactgacctggtgtcaatccaatctactgacaaaagggtgagccctcgcgcagaggtggattag

SEQ ID NO: 116462 - DNA, 2499 bp, synthetic construct
  misc_feature 1..2499: note = Description of Artificial Sequence: Synthetic coding sequence
  source 1..2499: mol_type = other DNA
atgacatggggggccctgttcaggcatgagattctttctcgagatccacttctgctggctatcattccgaaatatttgcgggcatccatgaccaacttggttaaaatggggttcccctcaaaaactgattcccctagctgcgaatactcgaggtttgatttcgactctgatgaagactttaatgcgttctttaattccagcagagcgcaacagggtgaagttatgcgcctggcctgcaggctggaccccaagacttcctttcaaatggctggcgagtggctaaaatatcagctgagcacctttcttgatgccggatcagtcaactcatgttctgccgtggggacgggcgaggggagtttgtgttccgtcttcagcccctcttttgtccagtgggaggcaatgaccctgtttctcgagagtgttatcacacaaatgtttcgaaccctgaaccgtgaggaaattcccgtgaacgacggtatcgagctcctgcagatggtgctcaactttgataccaaggatccactgattctctcatgcgtgctgactaatgtctcagccctgttcccgtttgtgacctaccggcccgaatttctgccacaagttttctccaagttgttcagcagtgtcacattcgaaacagttgaggaaagcaaagctccacgtacccgtgccgtccgcaacgtaagacgtcacgcatgttccagtattataaagatgtgcagagactacccacagctggtgctacctaattttgatatgctttataatcatgttaagcagcttctgagcaacgaacttcttctgacccaaatggagaaatgtgcattgatggaggcgctggtattaataagcaatcagttcaaaaactatgagcgacagaaggtgttcctggaggaactcatggcccccgtggccagtatatggcttagccaagacatgcacagggtgctatccgatgtcgacgctttcattgcctacgttggtaccgaccaaaagagttgtgaccctggcctggaggatccctgtgggctcaatagggctagaatgagcttttgtgtttattctattttaggcgtggtgaaacggacctgctggcccaccgatcttgaggaggcaaaggcaggcggtttcgttgttggatacacaagcagtgggaatcccatatttagaaatccctgcaccgagcagatcctgaagttgctcgataacctgctcgctctgattcgcacccacaataccctctacgccccggaaatgctggcaaaaatggccgagcccttcacaaaggcactcgacatgctggatgcagagaagtccgctattctgggcctgcctcagcccctgctagagctcaatgacagcccagtgttcaaaaccgtgctggagcggatgcagaggttcttttcaacactctacgagaattgcttccacatcctgggcaaggctggcccatctatgcagcaggatttctatacggtggaagacttggccactcagctcctgagctccgccttcgtcaatcttaacaacatcccagactaccggctcagacctatgttacgggtgttcgtcaagcctttggtgcttttttgcccacccgagcactacgaagctttagtttcgccaattcttgggcctctttttacttacttacatatgaggctgagccagaagtggcaggtaatcaatcagaggtccttactttgcggcgaagacgaagcggctgatgagaaccctgagtcacaggagatgctggaagaacagctggtaagaatgcttactcgcgaggtgatggatctgatcacagtatgttgcgtctcaaagaaaggagccgatcactccagtgccccacccgccgatggggacgacgaagagatgatggccacagaggtcaccccctctgctatggcggaattaaccgatctgggaaaatgccttatgaagcacgaggatgtttgcactgctctactgataaccgccttcaactctctggcttggaaagacacgctttcatgtcagcgcaccacctcccagctgtgttggcctctgctcaaacaagtgctgtctggcaccctccttgcagacgccgttacatggctctttacgtctgtgttaaaaggacttcagatgcacggccagcacgacggatgcatggcatctctggtccacctggcctttcagatctacgaggcgctgcgaccccgatacctggaaatcagagccgtaatggagcaaatacctgaaatacaaaaggactccttagaccagttcgattgcaagctgctgaatccaagcttgcaaaaagtggccgataaacgacggaaggatcaatttaaaaggttaattgcagggtgtatcgggaagcccctgggcgagcagtttcggaaggaggtccatatcaaaaacctgcccagcttgttcaagaagaccaagcctatgctcgagacagaagtgctcgacaatgacggcggcggactcgcgaccattttcgagccctag

SEQ ID NO: 116463 - DNA, 3378 bp, synthetic construct
  misc_feature 1..3378: note = Description of Artificial Sequence: Synthetic coding sequence
  source 1..3378: mol_type = other DNA
atggctagtgaagaggctagtctcagagcccttgaatcgcttatgactgaatttttccacgactgcactacaaatgagaggaagcgcgagatagaggagctgctcaacaattttgctcagcagattggcgcatggcgtttttgtctatactttctaagctcgacaaggaatgactacgtcatgatgtacagcctgaccgtatttgaaaaccttataaacaagatgtggctgggagtaccttcccaagataagatggagatccgctcctgcctccccaaactgttactggctcatcacaaaacattaccgtacttcattcgtaacaagctgtgcaaagttatcgttgacatcgggcgccaggattggcctatgttctaccatgactttttcaccaacatacttcagctcatacaaagcccagtgactactcccctgggtctgatcatgctgaagaccacatcagaggagctcgcatgcccaagggaggaccttagtgtggctagaaaggaggagctaagaaagctgttgctggaccaggtccagactgttctaggtctgctgacaggaatcctggaaaccgtctgggataagcacagtgtgacagcagcgaccccccctcccagtcctacatccggcgagagcggggatctcctctcaaacctgctccagtctccaagcagcgccaagctgttgaaccagccaatcccgatcctggacgtggaatccgagtacatctgtagcttagctttggagtgtttggcccacttgtttagctggatacctctgtccgccagcatcacaccaagtctgcttacaactatttttcatttcgcgaggttcggttgcgatattagggccagaaaaatggcgtctgtcaatggctcgagtcagaactgcgtgagcggccaggagagggggaggctgggcgtcttggctatgagctgcatcaatgaattaatgtctaaaaactgcgtccctatggaatttgaagagtatctgttgcggatgtttcagcagacattctatctacttcagaagataacgaaggacaataacgctcataccgtgaagtcccgattggaagaactcgatgaatcatacatagagaagtttaccgactttttgcgcctgttcgtgtccgtgcacttgcggagaatcgagtcgtatagccagttcccggtggtggaattcctcacattactgttcaagtacacgtttcatcagcccacgcacgagggctacttctcctgccttgatatttggacattgttccttgactacctgacctctaaaattaagagtaggctgggcgataaggaggccgtactgaaccgatacgaagatgcattagtgttactgcttacagaggtcctgaatcgcatccagttcaggtacaatcaagcgcagctggaagagcttgatgatgagacactggatgacgaccaacagaccgagtggcagcggtacctaagacagtccctggaggtggttgctaaagtcatggaattgctacctacccatgctttcagtaccctattccccgttttacaggacaacctcgaggtgtatttaggtttgcagcagtttattgtcacatccgggtccgggcatagactaaacataacagcagagaacgactgtagacggctccactgttctctgcgcgatctttcttccctgttgcaagctgtaggccgcctggctgaatatttcattggtgatgtatttgccgccagattcaatgacgcactcaccgttgtggagcgactggtgaaggtgaccctctatggaagccagatcaaattgtacaacatcgaaacagccgttccgagcgtcctcaagccagaccttatcgatgtgcatgcacagtccctggctgctctccaggcctattctcactggttggcccaatactgcagtgaggtgcatcggcagaatactcagcagttcgtgaccctgatttcaacgactatggacgccatcacacccttaatctctacaaaagtgcaagacaagctcctgttaagcgcttgccatctgttagtaagtcttgccacgacagtgcggccagtgttccttatctctataccagccgtccagaaagtgttcaaccggatcacagatgctagtgcgctaagactcgtggataaagctcaggtgctggtgtgccgagccctgtccaatatccttctcttgccatggcccaacctcccagagaacgaacagcagtggcccgttagatcaatcaaccatgctagcctgatatctgcactgtctagagactacaggaatctcaagccctctgcagttgccccccagaggaagatgcctctggacgacaccaaactgattatacaccagaccctgtcagtcctcgaggacattgtcgaaaacatttccggagagtctacaaaaagcaggcagatctgttaccagtccctgcaagagtccgtgcaagtcagcttggccctgtttcccgcatttatacatcagtctgacgtgactgacgaaatgttatccttcttcttgacactcttcaggggcttgagggtgcagatgggcgtcccttttactgagcaaattattcagaccttcctgaacatgtttacaagagaacagctggccgagtccattttgcacgaaggctccactggctgtagagtagtggagaaattcctcaaaattctccaggttgtggtgcaagagccagggcaggtattcaagcccttcctgccttctataattgcgttgtgtatggagcaggtgtatcctattatcgcggagcgcccaagtcccgacgtgaaagctgagcttttcgagttgctgtttaggacactgcatcataattggaggtattttttcaaatcaactgtcctcgcatctgtgcagcgagggattgctgaggagcagatggagaacgagccacagttttctgccataatgcaagctttcggtcagagcttcctgcaacctgacatacacctgttcaagcagaatcttttttatttagagaccttgaacacaaagcagaaattatatcacaagaaaatcttccggacagcaatgctgtttcagttcgttaacgtcctgcttcaggtcttggtccacaagagtcacgacctcctccaagaggaaattggcattgctatctacaacatggcctctgttgactttgatgggttctttgccgcatttttgcccgaatttctaacttcgtgcgatggcgtcgacgccaatcagaaaagcgttctaggaagaaacttcaagatggacagggacctgccatcattcacacagaatgtgcaccgattggtgaatgatctaagatactaccgcctgtgcaacgacagcctgccacccggaacagtcaagctttag

SEQ ID NO: 116464 - DNA, 3336 bp, synthetic construct
  misc_feature 1..3336: note = Description of Artificial Sequence: Synthetic coding sequence
  source 1..3336: mol_type = other DNA
atgacggagttttttcatgactgtacaaccaatgagagaaagcgcgagatcgaggaacttctcaacaactttgcacagcaaattggggcatggaggttctgcctgtactttctgtcgagtaccagaaacgactatgttatgatgtatagcttaaccgtgttcgagaacctcatcaataaaatgtggctgggtgtgccatcccaagacaagatggagataagatcctgtctgccaaagcttctgctcgcccaccacaagactttgccatacttcatccgcaacaagctctgtaaagtgatcgtggacattgggagacaggattggcccatgttctatcacgacttcttcaccaatatcttacagttaatccaaagccccgtgactacacccctcggactgatcatgcttaagaccacgtctgaggagctggcttgcccacgcgaggatcttagtgtggcccgcaaggaagagctcagaaagctcctcctcgaccaagtacagaccgtgctgggtctgctgacaggaattttagaaacagtttgggacaagcattccgtaactgctgctacacctcccccttcgcccacgtccggtgagtctggggaccttctctctaacctgctgcagtcgccatcctccgcaaaacttctgaaccaaccgatccctattttggatgtggagtccgagtacatatgtagcctcgctttagaatgcttggctcatttgtttagctggatcccactgagtgcctccatcacaccttccctgctaactaccatcttccacttcgctagatttggatgcgacatccgggcgcgtaagatggcttccgtgaatggctcatctcagaactgcgtcagcggccaagaacgcggaagactgggtgtcctggccatgagctgtatcaatgaattaatgtcgaaaaactgcgtgcccatggaatttgaagaataccttttgcggatgttccagcagaccttttacctcctccaaaagatcacaaaggataacaacgcacacactgtcaagtctcgcctcgaggaactggacgagtcctacattgagaaattcaccgatttcctgaggctgtttgtgtcagtgcacttgagacgaattgaaagttatagtcagtttcccgtggtggagttcctgactctgctgttcaaatatacttttcaccagcctacacacgaaggttacttcagctgcctcgacatatggacactcttcttggattacttgacttctaaaatcaagtccaggctgggcgacaaggaggctgtactaaataggtacgaagacgcgctcgtgctgctgctgactgaggtactgaataggatacaattccggtataaccaagcacagctggaggagctggacgacgagacccttgatgacgaccagcagacggaatggcaaagatatctccgccaatcattggaagttgtggctaaggtgatggagcttctcccgactcacgccttcagtaccttattccctgttcttcaggacaatttggaggtgtacctcggtctccagcaattcatagtgacctcagggtcgggccataggttgaacatcaccgcagagaacgactgcagaagactacactgctctcttagagacctctcttcacttctgcaggcagtgggcaggctggcagagtactttatcggcgatgtttttgctgctcgcttcaatgatgctctgaccgtggtggagagactggtgaaagttacattgtacgggagccagatcaaactgtataatatcgagacggcagtcccgtctgtcctgaaacccgatttgatcgacgtgcatgcccagagccttgccgcactgcaggcctatagccactggttagcacagtactgctccgaggtgcaccggcagaacacccagcaattcgtcacactgatctccactaccatggacgcaatcactcctttaataagtacaaaggttcaggataagctgctgctatcagcatgtcacctgttagtgagcctggctaccacggtgcgccctgtcttcctgatcagtatcccggccgtgcagaaggtttttaataggatcacagatgcgagcgccctgcgactcgtggataaagcacaggtgctggtctgcagagctctttccaacatcctgttgctgccttggccgaacttaccagaaaacgaacagcaatggcccgtacgtagcatcaaccacgcgtccttaatttctgcattgtccagggattaccgcaatcttaaaccgtcagccgtggctccacaacggaagatgcctttggatgacacaaagcttattatccaccagacccttagtgtactggaagacatagttgagaacattagcggagaatctacaaaatcacgtcagatatgttatcagagcctccaggagagcgttcaagtaagcctcgccctttttcctgcatttattcatcaaagcgacgtaactgatgagatgctctcgttctttcttactttgttccgggggctgcgggtgcaaatgggagtacctttcactgaacagatcatccaaactttccttaatatgtttacacgcgagcagctcgccgaatctattttgcatgagggcagcaccggctgcagggtggtggagaagtttctaaagatcctgcaggtcgtagtgcaagaaccaggccaggtcttcaagccgttcctgccaagtatcatcgcactttgcatggagcaggtctacccaattattgccgagagaccaagccccgacgtgaaagcagaattgttcgagttgctgtttcgaactttgcaccacaactggaggtacttctttaagagcacagtgctcgcgtccgtccagaggggaatcgcagaggagcagatggaaaatgaacctcagttttccgccatcatgcaggcattcggacaatcatttctgcagcctgacatccatctctttaaacagaacctgttttatctcgagactttgaataccaagcaaaagctgtaccacaagaaaatctttcgcacggccatgttgttccagttcgtcaacgtgctgctgcaggtgctagttcataaaagccacgacctgctacaagaagaaatcggtatagctatttataacatggcttcggtggactttgacgggttttttgccgccttcctgcctgaatttctgacatcctgtgacggcgttgatgcgaatcagaaatctgtgctcggcagaaactttaagatggatagggacttgccctcctttacccagaatgtgcaccgtctcgttaacgacctgaggtattacagattgtgcaatgacagcctccctccagggactgtcaagctctag

SEQ ID NO: 116465 - DNA, 3264 bp, synthetic construct
  misc_feature 1..3264: note = Description of Artificial Sequence: Synthetic coding sequence
  source 1..3264: mol_type = other DNA
atggcagaccatgtccaatcgcttgcccaactggaaaacttatgtaagcagctatacgagacaaccgatacgacaactcgtctgcaagctgagaaagcgctggtggaattcaccaactctcctgactgcctgagcaaatgccaattgctgttggagcgcgggtcttctagctactctcagctgttggccgctacttgcctgactaagcttgtttcgagaactaacaacccactgccacttgagcaaaggatcgatattcggaattacgtgctgaactacttggccactagaccgaaactggccacattcgtgactcaagccctgatacagctgtacgcccggatcacaaaacttggatggttcgattgccagaaagacgactatgtgttcaggaatgctattaccgatgttacgagattcctgcaggactcagtggagtactgtatcattggcgtgacaatattaagtcaactcacgaacgagataaaccaggcagacacaactcatcctctgactaaacatcgtaaaatcgctagtagctttagggactcctccctattcgacattttcacactgtcttgtaacttgctcaaacaagccagtggcaagaacctaaacctgaacgatgagagtcagcacggccttctgatgcagcttcttaagctaacccacaactgtctgaactttgactttatcgggacaagtacagatgaaagctctgatgacctctgcaccgtgcagatcccaacatcatggaggagtgctttcctcgactctagcacactgcaactgtttttcgatctctatcatagcataccgcccagcttctcccctctcgttcttagctgcctggtccagattgcatccgttcgccgttctctattcaacaatgccgaacgcgcaaaattcctgtcacacctggtggacggtgtgaagagaatacttgagaatccacagtccctctcagaccccaataattaccacgagttctgtcgtctcctggctcgccttaagtctaactatcaactgggcgaactggtgaaagtcgaaaactaccctgaagtcatccggctgatcgccaactttacagtgaccagcctgcagcactgggaatttgcccccaattcagttcattatctgcttagcctttggcaaaggctcgccgcctcagtgccttatgtcaaggctacagaacctcatatgctggagacctacacaccagaggttaccaaagcctacatcacatccagactagaaagcgttcacatcattctccgcgacggccttgaagatccactggaagacacagggctagtgcaacagcagctggatcaactttccacaatcgggaggtgtgaatacgagaaaacctgcgctctcctggtgcagttgttcgatcagtctgcacaatcctatcaagagctcttacagagcgcaagcgcgtcaccaatggatatcgccgtgcaggaaggacgtcttacgtggttggtgtacataatcggggctgtcatcggtgggagagtttctttcgctagcaccgacgagcaagacgcaatggacggggagctcgtttgtagagtcctacaactgatgaaccttacagacagtcgccttgcccaggccggaaatgaaaagctcgagctagctatgctgtccttttttgaacagttccggaagatctacatcggcgatcaggtgcaaaagagcagtaaactataccgtcgtctcagcgaagttctgggattaaacgatgagacaatggtgctgtcggtcttcatcgggaagatcatcacaaatctgaaatactggggtagatgcgagccgattacctcaaagactttgcaacttcttaatgatctcagcattggttatagcagtgtgcgcaagctggtgaagctctcagccgtgcaattcatgcttaataatcacacatctgaacatttttcctttctggggatcaacaaccagtcaaaccttacagacatgcgatgccgcaccactttttacactgctctggggcgcctcctgatggtggatctaggagaggacgaggaccagtatgagcagtttatgttacctttgacagccgcctttgaggctgtggctcagatgttttccaccaactcgtttaacgaacaggaggcaaaacggaccctcgtcgggctcgttcgtgacttgcgcgggattgctttcgccttcaacgccaaaacctcctttatgatgctgtttgagtggatttaccctagctacatgcctatcctgcagcgcgctatagagctatggtatcacgatcctgcttgtacaacccccgttctgaagctgatggccgaactggttcataaccggtcccaacgattacagttcgacgtgagctcaccaaatggtattctcttgtttcgcgagacctccaagatgatcacaatgtatggcaaccggatcctgaccctcggggaggtgccgaaggatcaggtgtacgcgctaaaactaaagggaattagtatctgttttagcatgctgaaagccgccctttctgggtcttacgtcaattttggtgtcttcaggctctacggcgatgacgccctcgacaatgccctgcagacctttattaaactgctactgtccatcccacactccgacctgcttgattatcccaagctgagccagtcctattacagccttttggaggtgctcacacaagatcacatgaactttatcgcctccttggaaccgcacgtcatcatgtacattctgtctagcatcagcgaggggctcacagcgttagatacgatggtctgcaccggctgttgcagctgcttggatcacattgtcacttatctgttcaaacaacttagcagaagtacaaaaaagcgcacaactcctctcaaccaagagtcggacaggtttctccacatcatgcaacagcatcctgagatgatccagcagatgctgtccaccgtgctgaacattattattttcgaagactgcagaaaccaatggagtatgtccagacctctactgggcctgatcctcctgaacgagaaatattttagcgacttaaggaattcaatcgtgaactcacaaccaccagaaaaacagcaggcaatgcacttatgttttgagaatctcatggagggaatcgaacgtaatcttctcacaaaaaatagagaccgcttcacccagaacctctccgctttccggcgcgaagttaatgacagcatgaagaacagcacctatggagttaatagcaacgatatgatgtcctag

SEQ ID NO: 116466 - DNA, 3267 bp, synthetic construct
  misc_feature 1..3267: note = Description of Artificial Sequence: Synthetic coding sequence
  source 1..3267: mol_type = other DNA
atgagagatcctggaagaaagtcattagctcagcttgaaaacttatgcaaacagttgtatgaaacaaccgacactacaacccgtctgcaggctgagaaggctctggtcgagttcacaaactccccagattgcctgtcaaagtgtcagctcctgttagagaggggctccagctcatactcgcagcttctggctgctacatgcctgaccaaattggtgagcaggaccaataatcctttgcccctggagcagaggatcgatattcgcaactacgtgctgaattacctcgccactcgacccaagctggcaaccttcgtgacgcaggccctcatacagttgtacgcgcgcattacaaaactcgggtggtttgactgtcagaaagatgattacgtgtttaggaacgcaattacagatgtcaccagattcctgcaggactcggttgaatattgcatcatcggcgtgacaatactttcacaactgaccaatgagatcaaccaggctgacacaactcacccgcttactaagcaccggaagattgcctctagctttcgggactcctccttgttcgatattttcactctgagctgtaacctgctgaagcaggctagcggcaagaatctgaatctgaatgacgagagtcaacacggcctcctcatgcaactcctcaagctgacacataattgcctgaattttgatttcattgggacatcgacagacgagtcatccgatgatctctgtacagttcagatcccaacctcctggcgtagtgccttcttagactccagtactttgcagttgttttttgatctgtaccactccatcccaccatcctttagcccccttgttctgtcatgtctggtacagatcgcaagcgtccggagatcccttttcaacaatgccgagcgcgctaagttcctttctcacctggttgatggggttaaacggatcttggagaacccccaatcactcagcgacccaaataattaccatgaattttgccgcttgctagctagactcaaaagcaattaccagttgggagagcttgtgaaagtcgagaactaccctgaggtcatccggcttatcgcaaattttacggttactagcctccagcactgggagttcgcccccaattctgtgcactatcttctgagcctgtggcagcggctcgccgcgtcggtaccctacgtcaaggccaccgaaccccacatgttagaaacttacacccccgaagtaactaaagcctatatcacttctcggctggagagcgtgcatatcatccttcgggacggcctggaagaccctttagaagacacgggactagtgcagcagcaactggaccagctgagcactattgggaggtgcgagtatgaaaagacttgcgccctgctcgtacagttatttgatcaatcagcgcagtcgtaccaggaactgctgcagagtgcgtctgcctctccaatggatattgccgtgcaggaggggagacttacgtggctcgtttacattattggggctgttattggcggaagagtctcatttgcttccactgatgagcaggacgccatggatggggagttggtgtgtagggtgcttcagctgatgaacttgacagacagtagactagcccaagctggaaacgaaaaattggaactggctatgctgtctttcttcgaacagtttagaaagatctatatcggggatcaagtacagaagagttcaaagctgtatcggaggctgtctgaagtgttgggactgaatgacgaaacaatggtgctaagtgtattcataggtaagatcataactaatctgaagtactggggccggtgcgaacccattacctctaaaacgctgcagctcctaaatgacctctccatcggatacagtagcgtgcgtaaactggttaagctttcagcagtccagtttatgctgaacaatcatacatctgagcacttcagcttcctaggcatcaacaaccaatctaatctgactgacatgcggtgcagaacaaccttctacaccgccctcggccgactattgatggtggatcttggagaagacgaagaccaatatgagcagtttatgttgccactaaccgctgcttttgaggcagtggctcagatgtttagtaccaacagctttaatgaacaggaagccaagcgcacactcgtcggactggtccgcgacttgagaggcattgcattcgcattcaatgccaaaacatcttttatgatgctcttcgaatggatctatccatcgtacatgcccatcttgcagagggccatcgagctatggtaccatgatccagcctgtacaaccccggtcctgaagctcatggccgaactcgtacataataggagccagaggttacagttcgatgttagcagtccgaatggcatccttctgttccgcgaaacaagtaagatgatcaccatgtacggtaacaggatcctgactctaggcgaggtccccaaagaccaggtgtatgcactcaagctaaagggaataagtatatgtttttccatgttgaaggccgccttaagcggcagctacgtgaattttggcgtattcagactctatggagatgatgctcttgacaacgccctccagactttcatcaaactcctcctaagcatcccacacagcgacctgctggattatcctaaactcagtcagtcctactactcactcttagaggtgcttacacaggaccatatgaattttattgcctctttagaaccccacgtcattatgtacattttgtcctccatctccgaaggcttaaccgccctggataccatggtctgcaccggttgttgttcgtgcctagatcacatcgtgacctatctattcaagcagctgagcagatcgacaaagaaacgcactacccctttgaatcaggaaagtgatagattcctccacataatgcagcagcatcctgagatgatccagcagatgcttagcacagtattaaacatcatcattttcgaggactgccggaatcagtggagcatgtcaagacccctcctcggactcatcctgctaaacgaaaaatacttctctgacctgcgaaattcgatagtgaattcccaaccccctgagaagcaacaggctatgcacctgtgtttcgaaaatttaatggagggtatcgagcgaaacctgctgaccaaaaacagagaccgatttacccagaacttgtcagcattcagaagagaggtaaatgatagtatgaaaaattctacctatggtgtgaactccaacgatatgatgtcatag

SEQ ID NO: 116467 - DNA, 3291 bp, synthetic construct
  misc_feature 1..3291: note = Description of Artificial Sequence: Synthetic coding sequence
  source 1..3291: mol_type = other DNA
atggctgaccacgtgcagagcttggctcaacttgaaaatctctgtaaacaactgtatgagacaacggacactactacacggctccaggcagaaaaagctctagtggaattcacaaatagtccagattgtttgagcaagtgccagctgttgttggaaagggggtctagctcatacagccaactactggccgccacctgtctcacaaaactggtgagcaggaccaataacccattgcccctggaacagagaatcgatatccgaaattacgttctgaattacctcgccaccaggcctaaactggcaactttcgtgacgcaggcactgatccagctctacgcacgcattacgaagttgggttggttcgattgccagaaagacgactatgtttttcggaacgcaatcacagatgttacgcggttcctgcaggatagcgtggagtattgtattataggggtaaccatcctgtcgcagctgaccaatgagatcaatcaggtcagcgctactgcattcctgatagaggccgatactactcacccactgacaaaacatagaaagatagcttcatcattcagggactcaagtctgtttgacatcttcacattgtcatgtaacttgctcaaacaagcaagcggaaagaacctcaatcttaatgatgaatcccaacacgggcttctgatgcagctgcttaaactgacacacaattgtctcaatttcgactttatcggaacatctactgacgaatcatctgatgatctctgcaccgtgcaaattccaacaagctggcgaagcgcttttttggatagctctaccttgcagctcttctttgacctctaccactctattcctccttcttttagtccccttgtgctgtcgtgcctggtacagatcgcctctgtgaggaggtccctcttcaataacgcagagagagccaagttccttagccacttggtcgacggggtgaaacgaatactggaaaacccacagagcctgtccgatccaaacaactatcatgagttctgccggcttcttgcacgattaaagtctaactatcaactcggggaactggtgaaagtggagaactatccagaagttatacggctgatagccaattttaccgtgactagcctgcaacactgggagttcgcccctaactcagttcactatctcttgtcactctggcagagattagcggcgagcgttccctacgtgaaggctaccgaaccccacatgctcgagacatacacccccgaagttacaaaggcctacattacaagcaggcttgagagcgtccacattatactgagggatgggttggaagaccctctagaagacaccgggctggtccaacagcaactggaccagctctccacaataggaaggtgcgaatacgagaaaacatgcgccctcctcgtgcagctgttcgatcaatctgcccagagttatcaggaactcttgcaatcagctagcgccagtcccatggacatagccgtgcaggaaggaaggctgacatggttggtgtatatcataggcgcagttatcggggggcgggtcagcttcgcttccactgacgaacaggacgcaatggatggagaactggtctgtcgggtgcttcagttaatgaacctcacggactccaggctggctcaggccgggaatgaaaaacttgaactagccatgttgtctttctttgagcaattccgtaaaatctacatcggcgaccaagtgcagaaatcttcaaagctctatcgtcgcctgagtgaggtgctgggactgaatgacgagacaatggtgctgtccgtattcattgggaagatcattaccaatctcaagtactggggccggtgcgaaccgatcacttcaaagaccttgcagctgctgaatgacctttccatcggatatagtagcgtacgcaagctggtaaagctcagtgcagtgcaatttatgttgaacaatcacacgtccgagcatttttccttcctcgggattaacaatcagagcaacctgactgatatgaggtgcaggacaacattctacaccgcgctcgggcgcctgctaatggttgacttgggggaagatgaggaccagtacgagcaatttatgctaccactcacagctgctttcgaagctgtggcccagatgttttccactaactcatttaacgaacaagaagcgaagcggaccctggtcggtctggtgcgggatctccgcggcatcgcatttgcattcaatgctaagacctcttttatgatgctgtttgaatggatctacccctcctacatgccaattctgcagcgagcaatcgagttatggtatcacgatcctgcctgcaccactcctgtactcaaactcatggctgaactcgtgcacaatcggtctcaacgactgcagttcgacgtatcgtcaccaaacggtatcctgctgttccgagaaacttctaaaatgataactatgtacggaaacaggatccttaccctcggagaagtgcctaaagaccaggtctatgccctgaaattaaaagggatcagcatctgctttagcatgctgaaggcagctctcagcggcagttatgtgaacttcggggttttcagactgtacggggacgacgccctggacaacgccctgcagaccttcattaagctgctgctctccattccacactcagacctgctggactatcctaagctgagccaatcgtattattccctgctggaggttctgactcaggatcacatgaattttatcgcttcactcgagcctcatgtaattatgtacattctgtcctctatctcagagggacttacggccctggacactatggtgtgtacaggatgctgttcctgcctggatcacatcgtaacctacctgtttaaacagttgtcccggtccaccaagaagcggactacgcccctgaaccaggagtcagaccggtttcttcacatcatgcagcagcacccagagatgatccaacagatgctgagtaccgttctcaacatcattatatttgaagactgtcgcaatcaatggtctatgtcccggcccttgcttggactgattctgcttaacgaaaaatactttagcgatctccgaaacagcattgtcaacagccaaccaccggagaaacagcaggctatgcatctgtgctttgagaaccttatggagggtatcgaacgcaacctcctgactaaaaaccgcgatcggttcacacagaacctgtctgccttcagaagggaggtgaacgatagtatgaaaaattctacatatggggtgaattcaaacgatatgatgagctag

SEQ ID NO: 116468 - DNA, 6363 bp, synthetic construct
  misc_feature 1..6363: note = Description of Artificial Sequence: Synthetic coding sequence
  source 1..6363: mol_type = other DNA
atgcggtcttttaaaagagtgaatttcgggactctactgtctagtcaaaaggaggcggaagaactactgcccgccctgaaggaattcctttctaatcctcctgcaggatttccctctagccgatctgatgccgaacgaagacaggcttgcgacgctattctgagggcatgcaatcaacagctcaccgcaaaactagcatgtcctaggcatctgggtagcctgctcgagttggctgagctcgcctgcgacggctatctcgtatccactccacaaaggcctcccctttacctggagaggatcttgttcgtgctattgcgaaacgccgctgcacaaggctcccccgaagcgacccttcggttggcgcagccactccacgcatgcttagtacagtgttcacgcgaggcagccccacaggattacgaagctgtggctaggggttccttctcccttttgtggaaaggcgccgaggctctgctagaacgacgcgcagccttcgccgctcggctcaaagcgctgtcctttctcgtcctgctggaagacgagagcacaccatgtgaagtcccgcactttgcatcacccaccgcttgccgagccgttgctgcccatcagctcttcgacgcaagcgggcacggtctgaatgaggctgacgcagactttctcgacgacctcttgagtcggcacgtgattagggcactcgtgggcgagcgcggcagttcctcaggactgctatctccacaacgggctttgtgtctcctggagctgaccttggaacattgcaggagattctgttggtctaggcaccatgataaggccatctccgccgtggagaaggcacattcttatctgaggaatactaatctggctccatctcttcagttgtgccaacttggagttaaactgttgcaggtgggagaggaaggtccccaagccgttgccaagctattaatcaaagcttccgctgttctatccaagagtatggaagccccgagccctccactgagggcattatacgaaagttgccagtttttcctgtctggcctggagaggggcacaaagcgtagatacagactggatgccatcctctctctgtttgccttccttggaggctactgctcactactccagcaactcagggacgacggagtctacggaggctcgagcaagcagcaacagtcattcctccagatgtacttccaggggctacacttatacacagtcgtagtgtacgatttcgcgcaaggatgccagatcgtagatctggcggatctcacacaactggttgactcctgcaagtcaactgttgtctggatgcttgaagccctggagggactttctggccaggaacttacagatcacatgggaatgacagccagttacaccagcaatctggcctactcgttctattcacacaaactgtacgctgaagcttgcgcaatcagcgagccgctctgccagcatttgggactggtgaagccaggtacatatcccgaagtgcctcccgaaaagttgcaccgatgcttccggctgcaagtcgaaagcctgaagaagctgggaaaacaggcacaaggatgcaaaatggtcattctgtggctcgccgccctccagccctgctcccccgagcatatggccgaaccagtgactttctgggtcagggtcaaaatggatgccgccagggccggtgacaaagagttgcagctcaaaacattaagggactcactctctgggtgggaccccgagacactcgctctgctgctccgagaagagctccaagcctacaaagcagtgcgggcggacacaggccaggagcggtttaatattatttgtgatttgctggagctcagtcctgaggaaacccccgccggggcatgggcgagagctactcacctcgtcgagttggcccaggtgctctgttatcacgatttcacacagcagaccaactgttctgcactcgatgccatccgcgaggccctgcagcttctggactcagtgaggcctgaggctcaggcgagagatcagctgctggatgacaaggcccaggctttgttgtggctgtatatttgcacactcgaagctaagatgcaagagggtattgaacgtgaccgtagagctcaggcgccaggcaacctggaagaatttgaagtaaatgatctgaactacgaggacaaattacaagaggatcgctttttatacagtaacattgcatttaacctggcagccgatgcagcacaaagcaagtgtcttgaccaggccctagcgttgtggaaggaactgcttactaagggtcaggcgccagctgtgcggtgccttcagcagactgcagctagtctccagattctggcggctctttaccagctagtggccaaacctatgcaggccctcgaggttctgttgttactacggatagtatcagagcgattgaaagaccactcaaaagcagcgggtagctcatgccacataacccagctgcttctcacacttggttgtccctcctatgctcagcttcacttggaagaagctgccagctccctcaagcacctcgaccagaccacagacacttacctgctgctgagcttgacatgcgaccttttgcggagtcaactgtattggactcaccaaaaggtgacaaagggagtttctctactgttatccgtgctgagggatcctgcactgcagaagtcaagtaaggcctggtatttgctcagggtccaggttctgcagctggttgcagcctatttgtccctgccgagcaacaacttaagccatagtctatgggagcaattgtgtgcccagggctggcagacccctgagatcgccctgattgatagtcacaagctcctgcgatcaataattctgctgctgatgggtagcgatattctctcaacacagaaggccgccgttgagacctcttttctggactacggcgagaaccttgtgcagaaatggcaggtcctcagcgaagtgctaagttgtagtgaaaagctcgtgtgtcatctgggccgcctggggtcagtctctgaggcaaaggccttctgcctggaagcactgaagttaacaaccaagctgcagatccctcggcagtgcgcactgttcctcgtgttgaaaggggagctggaactggctaggaacgatattgacctttgccagtctgatctgcagcaggtcctgttcttactggagtcatgtactgaatttggcggcgtcacacagcacttagatagcgtgaaaaaggtgcacctgcagaagggcaaacaacaggcacaggtcccatgcccaccacaactgccggaagaagagctatttctgcgcggtcccgccctcgagttagtcgctacagtagcaaaggagcccggcccaatcgcacccagcacgaatagtagccctgtcctgaaaacaaagcctcagcccatcccaaactttctctcccactccccaacttgtgactgctcactgtgcgcttcgcccgtacttaccgccgtttgccttcgctgggtgctggttacagctggcgtaagacttgcaatgggacaccaggcacaaggcctggatctattacaggtagtccttaaaggctgccccgaagccgcggagcgcctaactcaggccttgcaggcaagtctgaatcacaaaacccccccaagcctcgtgccaagtcttttggatgaaatcctcgctcaggcctacacattgctagcattggaggggctgaaccaaccaagcaacgaatctctccaaaaagtgctgcagagcggactaaagttcgttgccgcaagaatcccacacttagagccttggagagccagccttctgctgatttgggccttgaccaagctggggggcctgtcttgctgtactactcagcttttcgcatcttcctggggttggcagccccctcttataaagtccgtgccgggttctgaaccctcaaagacacagggacagaagcggagcgggagaggcagacagaagctggcttccgccccccttcggctgaataacacatctcaaaaaggcctcgaaggtagaggcctgccgtgtacaccgaaaccccccgacagaattaggcaggcagggcctcacgtgccattcacagtgttcgaagaggtgtgccctaccgagtccaaacccgaggtcccacaagcccctagagtgcagcagagagtgcagactaggcttaaagtaaatttttcagatgatagcgatctggaggatcctgtttcggctgaggcctggctggccgaagaacctaagagaagaggaacagcctctcggggccgcgggagagcacgaaagggactgtccctgaaaacagatgccgtcgtagcacccgggtctgccccgggcaatcccggactaaacgggaggagtaggcgcgccaagaaagttgcgtcgagacactgcgaggaacgccgcccacagagagcctcagatcaggcccggccgggccctgaaattatgcgcacaatccccgaagaagagctgactgacaattggagaaaaatgagctttgagatccttcgtggctccgacggggaggatagtgcgtccggcgggaagactccagcccctggtccagaagcagcttctggcgagtgggagctactgaggttagattcttccaaaaaaaaactcccttcaccttgccccgataaggaatccgataaggacctgggcccgcgcttaagactacctagcgctcccgtggcaacaggcctaagcacactggattctatctgcgactcactctcagttgctttcaggggcatttcccattgcccccctagcggactgtatgctcatctgtgccgcttcctcgccctctgtctgggccacagggatccctatgccacagcatttctcgtgacagagagtgttagcatcacttgccgtcatcaactgctcacacacttacaccgtcaactgtcaaaggcccagaaacatcgtggctctctcgaaatcgccgatcagctgcagggactttccttacaggagatgcccggggatgtgcctttggctagaatccagcggctgtttagttttagagctcttgagtctggccacttccctcagcccgaaaaggagtccttccaggagagacttgctttgatcccctctggcgtcactgtgtgtgttctcgcactggcaacgttgcagcccgggaccgttggcaataccttgctgctgacacgccttgagaaggacagtccaccagtgtccgtgcagatccccactggccaaaacaagttgcaccttcgatctgtcctcaatgagtttgacgccattcagaaagctcagaaggaaaactcaagttgtaccgataagcgtgaatggtggaccgggcggttggccttagaccacaggatggaggttctcatcgcatccctggagaagtctgtgctcggctgctggaagggtctgctgctgcctagctccgaggaacctgggccagcccaggaggcatcaaggctgcaagagctgctccaggattgtggttggaagtacccagatcgcactctgcttaagatcatgctgtctggcgcaggcgctctgaccccacaggacatacaggctcttgcctacggcctttgtcccactcagcccgagagggctcaggagcttctgaatgaagctgtcggaaggctccaggggttgaccgtgccctcgaactctcacctagtgttagttttagacaaagatcttcagaaactgccgtgggagagcatgcccagcctgcaggcccttccagtaaccaggctgccatcctttcgcttcctgctgagttatagtatcattaaggaatatggcgcttcaccggttctttcacagggtgttgacccacgttctacgttctacgtgctgaaccctcacaacaatctgtcgagcacagaggagcaattcagggccaactttagttctgaagcaggttggcggggggttgttggcgaggtaccacgacccgaacaggttcaggaggccctgacgaagcacgatctctacatctatgcaggccacggcgccggcgcccggtttttggacggtcaggcagtgcttcggttgtcttgcagggctgtggccctcttattcgggtgtagctctgccgcccttgctgtcaggggcaaccttgaaggagcaggcatcgttcttaagtacataatggccggctgtccactattcctggggaacctttgggacgttactgatcgcgacattgataggtatacagaagcactgcttcaaggatggctgggggccgggcctggcgctcctcttttgtattatgtgaatcaggcacgacaggccccccgcctcaaatatctaatcggcgcagctcccattgcttatgggcttcccgtgtctctgcggtag

SEQ ID NO: 116469 - DNA, 6363 bp, synthetic construct
  misc_feature 1..6363: note = Description of Artificial Sequence: Synthetic coding sequence
  source 1..6363: mol_type = other DNA
atgaggagtttcaaacgggtgaactttggtaccctactgtcaagtcagaaagaagctgaggagctgcttccagccctgaaggagtttctgagcaacccgcctgccggatttcccagctctaggagtgacgccgaacggcgtcaggcatgtgacgcgatactgagagcttgcaaccagcagctaaccgccaagcttgcctgtcctcgccatcttggctcactcctggaactcgcggagctcgcctgtgacggttatctagtcagtacgccccagcgcccacccctctatttggaacgcatcctctttgtacttctcagaaatgcagctgcccagggatctcccgaagctacacttagactggctcagcctttgcatgcttgccttgtgcaatgctctcgggaagcagcgccccaagattacgaagctgtagctcggggaagcttttctctcctgtggaagggggctgaggccctcctcgaacgcagagcagccttcgcagcccgcctaaaggccctgagtttcctcgtattgctggaggatgaaagcacgccatgtgaggtgccccattttgctagtcctaccgcctgccgggccgtcgcagctcaccaactgttcgatgcctccgggcacggacttaacgaggcagacgctgattttcttgatgacctcctgagccgacatgtgattcgggccttggtgggagagcgtgggtcaagttcaggactgctcagcccccagcgcgccttgtgtttacttgaactgacactcgagcattgccgtagattctgttggtcaagacatcacgacaaagctatctccgccgttgaaaaggcccacagctaccttcgtaataccaatctggctcccagcctccagctgtgccagctaggcgtcaaactgctgcaggtgggggaggaaggaccgcaggctgttgccaagctgctcatcaaggcatccgccgtcctctccaaatctatggaagccccctccccgccgctgagagctctgtatgagagctgccagttcttcttaagtgggctggagcgcggcaccaaacgccgatatcggctggatgccatcttgtcacttttcgcattcctcggcggatactgctctctccttcagcagcttcgtgacgatggagtctacggcggcagttccaaacagcaacaatcttttctgcagatgtactttcaggggttacacctttacacggtggttgtctatgacttcgctcagggatgtcagattgtggacttggccgatttaacgcaactggtggactcatgtaagtctaccgtggtgtggatgctggaggccctggaggggcttagcgggcaagagcttactgatcatatgggaatgaccgcaagctacacaagcaatcttgcatacagtttctatagtcataaactctatgcagaagcatgcgccatctctgaaccactttgtcaacacctgggcctggtcaagcccggaacatatcctgaagtaccacctgaaaaactacatcgttgctttaggctccaagtcgaaagcttgaagaagctcgggaaacaggctcagggttgtaaaatggtgattctctggctggccgcattgcagccctgctccccagagcacatggcggaaccagtgaccttctgggtgcgggtgaaaatggatgccgcccgagccggggataaggagctacagctgaagacactccgcgattcactgtccgggtgggatcccgagaccctcgcactcctgctcagagaggagcttcaagcctataaagcagtgcgtgctgatactggacaggaacgcttcaatataatttgcgacctcttagaactttcgcccgaagagaccccggccggcgcctgggccagggcaacccacctagtggagctcgcacaggtgctgtgttaccacgatttcacgcagcagacaaattgctcagcactggacgcgattcgagaggccttgcagctgctcgactcggtcaggcccgaagcacaagctcgggatcagctgctggacgacaaggcccaggcactgctgtggctgtacatttgtaccctggaggccaaaatgcaggaaggaattgaacgtgacaggcgggcccaagccccaggcaacctggaggaatttgaggttaatgacctaaactatgaagacaaactccaggaggatagatttctgtattccaacattgcattcaacctggccgctgacgccgctcaaagcaagtgtttagatcaggcattagcactgtggaaggaactgctgactaagggtcaagctcccgcagtgagatgcttgcaacagacagccgcctcattgcaaatccttgctgcactctatcagctggtcgccaagcctatgcaagctcttgaagtactgctgctcctcaggatcgtcagcgagcgtctcaaagaccacagcaaagccgctgggtcaagctgccacatcactcagttacttctaacgctggggtgtccatcttacgcacagctccacctggaggaggcagccagttctctgaagcacctcgatcagacaaccgatacttacctgttgcttagcctgacatgcgacctgttgcggtcccaactgtactggactcaccagaaagtaacgaagggtgtttctctgcttctctccgtattgcgtgaccctgcattacagaagagctctaaggcttggtacctgttgagggtacaagtgctgcagctagtcgccgcctaccttagtttgcctagtaataacctcagtcattccctgtgggagcagctctgtgctcaagggtggcagacccctgaaatcgctctcattgacagccataaactccttcggtccattatcttgctgttgatggggagcgacatcctcagtacacaaaaggcggctgtggagacaagctttttagactatggggagaacctggtgcagaaatggcaggtgctgagcgaggtccttagctgttccgagaagctagtttgtcacctcggccgactagggagtgttagcgaggctaaggcgttctgtttggaggctcttaagcttacaaccaagctccaaattcccagacagtgtgcgttatttttggtgctaaaaggggaactcgagttggcacgcaacgatatagacttgtgtcaaagcgacctgcagcaagtgttatttctgctagaaagttgtacggaatttggaggggttactcaacatcttgattccgtgaagaaggttcatttgcaaaaaggaaaacagcaggctcaagtgccatgcccgcctcagcttccagaagaggagctgttccttagagggccagcactggagctcgtggccaccgtagccaaggagcccgggcccattgcgcctagcacaaattcttcaccagtgctgaaaacgaagccacagcccatccctaactttctgtcacatagtccaacttgtgattgtagtctttgtgccagccctgtgctcacagcagtgtgcctccgttgggttctagtgactgcaggggtccggctggccatgggacatcaggctcaggggctcgacctgttgcaagtagtcctgaagggatgtcctgaggcagctgagaggctcacacaagctctccaggccagccttaatcacaagactccacccagcctcgttcctagtctcctggatgaaattctggctcaagcctacaccctgttagccctggagggtctgaaccagcccagtaatgagtctcttcaaaaagtgctgcagagcgggctgaagtttgtcgccgccagaatccctcacctcgagccttggcgggcctctcttctgctcatctgggctctcaccaagctgggagggctcagttgctgcactacccagctgtttgcctcttcctggggctggcagcccccattaattaaatccgtgcccggttcagagccctcgaaaacacagggacaaaagaggtctggcagaggccgccaaaaactggcgagcgctccacttcgattaaacaatacaagccagaaaggcctggaaggaagaggtctcccgtgtacacctaaaccacccgataggatcagacaagctggcccccacgtgccttttacagtctttgaagaggtttgtcctacagaatccaagccagaggtgcctcaggcccccagggttcagcagagagttcagaccaggctgaaggtcaattttagcgacgactcagacttggaggatccggtgagcgcagaagcttggctggcggaagaaccaaaacggcgggggaccgcgtctaggggacggggcagggcgcgaaagggtctcagtctcaagaccgatgccgttgtggctccagggagtgcgcccgggaatcctggcctgaacgggcgcagcaggcgggcaaagaaggtggcctcacggcattgcgaggagaggcgtccacaacgtgcgagtgaccaggcccggcctggccctgaaattatgcgtacaatccctgaggaagaactgactgataactggagaaaaatgtcattcgagatcctacggggttccgacggagaagacagcgccagcggtggcaaaactcccgcgcccggccccgaagctgcttcaggtgaatgggagttgctgaggctggattcaagcaaaaagaagctgccctccccttgcccagacaaagagagcgacaaggatctgggaccaagactccggcttccatcggccccagtcgccactgggctgagtacacttgattcaatttgtgactctttgtcagtggcgtttcgtgggatatcacattgccccccttccgggctgtacgctcacctgtgcagattcttagccctgtgcttaggacaccgcgacccgtatgcaactgccttcctggtgactgagagcgtgtccatcacctgccggcaccagctactcacacatctgcacaggcagctttcgaaggcacagaagcaccgcggcagcctggagattgctgatcagctgcagggcctgagcctgcaggagatgccaggggacgtgcctctggctcgcatccagcggcttttttcattcagagctctggaaagtgggcactttccccaacctgagaaggagagttttcaggagcgcctggctctaatcccgtccggcgtaacagtctgcgttctggcactggctaccctgcaaccgggaaccgtaggcaacacccttttgttgacgcgcctcgaaaaagatagtccgccagtgagtgttcagattcctaccggtcagaataaattacatctccgcagcgttcttaacgaatttgatgctattcaaaaagcccagaaggagaactcttcctgtaccgataaaagagaatggtggactggacgtcttgctctggaccatcggatggaggtgctgatagccagcctagaaaagtcggttctggggtgctggaaaggcctattactgcccagcagtgaagagccagggcctgcccaggaagcaagcagactgcaggagctgcttcaggactgcgggtggaagtacccagatcgcaccctgctcaagattatgttgagtggtgcaggtgctctgactcctcaggacatacaagctctggcatatggactgtgccctacacagccggagagggcccaggagctgctaaatgaggccgtggggaggttacaggggctaacggttccatcaaattcccacttggtgctcgtccttgataaagacctccagaagttaccatgggaaagcatgccgagcctacaagcactgcctgtcacacgacttccctctttcaggtttttactgtcgtacagcattatcaaggaatatggcgcatctccagtcctgtcccaaggagtggaccccagatcaacattttatgtcctgaatcctcataacaatttgagttccacagaagagcagttcagggccaactttagcagcgaggccggctggcggggggtggttggcgaggtgcctagaccagaacaggtccaagaagcactgacaaagcacgacttgtatatatacgctgggcatggcgctggcgcaagatttcttgatggacaggccgtgctgcgcctgtcttgtcgcgctgtagcgcttctgtttgggtgttctagcgctgcactggctgtcaggggaaacctggagggcgcaggcattgttctaaagtatatcatggctgggtgcccactgttcctggggaacctatgggacgtcaccgaccgcgatatcgataggtatacagaggccctcttacagggatggctgggggccggtcctggtgctccccttctttactatgtgaatcaggctcgacaagctccacgcctgaaatacctgatcggagccgcaccaatcgcatacgggctgcctgtcagtcttcgttag

SEQ ID NO: 116470 - DNA, 5388 bp, synthetic construct
  misc_feature 1..5388: note = Description of Artificial Sequence: Synthetic coding sequence
  source 1..5388: mol_type = other DNA
atggaagctcctagcccccccctacgtgccctctacgaaagctgccaattcttcctctcggggctggagcgagggaccaaacgccgttacaggctcgacgctattctatctttgttcgccttcctaggaggatactgcagcttgctgcagcaattgagggacgatggcgtctatgggggttccagcaaacaacagcaatcatttctgcagatgtatttccagggtttgcacctgtacacggttgtggtctacgattttgcgcaggggtgtcagatagttgatctggccgacttaactcaactggtcgacagttgcaaatcaaccgtcgtgtggatgttagaagccttagaaggcctgagtggacaggagctcactgatcatatgggaatgacagcctcctatacaagcaacctcgcctacagcttctacagccacaaactgtatgccgaagcgtgcgctatcagcgagcccctatgccagcacttgggattggtgaagccaggtacctaccccgaggtgcctccagaaaaactccaccgctgtttccgtctgcaggtggagtccctgaagaaactggggaaacaggcacagggctgcaagatggttatactgtggctcgcagctctgcagccttgcagtcctgaacacatggctgaacccgttactttctgggtacgagtgaagatggacgccgcacgggctggggacaaggagctgcagctgaagaccttgcgggacagtctatccgggtgggatcctgagaccttggctcttctgctgagagaggagttgcaggcctacaaggctgtgagggcagataccggtcaggagcgttttaacatcatttgtgacttactggagttatcgcccgaggaaactccagcaggagcctgggctcgcgccacccacctggttgagctcgcacaggttctctgttaccacgattttacacagcaaacaaattgttctgcccttgatgcgatcagggaagccctgcagcttttagattcagtcagacccgaagctcaagctagggaccagctcctggacgacaaagcccaagctttgctctggctgtacatctgcaccttagaggccaagatgcaggagggaattgaacgcgatcgacgtgcccaggctcctgggaatctggaggagttcgaagttaatgacctcaactacgaggacaagctgcaagaagaccgattcctgtactccaacatcgcatttaacctggctgcggatgcagcccagtcaaagtgtctggaccaggctctagccctgtggaaggaactcctcacgaaggggcaggcccctgccgtgcgatgtctgcagcagacagccgctagtctgcaaattctagctgcactttaccagctggtcgcaaaacccatgcaagctctggaagtgctcctgctgctccgtatcgtgtccgagaggctgaaggaccactccaaagcggcaggcagctcttgtcatattacccagctgttgctcacactcggatgtccatcatacgcgcagttgcatctcgaggaggcggcaagtagcctcaaacacctggatcaaactacggacacttacctcctgctgagcttgacctgtgatctccttaggtctcagctgtactggacacaccagaaggtgactaagggggtaagcctcttgctgagtgtgctgagagaccccgctctgcagaaaagcagtaaggcctggtatctgttgcgtgtacaagtactccagctcgtggctgcgtacttgtcacttccctccaacaatctgtcacacagcctgtgggaacagctttgtgcccagggctggcagacgcccgagattgcgctgatagactcacataagctgttgcgcagcataatcctcctgttgatgggctctgacatcctttctacccagaaggcagcggtggaaacatcattccttgactatggtgagaatttggtgcagaaatggcaggtcctcagtgaagtgctctcgtgttccgaaaaactagtatgccacctgggaaggctgggctcggtgtcagaggctaaggcattctgtttggaggccctgaagctgaccaccaaactacaaattccccggcagtgtgcattattcctcgtgctgaagggcgaactggagctggctcggaacgatatcgacctatgtcagtcagatcttcaacaggttctgtttctgctggagagctgtaccgagtttggcggcgttacccagcatttggactccgttaagaaggtgcatctgcagaagggcaagcagcaggcccaggtcccttgcccgccacagcttcctgaggaggagctcttcctccgcgggccagctctggagctcgttgccaccgtcgccaaagagcccggcccaattgctccatctacaaactcttccccggttctcaaaacaaaacctcaacccattcctaacttccttagtcattcccctacatgtgactgctccctctgcgcctcgcctgtattgaccgccgtctgcctacggtgggtgctggttactgccggtgtgcggttagctatgggtcatcaggcacagggtctcgacctcctccaggtggtgctcaaaggttgtccagaggcagccgagcggctcacacaggcactgcaggcatctctcaatcataagacgccccctagtcttgtgccttctttgctagacgagatacttgcccaggcatacactctgctggcattggagggcctcaatcagccttccaatgagagtcttcagaaagtcctacagagcggacttaagtttgtggccgcccgaatccctcacctcgagccgtggcgagcaagtcttctgctaatttgggctcttacaaagctggggggactgtcatgttgcactacccagcttttcgcttcttcttggggctggcagcctcctctgataaaatcagtgccagggtccgaaccatctaagacccaagggcaaaaaagatccggcaggggacgtcagaagctagcctccgcccctcttaggctgaataatacctctcagaaaggactggagggacggggcctgccgtgtactccaaaaccacccgatagaattcggcaggccggccctcacgtgcccttcaccgtgtttgaggaggtgtgccctacagagtcaaagccagaagtgcctcaggccccccgtgtgcagcagagggttcagacacggcttaaggtcaatttttctgacgactctgacttggaggatcctgttagcgccgaggcctggttagcagaggaacctaaacgccggggaacagccagccggggaagaggacgggcccgtaaaggtttgtcactaaaaaccgacgcagtagtcgccccaggttccgcgccagggaacccggggctgaacggtcgcagtcgtcgtgctaagaaggtggcatcccgacactgcgaagagagaaggcctcaacgggctagcgatcaagcgcgacccgggcctgaaattatgagaacgattccggaagaagagctgaccgacaactggcgcaaaatgtctttcgagatactgagagggtccgacggcgaagacagcgccagcggaggaaagacaccagcccctggtcctgaagcggcttcaggtgaatgggaactactgcgtctggactcatcaaagaagaaactaccatcaccctgccccgataaggaaagtgacaaagatctgggcccacgtcttcgactcccctcagcgcccgtggcaacaggactttccactctggatagcatttgcgattctctgtccgtcgcgtttagaggcattagtcactgtccccctagtgggttgtacgcccacctgtgtcggtttctcgccctctgtctgggacatcgtgatccgtacgccacagcattcttagtgacggagtctgtgagcattacctgtcggcatcagttactgacccacctgcaccggcagctgtccaaagcccagaaacacagaggaagcctggaaatcgcagaccagctgcaggggctcagcttgcaggagatgcccggagatgttccgctagcaagaatccagcgtcttttttccttcagagccctggagtccggccactttccccagcccgagaaggagtcgtttcaggaacgtctggccctcataccttccggggtcactgtgtgtgttctcgccctggccactctccagcccggcactgtgggaaataccctgctgttgaccaggctggaaaaagactctccccctgtctccgttcagatccctacaggtcagaacaaactgcaccttcgtagcgtcctcaatgagtttgacgctattcagaaagcccagaaggagaattctagctgtacagataagagagagtggtggactgggcgcctcgccctggaccatcggatggaggtgcttattgctagtctggagaagtcggtgctgggatgttggaagggtttgctcttgccaagtagtgaagaacccgggcccgcccaagaagcctcgagactacaggagctgttacaggactgcggctggaagtacccggatcgaactctactcaagatcatgttgtcaggcgcaggcgctctgactcctcaggatatccaggccttggcctacggcttgtgcccaacccagccagaacgcgcccaggagctgctcaacgaggccgtgggacgtctgcagggcctgaccgtgccatctaattcccacttggtattggtgctcgataaagatctgcaaaaactgccttgggaatcaatgcccagtctccaggccctgcccgtcaccagattaccctccttcagattcctgttgtcctactccatcatcaaggagtatggagctagcccagtgctgagccagggtgtcgacccgcggtctaccttttacgtacttaacccgcacaacaatctctcctccacagaagagcaattcagggcgaacttctcttccgaagccggatggaggggcgttgtgggcgaggtacctagacctgagcaggttcaggaagctctcacaaaacacgatctgtacatctacgccgggcacggagccggcgcccggtttctggatggacaggcagtactgcggctttcctgtcgggcagtggccctcctcttcggctgcagttcggcagcccttgccgttcgggggaatctggagggggccggcattgttctgaagtacattatggcaggatgccccctgttcctcggaaatctttgggatgtcacagaccgtgacattgaccggtatactgaagctctactgcagggttggctcggggctggtccaggggcacccctgctgtactacgtgaaccaagcgcgccaagctccacgcctaaagtatcttatcggggcagcccccattgcatatgggctacctgtgtcccttagatag

SEQ ID NO: 116471 - DNA, 1248 bp, synthetic construct
  misc_feature 1..1248: note = Description of Artificial Sequence: Synthetic coding sequence
  source 1..1248: mol_type = other DNA
atggggaccaccgcgcgcgcagctctggttctaacataccttgccgtggcaagtgcagcaagtgagggcggcttcactgccacaggacagaggcagctgcgccctgagcattttcaggaggttgggtacgctgccccccccagtccaccactgtcacgcagcctgcccatggaccaccccgattcttctcagcacgggccacctttcgaggggcagagccaggtgcagcccccgccatcccaggaagcgacaccattgcagcaagagaaactgctacccgctcagctcccagcagagaaggaggtggggccccctctgccacaggaagccgtccccctgcagaaggaattgccctctctgcaacatcctaatgagcaaaaggagggaactcccgcaccctttggagaccagagccacccggagcctgagtcttggaacgcagcacagcactgccagcaagaccggagtcagggaggctggggacatcggctggatgggttcccacctggacggccatctcctgataacctgaatcaaatctgcctgcctaatcggcagcatgttgtctacggaccatggaacctcccccagtcatcttactcccatctcacacgtcaaggcgaaaccctaaatttcctggaaataggttacagccgctgctgccactgtcggagccacacaaataggttagagtgtgctaagctcgtctgggaggacacactggacaagtattgtgatcgcgagtatgccgtaaagacacaccaccacctatgctgtcggcacccaccctcaccaacaagagacgagtgttttgcccgtagggcaccttatccaaactatgatcgcgacatcttaacgatcgatatcggtcgagtgactccaaacctgatgggccacctttgtggcaatcagcgcgtcctgaccaagcataaacacattcccgggctaattcataacatgaccgccaggtgctgcgacctaccctttccagagcaggcctgttgtgctgaagaggagaaactcactttcattaacgatctttgcggcccccgaaggaacatatggcgcgatcctgccctgtgttgttatttatcccctggggacgagcaggtgaattgcttcaacatcaattacctacggaacgtagctctggtgtccggcgacacagaaaacgctaagggccagggcgagcagggatcgaccggaggcaccaatatctctagcaccagcgagccaaaggaggagtag

SEQ ID NO: 116472 - DNA, 1623 bp, synthetic construct
  misc_feature 1..1623: note = Description of Artificial Sequence: Synthetic coding sequence
  source 1..1623: mol_type = other DNA
atgggcacaacagcccgggcagcattagtcctaacctacttggcagtggcttctgcggcctccgagggtggcttcacagccacaggccagcgacagctccgtccggagcatttccaggaagtcgggtatgccgctcctccaagcccccccttaagcagatccctgcctatggaccatcctgactcttcccagcacggcccacctttcgaaggccagagccaggtgcagcctcctccctcgcaggaagccactcctctgcagcaagaaaaactgctgcccgcccagctcccagccgaaaaggaagtcggcccgcccttaccccaagaagccgtccccctgcagaaggagcttccctccctacaacacccaaatgagcagaaggaggggactccagcaccatttggcgatcagtcgcatcctgagcccgagagttggaacgccgctcagcactgccagcaggaccgtagtcagggaggatggggtcatagattagatggcttcccacctggacggccttctccagacaacctgaaccaaatctgcctgcctaacagacagcatgtggtgtatggaccttggaatctgcctcagagtagttactcgcacttgaccagacagggcgagactcttaacttcctggaaattggatattctcggtgctgtcactgtcggtctcacaccaacagactcgaatgtgctaagcttgtgtgggaggaggcaatgagccgtttctgtgaagccgagtttagtgtaaaaacacgcccccactggtgttgcaccagacagggcgaagcaagattctcatgcttccaggaggaggccccccagccccattatcagctacgtgcctgtccgtcccatcagccggatatttcctctggcctagaactgccatttccccccggagttccaacgctggacaatatcaagaacatatgtcatttacgtaggtttaggtctgtgcctcggaacttaccagctacagatccactccagagggagctactggccttgatccagcttgagagggaatttcagcgttgttgccgccagggtaacaatcatacatgtacttggaaggcatgggaagatacactggacaagtattgtgaccgcgaatacgccgtgaagacccaccaccacttatgttgcaggcatccgccttcccctacccgtgacgagtgtttcgcaaggagggccccctacccgaattatgatagagatattctgactattgatattggaagggtgaccccaaacttgatgggacacctgtgcggcaatcagcgggtgttgactaagcataagcatattcccggcttaattcacaacatgactgcacggtgttgcgatctaccattccctgagcaggcatgctgcgctgaggaagagaagctgacctttataaatgatctatgtgggcctcgacgaaacatttggagagacccggccctgtgttgttacctgagtcctggagacgagcaggtgaattgtttcaacattaattacctgcgcaatgtggctttggtgtcaggtgatactgagaatgccaaaggccaaggagaacaaggctccaccggagggacgaatatatcctccacttctgagccaaaagaagaatag

SEQ ID NO: 116473 - DNA, 1704 bp, synthetic construct
  misc_feature 1..1704: note = Description of Artificial Sequence: Synthetic coding sequence
  source 1..1704: mol_type = other DNA
atgggaaccaccgctcgcgctgccctggtcctcacataccttgcagttgcttccgccgcttcagagggcggattcaccgcgacgggacagagacagctgcgccctgagcacttccaagaagtcggatacgccgcccctccctccccccctctgagtcgtagtctgccaatggaccatcccgactctagtcagcatggaccacctttcgagggtcaatcggggaaggagggacgtggcccacgaccccattcacagccatggctaggcgaacgagtgggatgcagccacatcccacctagtatagtacagcccccccccagtcaggaggcaacaccgctccaacaggaaaagctgctgcctgcccaattgcccgcagagaaggaggtcggccctccgctgccccaggaagctgtaccgctccagaaggaactgccttccttgcagcatcctaatgagcaaaaggagggcactcccgcacccttcggagaccagagtcatccagagcccgaatcctggaacgccgcccaacactgccagcaggacagatcacagggcggctggggacatcgtctggacggttttcccccagggaggccctcacctgataatttgaaccagatttgcctacctaaccggcagcacgttgtgtatggcccttggaaccttccgcagagtagctacagccatttgaccaggcagggcgagactctgaattttttggagattggctattcaagatgttgtcactgtcgctcccatactaatcgcctcgaatgcgccaaacttgtatgggaagaggccatgagccgattctgcgaggctgagttttctgttaaaactcggccccactggtgttgcaccagacaaggagaggcaagattttcttgctttcaggaagaggctccccaaccgcactatcaactaagagcatgcccatcacaccaaccagacataagctcaggactcgagctcccatttccacctggggtacctaccttggataatataaagaatatatgtcatctacgtaggtttagaagtgtcccgagaaatctcccggctacagacccccttcagcgtgagctgctggcattaatccagttagagagagagttccagcggtgctgtcggcagggcaataatcacacctgcacctggaaggcttgggaggacactctggacaagtactgcgaccgtgagtatgccgtgaagacacaccaccatttatgctgtcgacatcccccgtcccccactagagacgagtgcttcgcccggcgggccccctacccaaattatgatcgcgacatcctgacaattgacattggccgagttacccctaacttgatggggcacctgtgcgggaatcagagagtcctgacaaagcacaagcacatccctggccttatccataacatgactgctcgctgttgtgacctcccatttcccgaacaagcgtgctgtgccgaggaagagaagttgacttttatcaatgacctctgtgggccacgccgtaatatatggcgcgacccagcgctgtgctgttacctgtctcccggagatgagcaggtcaactgttttaacatcaactacctgagaaacgtagcacttgtttcaggggacactgagaatgcaaagggccagggagaacaaggcagcactggaggcaccaacataagtagtacatctgaaccaaaagaagagtag

SEQ ID NO: 116474 - DNA, 2100 bp, synthetic construct
  misc_feature 1..2100: note = Description of Artificial Sequence: Synthetic coding sequence
  source 1..2100: mol_type = other DNA
atgaagatcgctgttctgttttgttttttccttctcatcatcttccagacggatttcggtaagaatgaagaaattcccagaaagcaacggagaaaaatctatcatcggcggctgagaaagtcctcaaccagtcacaagcatagaagcaaccggcagttaggcattcagcagactaccgtcttcacacccgtggcaagattgcccattgtcaattttgattatagtatggaagagaagtttgagtcattttcgtcctttcctggagtagaatcttcctacaatgtattaccaggaaagaaggggcactgcttggtcaaggggatcactatgtacaataaggccgtatggagccccgaaccgtgtaccacgtgtctatgttctgacggtcgggtactatgtgatgagaccatgtgccacccgcagaggtgcccccagacagtaattcccgaaggggagtgctgtcctgtgtgttccgcaaccgtttcttattccctcttgtccggtattgccctaaatgatcgtaacgagttctctggcgactccagcgaacaaagggaacccacaaatctgctgcataagcagctccctcctccacaggtggggatggaccggatagtcagaaaagaggccctgcaatcagaagaagacgaggaggtgaaggaggaagacacagagcagaaacgagaaaccccagagagtaggaatcaaggtcagctttattccgaaggagattcaagagggggcgatagaaaacaacgcccaggggaagaaaggcggctggcccatcagcaacaacgccaaggccgggaggaggaggaagacgaggaagaagaaggagaagagggcgaagaggatgaggaagatgaggaggatcctgtacggggcgacatgtttagaatgccctcacgcagccccttgcccgccccaccaaggggaaccctgcgactgccctctggctgctccttgagttaccgaactatttcctgcattaacgccatgctcactcagatccctcctctcactgctcctcagatcacaagccttgaactgacggggaactctatcgctagcatcccagacgaggcatttaacgggcttcctaatctggaaaggctggatctctccaagaataacatcaccagcagcgggatagggccaaaagccttcaaactgctgaaaaagctgatgaggttgaacatggacggaaacaacctgatccagatcccaagtcaactcccctccaccctggaagaactgaaggtaaacgagaataatttgcaggctatcgatgaagagagccttagcgacctgaaccagctcgtgaccctagaactcgagggcaataacctttccgaagccaacgtcaatcctctcgcattcaaacccctaaagagccttgcctacctgcgactaggtaaaaacaaatttcgaatcatccctcagggtttacccggtagtatagaggaactttacctagagaacaatcaaatcgaagagattactgaaatttgttttaaccacactcggaagatcaatgtgatcgtgctccgctacaacaagatcgaggagaatagaattgcccccctggcctggattaatcaggagaacctagagtccattgatttgagttacaataaactgtaccatgtccctagttatctcccaaagtccctccttcaccttgtgcttctgggcaaccaaatagagcggatcccaggatatgttttcggccacatggagcctggattggagtacctctacctatctttcaacaagctggccgacgacggaatggacagagtgagcttctatggggcctatcactcgcttcgcgagctctttctagaccataatgatctgaagtctattccgcccggaattcaggagatgaaggcccttcattttcttagactcaacaacaataagatccggaatattctaccggaagagatttgtaatgctgaagaagatgacgatagcaacttagagcacctgcacctggagaataattacatcaagatcagagaaatcccatcctacacttttagttgtatccgctcgtacagcagtatcgtactcaaacctcaaaatatcaagtag

SEQ ID NO: 116475 - DNA, 495 bp, synthetic construct
  misc_feature 1..495: note = Description of Artificial Sequence: Synthetic coding sequence
  source 1..495: mol_type = other DNA
atgaagattgcagtgctgttctgcttctttctcctcattatttttcagactgattttggaaagaacgaggagattcctcgcaagcagagaagaaaaatttatcatcgccgcctgcgaaagtcttccacctcccacaagcatcgcagcaacaggcagctcggcatccagcagaccactgtattcacccctgtggcacgtctgcccatagtgaacttcgactatagtatggaagagaagtttgagtctttctctagcttccctggtgttgaaagttcatataacgtgttgccaggaaaaaagggccactgcttggttaagggcatcacaatgtataataaagcggtctggagcccagagccatgtaccacctgtctctgtagcgacggacgagtcctgtgcgatgagacaatgtgccacccgcaaaggtgtccacagaccgtgattcctgagggcgaatgctgccctgtctgctccgccactggcacggagatttag

SEQ ID NO: 116476 - DNA, 483 bp, synthetic construct
  misc_feature 1..483: note = Description of Artificial Sequence: Synthetic coding sequence
  source 1..483: mol_type = other DNA
atgaaaatcgctgtgcttttctgcttcttcctccttattatcttccagactgatttcgggaaaaatgaggaaatacccagaaagcagaggagaaagatctaccatcgccgcctacggaaatcatccacctcccataagcacagaagcaaccgtcagctaggcattcagcaaacgacggtttttacgcccgttgccagactaccaatcgtcaacttcgactattcaatggaggaaaagtttgagtcctttagcagcttccctggagttgaaagttcctataatgtcttgccaggtaagaaaggtcattgcctggttaagggaatcactatgtacaacaaagcggtttggagccccgaaccatgcaccacctgtctgtgctctgacggcagagtgttgtgcgacgagaccatgtgtcatccacaacggtgcccccaaacagtgatccccgaaggtgagtgctgtcctgtgtgtagtgcaacatag

SEQ ID NO: 116477 - DNA, 1932 bp, synthetic construct
  misc_feature 1..1932: note = Description of Artificial Sequence: Synthetic coding sequence
  source 1..1932: mol_type = other DNA
atgaaaatagccgtgcttttttgtttcttcctgttgatcatttttcaaacagattttggaaagaatgaggagatcccgcgcaagcaacggaggaagatataccaccggcgtctgcggaaatcctcgacctcccacaaacaccgctctaatcgccagctgggcattcagcagaccactgtctttaccccggttgcacggctgcccatagtgaactttgactatagcatggaagagaaattcgaaagcttctcgagctttcccggcgtggagagttcctacaacgtactgccaggcaagaagggtcattgcctcgttaaagggatcaccatgtataacaaggccgtttggtctccagaaccttgcacaacatgtctttgtagcgatggaagagtactgtgcgacgaaaccatgtgccaccctcagaggtgccctcagacagtgatcccggagggagagtgttgcccagtttgctctgccaccgagcagcgcgaaccaaccaaccttctccataaacagctgccacctccacaagtgggcatggatcggatcgtgagaaaagaagccctgcagagcgaagaggacgaggaggttaaggaagaggataccgagcagaaaagggaaacaccagagagtcgtaaccaaggccagctatactcagaaggggacagtagaggcggagaccgtaaacagcggcctggagaggagagaaggctggcccaccagcagcagaggcagggccgtgaggaagaggaggacgaggaggaagaaggcgaagagggagaagaggacgaggaagacgaggaagacccggtgcgcggggacatgttccgtatgccgtctcgctccccgctgcccgcccctccaaggggtacgttgcgattaccaagcggctgctctctgtcttacagaaccatatcgtgcatcaatgcaatgctgacacaaatccccccccttacggctcctcaaattacatctttggagctgacgggtaatagcattgcctcaatccccgacgaggcttttaatggcctgccaaacctggaacggctcgacctttccaagaataatatcacctcctcaggaataggcccaaaggcctttaagctgcttaagaaactgatgaggcttaatatggatgggaataacctcattcagatcccttcccagctgccatccacactagaagagctcaaagtgaatgagaacaatctccaagccatcgacgaagaatccctgtctgatttaaaccagctggtgactctggagctcgaaggaaacaatctgagcgaagccaatgttaaccctctggctttcaagccattgaaatctttagcatatctccgccttggcaagaataagttcaggattatccctcagggccttccggggagtatcgaggagctgtatctggaaaacaaccagattgaggagattacagagatctgtttcaatcacaccaggaaaattaatgtgattgtccttagatacaataagatcgaagaaaacagaatcgccccattggcctggattaaccaggagaatctggaatctattgaccttagctacaacaagttgtatcacgtccctagctacctccccaagtctctccttcacctagtgttactcggcaatcagatcgaacgtatcccggggtacgtgttcggacacatggagcccggcctggaatatctttatcttagcttcaacaagcttgcggatgacgggatggaccgagtatccttttatggcgcatatcattctctgagagagctgttcctggaccacaatgacctgaaatcaattccccccgggatacaggagatgaaggcgctacacttcttacggctaaacaacaataagatacgttgcgtgagtgatgccgtacttgagaccgtgactaatagaagcgatgtggcctttcccctgtggtag

SEQ ID NO: 116478 - DNA, 1779 bp, synthetic construct
  misc_feature 1..1779: note = Description of Artificial Sequence: Synthetic coding sequence
  source 1..1779: mol_type = other DNA
atggagatgcaggacctgaccagtccccactccagactgtctggtagctccgagagcccatccggccctaagctcggcaattctcatattaactcaaactctatgaccccaaacggaaccgaggtgaaaacggagccaatgagctcctccgaaactgcaagcacaactgccgacggtagcctgaataacttctcgggaagtgcaatcggctcaagctcgttctctcccagacccacccaccaattctctcccccacagatctacccttcaaacaggccttacccgcatatattgccgacgccttctagccagactatggcagcctatggccagacgcagttcaccacaggaatgcaacaagccacagcatacgctacctacccacagcccggacagccctatgggatcagttcttatggtgcgctctgggctggaatcaagactgagggggggctatctcaaagccagtcaccaggacagaccgggtttctgtcatatggcacttccttcagcacccctcagcctggacaggctccctactcttatcagatgcagggctcttccttcacgacaagtagcggcatctacactggcaacaatagcctcactaactcatccggcttcaatagctctcaacaggactaccccagctacccttcattcggtcagggtcaatatgcccagtactacaactcttccccttatcccgctcattacatgacatcatcgaacacctcaccaaccacacctagtaccaacgccacgtaccaactccaggagccaccatccggcattacgagtcaagcggttacagaccctactgctgaatattccaccattcattcaccttcaacccctatcaaggatagcgatagtgatcggttacgtcgcggctccgatggcaaaagtagaggccgcggccgtcggaacaataatccttcccccccaccagattcagacctggaaagagtgtttatttgggatcttgacgaaaccataatagtgttccacagcttgttaaccggatcctacgccaaccgatatggtcgggatccacccacctctgtgagcctggggctgcgcatggaagaaatgatatttaatttagccgacacccatcttttttttaacgacctggaagagtgcgaccaggtgcacattgatgacgtgagctctgacgataacggtcaggacctcagcacatataactttggtaccgatggattccctgccgcagctacatctgccaatctctgtctggctactggagtgcggggtggcgtagattggatgaggaagctcgcttttcgatacagacgggtaaaagaaatttataacacttataaaaataatgtgggcggcctcctaggacccgcaaagcgggaggcgtggttacaactgagggcagaaattgaggccttgacagattcctggctaactctcgccttgaaggcactgtctctcatacacagtagaacaaattgcgtgaacattctcgtcaccaccacccagctgataccagccctggcaaaggtactgctttacggactgggcatcgtcttccctattgaaaacatttacagcgctactaaaatcgggaaagaatcgtgcttcgagcgaatcattcaacggtttggacgcaaggtggtctatgtggttattggagatggagttgaagaagaacaaggtgccaaaaagcacgccatgccgttctggcgcatttccagccacagcgatctgatggctctgcaccacgctttagagctcgagtacctctag

SEQ ID NO: 116479 - DNA, 1680 bp, synthetic construct
  misc_feature 1..1680: note = Description of Artificial Sequence: Synthetic coding sequence
  source 1..1680: mol_type = other DNA
atgctcctgtttccccaggtggccgttaagacagagcctatgtccagttccgagacagcaagtactacagccgacggtagtctaaacaatttctcaggtagcgccatcggatcatcaagcttttcgcctcggccaactcaccagtttagtcctccgcagatttaccccagcaacaggccatatccacacattctgcctaccccctcctctcagaccatggccgcatacggtcaaacccagttcacgacagggatgcaacaggcaactgcttacgccacttaccctcagcccggacagccatatgggatttccagctatggagctctctgggccggcattaaaacagaaggtggcctgagccagtcccagagccctggccagacagggttcttatcttacggaacttcattctctacccctcaacccggccaggccccttatagctaccagatgcaaggatcctcctttaccacttctagcggtatctatacaggcaataattctctgaccaactcctccggcttcaactcaagccagcaggattacccgtcttaccccagttttggtcagggtcagtatgcacagtattacaacagttccccctatcctgcccactacatgaccagctccaatacaagccctacaacccctagtactaacgccacataccagttgcaagagcccccatcaggcataacgagtcaagccgttaccgaccccaccgctgaatattctactatccattcaccatcaacgcccatcaaagactcagactccgatagactacgacgaggtagcgatggcaaatctaggggccgtgggagacgaaacaataacccttcaccacctccagattccgacctcgagagggtattcatttgggacctggacgagactatcatagtctttcactctttacttacaggcagctacgcaaatcggtatggaagggacccacctacatccgtctccctgggtctgcgaatggaggaaatgatatttaatctcgctgacacacacctcttcttcaacgatttggaagagtgcgatcaggtgcatatagatgacgtcagtagcgatgataacgggcaggatctgtcgacctacaattttggcacagatggcttcccagccgctgccacttcggcaaacctctgcctcgcgaccggggtccgggggggtgtagactggatgagaaagctggcatttcggtatcgaagggttaaagagatatacaacacgtataagaataacgtggggggtttactgggaccagctaagagggaagcctggctccagttgagggcagagatcgaggctttaaccgatagttggttgaccctcgcacttaaagccctgtcactaatccatagcagaactaactgtgtcaacattctggtcaccacaacccagttaatacctgcattggccaaggtgttattgtatgggctgggtatcgtgttccctatcgaaaatatttactcggccaccaagatcgggaaagaaagctgttttgagcgtatcatccaaaggttcggcagaaaagttgtctatgtagtgataggcgatggcgtcgaagaagagcagggggccaaaaaacatgctatgcctttctggcgcatttcttctcatagcgacctgatggctcttcaccacgccctcgagctggaatacctctag

SEQ ID NO: 116480 - DNA, 1779 bp, synthetic construct
  misc_feature 1..1779: note = Description of Artificial Sequence: Synthetic coding sequence
  source 1..1779: mol_type = other DNA
atggaaatgcaggatctaacctcacctcatagtcgcttatcgggttccagcgagtccccctccggaccaaaactggggaatagccacataaactctaattctatgacacctaacggaactgaagtgaagaccgaacccatgtcttccagcgaaaccgcctctacaaccgcggatggcagtctgaacaacttcagcggaagtgccattgggtccagctccttttcaccacgaccaacccatcagttttctccccctcagatctatccaagcaataggccgtatccacatattctgccaacccccagctcccagaccatggccgcctacggacaaactcagtttaccaccggcatgcagcaagccacagcatatgccacttacccacagccaggccagccctacgggataagcagttatggagccctctgggccggcattaaaactgagggaggactctcacagagtcagagtcctggccagacggggtttctgtcatatggcacctcttttagcacaccccagcctggccaagccccttactcataccagatgcaaggatcatcgttcaccacatcgtccggaatctacacaggaaataacagtctgaccaattccagcggtttcaattcatctcagcaagattaccctagttaccccagtttcggacagggccaatatgctcagtactataatagcagcccctatccagcccactatatgactagttccaatacaagtcccacaactccgtccaccaatgcaacataccagctgcaggagcccccctctgggattacctcacaggccgtgaccgaccccacagcagagtacagtaccattcacagcccctctacacccattaaggacagtgattcagaccggctccggagggggtctgacggcaagtcccgcggaagaggaagaagaaacaacaatccgtctccaccgccagacagcgacctcgaaagggtcttcatttgggatctggacgagactatcattgttttccatagtcttctcactggatcctacgcgaacagatacgggcgggatccacccacaagcgttagcctcggactccggatggaagagatgatctttaacctggccgacacacacctcttcttcaacgatctagaggagtgtgaccaggtccacattgacgatgtgagctccgacgacaacgggcaggatctgtccacctataacttcggcacggatggcttcccggcagctgcaacctctgctaacctgtgcctcgccacaggcgttcggggtggcgtggactggatgcggaaactggcctttaggtaccgccgggtgaaggaaatctataacacatacaaaaacaatgtgggcggcctgttgggtcccgccaaaagagaggcctggcttcagctgagagctgaaatagaggctctcactgatagctggctcactctggccctgaaggcactgtctctgatccatagccgcacaaattgtgtgaatatcctggtcaccaccacccaactcattccggcactcgcgaaggtgctgttgtatggcttgggcattgttttcccgatcgaaaatatctatagcgccacaaagataggaaaagaatcttgttttgaacggattatccagcgctttggaagaaaggtcgtgtacgtagtcataggcgatggagttgaagaggagcagggggccaagaagcacgccatgcccttttggcggataagcagtcattctgatctgatggcgttgcaccatgctttggaactggagtacctctag

SEQ ID NO: 116481 - DNA, 1683 bp, synthetic construct
  misc_feature 1..1683: note = Description of Artificial Sequence: Synthetic coding sequence
  source 1..1683: mol_type = other DNA
atgctgatgatctacgtgcagttagtggtgaagaccgaacctatgtcttcttcagagacagccagcaccacagccgatgggtctcttaataacttctctggctccgcaatcggaagctcatcattcagcccccggcctactcaccaattttcacctccccagatatacccttccaaccgcccatatccccacatcctgccgaccccgtctagccagacgatggcagcctacggccagacccagttcaccaccggtatgcagcaagctacagcctatgcaacatatcctcagccaggccagccgtatgggattagtagctatggcgccctgtgggcagggatcaagaccgagggaggactctcccagtctcaaagccccgggcagacaggcttcttgagctatgggacctccttcagcaccccacagcccggccaggccccttactcataccaaatgcaaggatcctccttcactacttccagtgggatctatacagggaacaactctctcactaatagttctgggtttaattcatcccagcaggattatccaagttatccaagcttcggccaggggcaatatgcgcagtactacaacagttctccttatcctgcccattacatgacctccagcaatacatcacctactacaccatccactaatgcaacttatcagttgcaggaacctccctccgggattacaagccaagcggtgacagaccctactgccgagtattctacaatccatagtccatcaacccctataaaggattccgactcagatagactgcggcgggggagcgatggcaaatccaggggcagaggccgcaggaataacaatccttctccccccccagactctgaccttgagcgcgtgttcatttgggacctggatgagaccattatcgtctttcacagtctgctgacgggctcatacgctaaccgctatggtcgggacccgccaacctctgtctcgctcggtctgagaatggaagagatgatatttaatttggccgacactcacctcttcttcaatgaccttgaggagtgtgaccaggtccacattgacgacgtgagttcggatgacaatggacaagacctcagcacatataatttcggcacagatggattccccgctgccgccacatccgctaatctgtgtctggcgaccggagttcggggcggcgttgactggatgagaaaactggccttcaggtacaggagagtgaaggagatttataacacttacaagaacaatgttggtggactgctgggtcccgcaaaacgcgaagcctggctgcagctgagggccgagattgaggcgctgactgatagttggttgacccttgctctgaaggctctgtccttaattcattcacggacaaattgtgtcaacatcctggtgacgacgacccaactcatccccgccttggccaaggtgttattgtatgggctcggcatcgtgttccccatcgaaaacatctactctgccactaaaatcgggaaagagagttgcttcgagcgtatcatccagaggtttgggcggaaggtcgtgtacgtggtcataggagacggtgtcgaagaagagcaaggcgccaagaaacatgccatgccattctggcggatatcatctcattccgacctaatggcactgcatcatgcccttgaactggaatatctctag

SEQ ID NO: 116482 - DNA, 1674 bp, synthetic construct
  misc_feature 1..1674: note = Description of Artificial Sequence: Synthetic coding sequence
  source 1..1674: mol_type = other DNA
atggagatgcaagacctgacaagcccacatagccggctgtcaggcagcagtgagtccccgtctgggcccaaacttggaaattctcatattaattctaattctatgacaccaaacggaaccgaggtaaagacagaacccatgtcctcctccgagacagcaagtactaccgccgatggctctttgaataacttctctggctctgcaataggaagctcatcattctcaccaaggcctacacaccagttctctcccccacagatttacccgtccaaccggccttacccacatatcctccccaccccatcatcgcagacaatggcagcctatggtcagacccagtttaccaccggtatgcagcaggccacagcttacgcaacgtaccctcagcctggacagccatacggtatcagctcttacggcatcaagacagagggggggctttcccagtcacagtcaccaggccaaaccggattcttatcgtacgggaccagtttctccacaccacaacccggacaggccccctattcttatcaaatgcaaggcagcagtttcaccactagctccggcatatatactgggaataactctttgacgaatagttccgggttcaacagttctcagcaagattatccctcttatccttctttcggacaggggcagtatgctcagtattataactccagtccctaccccgcccactatatgaccagttctaatacatcacctaccacgccctcgactaatgcaacctaccagttacaggaacccccttccggcatcactagtcaggcagtgaccgacccaactgccgaatattcgacgattcactccccctctactccaataaaggactcagattccgataggctgagacgtggttccgacggaaagagcagaggacgcggcagaagaaacaataatccctcgcccccgcccgactccgatttggagcgggttttcatctgggaccttgacgagactatcatcgtctttcactcgttactcaccggcagctatgcgaacagatatgggagggaatgtgaccaagtgcatattgacgacgtgtcatctgacgacaatggccaggacctgtcgacatataattttgggactgatggcttccctgctgcggctacgtccgccaacctgtgcttagcaacaggcgttcgggggggggtggactggatgcggaagctggcttttcggtataggcgcgtgaaggagatctacaacacatataaaaacaacgttgggggtttacttggccctgccaagcgcgaggcctggctgcagctgcgcgccgaaatcgaagcattgacagactcctggctgacactggcccttaaggcgctcagtctgatccactcaagaacgaattgtgttaatatactcgtcaccaccacacagctgatacctgctctggcaaaagttttgttatacggactcgggatagtttttcctatagagaacatttattctgccacaaagattgggaaagaatcatgttttgaacgaatcatccagcgttttggtcggaaggtggtgtacgtagtcattggagacggggttgaggaagagcagggggccaaaaagcatgccatgcccttttggagaattagctcccacagtgacttgatggctctccaccacgctctcgagctagagtacctatag

SEQ ID NO: 116483 - DNA, 1527 bp, synthetic construct
  misc_feature 1..1527: note = Description of Artificial Sequence: Synthetic coding sequence
  source 1..1527: mol_type = other DNA
atggtcgaactggtaatctccccctcactgaccgtgaactccgattgcctggacaagctgaaattcaatcgcgccgatgcggccgtgtggactctctccgatagacaggggattactaagtctgctccattgagggtgagtcagctgtttagccgatcctgtcccagggtcctcccccgccagccctccaccgcaatggcagcatacgggcagacccagtacagtgccgggattcagcaggccaccccctataccgcttacccacctccggcacaagcctacggtatcccctcgtatagtataaaaaccgaggatagtctgaaccattccccaggtcaaagcggctttctttcctacggctcgagcttctccacatcacctacaggccaatcgccctatacctatcagatgcacggtaccacaggcttttatcagggtggcaacggtctcggaaacgctgctggattcggatccgttcatcaagactacccaagctatcccgggtttcctcagagccagtacccacaatactatggctcttcttataatcccccatatgtccctgcatcttccatctgcccctcccccctgtccacaagcacttatgttttgcaggaggccagtcataacgtgccaaaccagtcttctgagtccctcgctggcgaatacaacacccacaacgggccgagtactcccgcaaaagaaggtgacacagaccggcctcaccgggcctctgacgggaaactgaggggccgctccaagcggtctagcgaccctagccccgccggcgacaatgaaattgaacgcgtcttcgtctgggaccttgacgaaactatcatcatctttcactctctgctgacggggacttttgcctcccgttatggtaaagactgcgaccaaattcatgtggacgacgtgagcagcgatgataatggccaggatttgtctacttataatttcagtgctgatggattccacagttctgcgccaggagcgaatctttgtctggggagcggtgtgcatggaggcgttgactggatgagaaagctcgcattcaggtatcgccgggtcaaggagatgtacaacacctataagaacaatgtgggcggtctgattggaactcctaagcgcgagacctggttacagctccgtgcggagctggaagcactcaccgacctatggcttacccactccctgaaagctctgaatctgatcaattctcgtccaaattgtgtaaacgtcttagttactacaactcagctgatacctgctctcgctaaagtcctgctttacgggctcggttcagtattccctatagaaaatatatatagcgcgaccaaaacagggaaggagagttgtttcgagcggattatgcagcgcttcggaaggaaggccgtgtatgtcgtgatcggtgatggagtggaagaggaacaaggggccaagaagcataacatgcccttctggcggatatcttgccatgcagacctcgaagccctgcgacatgccctggagctggaatatctttag

SEQ ID NO: 116484 - DNA, 1617 bp, synthetic construct
  misc_feature 1..1617: note = Description of Artificial Sequence: Synthetic coding sequence
  source 1..1617: mol_type = other DNA
atggtggagctggtgatctcacccagccttaccgtgaactcggactgtttggataaactgaaattcaaccgtgcagatgctgccgtgtggacactgtcagatcgacagggcatcacaaagagcgccccattgcgagtctcccaattgttctcccgaagttgccctagagttttaccgcgccaaccatccacagctatggcagcttacggccagacccagtactccgcgggcatccaacaggcgactccctacactgcttatccaccacctgctcaggcatatgggatccctagttacagcattaagaccgaagatagcctgaaccacagccctggccagtcagggttcctgagttatggaagttctttttccacaagcccaactggacagtccccatacacataccagatgcacggtactacaggattctatcagggtggtaacgggctaggcaatgctgctggtttcggatccgttcaccaggactacccttcttatcctgggtttcctcagagccagtatccacagtactacgggtcatcctacaacccaccctacgtgcccgcttctagtatttgtccaagcccactgagtacgagcacgtatgtcctgcaggaagcttcccacaacgttccgaatcagtctagtgagtcacttgcgggggagtacaatacacacaatggacctagcacaccggcgaaggagggggacacggataggccacaccgtgcgtccgatggcaagctacgggggcggtccaagagatcttcagatccatctcccgccggtgataatgaaattgagagggtcttcgtttgggacctggacgagactattatcatttttcacagcctgctgactgggactttcgcatcaaggtatggcaaagacacgacaacaagtgttcggattggtctaatgatggaggagatgatatttaacctcgccgacactcacctgttctttaacgacctcgaggattgtgaccagatccatgtagatgatgtaagctccgacgataacggacaggatctgagcacttacaatttttctgcagatgggttccatagtagcgctccgggggctaatctttgcttggggagcggcgtgcatgggggtgttgattggatgcgtaagttggcattccgctatcgacgcgtaaaagaaatgtacaatacctacaaaaacaatgtggggggtctgattggcaccccaaagagagagacttggctccaactgagagcggagttggaggctctcacagacctgtggctgacacatagtctcaaggctctcaacctgatcaactctcggcccaattgcgtcaacgtccttgtcacaacgacccagttaattcctgctcttgccaaggtactgctatacggactcggtagcgtttttcctattgagaacatatattcagcaaccaagacaggaaaggagagctgtttcgaaaggataatgcagaggtttggtcgaaaggctgtgtacgttgtgattggagacggggttgaagaagaacagggcgccaagaagcacaacatgcccttctggagaatatcctgccacgctgacctcgaagctctcaggcacgccctagagttagaatacctctag

SEQ ID NO: 116485 - DNA, 1380 bp, synthetic construct
  misc_feature 1..1380: note = Description of Artificial Sequence: Synthetic coding sequence
  source 1..1380: mol_type = other DNA
atggtcgagctcgtgatatcccctagtctgaccgtgaactcggactgtctggataaattgaagttcaacagagcagacgcggccgtctggacactatcagacaggcagggtatcactaagagcgccccactgagggtttcacagttgttctctagatcctgtcctcgcgtgctcccgaggcagccttctaccgccatggccgcatacggacagacacaatacagtgccggcatccagcaagcaacaccctacactgcctacccacccccagcgcaggcctacggaatcccctcttattccattaaaacagaggactccctgaaccactcaccagggcagagtggcttcctgagctacgggagctcattttctacttctccgacaggtcagagtccctatacctatcagatgcatggaactacaggattttaccagggagggaatggcctgggtaatgccgcagggttcggttcagtccatcaggactaccctagttatccaggctttccacagagtcaatatccccagtactacggctcctcctataaccctccttacgtgcccgctagttcaatttgtccctctcctttgtcaacatcaacttatgtactacaagaggcaagccataacgtgcccaaccagagttctgaatcgcttgccggggaatacaacacacacaacgggccctctactcccgcaaaggaaggcgataccgaccggccccatcgcgcttccgatggaaaactccggggcaggagcaaacgttcaagcgatccatcacctgctggagataatgaaattgaacgggtgttcgtgtgggacttggatgaaacaataatcatctttcattcgttactgaccggaactttcgcaagcaggtatggaaaggacacaactacaagcgtacgcatcggcctcatgatggaggaaatgattttcaacttggccgatacacacttgttcttcaatgacttggaagattgtgatcaaatccacgtagatgacgtgagctcagatgataacggccaggatctctctacttataacttctcagccgacgggttccatagcagtgctcccggcgctaacttgtgcttgggctctggcgtccacggtggagtcgattggatgcgaaagctggcctttagatatcgtagggtcaaagagatgtacaatacctataaaaacaacgtggggggcaaagagagctgcttcgagaggattatgcagcggtttggaagaaaggcagtttatgtggtgatcggcgacggggtcgaggaggaacagggggctaaaaaacataatatgcctttctggaggatcagctgccatgccgatctggaggccctcaggcatgcactagaattggaatacctgtag

SEQ ID NO: 116486 - DNA, 1527 bp, synthetic construct
  misc_feature 1..1527: note = Description of Artificial Sequence: Synthetic coding sequence
  source 1..1527: mol_type = other DNA
atggtggaactggtcatcagcccctccctcacagtgaactccgactgcttagacaagttgaaatttaatagggctgatgccgccgtatggacactctccgacaggcaaggaataaccaagtccgccccgctaagagttagccagctgttcagtcgcagttgccctcgagtactgccaaggcagccgagcacagcgatggctgcctacgggcagactcagtactctgctggaatacagcaggcaacaccatacacagcatatccaccccccgcgcaagcctacgggattccctcctattccattaaaacggaagactcactcaatcactcgcccggccagtccggatttctctcatacgggtcatccttcagtactagccctacaggccagagtccatacacctatcagatgcatggcaccacaggattttatcaaggagggaacggcctggggaatgctgccggattcgggagtgttcatcaagattatccatcttaccccggcttcccccagtcacagtatccacagtactacgggagcagttataatcctccatacgtgcctgccagttctatctgtccttcccccctctccacctctacttatgtgctgcaggaggcttcccacaatgttcctaatcagtccagcgagtctctggctggagagtacaacacccataatggaccgtccacacccgccaaagagggagatacagatcgcccgcatagggcctcagacggaaagctgcggggccgcagtaaaaggtcttctgatcccagcccagctggggataatgagatcgagagagtttttgtgtgggatctggatgagacgattataatctttcacagcttgttgaccggcacgttcgcttcgcggtatgggaaagactgtgaccagatccatgttgatgacgttagtagtgatgacaacggccaagatcttagtacttataactttagcgccgacggtttccatagttcggcacccggagccaatctgtgcctggggtctggagtgcacgggggagtcgactggatgagaaagctcgcgtttcggtaccgccgcgtcaaggagatgtacaacacatacaaaaacaacgtgggcggactgataggaacacctaagcgggaaacttggttacagctccgcgccgaattggaagcgctcaccgatctgtggctgacacattccctcaaggccctaaacctgatcaattctcgtcagaattgtgtcaacgtactggttactactactcaactcatccctgccctcgccaaggttctgctgtatggccttgggtcggtgtttccgattgagaacatttactccgccactaagacaggcaaggagagctgcttcgaaaggatcatgcaacgatttggtagaaaagcagtttacgtcgtgattggcgacggtgttgaggaagagcagggagctaaaaagcataatatgcccttttggcggatctcgtgccatgcagacttggaagctctgcgtcacgcactggagttggagtatctgtag

SEQ ID NO: 116487 - DNA, 1611 bp, synthetic construct
  misc_feature 1..1611: note = Description of Artificial Sequence: Synthetic coding sequence
  source 1..1611: mol_type = other DNA
atggaggaagagcaagatctgccggagcaacctgtgaagaaggccaagatgcaggaatccggagagcagacaatttcccaggtttccaacccagatgtctctgatcagaagcctgaaacaagcagtctggcctcaaaccttcccatgtctgaagaaatcatgacatgcaccgattatatcccaagaagtagcaacgattacacctctcagatgtactctgcgaaaccatacgcccacatcctgtccgttcctgtgtccgagacagcctatccaggacagactcaatatcagactcttcagcagacacagccctacgctgtttaccctcaggctactcaaacctacgggctgcccccctttgcaagttctactaatgctagcctcatatcaacatctagcaccatagccaatattccagccgccgccgttgcaagtatcagcaaccaggactatcccacatatactatcctagggcagaatcaatatcaggcctgttatccaagctccagcttcggcgtgaccggccaaactaactcggacgcggaaagtacaacactggctgcaaccacatatcagtccgagaagcccagtgtcatggcccctgcacccgccgcgcagcgcctgtcaagcggtgatcccagtacctcccccagcctcagccagacaactccgagcaaggatacagatgaccagtcacgaaaaaacatgacaagtaagaatagagggaaaaggaaggcagacgccacctcctctcaggacagcgagctggagcgcgtgtttctgtgggacctagacgagacgatcattatattccattccctcctgactggatcttacgcacagaaatatgggaaagaccctactgttgtgataggctctgggcttaccatggaagagatgatcttcgaggtggcagacacacacctcttcttcaacgatctcgaggagtgcgatcaggtccacgtggaagacgtcgctagcgatgataatggacaggacctcagcaactatagcttctctactgacggtttttccggctccgggggaagcggtagtcacggatcctcggtcggagttcaggggggtgtggattggatgcggaaactagccttccgctatcgtaaggttagggagatctacgacaaacacaaatccaacgtcgggggattgctgagtccccagcgcaaggaagctctgcagcgtttgagggcagaaatcgaggtccttacggacagttggctaggaaccgccttgaaaagtctactcctcatccagtctagaaagaattgtgtcaacgtactcatcaccactactcagctggtcccagccctcgctaaggtactgctgtacgggttgggagaaatttttcccatcgaaaacatctactccgcgactaagataggcaaggagagttgtttcgagcgcatcgtttcacggttcggcaagaaagtgacctatgtggtgatcggggacggacgcgacgaagagattgccgcgaagcagcagctgtatttcctggacatggaggcactgggctgccagcttgagcctactgctctgattctgtttatccagctgtctggaaatctgtccaactacaataagctttag

SEQ ID NO: 116488 - DNA, 1251 bp, synthetic construct
  misc_feature 1..1251: note = Description of Artificial Sequence: Synthetic coding sequence
  source 1..1251: mol_type = other DNA
atgataattcctcataagtgtatactccagactagttccaccaatgcctccctcatctctactagtagcaccatcgcaaatatcccagccgccgccgtggccagcatttcgaatcaggattaccccacttacaccatccttggacagaatcaatatcaggcctgttacccttcctcttccttcggcgtgaccggtcagactaatagcgacgctgagagtaccacgctggcggctaccacataccaaagtgaaaagccttcagtcatggcaccagctcccgcagcacaacgtctgagctctgacccatcgacaagtccaagtctgtcacagaccaccccatccaaagatacagatgatcagagccggaaaaacatgacttcaaagaatagaggcaagagaaaagccgacgccacatcttctcaggatagcgagctcgagcgagtgtttttgtgggacctagacgagacaattattatttttcactcactgctgaccggcagctacgctcaaaagtatgggaaagaccccaccgtggtaattggttctggtcttacaatggaggagatgatcttcgaagtcgctgacacgcacctcttcttcaacgatctagaagaatgtgaccaagtccacgtggaggatgtcgcaagtgacgacaatggccaggatttatcgaattatagctttagtactgacggattctctgggtctgggggatcaggatcacacggcagctctgtcggagttcaggggggagtggattggatgaggaagctcgccttccgctacaggaaggtgcgggaaatctacgacaagcataagagcaacgtgggcggcttgttgtcaccacagcggaaggaagcactccagcgcttaagagcagagattgaggttctcactgatagctggctgggcacagctctgaagtccttgctgctcattcagtctcggaaaaactgcgtaaatgttttgatcactaccactcagcttgtaccagccttagcaaaggtcctgctctatggactgggcgaaatttttccaattgagaacatatactccgccactaagattggaaaagaatcctgcttcgagcggatagtttcacggttcgggaagaaagtgacatatgtagtgatcggtgacggacgtgatgaggagatcgctgctaaacaacacaatatgcctttttggaggattaccaatcatggcgaccttgtatcattgcaccaggccctagagttggacttcctttag

SEQ ID NO: 116489 - DNA, 1722 bp, synthetic construct
  misc_feature 1..1722: note = Description of Artificial Sequence: Synthetic coding sequence
  source 1..1722: mol_type = other DNA
atggaagaggagcaggaccttccagaacagcccgtcaagaaagccaagatgcaggaaagcggagagcagaccatttcccaggttagcaaccccgacgtgtctgatcaaaagcccgagacatcctccctggcttcaaatcttccaatgtctgaggaaattatgacttgcactgattatatacctcggtcgagcaacgattatacctctcagatgtacagcgctaagccttatgcccatattctgagcgtccccgtttccgagaccgcataccccggacagacccagtatcagacacttcagcaaacacaaccttacgcagtgtaccctcaggcaacccagacttacggtctgcctcccttcggagcgctctggcccggcatgaaaccagaaagtggcctaattcagacaccttctccgtctcagcactcagtgctgacctgcacaaccggtctgactacctcccaaccatcacccgctcactattcttacccaatccaggccagttcaaccaatgcatctttaatcagcacatccagtaccatcgccaacatcccagctgctgccgttgcatctatctccaatcaggattatccaacatataccatcctgggacagaaccagtatcaggcctgttacccctccagcagctttggggtgacagggcagactaattctgacgccgagtctaccaccctggccgccacaacctatcagagcgagaagccatccgtgatggcccctgctcctgctgcgcagaggctcagctcaggagacccatccacatctccttctctgagccagaccacaccatcaaaagatactgacgaccaatctaggaagaatatgaccagcaaaaatcgggggaagcgcaaagcagatgcaaccagctcccaggattcagagctggagcgagtcttcctttgggacctggacgagaccataatcatttttcactcattacttacgggctcttacgctcaaaagtacggcaaggaccctaccgtggtaattggttccgggctcaccatggaggagatgatttttgaggtggctgatacccacctcttttttaacgacctggaagagtgcgatcaggtccacgtggaggatgtcgctagcgacgacaatggccaggatctctcaaattatagcttctccaccgatgggttctccgggagtgggggcagcggcagtcatggttcttctgtcggtgtacaaggcggcgttgattggatgcgcaaactcgcatttcggtatcgtaaagtgcgagagatttatgataaacacaagtccaacgttgggggtcttctcagcccacagaggaaggaagccctgcagaggttacgggcagaaattgaggtgcttacagactcttggttggggacagcactgaagtccctgttacttatccagtctcgcaaaaattgcgtcaatgtgctcattacaactacacagctggtgcctgccttggcaaaagttctcctttacggtctcggggagattttccccatcgagaacatctactcagcgacgaaaatcggtaaggagagctgctttgagaggattgtgagccgctttggtaaaaaggtcacctacgttgtcatcggtgatggaagggacgaagagatcgccgcaaagcagcataacatgcccttctggcgaattacgaatcatggtgatctcgtcagtctgcaccaagctctggagcttgacttcctgtag

SEQ ID NO: 116490 - DNA, 1344 bp, synthetic construct
  misc_feature 1..1344: note = Description of Artificial Sequence: Synthetic coding sequence
  source 1..1344: mol_type = other DNA
atgaagccagagtccggattgatccagaccccatctccttctcaacactccgtgctgacctgcactactgggctgaccacgtcgcaacctagcccagcccattactcttacccaatccaagccagctccacgaacgcaagcctgatctccacctccagcacaatagctaacatccctgcggcagccgtcgcatcaattagcaatcaagactatcccacatacaccatcctcgggcagaatcaataccaagcctgctacccttcatcttcatttggggtcaccggccaaacaaactccgacgcggagagtactactctggcagcgaccacctaccagagcgaaaagccctctgtaatggcaccagcaccagccgcacaacgtctgtcgtctggagatccctccactagccctagcctttctcaaacgaccccctcaaaggataccgacgaccagtctaggaagaatatgaccagcaaaaacagaggaaaaaggaaggccgatgcgaccagtagccaggacagtgaattggagagggtgttcctgtgggacctcgatgaaacaattatcatcttccatagccttttaacaggctcctatgcccaaaaatacggcaaggatcccacggtcgtgatagggagcggactgaccatggaagagatgatctttgaagtggccgatacccacttgttttttaacgatttagaagaatgcgaccaagtacacgtggaggatgtggcctcagacgataacggacaagacttgtcaaactattcatttagtacggatggcttctctggcagtgggggctctggctcacatggctcaagcgtgggtgttcaaggaggcgttgattggatgagaaagctcgcctttcgctaccggaaggtcagagagatatatgataagcataaaagcaacgtgggcggtttactgtccccccagcggaaggaggcgctgcaacgccttcgagccgagatcgaggtgctcaccgattcgtggctgggtaccgctttaaagtccctgctactcatccaaagcagaaaaaattgcgttaatgtgctgattactaccactcaacttgtacctgctctagctaaagtgctgctttacggcctcggtgagatattcccaattgaaaatatttacagcgcaactaagattggcaaggagagttgctttgaaaggatagtcagccgcttcgggaagaaggtaacatatgtggtcattggcgacggcagggacgaagagatagcagcgaaacagcataacatgcccttttggaggatcaccaatcatggcgatctcgtttcactgcaccaggctttggaattagacttcctgtag

SEQ ID NO: 116491 - DNA, 1584 bp, synthetic construct
  misc_feature 1..1584: note = Description of Artificial Sequence: Synthetic coding sequence
  source 1..1584: mol_type = other DNA
atggaagaagaacaggatctgcctgagcaacccgtaaagaaagcaaagatgcaggagagtggtgagcaaaccatttcccaggttagcaaccccgatgtcagcgaccaaaaacctgaaacttcctcgctggcgtcaaacttacccatgtccgaagaaattatgacttgcaccgattatattccccgaagtagcaacgattacacatctcagatgtatagtgccaagccctacgcgcatatattatccgttcctgtcagcgagactgcctacccaggacagacacaataccaaacgctgcagcaaacccagccatatgcggtctatccacaggccacccaaacctacggcctgcctccctttgcttccagcacaaacgctagtttgatatctacttcctctacgatcgcgaatatcccagcagcagctgtggcttcgatcagcaaccaagactatcctacctatacaatcctgggccagaaccaatatcaggcttgttatccctccagttctttcggcgtgactggacagacaaattcagacgccgaatccaccaccttggctgccacaacgtaccagtccgagaagccatccgtcatggctccggcgcccgccgcccaacggctctcgagtggtgacccgtccacttctccttccctttcacagacgactccaagcaaggacacggacgatcagagccgcaagaacatgacatcaaaaaatcgaggaaagcggaaagcagacgccacctcatcccaagattcagaactggagagggtattcctatgggatttggacgaaacaataataatattccattctctcctcacagggagctacgctcagaaatatggaaaagatccaactgtcgtgatcggctcagggctgacaatggaggagatgatctttgaagtggccgatactcacttatttttcaatgacctggaggagtgcgaccaggtgcacgtggaggatgttgcatcagatgacaatggccaggatcttagtaactactccttcagcaccgacggcttctccgggtcaggtgggagcggatcacacggctcctcagtaggagtacaagggggtgtcgattggatgaggaagctggcttttaggtaccgcaaggtgagagagatctatgacaagcacaagtcaaatgtgggaggcctgttaagtccccagaggaaggaggctctgcagaggctgagagcggagattgaagttctgaccgatagttggttagggaccgctttgaaaagcctgctgttgatccagagccgcaaaaactgcgtcaacgtgctaatcaccacgacccagcttgtgcctgcactcgccaaagtcctgctatatgggctgggtgagattttccctatcgagaacatttattccgccaccaaaatagggaaggagagctgtttcgagagaatcgtgtcccgattcggcaagaaggtgacgtatgtggtcataggtgacggacgcgatgaagagatagcagctaaacagcataacatgccattttggcgtattaccaaccacggggacctggtctcgctgcaccaggctttagagctagactttctctag

SEQ ID NO: 116492 - DNA, 1563 bp, synthetic construct
  misc_feature 1..1563: note = Description of Artificial Sequence: Synthetic coding sequence
  source 1..1563: mol_type = other DNA
atgacatgcactgattatatcccccggagcagtaacgattacacatcacaaatgtatagtgccaagccgtacgctcacatcctcagcgtccctgtctccgaaacagcctatccaggacaaacccagtatcagacccttcagcaaacacagccttacgcggtttatccccaggcaactcagacatacggactgccccccttcggcgccttgtggcccggaatgaagccggagagtgggcttattcagactcctagtccctctcagcactctgtactgacgtgcactaccggcctaacaacatcccaaccgagccctgctcattactcctatccaatccaggcctccagtactaacgccagcctgatatctaccagctctacaattgcaaatattccggctgctgcggtggcaagtatatcgaaccaagactatcccacctatactattctgggtcaaaatcagtaccaggcttgttacccatccagctcctttggagtgacaggtcagaccaactcagatgctgagtcaacaaccttggcggctacgacttatcagtcagagaagcccagcgtaatggctcccgcacccgctgcacagcgtctctctagtggggaccccagtactagtccctccctatcccagacaacacctagtaaggacactgacgaccagtcccgaaaaaatatgacaagcaagaataggggtaaacggaaggcggacgctacatcaagtcaagacagcgaattagagagagtgttcctctgggatctggatgagacaatcattatcttccatagtttgctcaccggatcctacgcccagaagtacgggaaagatcccactgtcgtgattgggagtggcctgaccatggaggaaatgattttcgaggtggcagacacgcatctgttctttaatgatctggaggagtgtgatcaggtacacgtcgaggacgtggcaagcgatgataacgggcaggacctgtctaattattcattctcaactgacggttttagtgggagcggaggctcggggtcccacggctctagtgtgggggtccagggcggcgtggattggatgcggaaactcgccttccgctatcgcaaggtgagggaaatatacgataagcataagtccaacgttggcggccttctctcccctcagcgcaaagaagctctgcaaagactgcgagccgagatcgaagtgttgaccgactcttggctgggtacggcccttaagagtttgcttttgatccaatcccgaaaaaattgtgtgaatgtcctgatcacaacaacacagctcgtgcctgccctggccaaggtgcttctctacggattaggagagattttcccgattgagaatatctactcagctactaaaataggaaaagaaagttgctttgagcgaattgtctccaggtttgggaaaaaggtcacttacgtggtgataggcgacggaagggacgaggaaatcgccgccaagcaacacaatatgccattttggcggatcacaaaccatggagacctggtgtcattgcatcaggccctggagctggactttctttag

SEQ ID NO: 116493 - DNA, 1920 bp, synthetic construct
  misc_feature 1..1920: note = Description of Artificial Sequence: Synthetic coding sequence
  source 1..1920: mol_type = other DNA
atggaagattcccaggacctcaacgaacagagcgtcaagaagacttgtactgaatctgatgtgtcacagagccagaatagcaggtctatggaaatgcaggatcttgcctcaccacatacgctggttggagggggcgatacccccggttcctcaaaactggaaaaaagtaacctgtcttcgacctccgtaaccactaatggaaccggtggggagaacatgactgttctgaacactgctgactggctcctaagctgtaatactccatcttccgccaccatgtccttactggctgtaaagaccgaacccctgaatagctccgaaacaaccgcaaccactggcgacggcgccctggatacctttaccggcagcgtcattaccagcagcgggtactccccacggagcgcccaccagtactcaccccagctgtacccttccaagccgtaccctcatatcctcagcacaccagcagcccaaactatgtcggcctacgccggtcagacccagtacagcggaatgcaacagcccgcggtgtacactgcttacagccaaaccggtcaaccttactccctccctacctacgacttgggggtaatgctccccgctataaagacagagtctggcctgtcgcagacacagagtcccctccagtcaggctgcctgagctattccccaggtttttctaccccacagccaggacaaaccccttactcttatcaaatgcctggatcctccttcgcccccagttccactatttacgccaataactccgtcagtaactctactaacttctctgggtcccagcaggattacccaagctacactgccttcggccagaaccagtatgcacagtattattccgcctccacatatggcgcctatatgacttcaaacaacactgccgatggaaccccatctagcacctcgacatatcagctgcaggaatcgctgccaggtctcactaaccagcctggagaatttgataccatgcagagtcccagcacacccattaaggatctcgacgagcgtacttgcaggtcatccggatctaagagcaggggcagagggaggaaaaacaatccaagtcctccccccgacagtgacctcgagagagtattcgtgtgggatctcgacgaaacaataatagtcttccacagcctcctgactgggagctacgctcagaaatatggtaaagatccccctatggcagtaacattaggactcagaatggaggagatgatatttaatctggcagatacccacttgttttttaatgacttagaggagtgtgaccaggtacatatcgacgacgtatcttccgatgacaatggccaggacctgagtacgtactccttcgctacagacggatttcacgcagcagcgtcttcagccaatctatgtctgcccaccggggttagggggggagttgattggatgagaaagcttgccttccggtaccgtcgggtgaaggaactgtataacacttacaaaaataatgtgggggggctcctcgggcctgccaaaagagacgcctggttgcagctccgggcagaaatcgagggtttgacagactcatggttgactaatgccctgaagagcttatctatcatatccacacgcagcaactgcattaatgtgctggtcactacaactcagctgatacccgctctggcgaaggtcctgctctacagcctcggcggggcatttcccattgagaatatttacagcgccacaaaaattggcaaagagtcctgttttgagagaatcgtgagccgctttggtaccaatatcacatatgtcgtcattggagacggtagagacgaggagcatgccgcaaatcagcataacatgcccttttggcgcatctccagccatagcgacctgctagccctgcatcaagcattagagctggagtacttatag

SEQ ID NO: 116494 - DNA, 1851 bp, synthetic construct
  misc_feature 1..1851: note = Description of Artificial Sequence: Synthetic coding sequence
  source 1..1851: mol_type = other DNA
atggaagacagtcaggatctcaacgagcagagtgtcaagaaaacatgtactgaaagtgacgtatcacaatctcagaactctaggtctatggagatgcaagatctggcaagtccgcacactttggtgggtggcggcgacacaccagggagctctaagctggagaaatccaacctctctagtacaagcgtgactaccaatggaaccggcgtgtcgctcctggctgtgaaaacagagcctctgaactcttcagaaactaccgctacaactggcgatggcgcgcttgacaccttcactgggtcagtgataacctcctcagggtacagtcctcgttctgcccatcagtactcacctcaattataccctagcaaaccatacccccacatcctaagcacacccgccgcccagactatgagcgcttatgcaggtcagactcagtactcaggaatgcagcagcctgccgtgtatactgcttactcccaaactggacaaccctattcactgcctacatatgacttgggtgtgatgcttcctgctatcaagaccgaaagtggactgtcacagacacaatcaccactccagtctggctgcttatcttatagtcctgggtttagcacaccccagccaggacagacaccttatagctaccagatgcctgggagtagtttcgccccttcttcaactatctacgcaaataactctgtgtccaattctacaaatttttccgggtcacagcaagactatccttcttacacagcctttggccagaaccagtacgcacagtactactccgcatctacatacggggcgtatatgacatcaaacaacaccgctgatggcactccgagctctacctctacctaccagctgcaggaaagtctgccgggcctgacaaatcaacctggggagttcgacacgatgcagtcaccaagcactccaattaaagacctggatgagcgcacttgccggtccagcggtagcaagtctcgaggaagagggcggaagaataatcccagcccacccccagatagcgatctggagcgagtgttcgtttgggacctggacgaaaccatcatcgtttttcactcactcctgaccggaagctatgcccagaaatacgggaaagacccacccatggctgtaaccctgggacttcggatggaggagatgatttttaacctcgcagatacgcacctcttctttaacgatttggaagagtgtgaccaggtacatatcgacgacgtttcaagcgatgacaacgggcaggacctgagcacgtatagttttgccaccgatgggttccacgccgccgcgagttccgcaaacctatgtctaccaaccggcgtgaggggtggagtcgattggatgcggaagctggcattccgctacaggcgcgtcaaagaactttacaacacttataaaaataacgtgggcggcctgctcgggccggcgaagagagacgcctggctgcagttgagagccgagatcgaagggctgactgattcgtggctgacaaatgcgctgaagagcctctcaatcatctcaacccgaagtaattgcataaacgtcctcgtgaccactacacagctgattcccgcacttgccaaggtgttgctttactcgctggggggcgcttttccaatcgagaacatctattcggcaaccaagattggtaaggaatcttgctttgagcgtattatgcagcgatttgggcgcaaggtcgtgtatgtggtaatcggagacggggttgaggaggagcaggctgcaaagaagcacaatatgcctttttggcggatatcctctcattcagacttgcttgctttgcaccaggcccttgagctggagtacctgtag

SEQ ID NO: 116495 - DNA, 1920 bp, synthetic construct
  misc_feature 1..1920: note = Description of Artificial Sequence: Synthetic coding sequence
  source 1..1920: mol_type = other DNA
atggaggactctcaggacctcaacgagcagtccgtgaagaagacatgcactgagagtgatgtatctcagtcacaaaacagtagaagtatggagatgcaggatttagcaagtccacacaccctggttggagggggcgataccccaggaagctcaaagctggaaaagagtaatctgtctagtacctctgtaacaaccaacgggactggaggtgagaacatgaccgtgctgaataccgccgactggctgctgtcatgtaacacaccctccagcgcaacaatgagccttttggccgtgaagactgagccacttaactcaagcgaaactacagctaccaccggagacggagctcttgacaccttcacgggctctgtgataacgagctccgggtacagccctcgcagcgctcatcagtactctccccagctctacccgtctaagccgtacccacacattctgagcactccagccgcacagacgatgtcagcatacgccggacagacccagtacagcggaatgcagcagcccgccgtgtatactgcttacagtcaaactggacagccctactcattacctacttatgatctaggggtgatgctgccagccatcaaaactgaaagcgggcttagtcagacccagtcgcctctgcagtctggttgcctctcctatagccctggctttagcacaccccaacccggtcagacaccttacagttaccagatgcccgggtctagtttcgcacctagttcgactatatatgctaataactccgttagcaacagtactaacttctcaggaagtcaacaagattaccctagctacacagcgtttggtcagaatcaatacgcccagtattattctgcttcgacatatggcgcatacatgacatccaacaatacagcagatggtactccttcttccacatctacctaccaactgcaggaatcgctgcccgggctcaccaaccagcctggtgagtttgataccatgcagtctccatcaacgccaataaaagatctagacgaacgcacatgcagatcctccggctcgaagtcccggggccgaggtcgcaaaaacaacccgtctcctccacccgatagcgatttggaaagggtttttgtttgggacctggacgagacgatcattgtgtttcactctttgctgaccggcagctatgcacagaagtatgggaaggacccccccatggctgtaactttgggactgagaatggaggaaatgatattcaacttggcagacacgcatctattcttcaatgacctggaggagtgtgaccaggtccacatcgatgacgtgagtagtgatgacaatggtcaggatctgtctacctacagcttcgctactgatggatttcacgctgcagccagttcagctaatctgtgtctgcccaccggggtgagaggtggagtggactggatgcgcaaactagcatttcggtatcgaagagtcaaggagctctataatacctacaagaacaacgtgggcggcctgctgggcccagctaagagagacgcctggctccagttacgcgcagaaattgagggactaacagactcctggctaaccaacgcgctcaagtctttgtctatcatatctacccgctcgaattgtatcaatgtgctggtaaccacaacccagcttattcccgccctggctaaagttctattgtattctctcggtggtgcttttccaatcgaaaatatctatagtgccacgaaaatcgggaaggagtcctgctttgaacggattatgcaaagatttggccgaaaagtcgtatacgtggtaattggcgacggtgttgaagaggagcaggcggctaagaaacacaatatgcctttctggcgtatttcctctcacagtgacctgctcgccctgcatcaggcgttggagcttgagtatctgtag

SEQ ID NO: 116496 - DNA, 9498 bp, synthetic construct
  misc_feature 1..9498: note = Description of Artificial Sequence: Synthetic coding sequence
  source 1..9498: mol_type = other DNA
atgactgataagtccatcgttattctttctcttatggtgtttcatagtagcttcatcaatggaaagacctgtaggcgccagctggtggaggaatggcacccacaaccgtctagttacgtggtgaattggacattgaccgaaaatatctgcctcgacttctatcgcgattgctggtttctgggggtcaatactaagatagatactagcggtaatcaggcagttccgcagatatgcccccttcaaattcagctgggagatatcctggttatctcctcggagccttccttacaatttcccgaaattaatctaatgaacgtgagcgagacgagttttgtcggatgtgtgcagaacacaaccacagaggaccaactcctgtttggctgtcggttgaaagggatgcacacagtcaattcaaagtggttatcagtgggcacccattatttcattaccgtgatggctagtgggccctctccctgtccactgggtttacgcctcaacgtaacggtgaaacagcagttctgccaagaatccttaagctccgaattctgcagcggccacgggaagtgcctgtcagaggcctggtccaaaacctattcctgtcactgtcagcctcctttcagtggtaagtactgtcaggagctggacgcctgttcctttaaaccatgtaaaaataacggatcgtgcattaataaacgggagaactgggatgagcaggcctatgagtgcgtatgtcaccccccattcactggcaagaattgtagcgagatcataggccagtgtcagccacacgtctgtttccatgggaactgcagcaatattacgagcaactctttcatttgcgaatgtgacgaacagttttccggccctttttgcgaagtatctgctaaaccctgcgtcagcctgcttttctggaagcgaggcatatgcccaaacagctcaagcgcttacacctatgaatgtccaaaaggttcatcgtcgcagaacggggagacagatgtatccgagttcagccttgtcccttgccaaaacggcaccgactgtattaaaatttcaaatgacgttatgtgcatctgttcgccgatattcactgacttgttgtgcaagtctatccaaacatcctgtgaaagttttcctctccgtaacaatgccacctgcaaaaagtgcgagaaggactatccctgctcttgcattagtggctttactgagaagaattgcgaaaaggccatcgatcactgcaagctgttgagcataaactgcctgaacgaagagtggtgctttaatattatcggccgtttcaaatatgtgtgtattcccgggtgcaccaaaaacccctgctggttcctcaaaaacgtctatctcattcatcagcacctgtgctactgcggagtcacctttcatggcatttgccaggacaaggggccagctcagtttgagtacgtttggcaactcgggttcgcaggtagcgagggcgaaaaatgccagggagtcatcgatgcctattttttcctcgcagcgaactgcaccgaggatgccacttatgttaacgacccggaagataacaacagctcctgctggttccctcacgagggtaccaaagagatctgtgccaacgggtgtagctgcctatccgaggaagatagccaggagtacagatacctatgttttctcaggtgggcaggtaacatgtatctggaaaacaccaccgatgaccaagagaatgaatgccagcacgaggctgtatgtaaggacgagatcaatcggcctaggtgttcttgcagcctgagctatataggcagattgtgtgtcgttaacgtcgattattgcctcgggaatcactccatatcggtgcatggactctgtctggccctgagtcacaattgtaactgttctggattgcagcgctacgagcgtaatatctgtgagattgacactgaagattgcaaaagtgcatcctgtaagaatggcacaacatccacccatttgcgtgggtacttctttcgtaagtgtgtccccggatttaagggcactcagtgcgaaatcgatattgatgagtgcgctagccatccatgtaagaatggtgcaacgtgcattgaccagccaggcaattacttctgtcaatgcgtgcccccattcaaggtcgtcgatggcttcagctgcttatgcaaccccggatatgtcggaatccgttgtgagcaggatatcgatgactgcattttgaatgcttgtgaacacaacagtacttgcaaggatctgcacctaagctaccagtgcgtgtgcctgtcagactgggagggaaatttctgcgagcaggagtctaatgagtgcaagatgaatccttgcaagaacaactctacatgcacagacctgtataagtcttaccgttgtgagtgtactagtggatggacaggtcagaactgttctgaggagatcaacgagtgcgactcagatccctgcatgaacgggggactctgccacgaatctaccataccaggccagtttgtgtgcctctgtcccccgctctacaccgggcagttctgtcaccagcgctataacctgtgtgacttgctccacaacccctgtagaaataacagtacctgtctcgcactggtggatgctaaccagcactgtatctgtagggaggagttcgaggggaagaattgtgaaatagatgttaaggactgcctgtttctgtcttgtcaagattacggggactgcgaggacatggtgaacaacttcaggtgcatctgtcgcccgggtttcagtgggagtctatgtgaaatagagatcaacgagtgcagtagcgagccctgcaagaataatgggacttgcgtggacctgaccaacagattcttctgcaactgtgagccagagtatcacggcccattctgcgaattggacgttaacaagtgtaaaatctccccatgcctggatgaggagaactgcgtttaccgtaccgacggttataattgtctgtgcgcacccggctacactggaattaattgcgaaataaatctggatgaatgtctctctgaaccgtgcctccacgatggtgtctgtatcgatgggatcaaccactacacatgtgactgtaagtcggggttttttggcacccattgcgagactaacgcaaacgattgccttagcaatccttgcctccatgggagatgtaccgaattaataaatgagtacccttgctcttgtgacgctgacggcacttctacccagtgcaagattaagatcaatgactgcaccagtataccctgcatgaatgagggattctgccagaagtcggcgcacggatttacgtgcatttgccctcgcgggtatactggcgcttattgcgagaagagcatagacaattgtgctgagccagaattgaattccgtcatatgtcttaatggtggtatttgtgtggacggtcccggacatactttcgattgtaggtgcctcccagggttttctgggcagttctgtgagatcaacataaacgagtgctcctcatcaccttgcttgcatggtgctgactgcgaagatcacattaatggttatgtctgtaaatgtcagcccgggtggagcggacaccactgcgagaatgagctcgaatgcatacctaactcatgtgtacacgagttatgcatggaaaacgagcctggaagtacttgtctgtgtaccccagggtttatgacctgtagcataggtctgctgtgcggggatgagatccgacgaataacatgcttaacacctatctttcagagaacagatcctattagtactcagacatacactattccaccgagcgagactctcgtctcgtcattcccttcaattaaagccaccaggattccagcaattatggatacatacccagtggatcaaggcccaaaacagaccgggatcgttaaacacgatattctgccaacgacaggactggcaacactccgcattagcaccccactggagagttacctactgcaagagctgattgtaacacgggaactttcagccaaacattcactcctatcttccgccgacgtgagcagttcccgcttccttaactttggcatcagggaccctgcccaaatcgtccaagacaaaacctcagtgtcacacatgccaattaggacttctgcggctaccctgggttttttctttcccgatcgacgggcccgcacgccatttataatgtctagcttaatgagcgactttattttccccacacagtccctgttgttcgaaaattgtcagaccgtcgctttatcggctacaccaacgacaagtgtgatccgtagcatcccaggcgcagatatcgagctgaacagacagagtctgctttccagagggttcttgctgatagccgcctccatttcagccactcctgttgtgtcgagaggcgctcaggaggatattgaggaatactcagccgacagcttaatctctcggagggagcattggagactgctcagtccatcaatgtccccaatttttccagcaaaggttattattagtaagcaagtgaccattctgaactcatcagccctgcaccgctttagcaccaaggcatttaacccatccgaatatcaggcaattacagaggcgtcatctaatcagagacttactaatatcaagtcccaagctgcagattctctgcgagagctgtcccagacatgcgccacttgctcgatgaccgagattaagagtagccgggagtttagtgatcaagtcctccatagcaagcagtctcacttttacgaaacattctggatgaactccgcaattctagcttcctggtatgctctgatgggagctcagactattacttccggtcatagcttcagtagcgccactgagatcactccttctgtcgcatttactgaagtgccctccctgttcccctccaagaaaagcgctaagcgcacaatacttagttctagccttgaagagtctataacactgtctagcaatcttgatgttaacctctgccttgataagacctgtttgtctatcgtgccaagtcagacaatctctagcgatctgatgaactcagatctgacatcaaaaatgaccactgacgagctgtcagtctccgaaaatattctcaagctgctgaaaattcgtcagtatggcattacaatgggtcctactgaggtcttgaaccaggagagtctgctggatatggaaaagtctaagggctcgcacactctgttcaagcttcacccttcagactcctcgcttgatttcgaactgaacttacagatttatccggatgtgaccctgaagacctacagtgaaatcacccacgccaacgacttcaaaaataacctcccccccctgacaggttcagttcccgactttagtgaagtgacaacgaacgtggccttttacacagtctccgccaccccggctttgtccatacagacaagcagcagtatgtctgtgatcaggccagactggccgtacttcactgactatatgactagccttaagaaggaggtgaagacctcgtccgaatggtctaaatgggagttacagccatctgtccagtaccaggaattccccacggcttctaggcatctgcctttcactcgaagcctcacattgtcaagcctcgaatctatcttggcacctcagcgactgatgatctccgactttagttgcgtgcggtattatggcgatagctatttagaatttcagaatgtggcactaaacccccagaacaacatctctttagaattccagacgtttagcagctacgggctcctcctgtatgttaagcaggacagcaacctggttgacggcttttttatccagctgttcatcgaaaatgggacactcaagtaccatttctattgccccggagaagctaagttcaagagcataaatacaactgtgagggtcgacaatggacagaagtacaccttgcttattaggcaggagctcgacccatgcaatgccgaactcacaatactcggacggaatacacaaatatgtgagtctattaaccacgtactggggaagccactgccaaagagcggttcagttttcattgggggatttcctgatttacatggcaagattcaaatgcccgttcccgtcaagaacttcaccgggtgtattgaggtaattgagattaacaactggcggtctttcatcccctcaaaagcagtgaaaaattatcacattaacaactgccgaagtcagggcttcatgctgtcacccaccgctagctttgttgacgcgtccgatgttacacagggtgtggataccatgtggacttctgtctcgcccagtgtcgccgccccctcggtgtgccagcaggatgtatgccacaatggaggcacctgtcacgccatctttcttagtagtggtatagtcagcttccaatgtgactgcccactgcatttcacagggcggttctgcgagaaggatgctgggctgttttttcctagcttcaacgggaattcatacctggagcttcccttcctgaagttcgtgctggaaaaggagcacaatcggaccgtgacgatatacctgacgatcaagaccaactctctcaatggcaccattctgtacagcaatggtaacaattgcggcaaacagttcctacacctgttcctggtggaaggcagaccgagtgtgaaatacgggtgcggaaactcacagaacatcctcactgtatcagctaactacagcattaatactaacgcctttacacctatcaccatccgttatactacacccgtgggaagtccaggggtagtgtgtatgatcgaaatgacagccgacggaaagcctcctgtccagaagaaggatacggagatttcgcacgcgagtcaggcatatttcgaatccatgttccttgggcatatcccagccaacgtgcagatccacaagaaagctgggccggtctacgggtttcggggctgcattttggaccttcaggtcaacaacaaagaattttttattatcgacgaggctcgacacggaaaaaacatagaaaattgtcatgttccttggtgcgcccatcatctctgtaggaacaatgggacctgtattagcgacaatgaaaatctcttttgcgaatgtcctcgactgtactctggaaagctctgccagtttgcgagctgcgagaacaatccttgtggtaatggcgccacctgtgtccccaagagcggaacagatatcgtgtgtctgtgtccctatggaaggtcagggcctctctgtacagacgccataaatatcacccaacccaggttcagcggtacggatgcctttggttacacgtcattccttgcctattctcggatctccgacattagttttcattacgagttccacctgaaattccagctcgcaaataaccactctgctctgcaaaacaatctaatatttttcactggtcagaagggtcacggcctgaatggcgatgatttcctggcagttgggttactgaacggctccgtggtctatagctacaacctaggatcaggtatcgcatcgattcgctctgagcccttgaatctgtcactgggagtccataccgtgcacctgggaaaatttttccaggagggatggttgaaggtggatgatcataagaataaatccattatcgcacccggaagacttgtgggcctgaacgtgttttcccagttttacgtgggaggctatagcgaatatacccccgacctgctgccaaatggggcagatttcaaaaacggctttcagggatgcattttcaccttgcaggtgaggaccgaaaaagacggacattttcggggactcggtaatcccgaggggcaccccaacgcaggaaggtccgtcggccagtgtcatgcctccccctgcagcttgatgaagtgcggtaacggtggcacctgtattgagtctggaacaagtgtttactgcaactgcacgacaggctggaagggatccttctgtaccgagacagtctctacatgcgaccctgaacacgatccaccacatcattgcagtagaggggcgacctgtatcagtctgccacacgggtacacctgcttttgcccactcggtacaactggcatttattgcgaacaagctctgattctcattgtgattttggagaaacctaaacctgctgagaggaaagtaaaaaaagaggccctgagtattagcgatccctctttccgatctaacgagctcagctggatgtcgtttgcatctttccacgtcagaaagaagactcatatacagctgcagttccagccgctagcagccgacggcattcttttttatgccgcccagcatctcaaggcacaatccggagactttttgtgcattagcctcgtcaattcttctgtgcagttacgatacaacctcggcgaccgcacgataatcctggaaacactacagaaggtgaccatcaacggcagtacctggcacattatcaaagccggccgcgtgggtgccgagggctatctcgatttggacggaatcaacgttaccgagaaagcttcaacgaagatgtctagtctggacaccaacacggacttctacattggtggcgtcagttctctgaatctggtgaaccccatggctatcgagaacgagccagtaggatttcagggctgcattagacaggtgatcatcaacaatcaggagctgcaactgactgaatttggcgccaagggcggcagtaatgtaggggattgtgacggcacggcctgtggttacaacacatgcaggaatggcggggagtgtaccgtgaatggaacgaccttctcgtgccgctgtctgccagattgggctggcaacacctgcaaccagagcgtcagttgtttgaacaacctctgcttgcatcagtcattgtgtatcccggatcaaagtttttcttactcttgcctgtgcacgttgggatgggtgggtcgatactgtgaaaacaaaacctctttctccactgctaaatttatgggcaactcttatattaagtatattgacccgaactatcgcatgcgcaacctccagttcaccacgatatcattgaacttctccactaccaagactgagggattgatcgtttggatgggaatcgctcagaacgaggagaacgacttccttgctattggtctccataaccagacactcaaaattgctgtgaaccttggggagcggatcagtgtgccgatgtcctataacaatggtactttctgttgcaacaagtggcaccacgttgtggtgatacaaaatcagactctgattaaagcctacattaataactcacttatcctaagcgaggatattgatccccataagaattttgtggctctgaactatgacgggatatgctacctaggtggcttcgaatacggacggaaggtgaacatagtcacacaggaaattttcaaaacaaattttgtgggcaaaattaaagatgtggtcttcttccaagagcccaaaaatatcgagctgataaagctggaggggtacaacgtctatgacggagatgaacagaatgaggtgacctag

SEQ ID NO: 116497 - DNA, 1785 bp, synthetic construct
  misc_feature 1..1785: note = Description of Artificial Sequence: Synthetic coding sequence
  source 1..1785: mol_type = other DNA
atgactgacaaatctatcgttattctttcgttgatggttttccattcatcctttataaatggtaagacatgcaggcggcagctggtcgaggaatggcaccctcagccttcatcttatgtggtgaactggactttgaccgagaacatttgcctcgacttttacagggactgctggttcctgggggttaacacaaagatagatacttctggcaatcaggctgtgcctcaaatctgccctcttcagatccagttgggcgacatcctcgttatcagctccgagcccagtttgcaatttccagagatcaacctcatgaatgtgagcgagacgtcctttgtaggctgcgtgcagaatactactactgaggaccagctgttatttgggtgccgcctcaagggaatgcatactgttaatagcaaatggctcagtgttggaacacactactttattactgtcatggcctcaggaccttccccatgccctctgggcctgagacttaacgtgacggtgaagcagcagttctgtcaagagagcctgtcatctgagttttgtagcggacacggaaagtgcttatcagaggcatggtccaagacttacagttgtcactgccagcctcctttttcagggaaatactgtcaggagctggatgcttgctccttcaagccttgtaaaaacaatgggtcctgcatcaacaaaagagagaactgggatgaacaagcctacgagtgcgtgtgtcaccctccctttacaggcaaaaattgctcagaaatcatcgggcagtgtcaacctcatgtttgctttcacggaaactgcagcaatatcacatcgaacagttttatttgtgaatgtgatgaacagttctcaggtccattttgtgaagtgagtgccaaaccctgtgtttccctgctcttttggaaacgcggtatctgccccaatagtagttccgcttatacttacgagtgtccgaagggtagttcctctcagaacggagagaccgacgtttcagagttttccctagtaccctgccaaaatggcactgattgcattaagatttccaatgacgtcatgtgcatatgctctcccatatttactgacctgttgtgcaaaagcattcagacttcttgtgagagttttcccctgaggaataatgctacctgtaagaaatgcgagaaggattatccatgtagttgtatttccggcttcacagagaaaaattgcgagaaggcaattgaccactgcaagctgctgagtatcaattgtctcaatgaggagtggtgctttaatataattggtcggtttaagtatgtctgcattccaggttgcaccaaaaatccctgttggttcctaaagaacgtttacctgatacaccagcatttatgctattgcggcgtgacatttcatggcatctgccaggacaaggggccagcccagttcgaatatgtgtggcaattgggattcgccggcagcgagggtgaaaagtgtcagggagtcattgatgcatatttttttttggccgcaaactgtacagaagatgccacctacgttaacgatcccgaagacaataacagctcctgctggtttcctcatgagggaacaaaagaaatatgcgcaaatggctgctcctgtctttcagaggaagactcgcaggaatataggtatctgtgcttcctgaggtgggctgggaatatgtacctggagaatacaactgatgaccaggaaaatgagtgtcagcatgaagccgtgtgcaaagacgaaataaaccggccacggtatctgtgcattatttag

SEQ ID NO: 116498 - DNA, 9498 bp, synthetic construct
  misc_feature 1..9498: note = Description of Artificial Sequence: Synthetic coding sequence
  source 1..9498: mol_type = other DNA
atgacggacaagagtatcgtgatccttagcctaatggtttttcattcatcctttataaacggcaagacttgtagacgtcagctagtggaagaatggcaccctcagccttcgagctatgtggtcaactggaccctgacggagaacatctgcctggacttttatagagactgctggtttttgggagtgaatacaaagatcgatacttccgggaatcaggccgtgccacagatttgccccttgcagatccagctcggcgacattctggtgattagtagtgaaccaagcctgcagttccccgaaattaatctgatgaatgtctccgagacctccttcgttggatgtgtacagaatactaccaccgaagaccagctgttgtttggatgccggctgaaagggatgcacacagtcaattcaaagtggcttagtgtggggactcactacttcattaccgtgatggcaagtgggccgtccccctgccctcttgggctgaggctgaacgtaaccgtcaaacagcaattctgtcaagaaagtcttagctcagaattctgcagcggtcacggcaaatgcctctccgaggcatggtcaaagacgtactcctgccattgtcagcccccatttagtggaaagtattgccaggagctggatgcatgttcatttaaaccatgtaaaaacaatgggtcctgcattaataaacgggagaactgggacgagcaagcctacgagtgcgtgtgtcatccaccatttaccggcaagaactgtagcgagatcatcggacagtgccagcctcacgtgtgcttccacggcaattgctccaatatcacaagcaactccttcatttgtgagtgtgatgaacaattttccggacctttctgtgaagtaagcgctaagccctgcgtctctctccttttttggaagcgtggcatctgtcccaattccagcagtgcctacacctatgagtgccccaaaggcagctcgtctcaaaatggggagacggacgttagcgaattttctttagtgccttgccagaatggcacagactgcatcaagatttccaatgatgtcatgtgtatttgttctccgatctttactgatttgctctgcaaaagcatccaaacgtcttgcgaaagctttcctctgcgcaacaacgccacatgcaagaaatgcgagaaagattatccatgttcttgtatatcaggctttacggaaaagaattgcgaaaaggcaattgatcactgcaaactgctgtcaatcaattgccttaacgaggagtggtgttttaacatcatcgggcgcttcaagtacgtgtgcattcccggttgcacaaaaaatccttgctggtttctgaagaacgtctacctgatacatcagcacctttgctattgcggggtaacatttcacgggatatgccaggacaagggtcctgcccagtttgagtatgtgtggcagctgggattcgcaggatctgaaggcgagaagtgtcagggtgtgatagacgcatacttcttcctcgccgcaaattgtacagaggacgcgacgtatgtgaacgaccctgaagataataatagcagctgttggtttccacacgaaggaaccaaggaaatttgtgccaacggctgcagctgtttatcggaggaagatagtcaagaatatcgttacctttgtttcctccgctgggccggaaatatgtatctggaaaataccactgacgaccaggaaaacgaatgccagcatgaggctgtttgtaaggacgaaatcaataggcctcgatgctcctgctctctgtcatacatcggcaggctctgcgtggtcaatgtggactactgtctggggaatcatagcatcagcgtccatggcttgtgcctcgccctcagtcacaactgcaactgcagcgggcttcaacgctatgagagaaacatttgcgagattgacacagaggattgtaaatcagccagctgcaaaaatggaacaacatctacacatctgcgcggatatttctttcgcaaatgcgtgcctggatttaaaggcactcagtgtgagatcgatattgacgagtgcgcctctcacccctgtaaaaacggggctacctgtatagaccagcccggcaattacttttgccaatgtgttcctccttttaaggtagtcgacggttttagttgtctctgtaatccgggctatgtgggaatccggtgcgaacaggatatagacgactgtatcctaaacgcctgcgaacataattctacatgtaaggatttgcacctctcgtatcaatgcgtctgtttaagcgactgggagggcaacttttgtgaacaggagagtaatgagtgcaaaatgaacccatgcaagaataattccacctgtacagatttgtataagagttatcggtgtgagtgcactagtgggtggacaggacagaactgctctgaggagataaatgaatgtgactccgacccatgcatgaacggtgggctttgccatgagtccaccattcctggacagtttgtatgcctctgtccccccctttacaccgggcagttctgtcatcagaggtacaacctttgcgacctgctccacaacccttgtcggaataattctacatgcctcgctttagttgacgcaaatcaacattgcatttgcagagaagaatttgaaggcaagaactgcgagatcgacgtgaaagattgccttttcctgtcatgtcaagactatggggactgcgaagacatggtgaacaattttaggtgtatttgccgccctggcttctctgggtctctctgtgagatagaaataaatgaatgcagctctgagccctgtaagaacaatgggacctgtgtagacctgacaaaccggtttttttgtaattgcgagcctgagtatcacggccccttttgtgagctggatgttaataagtgcaaaatttcaccgtgcctcgatgaggaaaactgtgtctaccgcactgatggctataattgcctgtgcgctcctgggtatacggggatcaactgtgaaatcaacctagacgagtgtttatctgaaccctgtctgcacgacggtgtctgcatcgatggcattaaccattacacttgtgactgcaagtctggcttcttcggtacacactgcgaaaccaatgccaacgactgtctatccaatccctgcctgcatggtcggtgcaccgagttaatcaacgagtatccctgcagttgtgacgccgacggcacaagcactcagtgcaagatcaagatcaatgattgtacctccatcccatgcatgaacgagggcttctgccagaagtctgcacacggctttacatgcatttgcccaagaggatataccggagcctactgcgagaaaagcatcgataattgtgctgaacccgaactcaactcagtcatctgtcttaacggggggatctgcgtggacgggcctgggcatacatttgactgcagatgtctgcccggctttagcggccagttctgtgagattaacattaatgagtgcagctccagcccttgcctacatggtgccgactgtgaggaccacatcaatgggtacgtttgcaaatgccagcccggctggagcggccaccactgcgagaacgagcttgaatgcatacctaactcatgcgtacacgagctatgtatggaaaacgagccaggatccacttgcctctgcactcctgggtttatgacttgctccataggcttgctatgtggagatgagattagacgaatcacttgcctcaccccaattttccagaggactgatcccatcagtacacagacctatacaatacctccatccgagaccctggtgtcatcattcccaagcattaaagctacccggattcctgcaatcatggatacatatcccgtcgatcaggggcccaaacagaccggcatagtgaagcacgacattttaccaacaacgggacttgcgacactgcgaatctcaaccccgctggagtcctacctgctgcaggagctcatcgttacgcgcgagctctcagccaaacattcccttctctcctcagcagatgtgtctagttccaggtttttaaacttcggaatacgagaccccgcccaaattgttcaggataagacctctgtttcacatatgcccattagaacgtccgccgctacactgggctttttctttccagacagaagggcccggacccccttcattatgtcctccctcatgagcgactttatctttcccacccagagcctgctcttcgagaactgtcagacagtggcactgagtgccacgcccactacatccgtgatacgatctatccccggagccgacattgaactaaataggcaatcactgctttctagaggcttcctattgatcgccgcctcaattagcgccactcctgttgtctctcggggggcccaagaggacatcgaggaatattcggcagatagtctgatctcgcggcgagagcattggaggctgctaagtccgagtatgtctccaatatttccagccaaagtcataataagcaagcaagtcaccattcttaactcatccgccctacaccgttttagcaccaaggcgtttaaccctagcgagtaccaggcaattacggaagcctcaagcaatcagcggctgaccaatataaagtcacaggcagccgactcactcagagagctgtcgcagacttgcgctacgtgttccatgacagaaatcaagtcaagcagggagttcagcgaccaggtccttcatagtaagcaatctcatttttatgagaccttttggatgaactctgccattctcgcctcctggtacgccctgatgggggctcaaacaatcacaagcggtcactctttctcaagcgccacagagattactccgagcgttgcgttcactgaagttccaagtctttttccaagcaaaaagagcgcaaaacgcaccattctaagctcttcactagaggaatcaatcacactctccagcaaccttgacgtgaatctgtgcctggataaaacttgcttgtcaatcgtcccctcgcagacaatcagctcagacctgatgaactctgatcttacatccaagatgacgaccgatgaactctccgtgtctgagaatatactgaagcttctcaagataagacagtacgggatcacaatgggacccaccgaggtgctgaaccaggagtcactgctagacatggaaaagagtaaaggatcacacaccctttttaaacttcatcccagcgacagctccttagacttcgaattgaatctgcagatttatccagacgtgactttaaaaacatactcggaaatcactcacgctaatgacttcaaaaataacctgcctccactcactggctccgtacccgacttttcagaggtcactactaatgtagccttttacaccgtgtctgccacaccagccttgtcaatccaaacatcaagttccatgtccgtgatccgccccgactggccatacttcacggactacatgacgtccctgaagaaagaggtcaagacaagcagtgagtggagtaaatgggagcttcagccgagcgttcaatatcaagagttccctacggcctcgagacacctgccgttcacccggagcctgaccctgagtagcctggagtcaatcctggcacctcagaggctgatgatcagcgacttcagctgcgtgagatattatggagattcttacctggaatttcagaacgtagccctcaatcctcagaacaatatatccctggaattccagacatttagcagctacggacttctgctttatgttaagcaggatagcaatcttgttgatggcttctttattcaattatttatagagaacggtactttgaaataccatttctattgtcctggggaagccaaatttaagagcatcaatactaccgtcagggtggataatggtcagaaatacacccttttgattcgtcaggaattggacccttgcaatgccgagctgacaatactcggacgcaacacccagatttgtgaatcaataaatcacgttctggggaaacctttgccgaaaagcggaagtgtctttattggaggatttccggacttgcatggcaaaatccagatgcctgtgcctgtgaaaaattttaccggatgcatcgaagtaatagaaatcaacaattggaggtcttttataccctctaaggccgtcaagaactaccatattaacaattgccggagccaggggttcatgctgtcacccaccgctagcttcgtggatgcaagtgatgtgacccagggtgtggacacgatgtggacttccgtgtctccttccgttgccgcaccttcagtctgccaacaggatgtttgtcacaatggcggaacatgccacgctatctttctatcaagcgggatagtctcattccagtgtgactgccctttacacttcactggaagattctgcgagaaggatgctggcttgtttttcccatccttcaacggaaatagttatcttgagttgccattcttgaaattcgtgcttgaaaaggaacacaaccggacggtgactatttacctgaccataaaaacgaacagtttgaacggcactatactgtactcaaatggcaacaactgtggtaaacagtttctgcacctgttcctggtggagggccgcccctcagtgaaatacgggtgtgggaacagtcagaacattctgacagtctctgccaattactctatcaacactaatgcgttcacccccataaccatccgttacaccacgcccgtgggtagtccgggagtggtttgcatgatagaaatgaccgcagacggaaagcctcctgtgcagaagaaggacactgagatctctcacgcaagtcaggcgtattttgagtctatgtttctgggccacatcccagccaacgtccagattcacaagaaagcaggccccgtatacgggtttagggggtgcattctggatctgcaggtcaataacaaggaatttttcataattgatgaggctcgccatggaaagaatattgaaaactgccacgtgccttggtgtgcccatcacttgtgcagaaacaacggcacctgcattagtgacaacgaaaatctgttttgtgagtgtccccgactctactcggggaagctgtgccagtttgctagctgtgagaataacccatgtggcaacggagcaacgtgtgtgcctaagtccggtactgatatcgtctgtctttgcccatacgggcgctccggccccctgtgcacagatgcaattaacatcacccagcctcgattctctgggactgacgccttcggctatacgagtttccttgcatacagccgaatctccgacatatcttttcattatgagtttcacctcaaattccagctcgccaacaatcactcagccctccagaacaatctgatcttcttcacaggccagaaggggcacggtctgaatggagatgatttcctcgcagtggggctgttaaacggctctgtggtttactcctacaatcttggcagtggaattgcctctatccgtagcgagcctctgaacctgtcactgggggtccacaccgtgcacctggggaagttctttcaggaaggctggcttaaggtggacgaccataagaataaatctatcattgccccgggcaggctcgtcggtctcaacgtcttctcacagttctatgttggtggatactctgagtatacacctgacttattgccaaacggggcagacttcaagaacgggtttcaggggtgtatttttacattacaggttcggacagaaaaagacggccattttcgaggcctgggaaaccctgagggacatcctaatgccggacggtccgtaggtcagtgccacgcctccccatgttccctcatgaagtgtggtaacggaggaacatgcatcgagtccggtacctccgtctactgcaactgtactaccggatggaaagggtcattttgcaccgagacggtgtctacatgcgaccccgagcatgatcctccacaccactgctcacgaggggccacttgtatttctcttccccacggctatacttgcttttgcccactgggaaccactgggatctattgcgagcaggccctgatactgattgtcatactggagaaacctaaaccagcagagcggaaagtgaagaaagaggccctgtccatttctgatccgtcatttcgctctaatgagctcagctggatgtcttttgccagttttcatgtcagaaaaaagacacatatccagctacaatttcagccactggctgccgatggaatattattttatgctgcacagcacctgaaggcccagtccggggacttcctgtgtataagtctggtgaattcctcagtccagctgaggtacaaccttggggatagaaccattattctcgaaaccttacagaaggtgactattaacggaagcacgtggcatatcatcaaggcaggtagagtcggagccgaaggatatctggacttagacggcatcaacgtcactgaaaaggccagtacaaagatgagtagcttagatacaaatacagatttttacataggtggtgtaagcagcttgaatctagttaacccaatggctattgagaatgagcctgtgggtttccagggatgtattagacaggttatcatcaataatcaggagttgcagctcaccgaatttggagctaaaggaggctccaacgtgggggattgcgacggtacggcttgtgggtataacacgtgtcgtaatggcggagagtgtaccgtgaacggcactacgttctcctgccgctgcctgcccgattgggcggggaatacctgcaatcagtcagtctcttgtttgaataacttgtgtttacatcagagcctttgcattcccgaccaatctttcagctacagctgcctctgtactctaggatgggtgggacggtattgcgaaaacaagacgtcatttagtactgccaaattcatgggcaatagctacattaaatatatcgaccccaattacagaatgaggaacctccagtttacaaccatctccctgaacttctcgacaaccaagactgagggcttgattgtgtggatgggaatcgcccagaatgaggaaaatgattttctggcgataggcctgcacaaccagacccttaagattgccgtgaatttaggggagagaatcagcgtcccaatgagttacaacaatggcaccttttgttgcaacaagtggcaccacgtagtcgtgatccagaaccagactcttatcaaggcctacatcaacaattctcttatactcagcgaggacattgatcctcataaaaattttgtagctctcaattatgatggtatatgctatttggggggattcgagtacggacgcaaggtcaacattgtaacccaggaaatcttcaagaccaacttcgtgggtaaaatcaaagacgtcgttttctttcaggagccaaagaatatcgagctgatcaagttggaggggtataacgtgtacgacggcgacgaacagaacgaggtgacatag

SEQ ID NO: 116499 - DNA, 9435 bp, synthetic construct
  misc_feature 1..9435: note = Description of Artificial Sequence: Synthetic coding sequence
  source 1..9435: mol_type = other DNA
atgaccgataagtccattgttattctttctctaatggtgtttcattcatcctttataaacgggaaaacatgtaggcggcagctggtggaggagtggcatccacagcccagctcctacgtagtgaattggacgctgaccgagaatatctgccttgatttttatcgcgactgctggttcttaggtgttaacaccaagattgacaccagcggaaaccaggccgtgccccagatatgtccgctgcagattcaattaggagatatcctcgtgatcagcagcgaaccaagtctgcagttccccgagatcaatttgatgaacgtgtccgaaacaagcttcgttggctgcgtgcaaaacactaccaccgaagaccagcttcttttcggttgtagattaaaaggcatgcacacagtgaactctaagtggctgagtgtcggtacacactactttataaccgtgatggcttcaggaccatccccttgtccattgggcctccgcctgaacgttaccgtaaaacaacaattttgccaggaatccctgtcatctgaattttgcagcggacatggcaagtgcctgagtgaggcttggtcaaagacctacagttgccactgtcagccccccttttccgggaaatactgtcaggagctcgatgcgtgctcatttaagccttgcaagaacaatgggtcatgcattaacaaacgtgagaactgggacgaacaggcctacgaatgtgtgtgccacccgccttttactggaaagaattgtagcgagattatcgggcaatgccagccacacgtatgcttccatggtaattgttctaatatcacctcaaatagcttcatctgcgagtgcgacgagcagttctcaggaccattctgtgaggtctctgctaaaccctgtgtgtcactgctattctggaaaagggggatctgccccaactcgtctagcgcctatacctatgaatgcccaaaaggatcaagttcacaaaatggcgagactgacgtatctgagttcagcctcgtgccatgccagaatggcacggattgcattaaaatttcaaacgacgtgatgtgcatctgcagtcccatttttaccgacctgctgtgcaagtctatccaaacttcttgcgaatcctttcccctccggaacaacgctacctgcaagaagtgcgaaaaagactatccatgttcttgcatctctgggtttaccgagaaaaattgcgaaaaggccatagaccattgcaagctactttcgattaactgcctcaatgaagagtggtgtttcaacattattggtagattcaagtacgtatgtattccagggtgtactaaaaacccatgttggttcctgaagaatgtgtacctgatccaccagcatctctgttattgtggtgttacctttcacggtatatgtcaggataaggggcccgcacaatttgagtacgtttggcaactaggcttcgcgggtagtgagggtgagaagtgccagggggtcattgacgcttatttctttctagcagctaactgcacagaggacgccacgtacgtgaatgaccctgaggataacaatagttcttgttggttcccccatgaggggactaaagagatttgcgcaaatggttgctcctgccttagtgaagaagactcccaagagtacagatatctctgcttccttcggtgggctggcaatatgtacttggaaaatactactgatgaccaggagaatgagtgccagcacgaggccgtgtgcaaggacgagatcaatagacccaggtgtagttgctctctctcttacataggacgtctctgcgtcgtgaatgtagactactgcctgggcaatcatagtatatccgtgcatggcttatgcctggctttgtcacataactgtaattgtagtggcctccagcggtacgagcggaacatctgcgagatcgatacagaggattgtaagagcgctagctgcaaaaatggcacgacctcaacccatctccgcggctatttctttcggaagtgtgtccctggattcaaaggcactcagtgtgaaattgatatcgatgaatgcgcaagccatccatgcaaaaatggcgccacctgtatcgaccagcccggcaattatttttgccagtgtgttcccccattcaaagtggtggacggatttagctgcctctgcaacccaggatacgtcggcatcaggtgtgagcaggacattgatgactgtatcctgaacgcctgcgagcacaattccacctgcaaagacttgcatttgtcttaccagtgcgtgtgcctgtctgactgggaaggcaacttttgcgagcaagaatccaatgaatgcaaaatgaatccctgtaagaacaactcgacttgcaccgatctgtataagtcatacagatgtgaatgcaccagcggatggacgggccaaaattgctcagaagagatcaacgaatgcgatagcgacccttgtatgaacgggggcctctgccatgaatcaaccatccccggacagttcgtttgtctttgcccacccctgtatacaggacaattttgccatcaaaggtataacctctgtgatttattacataacccttgccggaataactccacgtgcctggctctcgtggacgccaaccagcactgcatctgcagagaagaatttgaggggaagaattgcgaaattgatgtgaaggattgcctctttcttagttgccaggattacggcgattgcgaggatatggtgaataatttccggtgcatttgccgcccaggcttctccgggagcctttgcgaaatcgagatcaacgaatgtagcagcgaaccatgcaagaataacgggacttgcgtcgatctgacaaatcgcttcttctgtaactgcgaacccgaataccacggaccgttctgtgagctagacgtgaataaatgtaagatatccccatgcctcgatgaagaaaattgtgtctatcgaacagacggttataattgtctttgtgccccagggtatacgggcatcaactgtgagatcaacttagacgagtgcttgtcagaaccatgtttacacgatggcgtctgcattgacggtataaaccactacacttgtgactgtaagtccggtttctttggtacccattgcgaaaccaatgccaatgattgcctaagcaacccctgcttacatgggcgctgcacagagcttatcaacgaatacccttgcagctgtgacgctgacggcacctcaactcagtgtaagattaagatcaacgattgtactagtataccttgtatgaacgagggtttttgtcagaaatctgctcatggcttcacttgcatatgcccacggggctacacaggggcctactgcgaaaagtctattgacaactgcgctgaacccgaactgaacagtgtcatctgtttaaacgggggcatttgtgtggatggccccggtcatactttcgattgtagatgcctgcccggattttccggccagttttgtgaaatcaatattaacgaatgcagttcatcgccatgcctgcatggggcagactgcgaggatcacatcaatggttatgtgtgtaagtgtcaaccaggttggagcggccatcattgtgagaatgagctggagtgcattcctaattcttgtgtccatgaactttgcatggagaacgagcccggatccacctgcctgtgtaccccggggttcatgacttgctcaatcggcctcctctgtggagatgagatccggaggattacatgtcttacgcccatttttcagcgaacagatcctatctccactcaaacctacactattccccctagcgaaacacttgtcagctcattccccagtatcaaagcaacgaggatcccagctattatggacacctatcctgttgaccagggtccgaagcagactggtatcgtaaagcacgatattctacccacaaccggcctggccacccttagaatttccacaccgctcgaaagctacttactccaagagctgatagtgacaagagaactttctgcaaaacacagcctcctctcttccgccgatgtctcaagctcaaggttcctgaactttggtatacgtgacccagcccaaatagtacaggacaaaacaagcgtgtcccatatgccgatccgaacctcagcagccacactgggttttttcttccctgacagaagagccaggaccccttttataatgagtagcctcatgtcggactttatttttcctacgcagagcctgctattcgagaactgccagaccgtggcgctgtctgctacccctaccacaagcgttattaggtccataccaggcgccgatatcgaactgaatcgacagtccctgctcagtcgaggctttctcctcatcgctgcatctatcagcgcgactcctgtggtgagcagaggcgcccaggaagacatcgaggagtactcagcagatagcttgattagcaggagagaacattggagattactgtccccttctatgtcccccatcttccctgctaaggtcattatatctaagcaggtgactatacttaattcttccgctctgcacaggttttcaactaaggcatttaacccgagtgagtatcaagctattaccgaagcttcgtctaaccagagactgaccaacatcaagtcacaagccgccgattcccttagggaactatctcagacgtgcgcaacctgctcgatgactgagatcaaatcatcccgagagtttagtgaccaagtgctgcactcaaagcagtcccacttctacgaaaccttctggatgaactctgccattcttgcctcctggtatgccttgatgggggctcagaccattacttcaggccattccttctcctccgctaccgaaataaccccaagcgtggctttcaccgaagtgcctagcctgtttccttctaagaagtccgctaagcggaccatccttagctcctccctagaggagagcataacactgtcttcgaatcttgatgtgaacttgtgtctcgacaaaacctgcctctccattgtgcccagtcagactatctctagtgatcttatgaactcagacctgacatcgaaaatgaccaccgacgagctctcggtgagcgaaaacatactcaaactcctgaagatccgccagtacggtattacaatgggccccacagaggtgcttaaccaagaaagcctccttgatatggagaagtcaaagggctcccacacgctgtttaagcttcaccctagcgactccagcctggactttgagctcaatctgcagatctaccccgacgtaactctcaaaacttactctgaaatcacacacgccaacgacttcaaaaataacctgcctcctttgaccggatctgtgcccgacttcagcgaagttactacaaatgtcgcgttctacactgttagcgcaacgcctgccctatccattcaaaccagcagcagcatgagcgtcattagacccgattggccatattttaccgactatatgacgtccctcaagaaggaggtgaagacctcctcagaatggagcaaatgggagctgcagccttctgtacagtaccaggagtttccgacggcgagcagacatctcccatttacacggtccttaaccttatcgagcctggaatcaatcctcgctccacagcgtctcatgattagcgattttagctgtgtccgctactatggcgacagctatctcgagttccagaacgttgccctgaaccctcagaacaacatttccctggagtttcagacattttcctcatacggattgctgttgtatgttaagcaggatagcaatctggtggatggattttttatacagctgtttatcgagaacggaactcttaagtaccacttttattgccccggggaggctaaatttaaatccattaacaccaccgtgcgagtggataatggccagaagtacaccctgctgattagacaagagctggatccctgtaatgccgagttgacaatcctgggacggaacacacagatctgcgaatcaatcaatcacgtgctggggaagccacttcccaagagcggatcagttttcattgggggtttccctgacctgcacggcaaaattcaaatgcccgtgcccgtcaagaactttacaggatgcattgaggttatcgagattaacaactggcggagcttcattccttctaaggctgtcaaaaactatcatatcaataattgtaggtcacaggggttcatgctcagtccaacagcaagtttcgtcgacgctagtgatgtgacccagggcgtagacacaatgtggacatccgtgagccccagtgttgctgcaccctccgtgtgccaacaagatgtctgccataacggaggcacctgccatgcgatctttctgtcaagcggcatcgtgtcattccagtgcgattgtccactccactttaccggtcgattttgtgaaaaggacgccggtctgttctttcccagctttaatgggaactcatatctggagctccctttcctgaagtttgtgctcgaaaaggaacataaccgaactgtcacgatctacttaaccataaagaccaacagcctcaacggaacaatcctgtacagcaacggcaataattgcggcaagcaattccttcacctgttcctagtggaaggtagaccctctgtcaagtacggatgcggaaatagtcagaatatcttaaccgtgagtgcaaattactccataaataccaatgctttcacccccatcactatccggtacaccacccctgtcggcagcccaggcgtcgtatgtatgattgaaatgacggctgacggcaaacccccagtgcaaaagaaagacactgagatttcccacgcgagccaggcgtatttcgaatctatgttcctggggcatatcccagcaaacgtgcaaatccataagaaagcagggcccgtgtatggattccgaggttgcatccttgatctgcaggtgaataataaagagttctttatcatcgacgaagcacgccatggtaaaaatattgagaattgccatgtcccttggtgtgctcaccatctgtgtcggaataacggtacctgtatcagcgacaatgagaacctgttctgcgaatgtcccagactgtactcaggcaaactgtgtcagttcgcctcctgcgaaaacaatccgtgtggcaatggagctacgtgcgtgcctaagagcggcaccgatattgtctgtctgtgtccctacggccggagcggtcccctctgcactgacgctataaatataacgcagcccagattctccggtacagatgctttcggctatactagcttccttgcttattccaggatttcggatatctcctttcactacgagttccacttaaaattccaactagcaaacaaccattcagccttgcagaataatctgatctttttcaccggacagaaagggcacggcctgaacggtgacgactttttggccgttggattactcaacggctccgtggtgtactcatacaatcttggaagcggtattgccagcatccgcagtgaaccactgaacctgagtctcggcgtccacactgttcatctgggaaagtttttccaggaaggctggttgaaggtcgatgatcataaaaataaatccattatagcaccgggcagactcgtggggttgaacgttttttcccaattctacgtcggcggctactcggagtatacgcccgatttgctgccaaacggggcagactttaagaatgggttccagggttgcatctttacattacaggtgagaaccgagaaagacggacatttccggggtctgggaaaccccgaaggacatccaaatgctgggcgtagcgtcggtcagtgtcatgcctccccctgttctctgatgaagtgcgggaatgggggcacctgtatagaaagcggaactagcgtgtattgtaactgcacgactggatggaaaggttccttttgtacagaaacggtatccacctgcgaccccgaacatgaccctccacaccactgctctagaggcgcgacatgcatctctctcccccatggttatacctgtttctgtccgctggggacgactggcatatattgtgaacaggccctcagcatcagcgacccctctttcagatccaacgaactcagttggatgagtttcgcctcctttcacgtccgtaaaaagacccacatccaattacagttccaacccctagcagccgatgggatcctgttttacgccgcccagcatctaaaggcgcagagcggggacttcctctgtattagcctcgttaactcgtccgtgcaattgcggtacaatttaggcgaccggactatcattctcgaaacccttcagaaagttaccattaacggctctacctggcacattattaaagcaggaagagttggcgcagagggctacctggatctggatggtatcaacgtgactgaaaaagcgtctaccaaaatgtcctccctggacaccaatacggacttttacattggcggagtgagtagtctcaacctagtcaatccaatggccatcgaaaacgagccggtgggctttcaaggttgcatcaggcaggtcatcataaataatcaagaactgcagttgacggaatttggggctaagggaggctccaatgtgggtgattgcgacggcacagcgtgtgggtataacacgtgccgcaacggaggagaatgtactgttaacgggactacattctcttgcagatgcctgcccgactgggctggaaacacctgcaatcagtctgtttcttgtctgaacaatctgtgcttgcaccagtctctttgtatccctgatcagtctttcagctattcgtgtctgtgcactcttgggtgggtgggccgctattgtgagaacaagacctcatttagcacagccaaatttatgggcaacagctacatcaaatacattgaccctaattatcgcatgaggaacttacagtttaccactatctcgcttaattttagcaccaccaaaactgagggtctaatcgtctggatgggcatcgcccagaacgaggaaaatgattttctcgctattggactgcataatcaaacgctgaagatcgcggtgaaccttggagagaggatctcagtgcctatgtcatataataacggaacattctgttgcaataaatggcaccacgtggtagtgattcaaaaccagacactcatcaaagcttatataaataattcgctgattctgtctgaggacattgatccccacaaaaattttgtcgcccttaactacgatgggatctgctatctggggggattcgagtatgggcggaaagtgaacattgttacacaggagatttttaaaactaattttgtcggtaaaattaaagatgtggtgttctttcaggagccaaagaatatcgaactgataaagctagaaggctataatgtatacgacggggatgaacagaatgaggtgacctag

SEQ ID NO: 116500 - DNA, 1785 bp, synthetic construct
  misc_feature 1..1785: note = Description of Artificial Sequence: Synthetic coding sequence
  source 1..1785: mol_type = other DNA
atgaccgataagagtatagtgatcctgagcttaatggtgtttcacagctccttcatcaatgggaagacctgtagacgccagctggtcgaggagtggcacccccagcccagctcatacgttgtgaactggaccctaacggagaacatctgcctggacttttatcgcgactgctggtttttgggtgtgaatacaaaaatcgacacgtcaggcaaccaagccgtcccccaaatttgcccacttcaaatccagttgggagacattctggtgattagctccgagccctccctccaattccccgagatcaatttaatgaatgtgtccgaaacatcttttgtaggctgtgtgcaaaatacgacaaccgaggaccagctcttgtttggatgtaggcttaaaggcatgcataccgtaaactctaaatggctgtccgtggggacacactacttcatcactgtgatggcttcgggacctagtccatgcccattaggcctcaggctgaatgtgaccgtcaaacagcagttctgccaagagagcttatcatccgaattttgcagtggccacggtaagtgcctttccgaagcatggagcaagacctactcctgccactgccagccaccattctctggaaaatactgccaagagctggatgcttgtagcttcaagccatgcaaaaataatggctcttgcatcaataagagggagaattgggacgaacaggcttatgagtgcgtttgccatcctccttttacagggaagaattgctctgaaatcattggccaatgtcagccacacgtgtgtttccacgggaactgctcaaacatcacctctaactcttttatttgtgagtgcgatgagcagttctcagggccattttgcgaggtctccgcaaaaccatgcgttagcctgctgttctggaagcgcggcatatgccccaatagcagttctgcttatacatacgaatgccccaaagggagcagttctcagaatggtgagactgacgtcagcgagtttagcctcgtcccttgccaaaatggtactgactgcatcaaaatctccaacgatgtgatgtgtatctgcagtccaatatttaccgacctgctctgcaagtcaatacaaacaagctgcgaatcttttcctcttaggaacaatgcaacctgcaagaaatgcgaaaaggactacccctgctcctgcatttccgggtttacagagaagaactgcgagaaggccattgaccactgcaagttgctgagcatcaactgcttgaatgaagaatggtgttttaatatcatcggaaggtttaagtacgtgtgcataccgggctgtacaaagaacccgtgctggtttctcaaaaatgtctacctgatacatcagcatctttgttattgtggcgtcaccttccacggcatttgccaggataaggggccagcacagtttgaatacgtttggcagctgggattcgcaggttcagaaggggagaaatgtcagggtgtcatagatgcctacttctttttagccgctaactgcacggaggacgctacgtatgttaatgacccggaagataataacagcagctgctggttccctcatgaaggcactaaagagatctgtgccaacggctgctcttgcttgtcagaggaggattcccaagagtatcggtacttatgctttctccgctgggctggcaatatgtacctcgaaaacaccactgacgatcaggaaaacgagtgtcaacacgaagccgtgtgcaaggatgagattaacagacccaggtatctttgcatcatttag

SEQ ID NO: 116501 - DNA, 1860 bp, synthetic construct
  misc_feature 1..1860: note = Description of Artificial Sequence: Synthetic coding sequence
  source 1..1860: mol_type = other DNA
atgaccgataaatctatcgttattctgagtcttatggtgtttcacagtagcttcatcaatggcaaaacctgtcgaagacagctggtcgaagaatggcatccacagcccagtagttacgtggtgaattggacattaaccgagaacatctgtctggacttttaccgagactgctggtttcttggagtgaataccaaaatagacaccagtggcaatcaagctgtgcctcagatctgccccctgcaaattcaactaggcgacattttggtgatatcatcagaaccatcacttcagttcccggagatcaacttgatgaacgtgtccgaaactagctttgttgggtgtgtccagaacactacaacagaggaccagttactgtttggttgtagactgaaaggtatgcacacggtcaattctaagtggctctcagtgggcacacactactttataacagtaatggcctctggaccatccccttgtccactggggttgcggctaaatgttactgtgaagcaacagttctgtcaggaatccctgagctctgagttttgtagtggacatggcaagtgcctgtcggaagcttggtcgaagacatacagctgccactgccagcccccgttttccggaaagtactgtcaggagttggacgcctgttcattcaagccttgtaaaaataatggctcatgtatcaataaacgagagaactgggacgaacaggcctatgagtgcgtatgccatccccctttcaccggcaaaaattgttctgagatcataggacagtgtcaaccgcatgtttgctttcatggcaactgttccaatattacatcaaactcttttatatgtgagtgtgacgaacagtttagtggacccttttgcgaagtatcagcaaagccttgtgtgagcctactgttttggaagcggggtatttgccctaacagctcaagcgcctacacctatgaatgccccaaaggctctagttcgcaaaacggcgagacagacgtgagcgaattcagcctagtgccttgtcagaatggcaccgactgcataaaaatctctaatgatgtaatgtgtatttgctctcctatattcaccgatctgctgtgcaagtccattcagacttcttgcgagtcatttccactgcggaacaacgctacatgcaaaaaatgtgagaaggactacccctgttcctgcatctcggggtttaccgaaaagaactgtgagaaagcaattgatcactgcaagctcctatctatcaactgcctcaatgaagaatggtgcttcaacattattggacggttcaagtatgtttgtatccccggatgtaccaaaaacccttgttggttcctgaagaacgtgtacctgatacaccagcatctttgctactgcggagtcactttccatggtatttgccaagacaagggaccggcccaattcgagtacgtgtggcagcttggtttcgcaggcagcgagggcgagaagtgtcagggagtcattgatgcctatttctttctcgccgcaaactgcactgaagacgccacctatgtgaatgatccagaggacaacaatagcagctgctggtttccccatgaaggcaccaaagagatatgtgcaaatggatgttcttgcctctctgaagaggatagccaagaatatagatacttatgtttcctgaggtgggctggcaatatgtatctcgagaacacgacagacgaccaagagaacgagtgccagcacgaggctgtgtgtaaggatgagatcaataggccccggcgaattctgaatacagtgatccctcatcaaattcagcagcatatagaaagatttattcagcatgaccaagtgggctttatagtccgcatttag

SEQ ID NO: 116502 - DNA, 1764 bp, synthetic construct
  misc_feature 1..1764: note = Description of Artificial Sequence: Synthetic coding sequence
  source 1..1764: mol_type = other DNA
atgggctgggatctgggaactcgcctgtttcagcgccaggaacagagatcacgactgagccgcatatggctcgagaagacccgggtctttttggaggggagtacacgaacgccagcattgccacactgcttgttctggcttctgcaagtgccttctacacaggatcctctgttccctggttacggtccacaatgtcctgtggatctggcggggcctccctgtctgagacctctcttcggcggactgggaggatactggagagcgctgcagagaggacgtgaaggtcgaacaatgacatctcgtgcaagcgaattaagccctggacggtctgtaactgccggaatcataatcgtgggcgacgagattctcaagggtcatacccaagacacaaacacatttttcctatgtcgaactctgcggagcctgggcgtgcaggtgtgtcgggtgtctgttgtgccggacgaagtggctacaatcgccgcagaagtaaccagcttctccaatagattcacgcacgtgcttaccgcaggcgggattggtcctactcatgacgatgtgacctttgaagccgtggcacaggcattcggggacgaacttaagccccatccaaaattggaggcagccaccaaggcactggggggagaagggtgggagaaactttccctcgtcccttcgagcgctagattgcactacggaaccgatccctgcacaggccagcctttccggttccctctggtttccgtgagaaacgtgtacctgtttccaggtatccctgaacttctcagacgggtgctggaaggcatgaagggcttattccagaaccctgctgtgcagttccactccaaggagctgtacgtcgctgccgacgaggccagcattgcacctatactggccgaagctcaagcacacttcggacgtaggctaggactgggaagttacccagactgggggtccaactattaccaggtcaaactgaccttggatagcgaggaggagggtccgctcgaggagtgcctagcctacctcactgctcgcctcccacaagggagtctcgtgccttatatgccgaacgctgtggagcaagcatctgaggccgtgtataaacttgcggaatctgggtccagcctaggcaagaaggtggctggtgctttgcagacgattgagacaagtcttgcgcagtactctttaactcagctgtgcgtgggcttcaatgggggcaaggactgcaccgccttgctccacctcttccatgccgccgttcaaagaaagctgccagatgtgcctaatccactacagatattatacatccggagtatcagcccctttcccgagcttgagcaatttctccaggatactatcaagcggtacaacctacagatgctggaagcagagggaagcatgaagcaggcactgggggagctgcaggccagacacccccagctggaagctgttctcatgggtactcgtcggaccgatccatacagctgctctctctgcccgtttagtcctaccgacccaggctggcccgccttcatgaggattaatcctctactggattggacgtaccgagatatctgggattttttgaggcagttgttcgtgccatactgtattctctacgaccgaggatacacatccttgggctccagagaaaacactgtgaggaatcctgccttaaagtgcctctcacctggcggtcaccccacctatagacccgcctacctgctggaaaacgaagaggaggagcgtaattcccggacctag

SEQ ID NO: 116503 - DNA, 513 bp, synthetic construct
  misc_feature 1..513: note = Description of Artificial Sequence: Synthetic coding sequence
  source 1..513: mol_type = other DNA
atgaagggtctgtttcagaatccagccgtgcaatttcattccaaggagttatatgtggctgcggacgaggccagtatagcccctatccttgccgaagcacaggcccacttcggacggcggctagggctaggctcatatcccgactggggatccaactattaccaggtgaagctcacgctcgatagtgaggaagaagggcccctggaggagtgtctggcctacctgactgcaagactaccccagggctcactcgtgccgtatatgccaaatgccgtggaacaggcctccgaggcagtgtacaagctggccgaatcagggaattacttgatgttccagacgccttcccgaagttgcatcagtgctgcttcaccactcagcctcagctggaacagcttctaccgaactctatctcgcgaacaggctattcctgaaaaccagatcgcctccccacccagtgaggctaaaggcgcagaagagccctggatgggcccttttccaggccaacaagggtag

SEQ ID NO: 116504 - DNA, 1473 bp, synthetic construct
  misc_feature 1..1473: note = Description of Artificial Sequence: Synthetic coding sequence
  source 1..1473: mol_type = other DNA
atgacttcacgagcgtcggaactttcccccggcaggtccgtgaccgccggtataattattgtgggggacgagatacttaagggtcatacccaagacactaatactttctttctgtgcaggaccctccggtcgttgggggtgcaggtgtgtcgggtatctgttgtgccagacgaagttgctacaattgcagctgaggtaacctcattcagcaatcgtttcacccatgtgcttaccgccggtgggatcggcccaacacacgacgatgttacttttgaggccgtggctcaggcctttggggacgaactcaagccccacccaaagttggaggccgctactaaagctctgggaggcgagggatgggagaaactgtccctggtaccttcatccgcgagactacactatggaacagacccctgcaccggccagccctttagattcccattggtgtctgtcaggaatgtttacctgttcccaggcattcccgaactacttcggagggtgcttgagggcatgaagggtttgttccagaaccctgccgtgcagtttcactcaaaggaactgtacgtagctgctgacgaggccagtatcgccccgattctcgcagaagctcaagcccatttcgggcggagactgggattgggcagttatccagattgggggagcaattactatcaggtgaagctgaccctggactccgaagaagaaggaccactcgaggagtgcttagcgtacctgacagcacgcttaccccaggggtcacttgtcccttacatgccaaatgctgtggagcaggcatccgaagcggtttacaagttagcggagagtggttccagcctcggaaaaaaagtagctggggcactgcagaccatcgagacttctctggcccagtacagtcttacccagctatgcgtggggtttaatggaggcaaggactgtacagcccttctccacttattccatgctgccgtgcagaggaagctgccagacgttcccaatccgcttcagatactgtatataagatcaatttctccttttcccgaactggaacaatttctccaggataccattaaaaggtacaaccttcagatgctggaagccgagggttccatgaaacaggctctcggtgaactacaggctcgacatccacagctggaggcagtgctaatgggcactaggcgcacagacccctactcttgcagcttatgcccattttcacctacagatccagggtggcctgcattcatgaggatcaatccactgctggattggacctatagagatatctgggacttcttacgacagctgtttgtaccttattgcattctttacgaccgtgggtatacctccctcggctcccgagagaataccgtgcggaatccagcactcaagtgcctgtcaccgggggggcaccccacttacagaccagcctacctgttggagaacgaagaagaggaacggaactcacggacgtag

SEQ ID NO: 116505 - DNA, 387 bp, synthetic construct
  misc_feature 1..387: note = Description of Artificial Sequence: Synthetic coding sequence
  source 1..387: mol_type = other DNA
atgctggaagctgagggctccatgaagcaagcgttgggggagcttcaagccagacatccccagctagaggctgttttaatgggcacacggcgcaccgacccatattcgtgcagcctgtgccccttttcccccacagaccccggctggcccgctttcatgaggattaatccccttctggattggacctaccgagacatttgggacttcctgaggcagttattcgtgccgtattgcattctttatgacagagggtacacatccctgggttcacgagaaaacactgtgcgcaaccctgccttgaaatgcctcagcccaggggggcatccgacttacaggcctgcctatctgctcgagaacgaggaagaagagcgaaattctcgtacctag

SEQ ID NO: 116506 - DNA, 885 bp, synthetic construct
  misc_feature 1..885: note = Description of Artificial Sequence: Synthetic coding sequence
  source 1..885: mol_type = other DNA
atgcaacctagctcctccactcccccactccacccttacagcacagacggactcatctttcccttcaatcctcaaggtcacactcaagacactaatacgttcttcctttgtaggaccctcagatcgttaggtgtacaggtctgcagagttagtgtggtcccagatgaggtggccaccatcgccgccgaggtaacaagtttttcgaatagatttactcacgtactgacagctggcgggattggacccacccacgatgacgtgactttcgaggcagtggcccaggcctttggcgatgagttgaagccacatcccaaactggaggccgcgacaaaagctcttggaggggaaggctgggaaaaactatccttggtacccagctcggctaggctgcactacgggaccgacccatgtactggccagcctttcaggttccctctggtttccgtccgcaacgtctacctgtttcctggcatccccgaactgctgagaagggtgttagagggcatgaaaggattgttccaaaaccctgccgtccagttccattctaaggagctgtatgtggccgccgacgaagccagtatcgcacctattctggcagaagctcaagcccactttggtaggagacttgggctcggctcctaccccgactggggtagcaactactatcaagtcaaactaactctggactccgaggaagagggtccccttgaagagtgcctggcttatctgactgctcgcctgccgcagggcagtctggtcccgtatatgccaaatgctgtggaacaagcctctgaggctgtatataagctggctgagtctggacgcgatctgatggaggaaggacattatgcccaaagccattggtggcaccctcggagccagtag

SEQ ID NO: 116507 - DNA, 1341 bp, synthetic construct
  misc_feature 1..1341: note = Description of Artificial Sequence: Synthetic coding sequence
  source 1..1341: mol_type = other DNA
atgacctccagggctagcgaattgtcccctggccggtccgtgactgccgggataatcattgtaggggacgagatcctgaaggggcacacacaggatacgaacacctttttcctatgtcggacactgcggtccctgggtgtccaggtgtgccgcgtgagcgtagtgccagacgaagtcgccaccatcgctgccgaagtcaccagcttttccaacaggttcacacacgtgctgactgctggtggcatcggccccacccacgacgatgtgacttttgaagccgtggcccaggcatttggcgatgagctcaagcctcacccaaaattggaagccgctacgaaagccttaggcggagagggatgggaaaagctgagcctggtgccttcgagcgcgcggctccattacggaaccgatccgtgcacgggccagcctttccgctttcctctggtgtctgtcagaaatgtatacctcttccctggaattcctgaactcttgagaagggtgctagaaggcatgaaaggtctttttcaaaatcctgccgtgcagttccactccaaagagttgtacgtggcagctgatgaggcttctatcgcccctattcttgccgaggcccaggcccacttcgggcgtaggctgggcctagggagttacccagactgggggagcaactattaccaggtcaagctgaccctggacagcgaggaggaaggccctttggaggaatgccttgcttatttaactgctcgtctgccacaaggtagcttagtgccctatatgccgaatgctgttgaacaggcctctgaggcggtgtacaagctggcagaatctggttctagccttggcaaaaaagtggctggagctttgcaaaccatagagaccagcctagcccagtatagcctaacgcagctttgcgtcgggtttaatggcgggaaggattgcacagccctactgcacctgtttcatgccgcggtccagcggaaactccccgatgtacccaatccattgcaaattctgtacattcggtcaatctccccgtttcctgagctggaacagttcctccaggacacgattaaacggtacaatctgcagatgctggaagccgagggtagcatgaagcaagctcttggggaactgcaggcaagacatccacaattggaagccgtcctaatggggaccagaagaactgatccttatagttgctctctgtgcccattctctcctacagaccctggctggccagctttcatgcggattaatccactgctggactggacctacagagatatttgggattttctccgtcagctatttgttccttactgcatcttgtacgacagggggtag

SEQ ID NO: 116508 - DNA, 1371 bp, synthetic construct
  misc_feature 1..1371: note = Description of Artificial Sequence: Synthetic coding sequence
  source 1..1371: mol_type = other DNA
atgggttgggaccttggtaccagactctttcagaggcaggagcagcggagccgactgtctcgaatctggctcgaaaagacgagagtgtttttggaaggatccacccgtacccctgcactgccacactgtctcttttggttgctgcaggtgccctccacacaggaccctcttttcccgggctatggccctcagtgtcccgtggatcttgctggcccaccctgcctgaggccactgtttggcgggttaggcggctattggcgggcgctgcaacgaggtcgcgaaggacgcacaatgacaagccgggctagcgaattatccccaggaagatccgtcaccgccgggatcatcatcgtaggcgacgagatacttaaggggcacacccaagataccaacacatttttcctatgcagaaccctccggtccctgggggttcaggtatgtagagtgagcgtagtacctgatgaagtcgcaacgattgccgcagaggtgactagcttctctaacaggtttactcacgtattgaccgctggtggcattggaccgacacacgatgacgttacttttgaggccgtcgcacaggcctttggtgatgagctcaagccccaccccaagctcgaggcagctacaaaggcgctgggaggcgaggggtgggaaaagctcagcctcgtcccatctagcgcaaggctgcactacggaacagacccgtgcacaggacagccgttcagattcccgctggtaagcgtacgcaatgtttatctctttccaggtatccccgagcttctcagacgggtgctggagggcatgaaagggttgttccagaatcctgccgttcaattccacagtaaagaactctatgtcgccgccgatgaggcatccatcgctcctattctagccgaagcccaggctcactttggcagacgactcggccttggttcatatcctgattggggctcaaactattatcaggtgaaactgaccctggatagcgaggaggagggaccgctggaagaatgtctcgcatatctgactgccaggctgcctcaagggtctctggtgccttatatgccaaatgctgtggagcaagcctcagaagccgtgtataaactcgccgagagcggatcctcactcggcaaaaaggtggctggagcgctccagaccattgagacgagcctcgcacagtactccctgacacagttgtgtgtgggcttcaatggcggcaaggactgcaccgccctgctacatctttttcacgccgctgtacagagaaaactccccgatgtgcccaacccattgcagattctgtacatccggtcaatcagtcctttccctgaattagagcagttcctccaggataccataaagcggtactag

SEQ ID NO: 116509 - DNA, 1017 bp, synthetic construct
  misc_feature 1..1017: note = Description of Artificial Sequence: Synthetic coding sequence
  source 1..1017: mol_type = other DNA
atgcaacccagctcttcaaccccaccactccacccatatagtacagatggactcattttcccatttaacccccagggccatacacaggacacaaataccttcttcctgtgtcgtactcttaggtcactgggcgttcaggtatgcagagtctccgtcgtgccagacgaggttgcgactatcgcagcagaggttacttcgttttcgaataggtttacccacgtgctcaccgctgggggaataggccccacccacgacgacgttacgtttgaggcagtggcccaggcattcggcgacgagctgaagccacaccccaagctggaggcagccaccaaggcactcggtggcgaaggttgggagaagctcagtctagtcccaagcagcgccagactccattatggtaccgacccgtgtaccggccagccctttagatttcccctcgtctccgtgcgcaacgtgtacctctttcccggcatccccgaactcctgaggagggtgttagaaggcatgaagggtttatttcagaaccctgctgttcaatttcacagcaaggagctgtacgttgctgcagacgaggcctcaattgctcctatacttgctgaagcacaggcccatttcggccgacgcttaggtctgggttcctatccagactggggatcaaattattaccaggtgaagcttacactcgacagcgaagaagagggccctctggaggagtgcttagcctacttgacagcccggctgccccaaggcagtctggtgccctatatgccgaacgccgtggagcaggccagtgaggctgtatacaagctggccgagtccgggaattacctgatgtttcagactccatctagaagttgcatctccgccgcctctcccctgtcgctgtcctggaattcattctatcgcaccttgtcgcgcgaacaagcaattccagagaaccagatagcaagcccgcccagtgaggccaagggggcagaagaaccgtggatggggccattccccggacagcaggggtag

SEQ ID NO: 116510 - DNA, 1461 bp, synthetic construct
  misc_feature 1..1461: note = Description of Artificial Sequence: Synthetic coding sequence
  source 1..1461: mol_type = other DNA
atgatacgtcgagtccttcctcacgggatggggagaggacttctcactaggagacctggaacacgccgcggcggctttagtctggactgggatggtaaagtctccgagattaagaagaaaatcaagtcaattctcccgggccggtcttgcgatctactgcaggacaccagccatctgcctccagagcactccgatgtcgtgatcgtcggggggggggtgttggggcttagtgtggcatattggctcaagaagctggagagtcggcggggcgctatcagggtcctcgtagtggagagagaccacacctactcacaggcctccactggcctctctgttggtggaatctgtcagcagttctctctaccggagaatattcagttaagcttgttctctgccagctttctgaggaacattaatgaatatctggcggtggttgatgctcctcctctcgacctgaggtttaatccatcaggataccttctattggcaagcgaaaaagatgctgctgcaatggagagtaacgtgaaagtgcagcgccaggagggcgctaaggtcagtctgatgtctcccgatcagctcaggaacaagtttccctggatcaatacagagggcgtagcactggcttcatacggtatggaggatgaggggtggtttgatccatggtgcctgctgcaggggctccgacgcaaggtccagtccctgggagtgcttttctgccagggtgaggtgactcggtttgtttctagctcacagaggatgcttacgactgacgacaaggcggtggttctaaaacgaatccatgaagtgcacgttaagatggaccgctctctggagtaccagccggttgagtgcgcgattgtgatcaacgcagccggcgcttggtccgcacagatagcagccctggccggggtgggggaaggacctccgggaacactgcagggcacaaaactgccagtggagcctcgcaaaagatatgtatacgtgtggcactgcccccaggggcctggactcgaaacacctttggtggcagataccagcggagcctactttcgccgcgaggggctgggcagtaactacctgggaggacgatctccgacagagcaagaggaacctgaccctgccaatctggaggtggaccacgacttcttccaggacaaggtctggccccacttggccctgcgggtgccagcctttgagactctcaaggtacagagcgcctgggctgggtattatgattataatacatttgatcagaatggggtcgtgggcccccatcctctcgtggtgaatatgtactttgctactggattttctggacatggtctccagcaggccccaggaatcggtagggctgtggccgaaatggtgctcaagggtagatttcaaacaattgacctgagcccgtttctcttcacccgcttctacttaggcgagaaaatacaagaaaataatatcatatag

SEQ ID NO: 116511 - DNA, 951 bp, synthetic construct
  misc_feature 1..951: note = Description of Artificial Sequence: Synthetic coding sequence
  source 1..951: mol_type = other DNA
atggagagcaatgtgaaagtgcagagacaagagggagctaaagtgagcctgatgtctccagaccagcttagaaataagttcccttggatcaataccgaaggggttgcccttgcgagttacggaatggaagacgaaggctggtttgacccatggtgcctgctgcaggggctacgaaggaaggtccagtcattgggcgttctcttctgccaaggtgaggtaacacggtttgtgagctccagtcaaagaatgctgaccaccgatgacaaggccgtagtgctcaagcggattcacgaggtgcacgtgaagatggacagatccttggagtatcagcctgttgagtgcgcgatcgtaattaacgcagctggggcttggtccgcacaaatagccgccctggctggagtaggcgagggacccccagggaccctgcagggtaccaagctccctgtagagccccggaaaagatatgtgtatgtttggcactgcccacagggacccggtctcgagacaccactggttgctgacactagcggagcttatttcagacgggaaggcctcggatctaactacctgggcggccgcagccccacagagcaggaggaaccagacccagccaatttggaagtcgatcacgatttttttcaggataaggtgtggccccaccttgcgctgcgcgtccctgctttcgagactttaaaagtgcaatctgcctgggcaggctactacgattacaacacgttcgatcaaaatggcgtagttgggccacatcctcttgtcgtaaatatgtattttgctacaggcttctctggccatggtcttcagcaggccccgggtattgggagagctgttgcggagatggtgcttaagggccgcttccagacgatagacctgagtcctttcttgttcactcggttttatctcggggaaaagattcaggaaaataacatcatttag

SEQ ID NO: 116512 - DNA, 1419 bp, synthetic construct
  misc_feature 1..1419: note = Description of Artificial Sequence: Synthetic coding sequence
  source 1..1419: mol_type = other DNA
atggctcataccgggagaactgtggggcggctgggagaaggtgactgggacggcaaagtgagcgagattaaaaaaaaaatcaagagcattttgccaggtcgtagctgcgatttgctgcaggacacaagccatctgcctcctgagcactccgacgtggtgatcgtgggcgggggtgtcctgggcctgagtgtggcgtattggctgaaaaagttggaatctaggcggggggctattcgggtgctagtcgtggaacgagaccacacatattcacaggcctcaacaggcctatctgtgggcgggatctgccagcagttttctctaccagagaacattcagctgagtctgtttagtgcctcatttctgcggaacatcaatgagtatcttgcagtcgtggacgctcctcccttggacctgagatttaatccgagcgggtacctgttgctggcttctgagaaggacgctgcagctatggagagtaacgtgaaggtgcagaggcaagagggtgccaaagtctccctgatgtcacccgaccaactgaggaataagtttccgtggatcaatacagaaggggtggcgttggcttcttatggcatggaggacgaagggtggttcgatccatggtgcctgttgcagggcctgcgacgtaaggtacagtctctaggcgtactcttttgccagggcgaggtcacacgcttcgtcagcagtagtcagcgtatgttgaccacagatgacaaggctgtcgtcctcaagcggatacatgaagtgcacgtgaagatggatcggagcttagaatatcagccagtcgagtgtgccattgttattaacgccgcgggtgcatggtccgcccaaatcgctgctctagccggggttggagagggccctccaggaacgctccagggcaccaagttgcctgtagagcctcgaaaacgctacgtgtacgtgtggcattgcccccagggtcctgggttggagacacctctggtcgcggacacatcaggagcatatttcaggagagagggacttggaagtaactacctaggcggacggtctccaactgaacaagaagaacccgatccagcaaacttagaggtggaccacgatttttttcaggacaaagtctggccccacttagcactcagggtgcccgcctttgaaacgctcaaggtgcaatctgcatgggccgggtattatgactataacacgttcgaccagaacggagtggttggcccccacccactcgttgtgaacatgtattttgcgactggcttctcgggccatgggctccagcaggctccaggcatcggacgtgccgtggctgagatggtgttaaagggacggttccagaccattgacctttctccgttcctgttcacacggttttatctaggtgaaaagatacaggagaacaacataatctag

SEQ ID NO: 116513 - DNA, 501 bp, synthetic construct
  misc_feature 1..501: note = Description of Artificial Sequence: Synthetic coding sequence
  source 1..501: mol_type = other DNA
atggcccagcggctgctgttgagacggttcctagcatcagtaatctctagaaagccatcacagggccagtggccccctcttacgtccagagccttgcaaactccacagtgtagtcccggaggtctcactgtgacccccaacccggcccggaccatttacacaacccgcatcagtctgacaacattcaatattcaggatggccccgacttccaggaccgggttgtcaacagcgagactcccgttgtagtggacttccatgcacaatggtgtggaccgtgcaaaattctaggcccacggcttgagaaaatggtggctaaacaacatggaaaagtggttatggccaaggttgacatcgacgaccacaccgacttggctatcgaatatgaagtgtcagcagtccctactgtactggccatgaaaaatggagacgtggtggataagtttgtcggcatcaaggacgaggatcaactggaggcattcctgaaaaagctgatcggctag

SEQ ID NO: 116514 - DNA, 2055 bp, synthetic construct
  misc_feature 1..2055: note = Description of Artificial Sequence: Synthetic coding sequence
  source 1..2055: mol_type = other DNA
atgggcctctcggcagctgctccactgtggggtccccctggcttactcttggccattgcgctccatccagccttatctgtgcccccccggagggattattgcgtgctgggtgccggcccagccggcctacagatggcttatttccttcagcgcgcaggtagagactatgcggtttttgaacgggccccaagacccggatctttcttcacccgttacccgagacataggaagctgatcagcatcaacaaacgatacactggaaaagccaatgcggaattcaaccttcggcatgattggaattccttactctcccatgaccctaggctgctctttagacattactcaagggcatacttcccggacgcccgtgatatggtgagatacctaggcgacttcgccgacactctgggactgagggtgcagtacaatacaaccattgctcatgttaccctcgacaaggaccggcaggcttggaatggtcattactttatactgaccgaccaaaaaggccaggttcaccaatgtagcgtactcttcgtcgccacggggctatctgttccaaatcaggtagacttcccagggtctgaatatgctgaggggtacgaatctgtatccgtggatccggaggattttgttgggcagaacgtgctcattttgggtaggggtaatagcgcttttgaaacagcggaaaatattctcggcgtgactaactttattcatatgctgtcaaggagcagagtgcgcttgtcttgggctacccattatgtgggcgaccttcgtgccatcaataatgggctactggatacataccagttaaaatcactggacggccttctggagtcagatctaactgacctggctatccttaaagactccaagggcaaattccatgtgactccaaaatttttccttgaggaagccaatactaaccagagcgctgatagtataaccctgccacaagacgataatgacaactttgctatgcgggtgccgtatgatcgcgtgatccgatgcctaggctggaatttcgatttctctatcttcaataaatctttgcgactaaacagcggaaacgccttcggaaagaaatatccccttatcagggctagttacgaatctaaagggtccagaggcttattcatcctggggacagcttcccactcagtcgattaccgaaagagcgccggtggatttatccatggtttcagatacaccgtccgtgccgtgcacaggttattggagcaccggcatcattccgtgacctggccagccacagagctgcctattacacagctcacctcaagcatcgtgagaagagtgaacgaagcttccggactataccagatgtttggggttcttgccgatgtaatcttgctgaaggagaactcaactgccttcgagtacctcgaagaatttccaattcagatgctggcacagctggaaaccttgacagggcgcaaggcgaagcatggtttgttcgttatcaacatggagtacgggcgcaacttcagcggcccagacaaagatgtgtttttcgacgatcgcagtgtgggtcacacagaggacgcatggcagtctaatttcttgcatcccgtcatttactattaccgctacttaccaactgaacaggaagtcaggtttcgacccgctcattggccacttccacggccaaccgcaatccaccacatcgtggaagatttcctgactgactggactgcacctatcggtcacattctcccattgcgccggttcctggagaattgtctggataccgatctgaggtctttttacgcggagtcctgtttcctcttcgcactgaccagacagaagttgccccctttctgccaacagggatacttacgcatgcagggcctcgtgtccactgaatccctctggcaacaccgcgtggaaagccgactgctccgagactacgctccaacgggccgccgactggaagactcttctcagcagctaggagatcaagagcctctgggcagtcccctagcccctggccctctggcacagtccgtggacagtaacaaggaggagctgtag

SEQ ID NO: 116515 - DNA, 2055 bp, synthetic construct
  misc_feature 1..2055: note = Description of Artificial Sequence: Synthetic coding sequence
  source 1..2055: mol_type = other DNA
atgggcctgtctgctgctgcccccctctggggccctcccggactgctcctggcgatagctttacacccagctctgagcgtgcctcccagaagggactattgcgtgctgggcgcagggcctgcagggcttcagatggcttattttctccagcgcgccggccgggactatgcagtgttcgagcgggcgccccggccaggatcgtttttcactcggtaccccagacaccgtaaactgatttctattaacaagaggtatacagggaaggccaatgcagagttcaatttgaggcacgactggaactcactcttatcacacgatcccagacttctatttcgccattatagcagggcatattttcccgacgcccgcgacatggtgaggtatttgggcgactttgctgacacactcggattgagggtgcaatataacactacaatcgcccacgttacgttggacaaggatcgacaggcctggaacgggcactacttcatcctcacagaccagaagggtcaagttcaccaatgctctgtgctgtttgtagccacggggctgtcagtgccaaaccaggtcgactttcccgggtcggaatacgccgagggctacgaatctgttagtgtcgaccctgaggacttcgtgggccagaacgtcctaatattggggagagggaacagtgccttcgagaccgcagagaacattttgggtgttacaaactttatccacatgttgtcccggtctcgtgtgcggctgtcatgggctacgcactatgttggcgatctgcgggctattaacaacggcctccttgacacttatcagctgaagagtctggatggcttgctggagtcagacctgacagacctagctatactcaaggatagtaaaggaaaatttcacgtgacacccaaattcttcttagaagaggcaaacactaatcagtccgccgatagcattactttgcctcaggacgataacgacaattttgccatgagagtgccctatgatcgcgtgataagatgtctgggttggaattttgacttttccatcttcaataaatccttgcgcctgaatagcggcaacgctttcggcaaaaaatatccattaatacgggcctcctacgagtcaaaaggatcccgtggattatttatcctcggaactgccagccatagcgtagattataggaagtctgctgggggcttcatccacggttttcgttatacggtgagagcggtccatcgtctgcttgagcaccgccatcattccgtgacctggccagctaccgagttaccaatcacgcagctgaccagttccattgtgagacgtgtgaacgaggcatcgggtctataccaaatgttcggagttcttgcagatgtcatcctgctgaaggagaacagcacggcattcgagtatcttgaggaattccccatccaaatgctggcccagctcgagacgctgaccgggcggaaggctaagcatggcctcttcgtcatcaacatggaatacgggcgcaacttctctggaccagataaggatgtattctttgacgatcgcagtgtggggcacaccgaagacgcctggcaaagcaacttcctccatccggtcatctattattatcgctacttgcctaccgagcaagaggtcaggtttagacctgctcattggcctttacctcggcctacggcaatccaccatatcgtagaggacttccttactgattggacggccccaattggacacatcttacccttgcgccggtttctcgagaattgtctggacacagatctaaggtccttttacgccgaatcttgcttccttttcgctttgaccaggcagaaattgcctccattctgccaacaggggtacctgcggatgcagggattggtgtccaccgagtccctctggcaacatagggtagagagccgcttattgcgggattacgcgcccacagggcgccgcttggaggattcctcccagcagcttggcgaccaggaaccactggggtcccctttagcacctgggcctttagcacagtccgttgacagcaacaaggaggaactttag

SEQ ID NO: 116516 - DNA, 261 bp, synthetic construct
  misc_feature 1..261: note = Description of Artificial Sequence: Synthetic coding sequence
  source 1..261: mol_type = other DNA
atggggctctcagctgccgctcccctgtggggccctcccggtcttctcctggccattgcactccatccagcgctgagtgtgccgccacggcgggactactgcgtacttggggcgggacccgctggcctgcagatggcatactttctgcaaagagctgggagggactatgcagtgtttgagagagccccaaggccagggtccttctttacgagatatccgaggcatcggaagttgatctccatcaacaagagatacacttag

SEQ ID NO: 116517 - DNA, 729 bp, synthetic construct
  misc_feature 1..729: note = Description of Artificial Sequence: Synthetic coding sequence
  source 1..729: mol_type = other DNA
atgtttctgttgagtggggacccatgtttcaagacgccacccagcactgccaagagcattagcattcccgggcaggattcctcactccagctcacctgtaagggggggggaacctcgtccgggggcagcagcaccaattccctcacggggtcaagaccacccaaagccagacctaccatcctcagcagcggactgcccgaagaacctgaccagaatctctcctcccccgaggaagtgttccactccgggcacagccggaacagctcatacgcatcacagcagagcaagatctctggctatagtactgagcattccagatcttcgtcgctcagtgaccttacccatagaagaaacacttctactagctcatcagctagcggcggcctgggaatgacagtagaagggcctgagggctccgagcgcgagcatcgcccgcctgagaaacctcccagacctcctagacctctgcacctgtcagacagatcgtttagacgtaaaaaggactctgtcgaaagtcaccctacctgggtcgatgatacccgcatagacgcagatgcaatcgtggaaaagatcgtccagtcccaagattttaccgacggcagcaatacggaagacagtaatcttcgactgttcgtgagcagggacgggtccgccaccctgtctggcattcaacttgccactcgcgtatcgtctggagtctatgaaccggttgtgatcgaatcgcattag

SEQ ID NO: 116518 - DNA, 1155 bp, synthetic construct
  misc_feature 1..1155: note = Description of Artificial Sequence: Synthetic coding sequence
  source 1..1155: mol_type = other DNA
atggcgtttctcatgaagaagaaaaagttcaagttccagaccacctttacactggaggagctgaccgcagtgccattcgttaacggggtgttattctgcaaagtacggctattggatggcggggattttgtgtcactctctagcagagaggaggttcaggaaaattgtgtgcgatggcgaaagaggtttacctttgtttgcaagatgtcagctaatcccgccaccgggttattggacccttgcgtttttagagttagtgtgcggaaggagctgaagggaggaaaagcgtacagcaaattgggtttcgctgatctgaatcttgccgagtttgccgggtcaggctctaccgtgcgctgctgcctgctggagggctatgacacaaaaaacacgagacaggataatagcattttgaaggtcactattgggatgtttcttctgagcggcgacccctgtttcaaaacaccaccttccacggctaagtctatttccatccctggccaagactcgtctttgcagcttacttgcaaaggagggggcacttccagcggaggatccagtaccaattctttgactggttcaaggcctcccaaagccagaccaacgatactgtcttcaggactgccagaagagcctgaccagaacttatcatcgccagaagaggtgtttcatagcggccactcacgaaattctagttacgcttcacagcagtccaaaattagcggctacagtaccgaacactcaagatcttctagcctgagtgacttaacacatagaagaaatacttctacaagctcctcagcctccggcggactgggaatgactgtggaaggcccagagggatctgagagagaacaccggcccccggagaagcccccacgccctcctcgccccttacatctgtctgacagatccttcaggcgaaagaaggacagtgtggaatcacaccctacatgggtggacgacacgagaatagacgcggatgcgatcgtggaaaaaatagtccagagccaagacttcaccgatgggagcaacactgaagattctaacctgaggttattcgtttctcgggacggtagcgccaccctcagtggtattcagctggcaacccgcgtctcatcgggcgtctacgaacccgtggtcatcgagtcacactag

SEQ ID NO: 116519 - DNA, 435 bp, synthetic construct
  misc_feature 1..435: note = Description of Artificial Sequence: Synthetic coding sequence
  source 1..435: mol_type = other DNA
atgtactctgagattcaaagggagagggccgatatcggcggtctcatggcacggcccgagtatcgggaatggaatcctgagctcattaaacctaaaaaactgcttaatcccgtcaaggcatcgcgtagccaccaagaactacatcgagagctgctgatgaaccatagaagggggctgggcgtggatagtaagcctgagctacagcgagtgttggaacatcggcggcgaaatcaattgattaagaagaaaaaggaggagcttgaggcgaaacggctgcagtgtcctttcgagcaagagttactaaggcgacagcaacgattgaatcagcttgagaaaccccctgagaaggaggaggaccatgcacctgagttcatcaaagtgagagaaaacctgagacgtatcgcaaccctcacgtccgaggagcgagagttgtag

SEQ ID NO: 116520 - DNA, 435 bp, synthetic construct
  misc_feature 1..435: note = Description of Artificial Sequence: Synthetic coding sequence
  source 1..435: mol_type = other DNA
atgtacagtgaaattcagagggaaagagctgatatcggtggccttatggctaggcctgaatacagagaatggaatcccgagctcatcaaacctaagaagctgctgaacccagttaaagcttcaagaagtcatcaggagctgcaccgagaactgctcatgaatcacaggagaggtttgggggtggactctaaacctgagctgcagcgagtgctggagcacaggagaagaaatcagcttatcaaaaagaaaaaagaagagctagaggccaagaggctgcagtgcccgttcgaacaggaattgctgcggcggcaacagcgcctgaatcagctcgagaagccacctgaaaaagaggaggaccatgcgcctgagttcatcaaagtccgcgagaacctaagaagaatagcaaccctgacaagtgaggaacgggaactctag

SEQ ID NO: 116521 - DNA, 519 bp, synthetic construct
  misc_feature 1..519: note = Description of Artificial Sequence: Synthetic coding sequence
  source 1..519: mol_type = other DNA
atggcccagcgccttggggagtgggctcgcggaccctctgacgcaaccggcctttatagagcagtgctcctgcgctctgcggctatgtactccgagatccaacgtgagcgcgcagacataggagggttgatggcacgccctgagtaccgggagtggaacccggaactcataaaacctaagaagttgctgaatccggtgaaagcgtctcgatctcaccaggagctgcatagggagctgctcatgaatcaccgccgggggctgggagtcgattccaaacccgaactgcagcgcgtgctggaacatagaaggagaaatcagctgattaaaaagaagaaagaggagctggaggctaaaagactccagtgcccctttgaacaggagctcctgagaagacagcagagactgaatcagctggagaagccccctgagaaggaggaggaccacgcgcctgagttcattaaggtgcgggaaaatttgagacgcattgctacgctgaccagcgaggagcgcgaactctag

SEQ ID NO: 116522 - DNA, 408 bp, synthetic construct
  misc_feature 1..408: note = Description of Artificial Sequence: Synthetic coding sequence
  source 1..408: mol_type = other DNA
atgtattctgagatacaacgcgagcgtgcggatatcggaggtctcatggccagacccgagtacagggagtggaatcccgaactgatcaagcctaaaaagttgctcaacccagtcaaagccagcaggagccatcaggagctgcatagagaacttctgatgaaccaccgtagaggtcttggagtagattctaagccagaattgcagcgcgtgctggaacaccgacgcagaaaccaattaatcaaaaagaaaaaggaggaacttgaggcaaagagactgcagtgtccatttgaacaggagctcttacgaagacaacaaagactgaatcaggtcggggatggccatccggcaggcacaactcacccaccagggctgagttccagagaggaactctgttgcggccatagttag

SEQ ID NO: 116523 - DNA, 318 bp, synthetic construct
  misc_feature 1..318: note = Description of Artificial Sequence: Synthetic coding sequence
  source 1..318: mol_type = other DNA
atgtattccgagatccagcgggagagagcagatatcggagggttgatggctcgacctgaatatcgggagtggaatcccgagctgattaaaccaaagaaacttcttaatccggtgaaggctagccggtcccaccaggagctgcatagagaactgctgatgaaccatcgcagaggccttggggtcgactctaaacctgaacttcagcgagttctggagcacaggcggcgaaaccaattaataaaaaagaaaaaggaggagcttgaggccaagagactgcagtgtccctttgaacaggagttgttaagaaggcagcagtag

SEQ ID NO: 116524 - DNA, 528 bp, synthetic construct
  misc_feature 1..528: note = Description of Artificial Sequence: Synthetic coding sequence
  source 1..528: mol_type = other DNA
atgggcgcagcccaggggaagaagaagacatatagccctcaagctcgattccactcagaaaacgaaaagcaaagaaggaacgggagtgccgctatgtattcggaaatccagagggagcgtgctgacataggaggattgatggcacggcctgaatacagggagtggaaccccgagctgatcaagccaaagaagctgttgaatcccgtgaaggcgtcccgttctcaccaggaacttcatagggaactgcttatgaatcataggcgaggtctgggcgttgatagcaaaccagagctccagagggtcctggaacataggagaaggaaccaactaatcaagaagaagaaagaggaactggaggccaagcggctccagtgccctttcgagcaggaactcctgcggcgacagcagcggctgaaccaactcgaaaaaccacccgaaaaggaggaggatcacgcaccggagttcatcaaggtaagagagaacctgcggaggatcgcaacactgactagtgaggaaagggagctgtag

SEQ ID NO: 116525 - DNA, 789 bp, synthetic construct
  misc_feature 1..789: note = Description of Artificial Sequence: Synthetic coding sequence
  source 1..789: mol_type = other DNA
atggccccaggctccccacctggccccgccattgcgactatgaaactcaatgagcggtccttagctttctacgccacctgcgatgcacctgtggacaatgccggctttctgtataaaaagggtggccgacacgccgcctaccaccgcagatggttcgtgttgagagggaatatgctgttttacttcgaggatgccgcttcgcgcgagcccgtgggtgttattatcttagaagggtgtactgtggaacttgttgaggctgccgaagaattcgcctttgcagtgcgattcgcgggtactagggctaggacctacgtcctagctgctgaatcccaagacgcaatggaaggctgggtgaaagcactgtctagagcctcttttgattacctacgactcgtggtccgcgaacttgaacagcaactggcagccgtgcgcgggggcgggggaatggccctcccccagccacagccacaatcactacctctcccacctagtctgccatccgcgctggctcctgttcccagcttgccttcagcccctgcgccggtgccagccttgcccttgccgcggaggcccagtgcactgccacctaaagaaaacggctgtgccgtttggtcgacggaggccacgttccggccaggaccagagcctccccctcctcccccccgccgacgcgccagtgccccacatggccccctcgacatggcacctttcgcaagacttcatgaatgttacgggcaggagatccgggccctccggggacaatggctctcctcgcgcgtccaaccttag

SEQ ID NO: 116526 - DNA, 750 bp, synthetic construct
  misc_feature 1..750: note = Description of Artificial Sequence: Synthetic coding sequence
  source 1..750: mol_type = other DNA
atgaaactgaacgagcggagcctcgctttttacgccacgtgcgacgcacccgtggataacgccggctttttgtataaaaagggaggcaggcatgctgcataccaccggcgatggtttgtgctgaggggaaatatgctgttttatttcgaagatgctgcctctcgcgaacccgtcggcgtgatcattctcgaggggtgcaccgtagagcttgttgaggccgccgaggagtttgcctttgccgtgagattcgccggaaccagggcacggacttacgttctggctgccgagtcacaggacgcgatggaggggtgggtcaaggctctcagcagagcaagcttcgactacctgcgcctcgtcgtgcgagagttagaacagcaattggctgcggttagaggcggtggcgggatggccctgcctcagccacagccacagtccctgcctctgcctccaagcctgcctagcgctttggccccagttccatcactcccctctgccccagcacccgtaccggctcttccccttccgagaaggccatccgccctgcctcccaaggagaatggctgtgccgtgtggagcactgaggctacttttcggcctggcccggagccacccccccccccgccacgacgccgggcatcggcccctcacggtccgcttgacatggccccttttgcccggctgcacgagtgttatgggcaggaaattagagctctccgtggccagtggctctctagtagggtccagccctag

SEQ ID NO: 116527 - DNA, 267 bp, synthetic construct
  misc_feature 1..267: note = Description of Artificial Sequence: Synthetic coding sequence
  source 1..267: mol_type = other DNA
atgaagctgaacgaaaggtccctggctttctatgccacttgtgacgccccagtcgataacgccggcttcctttacaagaagggcggacgacatgcggcgtaccatcgccggtggttcgtcctgagaggcaatatgctcttctatttcgaggacgctgcctcgcgggaaccggttggagtaatcatattagtggccgtcgccttgtggccgcgggctctgtcagtgtctccgtggtggttatctcaagggagccctgacaccccttag

SEQ ID NO: 116528 - DNA, 849 bp, synthetic construct
  misc_feature 1..849: note = Description of Artificial Sequence: Synthetic coding sequence
  source 1..849: mol_type = other DNA
atgcaggcatcctgtacgagacgtgtcggcggaactagacctactaccggagcaggcagctgctgtgccggcacgtgcagcagtacttcacgaaccctgcctgccgttagtccctgggcttcctctagctggcgcgccgccttgtggtcttggtggagacctccacgatcaagtcctagcctgtgcgctctgagggggcccgggcgtgcgcctacatgctggccccttcgcgttcggatgccctggcgcgccggatctagaccttgtagggtgcctgcctccacgacttgcggttggtggtgcgcctcctggagcagctcttggagactttatgtggcgggcgtagcttggccctgtcccagcccatcaccctcaccctgtccctgcccaagaccatgccctctgccatggccacagtctcacccatgcctgctgccccaacctcgatcccagccctgcccctgccccgccggccccgtacctagcaggccacgccgtatggccgcactgagcggggccttaaggccacctagcggtctcgacccaagcccgttgcatcataggcttgccgccgggcctcggcaccctacaggcccatggacctggccaccctcaccaggctgtacgtccgccatggcccgacggtctggtccctgtgtagcctctggaagcgctgctggaagtagtccagaggcaacccgcgcgccagtgcttgggggccataagctgtatgccctctgggaccgccctggtcctggcgagactgggggcgcggaccccgaggggaaccatgggcagggttggcctcctgggccagagtggccaggtttcggcggctgtcggctttag

SEQ ID NO: 116529 - DNA, 354 bp, synthetic construct
  misc_feature 1..354: note = Description of Artificial Sequence: Synthetic coding sequence
  source 1..354: mol_type = other DNA
atgaagcttaatgagcgctcgctcgccttttatgctacgtgtgacgctccagtggataacgcaggctttctctacaaaaagggaggaaggcatgctgcctatcatagacggtggttcgtgctgagggggaacatgctgttttatttcgaggacgccgccagtagggagccagtgggcgttataattctggagggttgtaccgtcgagctggtggaggctgccgaggaatttgcttttgccgtaagatttgcagggacacgcgcccggacctatgttctggccgccgaaagccaggacgccatggagggatgggtcaaagcactttcccgggcttcttttgactatctgagatag

SEQ ID NO: 116530 - DNA, 750 bp, synthetic construct
  misc_feature 1..750: note = Description of Artificial Sequence: Synthetic coding sequence
  source 1..750: mol_type = other DNA
atgaaattgaacgagaggagcctcgcgttttatgcgacttgtgacgcccctgtcgacaacgctggtttcctgtataagaaagggggccgacacgccgcttaccacaggcggtggttcgtgctcagaggcaacatgctgttttacttcgaagacgccgcttcgagagaacccgtgggcgtgatcatcttggagggctgcacagtcgaacttgtggaggctgcggaggaattcgcttttgctgttagattcgctgggaccagagcacgcacttatgtgctcgcagccgagagccaagatgccatggaagggtgggtaaaagccctgtccagagccagcttcgattacctaaggttagtagtcagggagttagaacagcaactcgccgctgtgcggggaggtggcggaatggccctccctcagcctcagccccagagcctacccctgccgccctctctcccctccgcattggcccccgtcccctcattaccatcggctcccgcccccgtgcccgcgttgcctttgcctagacggccgagcgccctccctccgaaggaaaacggctgcgcagtgtggtctacggaggccacgtttaggcctggacctgagcccccaccaccgccgccaagacgaagagcaagtgcacctcatggaccccttgatatggcgccctttgcgcgcctccatgaatgttatggtcaggagattcgagccctgaggggccagtggcttagcagcagagtacaaccctag

SEQ ID NO: 116531 - DNA, 750 bp, synthetic construct
  misc_feature 1..750: note = Description of Artificial Sequence: Synthetic coding sequence
  source 1..750: mol_type = other DNA
atgaaactgaacgagcggagcctagccttttatgccacatgcgacgccccggtggataatgcgggcttcttgtacaaaaaaggagggaggcatgcagcgtatcataggcgttggtttgtgcttaggggcaatatgctgttctacttcgaggacgccgcctctagggagccggtgggcgtgatcattctggaaggctgcacagttgagcttgtggaggccgccgaggagtttgcatttgctgtaaggtttgctggtaccagagctagaacttacgtgctggctgccgaatcccaggacgctatggagggttgggttaaggctctgtcacgggcaagctttgactacctaagattggtggtgagagagctggaacagcaactagccgcggtgagaggaggaggaggtatggccctgccccagcctcagccccagagtctaccactgccccctagcctcccctccgccctggcaccggtgccaagtctgccttctgcacctgccccagttccggccctgccattgccccggcggccatcagctcttccacccaaggagaatggctgtgctgtgtggagtaccgaggcgacgtttaggcccggccctgagcctccccccccaccacctcgacgtcgggcctctgcccctcatggccctctggacatggctccttttgcccggctccatgaatgctacggacaggaaatcagagccttacggggccagtggctgtctagcagagtacagccctag

SEQ ID NO: 116532 - DNA, 225 bp, synthetic construct
  misc_feature 1..225: note = Description of Artificial Sequence: Synthetic coding sequence
  source 1..225: mol_type = other DNA
atgaaactcaatgagcggtccttagctttctatgccacttgcgacgctccagtggataacgctgggtttctgtacaagaaaggggggcgacacgccgcctatcacaggcggtggttcgtcctgaggggtaacatgctgttctactttgaggatgccgcttcacgagagcccgtgggcgtgatcattctggaaggatgtactgtggagctggtggaggctgcctag

SEQ ID NO: 116533 - DNA, 243 bp, synthetic construct
  misc_feature 1..243: note = Description of Artificial Sequence: Synthetic coding sequence
  source 1..243: mol_type = other DNA
atgaagctgaacgagaggagtctggccttttatgctacttgcgacgctccagttgataacgcaggattcctttacaaaaagggaggtcggcacgctgcttaccacaggcgatggttcgtgctgaggggcaacatgctgttttactttgaggatgccgcatcgcgcgaacctgtgggtgtcatcatcctagagggctgcaccgtagaattagttgaggccgccgaggagttcgcatttgcctag

SEQ ID NO: 116534 - DNA, 780 bp, synthetic construct
  misc_feature 1..780: note = Description of Artificial Sequence: Synthetic coding sequence
  source 1..780: mol_type = other DNA
atgaagctaaatgagcggtcggtcgcccattatgctctgtcagactcacccgccgatcacatgggatttctgagaacctggggcgggcctgggaccccacctactcctagtggcaccgggagacgttgttggttcgttttaaaaggaaacttactgtttagtttcgagagtagagagggccgggccccactcagtctggtggttcttgaaggctgcaccgtggaactggccgaagccccggtacccgaggaattcgcatttgcaatctgttttgatgcccccggcgtacggccacatctgttggctgcggagggacccgcagcacaggaggcatgggtgaaagtgctttccagggctagctttgggtacatgcggctcgtagtgagagagctggagtctcagctgcaggatgctagacagagtctcgcactgcagcggagaagcagttggaaatccgtggccagcaggtgcaagccacaggctccaaaccatcgggccgccggactggagaatgggcactgcctgtcgaaggattcaagtccggtgggcctggtagaggaggcaggctccagatctgcgggctgggggctcgctgagtgggagctgcagggtccagcctctctgttactcggaaaaggacagtctcccgtttccccagagacctcatgcttctcaactctccatgactggtatggccaggaaatcgtggagctcagacagtgttggcagaaaagggcacagggctcccatagcaaatgcgaggaacaggataggccttag

SEQ ID NO: 116535 - DNA, 327 bp, synthetic construct
  misc_feature 1..327: note = Description of Artificial Sequence: Synthetic coding sequence
  source 1..327: mol_type = other DNA
atgaaactgaacgagcgctctgttgcccattacgccctgtcagactctcccgctgaccacatgggcttcttacgaacatggggaggacccggaactcccccgacacccagcggaacagggcgcaggtgctggtttgtgctcaagggtaacctgcttttctcctttgaaagcagggagggcagggcacccctgtcattggtggtcctcgaaggttgcacagtggagcttgctgaagcccctgtgccagaagagttcgcatttgccatttgcttcgacgcacccggggtgcggccccacttgttagcggccgagggcccagctgcttag

SEQ ID NO: 116536 - DNA, 729 bp, synthetic construct
  misc_feature 1..729: note = Description of Artificial Sequence: Synthetic coding sequence
  source 1..729: mol_type = other DNA
atgaccatcccaggcggcactccttccttgaaaatcctgtggctgaatcaagagccggagattcaggtacggcgtttggacactcttctagcttgtttcaatttgtcctctagcagggaggaactgcaggcggtggagtctccattccaagcactgtgctgcctcctgatttatttgttcgtgcaagtggacacactgtgcctggaggacttgcatgcatttatagcacaggcactgtgtctccaaggcaaatcaacttctcaattagtgaatttacagccagattacataaaccctcgcgccgtgcagcttggctcattgttggtgcgaggtctcaccaccctcgttctggtgaactcagcctgcggatttccctggaaaacatccgacttcatgccatggaacgtcttcgacggaaagctgtttcaccagaagtacctccagagcgaaaaagggtacgcggtggaagttctattggaacagaatagatcgcggctcaccaaattccacaacttgaaagctgttgtctgtaaggcatgtatgaaagagaaccggaggattactggtcgagctcactggggatcccaccatgctggcagatgggggcggcagggctcttcgtatcatcgcaccgggagcggttatagtaggagcagtcagggccagccttggcgtgaccaaggccccgggagcaggcaatacgagcatgaccagtggcgaagatactag

SEQ ID NO: 116537 - DNA, 2733 bp, synthetic construct
  misc_feature 1..2733: note = Description of Artificial Sequence: Synthetic coding sequence
  source 1..2733: mol_type = other DNA
atgggagtgagggggttacaaggatttgtgggaagtacatgcccacacatctgtaccgtggtgaactttaaagagctggcagagcaccaccggtccaaataccccggctgtacaccaaccatagtggtagacgcgatgtgctgtctccggtattggtatacccccgaatcttggatttgtgggggacagtggcgagaatacttttccgccctccgcgacttcgtgaaaactttcacggccgccgggatcaaacttattttcttcttcgacggcatggtagagcaggataaaagagacgaatgggtgaaacggaggctcaaaaacaacagagaaatttctagaatttttcattatattaaatcacataaggagcagcccggcaggaatatgttcttcattcccagcggccttgccgtgtttactagatttgcgctgaaaactttgggacaggagactctctgctccctgcaagaggcagactacgaggttgcatcctacggactacagcacaactgcctgggaattctgggtgaggatacagattaccttatctatgatacatgcccttatttcagcataagcgaactgtgcttggagtcattagacaccgtcatgctctgtcgggagaagctttgtgagagcctgggactttgtgtcgccgatttgccactgctggcctgtctattaggcaacgatattatccctgaggggatgttcgaatcctttcgctataaatgcttgagcagctatacctcggtgaaagagaactttgataaaaaaggcaatattatcctcgcagtctctgaccacatctctaaggtgctgtacctataccagggggagaaaaagctggaagagattctacctctcggtccaaataaagctcttttttacaaggggatggccagctacctgctgccaggtcagaaatcaccctggttctttcagaaaccaaagggggtcatcacgctcgacaagcaagtgatttccacatccagtgatgcggagagcagggaggaagtccccatgtgctctgacgcagagagtaggcaggaggtgcccatgtgtaccgggcccgagagccgacgcgaagtgcccgtgtacacagactctgaaccccgtcaggaagttccaatgtgcagcgatccggagcccagacaagaagtcccaacctgtaccgggcctgagtctcgccgcgaagtgcccatgtgctccgatcccgagcctcggcaggaagtcccaatgtgcacaggacctgaagcacgtcaggaagtgccaatgtacaccgactccgagccaaggcaggaggttcctatgtatacagactctgaaccaaggcaggaggtgcctatgtataccggaagcgagccccgtcaagaggtccccatgtatacgggccctgagagccgtcaggaagtccccatgtataccggtccagaatctcggcaggaggtgttgattcggacggaccctgaatctcggcaggagattatgtgtactggacatgaatcaaagcaggaggttcccatctgcaccgaccccatctcgaaacaggaggattctatgtgtacacatgctgagattaaccagaagctgcctgtggccactgactttgaatttaagctcgaagctctgatgtgtacaaatcctgagataaaacaggaagatccaaccaacgtgggacccgaggttaaacagcaagtgaccatggtttctgacacagaaattctaaaggtggctaggactcaccacgtgcaagcagaaagttatcttgtgtacaacatcatgtcctcaggcgaaatagagtgctcaaatacgctggaggatgaactggatcaggcactcccaagccaggcatttatttataggcccattcgtcagcgcgtgtactccctactgctcgaagactgtcaggatgtaacttctacctgtctcgccgtcaaggagtggttcgtgtacccagggaatcccttacggcacccggacttagtccgcccactgcagatgaccatcccaggaggcactccgtccttgaaaatcctctggttaaaccaggaacccgagatccaagtcagacgtctcgataccctgttagcctgtttcaatcttagctctagcagagaagagctacaggccgtagagagccctttccaagctctgtgctgcctgctcatatacctgtttgtccaggttgacaccctatgtctcgaagacttgcacgcatttattgcccaggcactgtgcctgcagggtaagagcacctcccagctcgtcaacctgcaaccagattacatcaacccccgggccgtccagctggggagtctgcttgttcgcggtcttacaacccttgttctagtgaattctgcatgtggctttccttggaaaacttccgacttcatgccctggaacgtcttcgatggcaagctttttcatcagaagtatctgcaatcagagaaagggtacgccgtagaggtcctgctcgagcaaaatcgctcccgtctaaccaagttccacaacttgaaggccgtggtgtgtaaggcttgtatgaaggagaaccgtcgaataacaggtagggcgcattgggggtcacaccatgccggcagatggggtcgacaaggctcgtcttaccaccgaactggcagcggctactctaggagtagccagggccagccgtggcgggatcaaggccctgggtctcggcagtatgagcatgatcaatggaggcggtactag

SEQ ID NO: 116538 - DNA, 2802 bp, synthetic construct
  misc_feature 1..2802: note = Description of Artificial Sequence: Synthetic coding sequence
  source 1..2802: mol_type = other DNA
atgtttgggccgcgcgggtctacgagtgcaggcgcaggccgaaaggagatcctgagccgttcttcagtgatgggcgtgagggggctccagggcttcgtgggatcaacttgcccacacatctgtaccgtggtcaactttaaggaactggccgagcaccataggagcaagtatccaggatgcacccccacaattgtggtggacgctatgtgttgcctgcgttattggtacactcccgagtcatggatctgcggagggcagtggagggagtatttttctgcactccgcgatttcgttaaaacatttacagccgctggaatcaagcttatctttttctttgatggaatggtggagcaggacaaacgagatgagtgggtgaagagacgactgaaaaacaatagggaaataagccggatctttcattatataaagagccataaggaacaacccggtcggaatatgttcttcatcccttccgggctcgccgtatttacacggttcgccctgaaaaccttgggccaggaaacattgtgttccctgcaggaagcagactacgaagttgcttcctacggattacagcacaattgtctcggaattttaggagaggacactgattatttgatctacgatacgtgcccgtattttagcatctctgagctgtgccttgaaagcctggacacagtcatgctatgcagagagaaattgtgcgagtcactgggactgtgtgtcgctgatctcccacttctggcgtgtctgcttggaaacgacatcattcctgaaggcatgtttgaatcattccgctacaagtgcctgagttcctacacaagcgtgaaggagaacttcgataaaaagggtaatataatcttagctgtgagcgatcatatctctaaagtgctgtacctttatcaaggcgagaagaaactggaggagatcctgcctttgggacccaacaaagccctattttacaaagggatggcaagttatcttctaccaggacaaaaatccccctggttttttcagaagcccaaaggagtgatcacactcgacaaacaggtgatctccacaagtagcgatgcagaaagcagggaggaagtgcccatgtgcagcgatgctgagtcccggcaagaagtcccaatgtgcactggtcccgagagccggagagaggtgcccgtatacacagattccgagccaaggcaggaggttccaatgtgcagtgacccagaacccaggcaagaggtacctacatgcactggcccagaatccagaagagaagtgcccatgtgctccgacccagagccacgtcaagaagtgcctatgtgcactgggcccgaagcgcggcaggaggtgcctatgtacaccgacagtgaaccccggcaggaggtaccaatgtacacagactccgagccaagacaggaggtgcctatgtacactggctccgagcctaggcaggaagtgcctatgtatactggaccggagtcccggcaggaggtgccgatgtataccgggccagagagccgccaggaagtgctgattcggactgaccctgaatctcgtcaggaaatcatgtgcacaggacatgaaagcaaacaagaggtcccaatctgtacagaccccatcagcaaacaagaggactccatgtgtacacatgcggagattaaccaaaaattgcctgtcgcaaccgacttcgaatttaagcttgaagctctaatgtgtactaatccagagatcaaacaagaggacccgacaaatgtgggacctgaagtgaagcagcaggtgactatggtttctgacacagagatattgaaggtggcaagaactcaccatgtacaggcagagtcataccttgtttacaatatcatgagctctggtgagatcgaatgctccaatacgctggaagatgaactggatcaggctttaccctctcaggcctttatctatagaccaatccggcagagagtgtattccctgctccttgaggactgtcaggacgttacctctacctgcctggcagtcaaagagtggtttgtctaccccggaaatccattgaggcaccctgacctggtgaggcctttgcagatgacaatccccggggggacgcctagcctcaagatcttgtggctgaaccaggagcctgaaatccaagtgcggcgcctcgatactctgcttgcctgcttcaatctgagttcatcccgggaagagctccaggctgtcgaatccccgtttcaggctttgtgttgtttactgatttacctttttgtccaggttgatactctttgcctggaggacctccacgccttcatcgctcaggcactttgcctgcagggaaagagtacgagtcagctcgttaatctacagcccgattacataaatcctcgagctgtgcaacttgggtctctcctggtgcggggcctgacaacccttgtcttggtcaacagtgcctgcggctttccatggaagacctcagactttatgccttggaatgtgttcgacggcaaactgtttcaccaaaagtaccttcaatccgaaaaagggtacgctgtggaggtgctgctggagcagaaccggagtaggctgacaaaatttcacaatttgaaggcagtggtgtgtaaagcctgtatgaaggagaatcgcagaattactggtagggcccactggggctcccaccatgccgggcgctggggccgccaggggagcagttaccaccgaaccggctctggctacagtagatcttcccagggacagccgtggcgcgaccagggccccgggtctcgtcagtacgagcacgaccagtggcggaggtactag

SEQ ID NO: 116539 - DNA, 2769 bp, synthetic construct
  misc_feature 1..2769: note = Description of Artificial Sequence: Synthetic coding sequence
  source 1..2769: mol_type = other DNA
atggatcggcagatgatcctgagccgatcctctgtgatgggcgtccgtggcctgcaaggcttcgttggctcaacctgcccacacatatgcacagtggttaatttcaaagagctggctgaacatcatcgcagcaaatacccagggtgtactcccaccatagtagtggatgcaatgtgttgcctgaggtactggtatacaccggagtcatggatctgtgggggacagtggagagagtacttcagtgcgctccgcgatttcgtgaagaccttcacggcagctggcatcaaactgatctttttttttgacgggatggtggagcaggataagagagacgagtgggtcaaacgcaggcttaagaacaacagagagatctctcggatctttcactatatcaagtctcataaagaacagcccggccgaaacatgttttttatccctagcggccttgccgtttttacccggttcgccctgaaaaccttagggcaggaaacactctgtagcctgcaggaggcagattatgaagtggctagttacggactccaacataattgtctgggaattttaggggaagatacagattacctgatatacgacacatgtccatacttctccatctcagagctctgcctggaatccctcgacaccgtgatgctatgtcgtgaaaagctttgcgaaagtctgggcctctgtgttgccgacctgccgctgctcgcttgcctgctcggcaatgacatcatcccagaagggatgttcgagtcttttaggtacaaatgcctgtctagctataccagcgtcaaggaaaacttcgacaagaagggtaacattattctcgccgtgtcggaccacatttccaaggtcctctacctctatcagggcgaaaaaaagctggaggaaatcctgcccctcggacctaacaaagcactgttctacaaagggatggcttcttatttgctacccggccagaagtctccatggtttttccagaagccgaaaggagttataaccctggacaaacaggtaatcagtacttcgtcagacgctgaaagccgcgaagaggtgccaatgtgttctgacgctgaaagccgacaagaggtgcctatgtgtactgggccggagagtaggagagaagtgccggtctatacagatagcgaaccacgacaagaggtccctatgtgcagcgaccccgaaccccgacaggaagttcccacatgcaccggacccgaatctaggagggaggttccaatgtgctccgacccggagccgagacaggaggtccccatgtgtactggcccagaggcccgccaggaggtccctatgtacacagatagcgaacccaggcaggaagtgcccatgtacaccgacagtgagccaaggcaggaagtgcccatgtacaccggttccgaaccaaggcaggaggtgccaatgtatacaggtcctgagagtcgccaagaagtgcccatgtatactggacctgaatctcgccaagaggtcttgatacgcacagatcctgagtctaggcaggaaatcatgtgtacgggccacgagtctaaacaagaggtgcctatctgtacagatccaatcagcaagcaagaggacagcatgtgtacgcacgcagaaatcaatcaaaagctgccagtggccaccgacttcgaatttaagcttgaggcattaatgtgtaccaaccctgagatcaagcaagaggatcctaccaacgtgggtcctgaggtaaagcaacaagttacaatggtaagcgacaccgagatccttaaagttgcacgaacgcaccacgtccaggctgagagctacctggtttataacattatgtcctcgggagagatcgagtgtagcaatacattagaagacgagctcgaccaagccctgcccagtcaagcctttatctaccggccaatacggcagcgggtttacagcctcctgctggaagactgtcaggatgtaactagcacatgcctggccgtgaaggagtggtttgtttatcctggtaatccactgagacaccctgatctggttcgaccattgcaaatgaccatccccggtggcaccccctccttaaaaattttatggcttaatcaggagcccgagattcaggtacggagactcgatactctcttagcctgcttcaatttgtcatcttcgcgggaggaacttcaggctgtcgaatcccctttccaggctttgtgctgtctattgatctacctctttgttcaggtcgataccctgtgtctcgaagatctgcacgccttcattgcacaggccctgtgccttcaaggaaaatctaccagccaactggtgaaccttcagcctgactacattaatccccgcgcagtgcagctcgggtccctgctggttcggggtctgaccaccctcgtgttagtgaattctgcttgcgggttcccatggaaaacatctgatttcatgccatggaatgtcttcgatggcaagttattccaccagaaatacctgcagtctgaaaaagggtacgcggtggaagtcttgctggagcagaacaggtccaggctgaccaaattccacaacttgaaagccgtagtttgtaaggcctgcatgaaagaaaatagacggatcactggcagggcacactggggatcccatcacgccgggaggtgggggcgccaagggtcttcctaccaccggactggttctggctactcacggtccagccaaggacagccgtggcgggaccaggggcctggctctagacagtatgaacatgaccaatggcggcgttattag

SEQ ID NO: 116540 - DNA, 3291 bp, synthetic construct
  misc_feature 1..3291: note = Description of Artificial Sequence: Synthetic coding sequence
  source 1..3291: mol_type = other DNA
atgggagttcagggctttcaggagtttttggagaagagatgccccggcgccgtggttcccgtggatttactgaaactcgcaagaaccgtttctcgacagcagcagcaacagcacctgcataggcagctccctcctaccgccgccctagctccaggagctccacgcgccgctagaggctcagtcccgctgcagccccccctcccacctgctgccctgggtgcctactcgggcggagctggaccgatccgccatcaccacccggcccatcattttcaccaccacggccaagcacagcccgggctgcatcctccactgccaccacctccgccccctcagctgcctggcgctagggttctggttgacgctggaagtgccctacctcggttatatggaggctaccaaactgactgggtgtgcgggggacaatggaatgccatgctgggctacctgtccgccctgtgtcaagcttgtgcgtaccccggaggagacggcctggaactggtagtcatgtttcccgggggtctaggaaaggaccggttggcagagtggggaagaaggtgtcaggccgaaaggcagaccgcgcagctaattgtcggacatgtgggcaacaaagggacgcccccgccccgcgcctggttcctgccacctgcgtgcctgagccactgcgtgagactcgcgctaatacgatttcgggttaaggtgtttcagagcctggaggaccaccatctggaggtcgtggctttctttagagagaacggatttcatggcctcctcgcccatgactcagagtacgccctatataacatcccttcctactactccagccacgcactgaagctttcatggaacggaaagaatctcactaccaatcaatttctaatgcaggaagttgctaagcagctcggcctcaaacgaatgaacttcccaatttttgccgcattgttaggcaatcatattctgcccgacgaagatctcgctgcattccactggtcactgctgggaccggaacatccccttgcatcccttaaagtccgcgcgcatcagctcgtgttacccccctgcgacgtggttatcaaggcagtctcagagtacgtctcgtcaattaaggatccttctaatctagatgtggtcgggaaggacgtttttaaacagtcccagagccgtacagaagataaaatcgaacgatttaagaaagctgtagagtattatagcgtcacaactaagctatcaagtctgcccgttggcccgtcatttctcggttttcggaacaatcggcttggcaatcctcctctgccaaggaaccaggttgggacgatctcagccgggaagccaatgtttagccaccaggtgcctcagaaggtgaagtatccacctcctttccctgtcggccccaacagctccctcctgttctcttctcacgccttgggcgaatcacacgccttctccgaagaccctatgcttcagaattccccattcgccaactgggcagtgtcttatgactcaagtgcgtcacagtttccaaattatcttccctccaaggcatccccccctttaggcccagattcatctcattcttctagtagcgacggcgacgaaccaaatggagcttcttctgatcacatcacagaggccttccaccatcaaccagaatggggaaacccaaatcgagaccgaggcagctgggctcagccagtggacacgggtgtgagtgaagctagtttaggggatggcgaaccccatattccatcgctactcagcatgagtacccgaaatcacatggatattactatcccacctttaccgcccgtagcccctgaggttttgcgcgtggccgaacaccggcacagacgcggtctgatgtacccatatatttatcatgtgctcaccaagggggagatcaagatcccagtctgcatcgaggacgagtgtaatatggaactcccccccgccgccctgttatttcggagcgccagacaatacgtttacggggtcctgttttcactggcggaaacccagcgcaaaatggagaggctcgcgatgcgaagaaggcttcctgtcgaggtcccctcagtaatcctcaaggagtggagtgcctataagggcaagagcccgcagacgcctgagctcgtaagtgcactgacattccgggaatggacctgccccaatctgaagaagctgtggcttggcaaagccgtcgaggataagaataggcgaatgagggcatttctggcctgtatgaaatccgacactccttctatgttgaaccccgccaacgtgcctacacaccttttgctaatgtgttgcgtcttgcggtacatggtgcagtggcccggcggacgaatcttgcaccgacacgagctcgacaccttcctagcacaggccgttagcacacagttgtatgaacccgataggctgcaggaactgaaaattgagaagctcgatgccagaggtatccagctcgccgcccttttcatgagcggggtggatactgctctgtttgccaacgatgcttgcggacaaccagttccctgggaacactgctgcccctggatatacttcgacggaaagttgttccagagtaagctaatcaaagccgggcgggagagagtgtctctggtggagttatgcgacggccaggcagacctcgcaactaaggtcgaaaagatgcgacaatccattctcgaaggggtcaatatgaaccatcctcctccatcagccctgctcccatctcctacgttcgtgccccctatggttccctcactatatcctgtatcattgtattcacgcgcgatgggaagcatgccgctgcctccacagggccgctcacggggctttgccggcttgcacccgatacccccacaggggggtaagcttgaaattgccgggatggtcgtcgggcagtgggcaggcagtcggtcatcaaggggacgcgggtccttcgggatgcaggtggtcagcgtcggaggaccaggaaagggccacgggaaagagcagaccgggagaggctctaagggtcacaaaaagggcaataagcagggaagttccgacggtgtcagtaaatcactagaactccatcagggacgatctcggtctcaggtgaatggaaactctggtgccctgatcaaggaagaaaaatccgatcatcggttgcccgctcctagtcaatgtgcgctgtctcgagactctaatgagtgtaataacggaaatcggtatctccctatgaataacagagaaaagaaccacctgcaggagcagaagctggagactgtggcccaacggaaagaggattag

SEQ ID NO: 116541 - DNA, 717 bp, synthetic construct
  misc_feature 1..717: note = Description of Artificial Sequence: Synthetic coding sequence
  source 1..717: mol_type = other DNA
atgggggtgcagggctttcaggagtttctggagaagagatgtcccggagcagtggtgcccgtcgaccttctcaagttggctcgcacagtctcccggcagcagcagcagcagcatttgcacaggcagctgccacccacagcagcactagcaccaggcgctcctcgggctgcccgtgggagcgtacctctccagccgcctctgcccccagcagcccttggggcttattctggcggtgctggccccatccgccatcaccatcccgctcaccattttcatcaccacggacaagcccagcctgggctccaccctccactgcctccacccccccctccccagttgccaggagcacgtgtactagtggacgccggctctgccttgccccgcctgtacggaggataccaaacggactgggtgtgcggcggccagtggaatgccatgcttggttacctcagtgcactgtgccaggcttgcgcttaccctggaggcgatgggctcgagctggtcgttatgttccctggaggattggggaaagatcggttagctgagtgggggaggagatgtcaggccgaacgccagactgctcagcttatagtgggccacgtgggaaacaaaggcactccccctccaagagcgtggttcttgcctcctgcctgtctctcccattgtgtgaggctcgccttgattcgtttccgcgtgaaacaggcagccatgctgtag

SEQ ID NO: 116542 - DNA, 3408 bp, synthetic construct
  misc_feature 1..3408: note = Description of Artificial Sequence: Synthetic coding sequence
  source 1..3408: mol_type = other DNA
atggagacccaaaaagatgaggccgcacaggccaaaggggcagcagcatcgggttcgacccgagaacagacagcagaaaagggtgctaagaacaaagccgctgaagccactgaagggccgacatccgagccatccagctccggtccaggcagactaaaaaagaccgctatgaagctctttgggggaaagaaagggatctgtacactgccatccttctttggagggggtaggagcaagggaagtgggaagggcagctctaagaaaggcctgagcaagtccaagacacatgatgggttgtctgaggccgcacacggacccgaggatgtcgtctctgagggaaccgggttcagcctgcctctgcctgaacttccatgccagttcccatcaagccagagtgcccatggcgctttggagaccggcagccgctgtaaaacttctgtcgcgggtgctaccgagaaagccgtcgcagaaaaattccctagcatgcccaaacccaaaaaaggtcttaaaggtttcttcagttccatccgccggcatagaaaatcaaaagtgacaggggccgagcagtccgagcccggcgccaagggccctgagcgggtccgcgcacgcccccatgagcatgtgagcagcgccccccaggtcccctgtttcgaagagacatttcaggccccacgtaaagagaatgctaatccccaggacgctcccggtccaaaggtgagtcccacaccagagccctcaccccccgcaactgaaaaaatggcatgcaaagacccggagaaacctatggaagcctgtgcctctgctcatgtccagcctaaaccagcccctgaagccagctctctggaggagcctcattcccctgagaccggtgagaaagtcgttgcgggggaggtaaacccacctaatggccccgtgggcgatcccttgtccctactctttggggacgttacaagtctgaaatccttcgattcactcaccgggtgtggcgatatcattgcagaacaagatatggacagcatgaccgactctatggcaagcggcgggcagagggcaaaccgtgacggcacaaaacgctcatcctgtctggtaacctatcagggcggaggagaggagatggccctccccgatgatgacgacgaggaggaagaagaggaagaagaggtggagctggaagaggaggaagaggaagtcaaggaggaggaggaggatgatgaccttgagtatttgtgggagaccgcacagatgtatccgagacccaacatgaacctgggataccaccccacaacgtccccagggcatcatggatacatgctgctggaccctgtgagatcttatcctggcttggcccccggggaactcctcaccccacagtctgaccagcaagaatctgccccaaatagtgacgagggatactatgacagtaccacccctggtttcgaggatgatagcggcgaggcactgggactggtgcgcagagactgcctccctagagactcttactccggcgatgctctgtatgagttttacgaacctgatgactctctcgagaatagtccaccaggagacgactgtctctatgatttgcacgggcgaagctctgaaatgtttgatccttttctgaatttcgaacccttcctctccagcaggcctcccggtgccatggagacagaagaggagaggctggttaccatccagaaacaactgttatactgggagctgcggagagaacagcttgaggcccaggaggcgagggctagggaggcccatgcgcgggaggcacacgcaagggaggcctacacaagagaggcttatggcagagaagcgtacgcccgcgaggctcatacttgggaggcacatgggagggaggcccgcaccagggaggctcaggctcgggaagtgaggtgcagggagacacaggtaagggaaacccaggctcggcaggagaagcctgttctcgagtaccagatgagacctctgggtcccagcgtgatgggcttagctgccggggtgtccggcacttcacagattagccataggggcatcacaagcgcctttccgacgactgccagcagtgagcccgattggcgcgactttcgaccgctggaaaaacggtacgagggtacttgttcaaagaaagatcagtcgacctgtctgatgcagcttttccagagcgacgcaatgttcgagccagatatgcaggaagccaacttcggcgggagccctaggagagcctaccctacctatagtcccccggaagatcctgaggaagaagaggtggagaaagaggggaatgctaccgtctccttttcacaggccttggtcgaatttacctccaatgggaacctcttttcttccatgtcttgcagctcagatagtgacagcagcttcacccagaatctcccagagttgcctccaatggttacatttgacatagcagacgttgagagggacggcgagggcaaatgcgaggaaaacccagaattccacaatgacgaagatctcgccgcttccctggaggctttcgaactggggtattaccataaacacgcatttaataattaccattcccgcttctaccaaggtttgccctggggtgtctcttcactcccaaggtatctgggtctgcctgggctgcatcccaggccacccccagccgcgatggctctgaataggagatcaagatctcttgacacagccgagactctcgagatggagctaagtaattcccatctcgtgcaaggttacttggaatcagatgaactgcaggcgcagcaggaggactctgatgaggaggacgaagaggaagaagagggcgaatggagtagagatagcccactaagtctgtacaccgaaccccccggcgcctatgattggcccgcttgggcaccctgccctcttcccgttggacccggccccgcatggatcagccccaatcaacttgacaggccctcctctcagagtccataccggcaggcaacctgctgtattcctcccatgaccatgtcaatctcgctgagtgtgcctgaaagtcgcgcgccaggggagagcggtccacagctggcacgcccgagccacctccaccttccaatggggccctgttacaatctgcagcctcaggcttctcagtctatgagagcgagacccagggacgttctgctgccagtggacgaaccaagttgttcctcatcaagtggtggcttctctccttcacccctgccacaagccaaaccggtcggcataacccatggcatcccgcagctcccaagagtaaggcccgagcatccccagccccagcccactcattacggaccgagcagcctggatctttcgaaagaacgggccgagcagggcgcctcactggccactagttatagctctacagccatgaatgggaacttggccaaatag

SEQ ID NO: 116543 - DNA, 2415 bp, synthetic construct
  misc_feature 1..2415: note = Description of Artificial Sequence: Synthetic coding sequence
  source 1..2415: mol_type = other DNA
atggagacccagaaggacgaagcagctcaagccaaaggtgcagccgcgtccgggtctacacgggagcagaccgctgagaagggggcaaaaaataaagctgctgaagccactgaaggtcccacctccgaaccttcgtcaagcgggccagggcggctgaagaagacggcgatgaaactgtttggcggcaaaaaagggatctgcaccctgcctagcttctttggtggagggcgtagcaaaggatccgggaagggctcaagtaaaaagggactgtccaagtctaagacgcatgatggcctttctgaagccgcccacggcccagaagacgtagtgtctgagggaactgggttctcactccccctgcctgagctgccatgccagttccctagttcacagtccgcccatggcgcactggagacaggatctagatgtaagacatctgttgctggcgccactgaaaaggctgtcgccgaaaaatttccatctatgcctaagcctaaaaaaggcctcaagggatttttttcatctatccgcaggcacagaaaatccaaggtaacaggagctgagcagtccgagcccggagctaagggccccgaacgcgtgcgcgcgagaccccatgaacacgtcagttcagctccgcaggtgccatgtttcgaggagactttccaggctccaaggaaagagaacgcgaacccacaggacgcccctggacctaaagtttcaccaacacccgagcccagccccccagcaacggagaagatggcttgcaaagaccccgagaaaccaatggaagcttgtgcgagcgcccacgtgcaaccgaaacccgcacctgaagcatcctctctcgaagagcctcactcgcctgaaactggcgagaaggtcgtcgctggcgaggtgaatcccccgaatggtcctgtgggcgatcctctctcactgttgtttggggatgtgactagtctgaagagcttcgattcactaactggctgcggggatattattgcagagcaggatatggactctatgacggacagtatggccagcgggggacagcgtgccaatagggacggaaccaaacgatcgtcttgtctggtaacttaccagggtgggggggaagagatggcactgcctgacgatgacgacgaggaggaagaagaagaagaagaggtggaactcgaggaagaagaagaggaagtgaaggaagaggaggaagacgacgacctcgagtatctatgggagaccgcacagatgtacccgcgcccaaacatgaacttgggctaccatcctacaaccagcccggggcaccatggatacatgttgttagatcccgtgaggtcttacccaggtttggctcccggcgagcttcttacgccgcagtccgaccaacaggagagtgctccaaattccgatgagggttattatgattcaacgacccctggcttcgaggatgatagtggggaggcattgggcttggtcagaagagactgtctgccacgtgattcttatagtggcgatgccctctacgaattctatgagcctgacgactccctggagaactcacctcctggtgatgactgtttgtacgatctccacgggcgcagcagcgaaatgttcgaccccttcctgaatttcgagcccttcctatcgagccggcctcctggggcgatggaaaccgaggaggagcgtctcgtgacaatccagaagcaactgctgtattgggaacttcgaagggaacagctggaggctcaggaggcacgggcacgggaagcccatgccagggaagcccacgcccgggaggcttatacaagagaggcttatggccgagaagcatacgccagggaagcacacacttgggaggcccacggcagagaggctcggacccgggaagcccaagcgcgggaggttagatgccgcgagacgcaggtgagagagacgcaggcccgtcaggagaagcccgtgcttgaatatcagatgaggcccctgggaccaagcgtgatgggcttggcggctggcgttagcgggacgagtcagattagccatagggggataacctctgcgtttcctacaactgcaagctcagagccggattggcgggacttccggcccctggagaaaagatatgagggaacctgctcaaaaaaggatcaaagtacctgcctgatgcaactgttccagagcgatgcgatgtttgaacctgacatgcaagaagcgaattttgggggatcccccaggagggcttatcctacctactcccccccagaggaccctgaggaagaggaggtggaaaaggagggaaatgctacagtcagcttttcccaggccctggtggagttcacttctaacgggaatcttttctcatctattcggtgtccgggtactgaggataaacggcaggtgacccaggcttgtggcacctggtag

SEQ ID NO: 116544 - DNA, 1566 bp, synthetic construct
  misc_feature 1..1566: note = Description of Artificial Sequence: Synthetic coding sequence
  source 1..1566: mol_type = other DNA
atgttcacatctgagaagggagtggtggaggaatggctgtcggaatttaaaaccctgccagagactagtctgcccaactacgcaaccaacctcaaggataagtcatctctcgtgagttcgttgtacaaggttattcaggagcctcagagtgaactccttgaacccgtgtgccaccagctcttcgagttctatagatctggagaagaacagttgctccagtttacgttgcagttccttcccgaacttatctggtgttacctggccgtgtcagcaagcaggaatgtgcattcctctggctgcatcgaagctctgctgctgggcgtgtacaacttggaaattgtcgacaaacaagggcatactaaagtcctgagcttcaccatcccatcactttctaagcctagcgtgtatcacgagccttcctctatcggatccatggccctgactgaatccgccctatcgcagcatgggctgtccaaggtggtgtactccggccctcatcctcagagagagatgctgaccgcccagaacaggttcgaggttctgacatttctactcctgtgttataatgcagctctgacctacatgccaagcgtgtcactgcagtcactgtgccaaatctgttctcgaatctgcgtgtgcgggtaccccagacagcacgtgcgtaaatacaaggggatttcttccagaatccccgtttcttctggtttcatggtccagatgctgacaggaatttactttgccttttataatggcgagtgggacctggcacaaaaagctctggacgacatcatataccgagcccagctcgaactctatccagagcctcttctggtcgccaatgccataaaggcttccctgccgcacggacctatgaaatcaaacaaagaaggtacccggtgcatccaagtggaaatcacccctacatcatccaggatctcccggaatgcagtgaccagcatgtcaattcgaggccatagatggaaaaggcatgggaacactgaacttactgggcaggaagaactcatggaaatcagcgaggttgacgagggcttttattcccgggccgctagcagcacttcacagagtggtttgagcaactcgtcacataactgctccaacaagccaagtatcggcaagaaccatagacgctccgggggaagcaagaccggaggcaaagagaaagaaactacaggggaaagctgcaaggaccattttgccaggaagcagacacagagagctcagagtgaaaacttggaattgcttagcctcaaacgactcactctgactacgtcccagtcactgcctaaacccagttcccacggacttgctaagactgccgcaacagtattcagcaagtcctttgaacaggtgtccggcgtgactgttccccacaacccctctagcgctgtcggctgcggcgccggcaccgatgcaaatcggttctcagcctgcagtctccaggaggaaaagctgatttacgtgtctgagcggacagagcttcctatgaaacaccagtccggccaacagcgcccacctagcatcagtattactctcagcaccgattag

SEQ ID NO: 116545 - DNA, 342 bp, synthetic construct
  misc_feature 1..342: note = Description of Artificial Sequence: Synthetic coding sequence
  source 1..342: mol_type = other DNA
atggacggccgcgttcagctcataaaggctctcctggctcttcctattaggccagcgacccgccggtggaggaacccgattccattccctgagacatttgatggggataccgacaggctcccggagtttatcgtccagacagggtcctacatgtttgtcgacgagaatacattttcaagcgacgcccttaaagtaacattcctaattacccgtctgaccgggcccgcactgcagtgggtcattccctatattaagaaggaatcgcctctcctgaatgattataggggctttttggctgagatgaagagggtgtttggatgggaagaagacgaagacttttag

SEQ ID NO: 116546 - DNA, 2241 bp, synthetic construct
  misc_feature 1..2241: note = Description of Artificial Sequence: Synthetic coding sequence
  source 1..2241: mol_type = other DNA
atgggtgacgtcctatcaacgcaccttgatgacgcccggcggcagcacatcgccgaaaagacaggcaagattctgacggagttcctgcagttctacgaagaccaatacggcgtggccttatttaacagtatgcgtcacgaaatagagggaacaggcctcccgcaggcccagctcctctggagaaaagtgccgctggacgagcgtattgtattttcaggtaacttgtttcagcatcaagaggactctaagaaatggcggaaccgtttcagcctggttccccacaactacggcttagtgctgtatgaaaacaaagcagcctacgagcggcaggtgccacctcgggctgtgatcaacagcgctggttataagatcctgacatcagttgaccagtacctggagctcatcgggaacagtcttccaggcacaactgctaagtcaggctccgcacctatcttgaagtgtcccacacagtttccgctgatactatggcacccatatgccagacattactatttttgtatgatgacagaggcagaacaggataagtggcaggctgtgctgcaagattgtatccgtcattgtaataatggaattccagaagattctaaagtggaagggccagcgttcaccgatgcaattcggatgtataggcagtcaaaggagctgtacggaacctgggaaatgctctgtgggaacgaagtgcaaatcctcagcaacctggtcatggaggagcttggccccgaactcaaagccgagctgggccctagactgaaggggaagccccaggaacgtcagagacagtggatccagataagtgacgccgtctatcacatggtctacgagcaggccaaagcccgcttcgaagaagtactttctaaggttcagcaagtgcagccagcgatgcaagccgttataagaactgatatggatcagattataacttcaaaagagcatttagcatctaaaatccgagcctttattctcccaaaggcagaggtttgcgtcagaaaccacgtacagccatacattcctagtattctggaagccttgatggtgcctacaagccagggctttaccgaagtcagggatgtgttttttaaagaagttaccgatatgaacctcaacgtgatcaatgagggaggaatagacaagctgggcgaatatatggagaagctttctcggctggcttaccatccactcaaaatgcagagttgttatgagaagatggaatccctgcgattagacgggctgcagcagaggtttgatgtgtccagcacctctgtgtttaaacaaagagctcaaatccacatgcgagagcagatggataatgccgtatatactttcgaaactcttctccaccaggaactgggtaagggccccacgaaggaagagctgtgcaaatcaatccagcgcgtcctagagagggtgcttaaaaagtacgactacgatagctcctctgtgagaaagcgattcttccgagaagctctccttcagatttccatccccttcctacttaagaaactggcaccgacctgcaagtccgaattacctcgtttccaagaactgatctttgaagactttgcccgtttcattctggtggaaaacacttacgaagaggtggtccttcagaccgtcatgaaagatattcttcaggccgttaaggaagcggcagtgcagcgcaagcataacctgtaccgtgattcaatggtcatgcacaactccgatccaaacctgcacctgctggctgaaggtgctcctatagattggggtgaggagtattcaaactccggtggaggcggttccccttcccctagtacacctgagtctgccacattatccgaaaagcggcgacgggcgaaacaggtggtgagcgttgtacaggatgaggaggtagggctgccatttgaagcctcaccagagtcgccaccgccagcttcacctgacggagtcacagagatccgcggattgctcgcccagggcctccgacctgaatcacctccgcccgcggggccccttctgaatggcgctccggctggcgagtcaccccagcccaaggctgcccccgaagcctctagccctccagcaagtccccttcaacatcttttaccaggaaaggccgtggatctagggccacccaagcctagtgatcaggagacaggagagcaggtgtcatccccctcgtcccacccggcgttacatactactacagaagatagcgccggtgtgcagactgagttttag

SEQ ID NO: 116547 - DNA, 2202 bp, synthetic construct
  misc_feature 1..2202: note = Description of Artificial Sequence: Synthetic coding sequence
  source 1..2202: mol_type = other DNA
atgggttggatgggagagaagaccggaaagattctcactgaatttctccagttctatgaagaccaatacggagtggctctctttaactctatgaggcatgaaattgaaggcaccggactaccgcaggcgcaactgctgtggcgcaaagtaccacttgacgagcggatagtgttttcaggcaatctgttccagcatcaggaggacagcaaaaagtggagaaatcgcttctctctagtgccccacaactatgggctcgtcctctacgaaaacaaagctgcatatgaaagacaggttcctcctagagcggtgattaatagcgcaggctacaagatactgaccagtgtggatcagtatctggaattgatcgggaattcactgccgggaaccacggccaaatctggcagcgccccgatcctaaaatgtcccacccagttcccccttatcctttggcacccgtacgcccgccactactatttctgtatgatgactgaggctgaacaggataaatggcaggctgttttgcaagactgtatacgccattgcaataatggtatccctgaagatagcaaggtggagggaccggcattcaccgacgctatccgtatgtataggcagtcgaaagaactctacgggacctgggagatgctgtgcggcaacgaggtacagatactaagtaacctggtgatggaagagctcggtcccgaactcaaggccgaacttggtccccggctcaaaggcaaaccccaagagcggcagagacaatggatacaaatctcggatgccgtgtaccatatggtttacgaacaagccaaggctcggttcgaagaagttctgtcaaaagtccagcaggtgcagcccgccatgcaggcagtgatccgcacagacatggaccaaattataacatccaaagaacatctggccagcaagattcgcgccttcattctgcctaaggctgaagtgtgcgtgaggaaccacgtacagccatacatcccctcaatcttggaggccctaatggtaccaacttcacagggatttaccgaagtaagggacgtgttcttcaaggaagtgactgacatgaatttaaacgtgattaatgagggcgggatcgataaactgggtgagtatatggagaagttatccagattggcctaccaccctcttaaaatgcagagttgctacgaaaaaatggaaagcttgcggcttgacggcttgcagcagagattcgacgtatccagcactagtgtgttcaagcagcgcgctcagatccatatgcgagaacagatggacaacgccgtctatacctttgagaccctcctgcaccaggaactgggcaaaggccccactaaggaggagctctgcaagagtatccaaagagtactggaacgtgtgctaaagaagtacgattatgacagcagctctgtacgaaagcgctttttccgtgaagctcttctacaaatttcaatccccttcctcctgaagaaactggctcctacctgcaagtcagaacttcctcgattccaggaactgatatttgaggactttgccaggtttattctggtagagaacacctacgaggaggtggtgctgcagacagtcatgaaagatatattacaggcagtaaaggaagccgctgtgcagcgcaagcacaacttgtacagggacagcatggtaatgcacaatagcgaccccaatctgcatctgctagctgaaggcgcccctattgactggggggaggaatactccaactctgggggcggggggtccccttcgccctcaactcccgaatcagctacgctcagcgaaaagagacgcagagccaagcaagtagtctctgttgttcaggacgaagaggtgggacttcccttcgaagcatctccggagtccccccctccagcctcacctgacggagttacagagatccggggcctcctggcacagggcctacggcctgagagcccacccccggccggacctttgctaaacggagcaccggccggggagagcccccagcccaaggccgcacctgaagccagttcacctcccgccagccctttgcagcacctgctcccggggaaggccgtcgatctaggccctcctaaaccttctgatcaggaaacaggcgaacaggtctccagtcctagctctcatcccgcgctgcacacgaccaccgaagatagcgcaggggtccagaccgagttttag

SEQ ID NO: 116548 - DNA, 1191 bp, synthetic construct
  misc_feature 1..1191: note = Description of Artificial Sequence: Synthetic coding sequence
  source 1..1191: mol_type = other DNA
atggtgcccactagtcagggttttaccgaggtccgggacgtctttttcaaagaggtgaccgatatgaatcttaacgttatcaacgagggcgggattgacaaactgggggagtatatggagaagctcagccggctcgcttatcatccccttaagatgcagtcttgctacgaaaagatggagtccttgcggctggacgggcttcaacagcgtttcgatgtgagttccaccagtgtgttcaagcaaagagcccagatccatatgagggaacaaatggacaatgccgtctacacattcgaaacactgctgcaccaggagctgggaaagggtccaacaaaagaggagttatgcaaatctatccaaagggtcctggagagggtgctgaagaagtatgattatgactcatcctccgtgcggaagagattttttagagaagcgttactccaaatctccattccattcctgttgaagaagttagcccctacatgcaagtcggagctaccaaggttccaggagctgatcttcgaggacttcgctcggtttatactggtagagaacacatatgaagaggtagtactgcaaacagtgatgaaggacatcttacaagccgtgaaggaggccgctgtccagcggaagcacaatttatatagggactctatggtgatgcataattctgacccaaacctccacctgctcgccgagggagccccaatcgattggggggaagagtactcaaacagcggggggggcggatctccaagtcccagcacccccgagagcgccactctgtcggaaaagcgcaggcgcgccaagcaagtggtctccgtagtgcaagatgaggaagtgggacttccctttgaggcctccccggagagtcccccgccagcaagcccagacggcgttactgaaattcggggcttgcttgcccagggactgcgtcccgaatccccacccccagccgggccactcctgaacggagctccagccggtgagagccctcagcccaaggccgcacccgaggcatcctcccctcccgcatctccactgcagcacttgctgcctgggaaggcagtcgatctgggtccacccaagccgagcgaccaggaaacaggcgagcaagtgtccagcccttcctcccaccccgcactgcacaccactaccgaagattcagcaggtgtccagacagagttctag

SEQ ID NO: 116549 - DNA, 3072 bp, synthetic construct
  misc_feature 1..3072: note = Description of Artificial Sequence: Synthetic coding sequence
  source 1..3072: mol_type = other DNA
atgggggccggtgcactagcgatctgtcaatcaaaggccgctgtgagactaaaagaggatatgaaaaaaatcgtggcagtacctctcaacgaacagaaggactttacttaccaaaagctgttcggagtgtccttacaggagctggaaaggcagggtctgaccgaaaatggtattcccgccgtggtctggaatattgtcgaatatttgactcaacacgggctgacacaagaaggactcttcagagtcaacggcaacgttaaagtcgttgagcagcttagactgaagttcgagagtggcgtgcctgtggagctggggaaggatggtgacgtctgctcagccgctagcttgctgaagttatttcttagagaactgcccgattcattaatcaccagcgcactgcagcctagattcattcaacttttccaggacgggcgcaacgatgtccaggagagttcccttcgagatctcattaaggagctgcctgacacccattattgtctccttaagtatctgtgtcagttcctgacaaaggtggccaagcatcatgtgcagaaccgtatgaacgttcataatctggccactgtgtttggcccgaattgctttcatgtcccgccaggtttggagggcatgaaggagcaggacctgtgcaataagattatggctaaaattctggagaactataacaccctttttgaagtcgagtacaccgagaatgaccacctgcgctgcgagaatctggctagactgattatcgtgaaggaggtgtactataagaatagtctccctattctcctaactagaggcctcgaacgcgatatgccgaagccgccacccaagaccaagatccccaagtcaagaagcgagggctcaatacaggcccatagggttttacagcctgagctgtccgacgggatccctcagttatctcttcggctctcatacaggaaggcatgtctggaagacatgaactccgcagagggagctatttccgcaaagctcgtgcccagttctcaggaagatgagagaccattgtctcctttctatctgtcggctcacgttcctcaggtgagtaacgtttccgcaactggcgagctgctggagcgaacaatacgatcggcagtggagcagcacctgttcgacgttaataatagcgggggacagtccagcgaggactctgaatccgggactctgagcgcaagtagcgcgactagtgcccgtcagaggagaagacagagcaaagagcaggacgaggtgcggcacggcagagataagggcctaataaacaaggaaaacactcccagtgggttcaaccatttggacgattgtattctgaacacacaggaggttgaaaaagttcataagaacacctttggatgtgctggcgagaggtcgaaaccaaaacgtcaaaagtcctctacgaagctgagcgaactgcatgacaatcaagatggtcttgtgaacatggagagcttgaactccacacggtcccacgagcgcaccgggccagacgatttcgagtggatgagcgacgagcgcaaaggcaacgaaaaggacggggggcacacacaacactttgagagtcccactatgaagattcaggaacacccatcgctgtctgacacaaagcagcagcggaaccaggacgccggtgaccaggaggagagcttcgtttccgaagtccctcaatccgacctcactgccctttgcgatgagaaaaattgggaagaacctataccggccttcagttcatggcagcgcgaaaactccgatagtgacgaggctcacctatctccgcaggctggtcggttgataaggcagcttctggatgaggatagcgatcccatgttaagtccacgcttctatgcgtacggtcagtctcgacagtacctggatgacactgaggtgccgccctctcctcccaattctcactcattcatgcggcgccggagcagcagcttgggctcttacgatgacgagcaggaagacttgacccctgcccagctgacacggcgtatccaaagcctcaagaaaaaaattagaaaatttgaggataggtttgaggaggagaagaaataccgcccttcccactctgataaggcggccaatccagaagttctgaagtggaccaatgacctggcaaagttccgacgccaactaaaagaaagcaagctcaagatctccgaggaggatctgacgcccagaatgcgtcagcggagcaacactctccccaagtcctttggctcccaactggagaaagaagacgaaaagaagcaagagttggtcgacaaagcgattaaaccctctgttgaggcaacccttgaatccatccagcgtaagctccaagagaagcgtgccgagtcttctcgacctgaggacatcaaagatatgacaaaggatcaaattgccaatgagaaggtggctctgcagaaagcactgctgtactatgagagcatacatggcagacccgtgaccaaaaatgagcgccaggttatgaagcccctctacgatcggtaccggctcgtgaagcaaatcctctccagggctaacacaatacccataatcggctcgccatctagcaaaaggcggtcccccctactccagcccattatcgagggcgagacagctagctttttcaaggagatcaaggaagaagaggaagggtccgaggacgactcaaatgtcaaacctgatttcatggtcacactgaaaactgattttagcgcacgatgcttccttgaccaatttgaggacgacgctgatggcttcatctccccaatggatgacaaaataccatctaaatgctcccaggatacgggcctctctaacctgcatgctgcttcaatcccagaactccttgagcatttgcaggaaatgagagaagaaaagaaacgcatacgaaaaaaattgcgagatttcgaggataattttttccgacaaaacggcagaaacgtccaaaaagaagatcgaacgccaatggcagaagagtatagcgagtacaaacacataaaggccaaactcaggttgctcgaggtccttatcagtaaacgagatacagacagcaaaagtatgtag

SEQ ID NO: 116550 - DNA, 2010 bp, synthetic construct
  misc_feature 1..2010: note = Description of Artificial Sequence: Synthetic coding sequence
  source 1..2010: mol_type = other DNA
atggcttgtgaaatcatgccactgcaaagctcccaggaagatgaacgccctctttccccattctacctgagtgcccacgttccccaggtgagcaatgttagcgccacaggggagttgctcgagagaacaattcgtagcgccgtggaacagcacctgtttgacgttaataatagtggcggacaatctagcgaggatagcgagtccggcacgctttcagcttcatcagccacctcagcgagacaacggcgcaggcagtccaaagaacaggatgaggtgaggcatggtagggataagggactcataaataaagagaacacgccctcaggtttcaatcacttggacgattgcatactgaacacccaggaggtggagaaagtccacaagaatacttttggctgtgccggtgagcgatccaaaccaaagaggcagaagtcctccactaaattgtccgaactgcatgacaatcaggacggattggtgaatatggaatccctgaatagcacgaggtcacacgagcggacaggtccggatgattttgaatggatgtctgatgaacggaaggggaacgaaaaagacgggggtcacacgcagcacttcgagtcaccaacaatgaaaatccaggaacatccaagtctttcggacactaagcaacaacgcaatcaagacgctggcgaccaggaagaatctttcgttagcgaggtccctcagagcgacctaactgcattgtgtgacgagaagaactgggaggaacctattcccgcattttcgagctggcagagggagaacagtgatagtgacgaggcccacctaagccctcaggccggccgactgatcaggcaactgttggatgaagatagcgatcccatgttgagccctcgcttctatgcatatgggcagtctagacagtatttggacgatacagaggtgccaccatctcctcccaatagtcattcattcatgcgcaggcgctcctcttcactgggctcctacgatgatgaacaggaggatctcacccctgctcagcttactagaaggattcaaagcctgaagaaaaagattagaaaattcgaagaccgatttgaggaagaaaaaaagtaccgcccgtcccactcagacaaggccgctaacccagaggtgctaaaatggaccaacgatctggctaagttccgccgacaattaaaagaatcgaaactcaagatctccgaggaagacctgacaccacggatgcgacagcggtccaacacactgcccaaatctttcggcagccagttggagaaggaggacgagaagaagcaagagcttgttgacaaggctatcaagccgagcgtcgaggcaaccctggagtctattcagcggaagttacaggagaagcgggcagagagcagcaggccagaagatattaaggatatgacaaaggatcagatagcaaatgagaaagttgcactacagaaagccctgctgtactatgaaagcatacatggtagaccagtgacgaagaatgagaggcaggtgatgaagcctctatatgatagatatcgactggtcaaacaaatcctgagtcgagccaatactattcccatcatcgaagaggaggaaggtagtgaggacgactctaacgtcaagcccgactttatggtaaccttgaaaacggacttctcagcccgctgttttcttgatcaatttgaggacgatgccgatggatttatatcacccatggacgataagatcccttccaaatgctcacaagacacaggcctgagcaatctgcatgctgcatcaatccccgagctgctggaacatctgcaggaaatgcgcgaagaaaaaaaacgcattcggaaaaagctgcgggactttgaggataacttctttcgccagaacgggcgcaacgtacagaaggaagaccgcactcctatggcagaggaatactcagaatataaacatatcaaggcaaagctcaggcttcttgaagtgctcataagcaaacgagataccgattccaagtctatgtag

SEQ ID NO: 116551 - DNA, 2094 bp, synthetic construct
  misc_feature 1..2094: note = Description of Artificial Sequence: Synthetic coding sequence
  source 1..2094: mol_type = other DNA
atggcttgcgagataatgcctcttcagagctcacaggaggatgagcgccccctgagtccattttacctgtcagcccatgtccctcaggtcagcaacgttagcgctacgggggagctcctggagcgcacaattagaagtgctgtcgagcagcatctgtttgatgtgaacaattcagggggacagtccagcgaggactctgaatccggcaccctgagtgcaagcagtgctacttcagccagacagaggcggagacagtcaaaggagcaggacgaagtccgccacggccgggacaaaggcctgatcaacaaagagaacacaccctctggattcaaccacctggacgactgtatcctaaacacacaggaagtggagaaagtacataagaacacctttggatgtgcaggtgaacgctccaaaccgaagcggcagaagagcagcaccaagctctcagaactccacgacaaccaggatggcctcgtgaacatggagtctctgaattcgacaaggtcacacgagcgtacagggccagacgactttgagtggatgtccgacgagagaaagggcaatgaaaaggatggcggtcacacacagcatttcgaatccccaaccatgaagattcaggagcatccatccctgagtgacaccaaacagcagcggaaccaggacgccggcgaccaggaggaatctttcgtgtcagaagtcccccagtcagacctgacggccttgtgtgatgaaaaaaattgggaggaacctatacccgctttcagcagttggcagcgtgaaaatagcgacagtgacgaggcccatttgagtcctcaggcgggtcggcttatcagacagctcctagatgaagattcagaccctatgctttcaccaagattctacgcctatggacaatccagacagtacctggacgatacagaggtgccaccttctccacctaactcccattcctttatgcgtagacggtcaagctcactggggtcctacgacgacgagcaggaagacctgacccccgcccagcttactagaaggatccaatctctgaaaaagaagattaggaagtttgaggaccgtttcgaagaggaaaaaaagtaccgtccttcccactcagacaaagctgctaacccagaggtcctgaagtggaccaacgatctggccaaattcaggagacagctcaaggagtccaagctgaagatttccgaagaggatctgacccccagaatgagacaacgctccaacacactgcctaagtcatttggttctcagttggagaaggaggatgagaaaaaacaggaactggtggataaagcaatcaaaccaagcgtggaagcaaccttagagtccatccagagaaagctgcaggaaaagcgcgctgaatcctcaagaccagaagatatcaaggacatgacaaaagatcagatcgctaacgagaaggtcgccctacagaaagcactgctgtactacgagagtatccacggccgccccgtgactaaaaatgagagacaggtgatgaaaccactgtacgataggtatcgcctcgtgaaacagattctgagcagggctaacaccattcctatcatcggctcccctagctccaaaaggcggtctccgctactgcaaccaattatcgaaggcgagactgcttccttttttaaagagatcaaggaagaagaagaggggtcagaggacgactctaacgtaaaacccgattttatggttacccttaaaacggacttcagtgcccgttgcttcctggatcagtttgaggatgacgctgatggattcatttcccccatggacgacaagatcccgagtaagtgctctcaagataccggactctccaacttgcacgccgcctccataccagagttattggagcatctgcaggagatgagggaggagaagaaaaggatcaggaagaagctccgtgactttgaagacaactttttccgccaaaacggaagaaacgtccaaaaggaggaccgtactcctatggcagaggaatattcggaatacaaacacattaaggccaaactgcgccttctggaagtacttatctctaagcgtgacactgactctaaatctatgtag

SEQ ID NO: 116552 - DNA, 609 bp, synthetic construct
  misc_feature 1..609: note = Description of Artificial Sequence: Synthetic coding sequence
  source 1..609: mol_type = other DNA
atgggagcgggcgcccttgccatctgccagtcgaaagccgccgtcagactgaaagaggatatgaaaaagattgtggctgtgccactgaatgaacaaaaggactttacctatcagaagctgttcggagtgagccttcaggagctggaacgccagggattgacagaaaatggaatcccagccgtcgtgtggaatatagtagaatacctgacacagcatggtttaactcaggagggacttttccgcgtgaatggcaatgttaaggtggtggagcaacttcgtcttaaattcgagtcaggagtacccgtagaattgggtaaagatggagatgtgtgtagcgcagcgtcactcttaaagcttttcttgagagagctgcccgattctctaatcaccagtgctcttcagccaaggtttatccagttatttcaagatggcagaaatgacgtgcaggagtctagcctccgcgatctgattaaagagctcccagacacacattactgcctgctgaagtatctttgtcagtttttgaccaaggtggcaaagcaccatgtccaaaatagaatgaatgtgcataatttggcgaccgtgttcgggccgaattgctttcagtag

SEQ ID NO: 116553 - DNA, 1494 bp, synthetic construct
  misc_feature 1..1494: note = Description of Artificial Sequence: Synthetic coding sequence
  source 1..1494: mol_type = other DNA
atggcctcacccgcaccacccgaacacgcggaagagggctgtcccgcaccagccgcggaggaacaggccccgcctagcccacccccgcctcaggcaagtccagcggagcggcagcaacaggaagaagaagcgcaggaggccggcgcagcagagggggccggcctgcaggtcgaagaagccgccgggagggccgccgccgccgttacatggttacttggtgaacctgtactatggctgggctgtcgggccgacgaattgttaagctggaagagaccactccggagcctcctcgggtttgtggccgccaatctgctattctggtttcttgccctgaccccctggcgcgtttaccacctgatatccgtcatgattctggggcgcgtgatcatgcagattattaaggacatggtcttgagtagaacacgcggtgcccagctgtggcggagtctgtccgaaagctgggaagtcattaattcgaaacctgacgagcgtcctagactctcccactgcatcgcggagtcctggatgaacttctccatattcctccaggagatgtccctttttaagcaacagtctcctggaaagttctgtctccttgtgtgttctgtctgcacgttcttcactatcttagggtcatatatccctggtgtcatcttgtcttatttgcttctgctttgtgctttcctctgccccctgtttaagtgtaatgacatcgggcagaaaatttatagcaaaatcaaatcagttcttttgaaacttgatttcggaatcggtgaatatattaatcagaagaaacgggagaggagtgaggccgataaagaaaagtcgcataaggacgatagcgagctcgacttttcggcactctgccccaagatttcactgacagtcgccgccaaggaactcagcgtgtccgacacggatgtttccgaagtctcctggactgataacgggacgttcaatctcagtgagggctacaccccccagacagacacgagcgatgacctcgataggcctagcgaggaggtgttctccagggacctgtcagatttccctagcctggagaatggcatggggactaatgacgaggacgaacttagccttggattgccgacggagctgaaacgaaagaaggaacagctggattcgggacaccggcccagtaaagaaactcaatcagctgcggggctgaccttgcccttaaacagcgatcagacgtttcaccttatgagcaacctagcgggggatgtgattaccgctgccgtgacggccgcgatcaaggatcagttagaaggcgtgcagcaggccctctctcaagccgctccgattcccgaagaggacaccgatacagaggagggcgatgacttcgagctcctcgatcagagtgagcttgaccagattgaatctgagctaggtctcacgcaggaccaggaggccgaagctcagcagaacaagaagtcctccggtttcttgagcaatttgctgggcggccactag

SEQ ID NO: 116554 - DNA, 1071 bp, synthetic construct
  misc_feature 1..1071: note = Description of Artificial Sequence: Synthetic coding sequence
  source 1..1071: mol_type = other DNA
atgcctgagggcgaggacttcgggcccggaaagagctgggaagtcattaacagcaagcctgatgagcgccctcggttgagtcattgcatagctgagtcatggatgaatttcagcattttcttgcaggagatgtccctctttaaacagcagagtcctggaaagttttgtcttctggtgtgctcagtgtgcacttttttcaccatactgggaagctacatccctggcgtgatcctaagttacctgctgctgctctgcgcgttcctgtgccctctcttcaagtgtaacgatataggtcagaagatttacagcaagattaaaagcgttctgctgaaactggacttcggtataggggagtatatcaaccagaaaaagcgcgagcgctcggaggctgataaggagaagtcgcataaggacgatagtgaacttgacttcagtgctctatgtccaaaaatctcattgactgtggccgctaaggagctaagtgtgagcgatactgatgtgagcgaggtgagttggaccgataacggaacattcaacctgtctgaagggtatacccctcaaacggacacatctgacgatctcgaccgccccagcgaggaagtgttcagtcgtgacctcagcgacttcccaagcctagagaatgggatgggcactaatgacgaggatgagctatcactgggccttcctactgagctcaagaggaagaaggaacagttagacagtgggcatagacctagcaaggagacccagagcgccgccggattgacattaccacttaactccgatcaaacatttcatcttatgtctaatctggccggggacgttattaccgcagccgtgacagccgctatcaaggatcaactagaaggcgtccagcaggctttgagccaggccgcacctatccccgaggaggatactgatacagaagaaggggacgattttgaactgctggatcaatcagaattggaccagatcgagtccgaattaggcttaacccaggaccaggaggcggaagcccaacagaacaaaaaatctagcggattcctgtctaatctgctgggcggccactag

SEQ ID NO: 116555 - DNA, 2151 bp, synthetic construct
  misc_feature 1..2151: note = Description of Artificial Sequence: Synthetic coding sequence
  source 1..2151: mol_type = other DNA
atggctacgagccaccgagtagcgaagttggtggcttcttcactacagactcctgtgaacccaatcactggggcacgtgtggcccagtacgaaagggaggaccccctcaaggccctggcggccgccgaggcgatcctggaggacgaagaagaggaaaaagtggcccagcccgccggagcctccgcagatctcaacactagctttagtggggttgatgagcacgccccaatttcctatgaggactttgtgaacttccctgatattcaccattctaatgaagaatatttcaagaaggtcgaagagttaaaggcggcgcatattgaaaccatggctaagctcgaaaagatgtaccaggacaaactgcacctcaaggaggtgcaacctgtcgttatcagggaggactctctgtctgactctagcaggtctgtgtcagaaaagaactcttatcatcccgtatccctgatgacatccttctctgagcccgacctgggacagagttcctccttatatgtgagctcttccgaggaggaactgcctaatctagagaaggagtacccacggaagaaccgcatgatgacctacgctaaggagttaataaataacatgtggaccgatttctgcgtcgaggattacatccgctgcaaggatacaggtttccatgcagctgagaaacgccggaaaaagcgtaaagaatgggtgccaaccattactgtaccggaaccttttcaaatgatgatccgcgaacaaaagaagaaagaagaaagtatgaagagtaaatccgatattgagatggttcacaaggcactaaagaaacaggaggaagaccctgagtacaagaaaaaatttcgagccaacccagtcccagcttcagtgtttctccccttataccacgacctggtgaaacagaaggaagagcgaaggagatctctgaaagagaagtccaaagaggccttgctggcatcccagaaaccctttaagttcattgcaagggaggagcagaaaagagccgctcgggagaagcagctacgtgacttccttaagtacaagaagaagactaaccggtttaaggcccgacctatcccacgttcaacgtacgggtcgaccaccaatgataaactgaaagaagaggagctttatagaaatctgcgtacacagctgcgagcccaggaacacctccagaattcttctcctctgccatgtagaagcgcttgtggctgtcgcaatcctcggtgccccgagcaggctgtgaaactgaaatgcaaacacaaggtgagatgccctactccagactttgaagatctaccagaacggtaccagaagcacttgagcgagcataaatcacctaaactgcttacagtttgtaagccttttgacctccacgcgtctcctcacgcaagcatcaagcgggaaaagattctcgccgacatcgaagccgatgaggaaaacctgaaggaaacgcggtggccgtacctaagccccagacgcaaatcgcctgtacgatgtgctggtgtcaaccctgtgccgtgtaactgcaatccccccgtacccacagtatccagccggggaagggagcaggcggtcagaaggtcactcgaggaaaagaaaatgctggaagaggaaaggaaccgcatattgacaaagcagaagcaacggatgaaggagctacagaaactattgacaaccagagccaaggcctacgattcgcaccagtctctggcacagatttcgaagtccagggtaaaatgtcttagaaagagcgaaaaggagagaatgcgcgagtatcaacgcgagctggaggaacgcgaagagaaactgaagaaacgtccactgctttttgaacgcgttgctcagaaaaacgctaggatggctgccgaaaagcattactccaacacattgaaagctcttgggattagtgatgagtttgtatcaaaaaagggacaaagtggcaaagtacttgagtactttaataatcaggaaactaagagtgtaacagaggataaggaaagtttcaacgaggaagagaagatcgaggagcgtgaaaacggcgaggaaaattatttcattgacactaatagtcaggactcgtacaaagagaaggatgaagccaatgaggagagcgaagaagaaaaatccgtggaggagagccactag

SEQ ID NO: 116556 - DNA, 1983 bp, synthetic construct
  misc_feature 1..1983: note = Description of Artificial Sequence: Synthetic coding sequence
  source 1..1983: mol_type = other DNA
atggcaacttcccaccgtgtagccaaacttgtggccagcagcttacagactccagtgaaccctatcaccggagcaagagtcgcacagtacgagagagaggaccctctaaaggcattggctgccgccgaggccatactggaagacgaagaggaggagaaggtggcccaacccgcaggcgctagcgccgacctgaatacctccttcagtggggtcgatgagcacgctcccatcagttatgaagacttcgtgaatttccccgacattcaccatagcaacgaggaatattttaagaaggtggaggaactcaaagctgcccatatcgaaacaatggccaaactggaaaagatgtaccaagacaagctgcatctgaaagaagtccaaccagttgtgatacgcgaagactccctgagcgacagttcccggtctgttagtgaaaagaactcctaccaccctgtcagccttatgacttccttcagcgagcccgacttggggcagagttcttccctctacgtgtcctcatccgaggaggaactccccaacttggaaaaggagtaccctcgcaagaatagaatgatgacatacgccaaagagttgatcaacaacatgtggactgacttttgcgtggaggactatatccggtgtaaagacactggattccacgcagctgagaaacggcgaaaaaaacggaaggaatgggtcccaactataaccgtgccggaaccatttcaaatgatgattcgcgaacaaaagaaaaaagaagaatcaatgaagtctaaatcagatattgaaatggttcataaagctctaaaaaagcaggaggaggatccggagtataagaagaagttcagggctaaccctgtccctgcatccgtgttcctgccactgtatcatgacctggtgaagcaaaaagaagagagacggcggagtctgaaagagaagagtaaggaagccctgctggctagccagaagccgtttaagttcatcgcacgggaagagcagaaacgggctgccagggagaagcagctgagagatttcttgaaatacaagaaaaagactaatagattcaaggcacgaccaataccgaggagcacttatgggtcgacaaccaacgataaattgaaggaagaggaattatacaggaacctgcggactcaactcagggcccaagagcatctgcagaacagttctcctctgccatgcaggagcgcttgcggttgtcgcaaccccagatgccccgagcaggcggtaaaactgaagtgtaagcacaaggtgcgctgccccactcccgatttcgaagatcttccggaaaggtatcagaagcacctgtctgaacataagtcacctaaactcctcacagtgtgcaaaccatttgacttgcatgccagccctcacgcctctatcaagagggaaaaaatcctggccgacatcgaagccgatgaggagaatctaaaggaaacaaggtggccatacctgtccccccggagaaagtcccccgtgcggtgcgcaggagtcaacccagtaccttgcaactgtaatccccccgtccccacagtgagctcaagaggtagagagcaagcagtgaggaaatccgagaaagaacgtatgagggagtatcagagagaactggaggagagagaagagaaactgaagaagcgcccgcttctttttgagagggtggcacagaaaaacgcccggatggcggcggaaaagcactatagcaataccctcaaagctttgggaatctctgacgagttcgtctctaaaaaaggccagtcaggaaaggtgttagagtattttaacaaccaggagaccaaaagcgtgactgaggacaaggagtcttttaatgaagaagaaaagattgaagaacgcgaaaacggagaggagaattacttcattgatacaaattcccaagacagttataaagagaaggacgaagccaatgaagaaagcgaagaagaaaaatcagtggaggagtcccattag

SEQ ID NO: 116557 - DNA, 645 bp, synthetic construct
  misc_feature 1..645: note = Description of Artificial Sequence: Synthetic coding sequence
  source 1..645: mol_type = other DNA
atgtcagtgccacagatccatgttgaagaggtcggcgccgaggaaggggcaggggccgcagcccctccggacgaccatctgcgatcgctgaaggcactcacagaaaaactgagactggagactcggcgcccatcatacctggagtggcaggctagactggaggagcatacctggcctttcccccgaccagccgctgagcctcaagcctctctcgaagagggcgagaggggcggccaggaaccactcctgcctctgcgggaagcagggcagcacccaccatccgcccgaagcgcctcccagggtgcaagacctctgagtacgggtaaactagagggattccagtcaatagacgaggccatcgcctggctcaggaaagaactgacggaaatgaggctgcaggaccagcagctggctcgacagctgatgcgtcttagaggagatatcaacaagctcaagattgagcacacctgccggctgcatcggcgcatgctcaatgatgctacctacgagctagaagaaagagacgagctggccgacttgttttgcgatagccctctggcttcgagcttctccctgtccacccccctgaaactaattggcgtgacaaaaatgaacattaacagtcggcgcttttcattatgctag

SEQ ID NO: 116558 - DNA, 1248 bp, synthetic construct
  misc_feature 1..1248: note = Description of Artificial Sequence: Synthetic coding sequence
  source 1..1248: mol_type = other DNA
atggctgcctccataagcgggtacacattttccgccgtctgcttccacagcgccaatagcaacgctgatcacgaagggtttctacttggtgaggttcgtcaggaggagacttttagcatcagtgactcacagatcagcaacactgaattcctgcaggtgatcgagatacataatcatcagccgtgtagcaaactcttctccttttatgactacgcgtctaaagtcaacgaggaaagcctggaccgcatcctcaaagatagacgcaagaaagttattggctggtatagattccggcggaacacgcagcagcaaatgtcctaccgcgagcaggtgctgcacaaacagctgacgagaatactgggcgtgcctgacctcgtttttctcctgttttcatttatttcaaccgccaacaatagtacccatgccctggaatatgttctgttccggcccaaccggcgatacaatcagaggatctcccttgctatccccaatctcggcaacacgtcccagcaagagtataaggttagttctgtgcccaatacctctcagagctatgcaaaggttataaaggagcacggcacagatttcttcgacaaggacggcgtgatgaaggacattagagcgatctaccaagtgtacaacgccctgcaagagaaggtgcaagcggtctgtgctgatgtggagaagagcgagcgggttgtagagtcctgccaagctgaagtaaataaactgcgcaggcaaatcacacagcgaaagaatgagaaagaacaggaacgtagactccaacaggcagtgctgtctaggcaaatgccatccgagagcttggatccagccttttcccctcgcatgccatcttctgggttcgcggctgagggacgatccactctgggtgacgccgaggccagcgatcccccgccgccctattctgactttcaccctaataatcaggagtctacactcagtcactctagaatggagcgaagcgtattcatgccaagacctcaggccgtgggctcctcgaattacgcatcaactagcgctgggctcaaataccccggaagcggtgctgaccttcccccacctcaacgcgctgccggcgacagcggagaagacagtgatgatagcgattacgaaaacctgatcgaccccacagaaccgagtaatagtgagtatagtcactctaaggatagtcggcccatggctcatcccgacgaagatcccagaaatacccagacctcccaaatttag

SEQ ID NO: 116559 - DNA, 3522 bp, synthetic construct
  misc_feature 1..3522: note = Description of Artificial Sequence: Synthetic coding sequence
  source 1..3522: mol_type = other DNA
atgacccgacggtgtatgccagcccggccaggtttcccctcctcacctgcgccaggaagctctcccccaagatgtcatctcagacctggctccaccgcccatgcggccgctgggaaacggacagagtcacctggggaccgtaagcagagcattattgacttcttcaagccagccagcaagcaagataggcacatgctggactctccacagaaatccaatatcaagtatgggggcagtaggctgagtattacagggaccgaacagttcgagaggaaactgagctcacccaaagaatcaaaacctaagagagtcccccctgaaaaaagcccgatcattgaggcctttatgaagggcgtcaaagaacaccacgaggaccacggaattcacgagtcacgcagaccatgcctgtccttggcttctaaataccttgccaaagggactaacatctacgtgcctagcagttatcacctgcccaaggagatgaaatcacttaagaagaagcatagatcgccagaaaggcggaagagccttttcatacacgagaataacgagaagaacgatagagatcggggaaaaacaaatgctgactctaagaagcagactacggtggctgaggctgatatatttaataacagttcacgttcgctatcctccagatccagtctgtcccgtcatcatccagaagagtcacccttgggagcaaaatttcagctctctcttgcctcatattgtagggaaagagaactgaagcgactgagaaaggagcagatggagcagcgcataaattcagagaattctttttccgaggcgagtagcctcagcctgaagagtagcatcgagcgaaaatacaagccccgccaggaacagcgcaagcagaatgacataattcccggcaagaacaacctgtccaacgtggagaatggacacctctcacggaagcgtagttccagtgactcctgggaacccacttcagcgggctcaaagcagaataagtttcctgaaaaacggaaaagaaattctgtggactccgatttgaagtccacccgggagtcaatgatccctaaagccagggagagtttcctcgagaagaggcctgacggcccccaccaaaaggaaaagttcataaagcacatcgccctgaaaacccccggcgacgtgctcagactagaagatattagcaaagagcccagcgacgagacagatggaagctcggctggtctggccccctcaaacagcgggaattcagggcaccactccacaagaaattccgaccaaatacaggtcgctggcacaaaagaaaccaagatgcagaagcctcacctgcccctttcacaggaaaaatccgctatcaaaaaggcatcaaatctacagaaaaataaaacagctagcagcactactaaggagaaagagacaaaactcccgctgttgagtagagtgccttctgcaggatcttccctggtgccacttaatgccaaaaactgcgccctgcctgtaagcaaaaaagacaaggagcggtcttcgtctaaggagtgcagtgggcattcaaccgagtcaaccaaacacaaagaacacaaagctaaaactaacaaggctgatagcaacgtttcttccggcaaaatttctggaggaccattgagatcagaatacggaacacccactaaatccccacccgccgcactcgaggtggtcccatgtatccccagtcccgccgccccgtcagataaggccccttccgagggcgagagttccggtaatagcaatgcaggatctagtgccttgaagcgtaagttacggggcgactttgactccgacgaagagagcctcgggtacaacttagatagcgacgaggaagaggaaaccctaaagagcttagaggagatcatggccctgaactttaaccaaacacctgccgctacaggaaaaccacccgccctgtcgaagggccttcgttctcagagctccgattacactggtcatgtgcatcccggtacttacacaaatacactggagaggttagtaaaagaaatggaggatacccaacgcctggacgagctccaaaagcagctgcaggaggacattcggcaggggaggggcatcaaatcaccaattcgaatcggagaagaggactctactgatgacgaggatggactcctcgaggaacataaggagtttctgaaaaagttttcagttacaatcgacgcaatacctgaccatcaccccggggaagaaatctttaatttcctcaatagtggaaagatcttcaaccagtatactctggacttaagggattccggctttatcggtcagtctgccgtcgagaaacttattttgaagtcaggtaagactgatcagattttcctgactacccagggctttcttactagtgcttatcattatgtccaatgccctgtcccggtcttaaaatggctgtttaggatgatgagcgtacatactgattgcatagtgtctgtccaaattttgtctaccctgatggagatcaccatccgaaatgacactttctccgattctccagtgtggccttggatccccagcttgtctgatgtggctgctgtatttttcaatatgggcatagacttcagaagcctgtttccgctggaaaaccttcagcccgactttaatgaggactacttggtatctgagacgcagaccacgtccagggggaaagagtcagaagattccagctacaagcccatattctcaaccctcccagagactaatatactgaacgtggtgaagtttctcggcctgtgtaccagcatacatccagagggctatcaggacagggagattatgctactgatccttatgcttttcaagatgtctcttgaaaaacagttgaaacaaatcccccttgtggacttccagtccctcctcatcaatctgatgaagaatatccgggactggaatactaaggtccccgaactgtgcttgggcatcaacgagctctcctcacatccccataacctgctttggctcgtgcagctagtgcccaattggacaagccgcgggcggcaattgcggcaatgcctgtctctcgtaataatttctaaactgctggatgagaagcacgaagatgtgccaaacgcatctaacctccaggtcagtgttctgcaccgttacttggtccagatgaagccctctgatctgttaaagaaaatggtactaaaaaagaaggctgaacagcccgacggtatcatcgatgattccctgcatctggagttggagaaacaggcgtactacctcacatacatcttgttgcacctggtcggagaggtgtcatgtagccattcattcagcagcgggcagcgaaaacattttgtcctcctctgcggtgcactggaaaagcacgtcaaatgcgacataagagaagacgccagactcttctatcgaacgaaagtcaaggacctggtcgcaaggatccacggaaaatggcaggaaatcatccaaaactgtcgaccaactcaggggcagctccacgacttttgggtgccggacagctag

SEQ ID NO: 116560 - DNA, 3561 bp, synthetic construct
  misc_feature 1..3561: note = Description of Artificial Sequence: Synthetic coding sequence
  source 1..3561: mol_type = other DNA
atgacacggcggtgtatgccggcaagaccaggattcccaagttccccggcacccggtagcagtccacctcgttgtcacctgaggcccggatccactgcccacgccgcagctggcaaaaggacagagtcccctggcgaccgcaaacagtctataatcgatttcttcaaaccggcgtccaagcaggatagacacatgttagacagcccacagaagtctaacattaagtatggcggcagccgcctgtcaataaccggcaccgaacagttcgaaagaaagctgtcctcaccaaaggagtcgaaacccaagagagtgccacctgagaagagcccgataatagaagcctttatgaaaggggtgaaagagcatcacgaagaccacggaatccatgagtcaaggagaccgtgcctgagtttggcttcaaagtacctcgcgaagggcactaacatttatgtcccttcttcatatcatctcccgaaagaaatgaagtctttgaagaagaaacatcggagcccagagcgccgaaagtccttgttcatccacgagaataacgaaaagaatgaccgggatcggggtaagactaacgcagactcaaaaaagcagacgacagtggcagaagccgatatctttaataacagcagtcgatctctgagttccaggagtagcctgtctcggcaccacccagaagaatctccactgggtgcaaagtttcagctctctctcgccagttactgcagagagcgggagctcaaacgactgcggaaggagcaaatggaacagcgaattaattctgagaactctttctcggaggcctcttccctgagtttgaagagtagcattgagagaaagtacaagcccaggcaggaacagaggaagcaaaatgatattatcccaggtaagaacaatctgtcgaatgtcgaaaatgggcacctatctcggaagcgtagctcttcggattcttgggaacccactagtgctggttctaagcagaacaagttccccgaaaaacgcaagaggaacagcgtagatagcgatctgaagagtactagggaaagcatgattcccaaggcaagagaatccttcctggagaagcgaccagacgggccacaccaaaaggagaagtttattaagcatattgctctcaagacccctggcgacgttctgagacttgaagacatcagcaaggagccgtccgatgagaccgacgggtcttcagccggacttgccccttcaaactctgggaatagcggccaccactcgactaggaacagtgaccagatccaggtggccggcactaaggaaacaaagatgcaaaagcctcatcttcccctcagtcaagaaaagtccgctatcaaaaaagcctccaacctccagaaaaataagaccgcctccagcacaacaaaggagaaagaaacaaagctgcccctgctctctcgggtgccatcagccgggtcaagccttgtccccctgaacgccaagaattgtgctctgcctgtgagcaagaaagacaaagagcgtagttcctctaaggaatgctcaggccactcgaccgagagtaccaagcacaaggaacacaaggcgaagacaaacaaggccgacagcaatgtgagctcagggaagattagtggtggcccccttcggtctgagtacggcacacctactaaaagccccccagcagcactagaagtcgtgccatgcatcccgtccccagctgcacctagtgataaggcacccagcgaaggagaatccagcgggaacagtaacgctggcagcagcgctctgaaacggaaattgcgcggtgactttgactcagacgaggagtcactcgggtacaacctcgactccgatgaggaggaagaaaccttaaagagtctggaggagattatggcattaaattttaaccagacacctgcggccaccggcaagccaccggctctctccaaagggttgcgctctcaatcttcagactataccggccacgttcacccaggtacttacaccaatacacttgaaaggctggtaaaggaaatggaagatacacagcgcctagatgagttgcagaagcagcttcaagaagatatcagacagggacgcggcataaagagtccaattaggatcggtgaagaagactcgacagacgacgaagacgggctgctggaggaacacaaagaattcttgaaaaagttctctgtgacgattgacgcaattccggatcaccacccaggcgaggagatcttcaactttctgaacagcgggaagatattcaatcagtataccttagacctaagagacagtggctttattggtcagagtgcagtagagaagctcatcctgaagagcggcaaaacagatcagatattccttacgacccagggatttctgacttccgcgtaccactacgttcagtgccccgtgcccgtcctgaagtggctcttccggatgatgagcgtacacactgactgcatcgtttcggttcagattttgtcgacactgatggaaattacgatccgtaatgacaccttcagcgatagccctgtgtggccatggattccctccctgtccgatgtggccgctgtgttctttaatatgggtattgacttccggagcttatttccattagaaaatctgcaacccgactttaacgaagattatcttgtttctgagacacagacaactagcaggggcaaggaatcggaggactcaagttacaaacccatcttttctacgctccccgagaccaacatcctgaatgtcgtgaagtttctggggttatgtaccagcatccaccccgagggataccaggaccgggagataatgttactgatcctgatgttgttcaagatgtctttggaaaagcaactgaagcagatccctcttgtcgatttccagtctctgcttattaacctgatgaaaaatattagggattggaacactaaggtacccgagctgtgtctggggatcaacgagctgagttctcatcctcacaacctgttgtggctcgtgcagctggtgcccaattggacctcacgggggcgacaactcaggcagtgcctctcactagtgattatctctaagctgctcgatgaaaaacacgaggacgttcctaatgcatccaatctgcaagtgagtgtgctccaccggtacttggtgcagatgaaaccttccgacttgctcaaaaaaatggtactgaaaaagaaggcagagcagccagatgggattattgatgattcccttcatctagaactggaaaagcaagcttattatctcacctatatcctcctgcacctcgttggtgaagtgagctgctctcactcatttagcagcgggcagcgaaaacactttgtcttgctttgtggggcacttgagaaacacgtgaaatgcgacattagggaggacgctcgcctcttctaccgcaccaaggtaaaagatctggttgcgcgaatccacggaaaatggcaggaaatcattcagaactgccgacccacacaggtctccttctgttacaccatttcttgcattctgaattcatttgccgagtggcattcctcttattgtctgaaatag

SEQ ID NO: 116561 - DNA, 2277 bp, synthetic construct
  misc_feature 1..2277: note = Description of Artificial Sequence: Synthetic coding sequence
  source 1..2277: mol_type = other DNA
atgactcggcgctgcatgccagctaggccaggtttcccgtcctctcccgctcccggttcttctcccccgcggtgccacttgaggcccgggtccactgctcacgcagctgccggtaagaggacagagtcccctggcgacagaaaacagtccatcatcgatttcttcaaaccggctagcaaacaagatcgtcatatgctggactctccccagaagagtaatatcaagtacgggggcagtaggctctctattaccggcacggagcagttcgaacggaaactgtcatccccaaaagagagcaagccgaagagagtgccaccggagaaatcccctattattgaagccttcatgaagggggtgaaggaacatcacgaagaccatggaatccatgagtcaagacgtccttgtctcagtttagcaagcaagtacctcgcgaaagggacaaatatctacgttcctagcagttatcacctgccaaaggaaatgaaaagcctcaagaaaaagcatcggagccctgagcgcagaaagtcactctttatacatgagaacaacgaaaaaaatgatagggaccgggggaagaccaatgcagatagcaagaaacagacgacggtggccgaggcagacatttttaacaatagtagtcgatccctgtcctccagatctagtctgtcaagacatcatcctgaggaaagcccactgggggcgaagtttcaacttagtctcgccagttattgtagggagcgtgagctgaagcgcctgcgcaaagaacagatggaacagagaatcaattcagagaattcattctcggaggcatcaagcctgtccctgaagtcatctatcgagcgcaagtacaagccccggcaggaacagcgaaagcagaacgatatcatcccagggaagaataatttaagtaacgttgagaacggccacctatctagaaagcggtccagctccgattcttgggagcctactagtgcgggatctaagcaaaacaagttccctgaaaaaaggaagcgaaatagcgtggatagcgatctcaagagcaccagggagtctatgatcccaaaggcccgcgagtcattcctggagaaaaggccagatggcccccaccagaaagaaaagttcataaagcatatcgccctgaagacacctggggacgtgctgagactagaagatatcagcaaggaaccttctgatgaaacagatggatcctcagctgggttggctccgtctaatagtggcaactccggacaccactcgacaaggaactctgaccagatccaggtggccggcaccaaagaaaccaagatgcagaagccgcacttgcctctgtcacaggaaaaatcggccataaagaaggcttcaaacctgcagaagaataaaaccgcttctagtactactaaagaaaaagagaccaaactgcctctgctgtccagagtgccaagtgcagggtcctctctcgtgccactcaatgccaaaaattgtgcacttcccgtgtctaaaaaagacaaggaaaggtcttcatccaaggaatgtagcgggcactccacagaaagtaccaaacacaaggaacacaaggccaagaccaacaaggctgactctaatgtgtcaagcggaaaaatttccggcgggccccttaggagtgagtacgggacccctaccaaaagcccacctgcggctctggaggtggtcccctgcatcccaagccctgcagccccatcggataaagccccaagcgaaggcgagtcctccggcaattctaacgcagggagtagcgcactgaaacgtaagctcaggggggatttcgacagtgacgaggaaagcctggggtataacttagactccgacgaggaagaagaaacccttaaaagtctcgaggagatcatggccctcaatttcaatcagacacccgctgccactggaaagccacccgcactctccaagggactcaggtcgcaatcatcagattacacggggcacgtgcacccgggtacctacaccaataccctggaacggctggtgaaggaaatggaagatacgcaaagattcgtgagcatcaagattaatttgcttaaccttaccttctgtctgttcgtatggctcacttttaacctcccatttcttaagaatcacgaaaagctggcttgcatcctcgactccgtagtgaactgtgtgagaatccgctacgtgggacgaactcaatggctgatgcctgtgatcactacactgtgggaaacacaggctcgactgttagagcctcgctccagtcgcctgagatag

SEQ ID NO: 116562 - DNA, 675 bp, synthetic construct
  misc_feature 1..675: note = Description of Artificial Sequence: Synthetic coding sequence
  source 1..675: mol_type = other DNA
atgaccagaattacggagctttggagttcaccacagtggaaggtcggagcggaagtgtgcggcagacaaatgagagagcagcggactgctgagcaatctgaaacgcaacggacttggctgagtatggcagccacactccagttcctcgtctgccttgttgttgccatatgcttactatccggagtaaccacaacacagccacatgcgggacagccaatggacagcacatccgtgggcggtggcctgcaggagccggaagcgcccgaagtaatgttcgagctgctatgggcaggactggagttggatgttatgggccaacttcacattcaggacgaggaactggcttccacacaccccggccgccgccttagactgctcctgcagcaccatgtgccttccgacctagagggcacggaacaatggctgcagcagctgcaggatctgcggaaagggccacccctgtcaacttgggatttcgagcaccttctcctgactggcttgagctgtgtttataggctgcatgccgcgtccgaagccgaggagcgcggtaggtgggctcaggtgttcgctctgcttgcccaagagaccctgtgggacctgtgcaaaggcttttgcccccaggatagaccgcctagtctgggaagctgggcctctattcttgaccccttcccctag

SEQ ID NO: 116563 - DNA, 606 bp, synthetic construct
  misc_feature 1..606: note = Description of Artificial Sequence: Synthetic coding sequence
  source 1..606: mol_type = other DNA
atgcgcgagcagcgcacagccgaacagtccgaaacacagagaacatggctctcaatggcagccacactacagtttctagtgtgtctagtggtggctatatgtctattgtctggtgtcacgacgactcaaccccacgccgggcaaccaatggacagtacctctgtcgggggcggactgcaggaaccagaagcacccgaggtcatgttcgagctactgtgggccggcttggagctggacgttatgggtcagctccatatccaggatgaagagctagccagcacacaccctggacgacgcctaaggttactactccagcatcatgtcccttccgatttggaaggtacggagcaatggttgcagcaactacaggacctgcgcaagggtccccccctgtcaacatgggacttcgaacacctgctcctcacgggattgagctgcgtttatcgcctccatgctgcttctgaggctgaggagaggggtcgctgggcccaggttttcgccctgctggcccaggaaacactatgggacctatgcaaaggcttctgtccccaggataggcccccatcccttggatcatgggcttcaattctggatccattcccgtag

SEQ ID NO: 116564 - DNA, 1626 bp, synthetic construct
  misc_feature 1..1626: note = Description of Artificial Sequence: Synthetic coding sequence
  source 1..1626: mol_type = other DNA
atgccagggctcaggcgtgatcgcctgctcaccctcttgctcctgggagctctgctctccgcagacctctattttcacctgtggcctcaggtccagcgtcagttgcggccgagagaaaggccgaggggatgtccctgcactgggcgtgcttcttccctggcaagagacagtgcggcagccgcttcggaccctgggactatcgtgcataacttttcgcgcacagaacctagaactgaacccgcaggtgggagtcatagcgggagctcatcgaagctccaggcactcttcgcccatcctctgtacaacgtacccgaagagccccccctcttgggcgctgaagactcacttctcgccagtcaggaggccctcagatactaccgcagaaaggtggccaggtggaaccgaagacacaagatgtatcgtgagcagatgaatctgacctctcttgatccccctctgcagctccgcctcgaggcctcttgggttcagttccatttaggaataaaccgacacggactgtacagtcgctcctccccagtggtttcaaaactgttacaggatatgaggcacttccctaccatctctgctgactactcacaagacgaaaaggcactgttgggagcatgtgactgtacccaaatagtcaaaccaagcggggtgcacctcaaactggtgctgcgctttagtgacttcgggaaggccatgtttaaaccaatgagacagcagcgcgacgaggagacccccgttgactttttctacttcatagattttcagagacacaacgccgagatcgccgcctttcatctagacagaatactggattttaggagggtccccccaacagttggtcggatagtcaatgttacaaaggagattctcgaggtgaccaagaatgaaatccttcagtcagtgttcttcgtgtctccagcttctaatgtttgttttttcgccaaatgtccttacatgtgcaaaacagagtacgccgtttgtgggaaccctcacttgctggaaggcagcttatctgcgtttttgccgtccctgaacttggcgcctagactatctgtaccaaacccttggatcaggagttatactttggctggtaaggaagagtgggaagtgaatcccctctactgcgataccgttaaacagatttacccttataataacagccagaggctactcaatgtaattgatatggcaatatttgactttctcatcggtaatatggaccgccatcactacgaaatgtttacaaaattcggagacgatggtttccttatccacctggacaacgccagagggttcgggagacactcgcacgacgagatcagtatattgagccccctatcccagtgttgtatgataaagaagaaaactctcctacatctgcagctgcttgcacaagccgactaccgactttctgatgtgatgcgcgaaagtctcctcgaggatcagctctcccctgtcctgaccgagcctcacctcctggctctcgataggaggttgcagaccatcctgaggacagtagaaggatgcatcgtggcccacggacagcagtccgtgatcgtagacggcccggtcgagcagcttgctccagattcaggccaggcaaacttgacttcgtag

SEQ ID NO: 116565 - DNA, 1023 bp, synthetic construct
  misc_feature 1..1023: note = Description of Artificial Sequence: Synthetic coding sequence
  source 1..1023: mol_type = other DNA
atgggcccacctcacagcggccccggaggagtacgagtgggagcgctgctcttactaggagtgcttggcctggtgtcggggctgagcctcgaacccgtgtattggaactcggcaaataaacgtttccaggcagagggaggatacgttctttatccacagatcggggaccgccttgacctgctttgccctcgggcacgccccccaggacctcattcttctcctaattatgaattctataaactgtacctggtggggggggctcagggacgtcgatgcgaagccccccctgcgccgaacttgctgcttacttgtgatcgccccgaccttgacctaagatttaccataaagtttcaggaatatagtccaaacctgtggggtcacgagttcaggtctcaccacgactattacataatcgcaacgagcgacggcactcgcgaaggattggaaagtctgcagggcggcgtatgcctcacacgggggatgaaagtgctgttgagggtgggacagtcccctcggggcggagccgtgccaagaaaaccagtgagtgaaatgccaatggagcgggacagaggtgcagcccacagcctagagcccggaaaagagaatctgcctggcgatcctacctcaaatgctacaagccgcggggccgagggccctttaccacctccatcaatgcccgccgtggccggagccgccggcggactggctctcctattgctgggtgtggccggtgccggaggtgctatgtgctggcgtcgacgaagggcgaaaccctcagagtcacggcacccaggacccgggtcgttcgggcggggaggatccctgggcctaggcggcggcggcgggatgggacctcgagaagctgagccaggtgagttgggaatcgccctgcggggcggcggagcagctgaccctcccttctgcccgcattacgagaaggtgtctggcgattatggacatcctgtgtatatcgttcaggatggacccccgcagtcccctccaaacatttattataaggtgtag

SEQ ID NO: 116566 - DNA, 438 bp, synthetic construct
  misc_feature 1..438: note = Description of Artificial Sequence: Synthetic coding sequence
  source 1..438: mol_type = other DNA
atgtttacctcccccagcgagggcaagcccggcaatatggatcggcaccattatgagatgtttaccaaattcggggacgacgggttcctcattcacctggacaacgcccgaggattcggacgtcactcacatgacgagattagcatactgtcgcccttgtcacaatgctgcatgataaagaagaagaccttgctgcacttacagctcctcgcccaggccgattatcggttgagcgacgtgatgcgcgagtccctgcttgaggaccagctctctcctgttctcacagagccccacctcctggctctggatagaagattgcagactattctacgtaccgtcgaaggatgcatcgtagcccatggacagcagtccgtaattgtggatgggcctgtggaacagttggcccccgattccgggcaggctaatctcacctcctag

SEQ ID NO: 116567 - DNA, 1230 bp, synthetic construct
  misc_feature 1..1230: note = Description of Artificial Sequence: Synthetic coding sequence
  source 1..1230: mol_type = other DNA
atgaagctaaagcagcgggtcgtattgctggccatcctcctggtcatatttattttcaccaaggtcttcctcattgataatctagacacctccgctgccaacagggaagaccagcgagctttccacaggatgatgactggtctgcgggtcgagctggctccaaagttggaccacactcttcaaagtccgtgggaaatcgcggctcaatgggtggtaccccgggaggtgtacccagaggaaacccctgaactgggagccgtgatgcacgccatggctaccaagaaaatcattaaggccgatgtgggctacaagggaacccagcttaaggcactgctgatcctggagggcggccagaaagttgttttcaaacccaaacgatactcaagagatcatgtggtcgaaggggaaccgtatgcaggatatgacaggcacaacgcagaggttgctgcgttccacctcgaccgaatcctcgggtttcatcgtgcccctctggtggtcggacgattcgtaaatctgaggaccgaaatcaaacctgtagcgactgagcagctgctctctactttcttaacagtgggtaacaatacgtgtttctacggtaaatgttattactgtagagagacagaaccagcctgcgctgatggcgatatcatggaaggctcagtaacactgtggctgcccgatgtttggccactacagaaacacaggcatccatggggcagaacttaccgggaaggcaaattggcaagatgggaatatgatgaatcttactgcgatgccgtaaaaaagacttctccttacgatagtggccctcgcttgctggacatcatagacacagctgtgttcgattatctgattggcaatgccgatcgccatcattatgaatcatttcaggacgacgagggcgcatccatgctgattctgctcgataacgctaaatcattcggtaacccctctcttgatgaaagatcaattctggcccccctatatcagtgctgcatcatcagggtgagcacatggaaccggcttaattacctcaagaacggtgtgctaaaatctgcactgaagtctgctatggcccatgaccctattagccctgtcctctcagaccctcatttggacgccgtcgaccagcgtctgctgtcagtactggctactgtgaaacagtgcactgatcagtttggaatggacactgtcctcgtggaggatagaatgcccttatctcatctatag

SEQ ID NO: 116568 - DNA, 417 bp, synthetic construct
  misc_feature 1..417: note = Description of Artificial Sequence: Synthetic coding sequence
  source 1..417: mol_type = other DNA
atgaagctgaagcagcgagttgttctgctcgcgattctgttagtgatatttattttcacgaaggtattccttatagataacttagatacttctgccgctaaccgtgaagaccaacgcgcgtttcaccgtatgatgacaggacttagagtggaactggctccgaagctcgaccacacattgcaatccccgtgggaaatcgctgcccagtgggtggtgccaagagaggtgtaccctgaagaaaccccagaactgggtgcagttatgcacgcaatggccacaaaaaaaatcattaaggcagacgtcgggtataaaggcacacagctgaaggcactactgatcttggaggggggtcagaaagtcgtattcaaacccaagcggtattctagggaccacgtagttgagggcgaaccatactag

SEQ ID NO: 116569 - DNA, 1755 bp, synthetic construct
  misc_feature 1..1755: note = Description of Artificial Sequence: Synthetic coding sequence
  source 1..1755: mol_type = other DNA
atgaagatgatgctcgtcaggcgatttcgagtgctgatcctcatggtgttcctggtggcttgtgctctgcacatcgctctggacttgctaccccgtcttgaacggagaggagccaggccaagtggcgaaccgggctgttcatgcgctcaacctgccgcggaggtcgcggcccccggatgggcgcaggtgcggggccgccctggggagccacccgcagcctcgtccgccgctggggacgcgggctggccgaacaaacacactctgcggatactacaggattttagtagtgatcccagttctaacctgagctcacatagcctggaaaaactcccacctgcagcggaacccgctgagcgagcactccgcgggagggaccctggggccctgaggccacatgaccccgctcaccggccccttctgagggaccccggcccccgaagatctgaaagcccaccaggacctggcggagacgcatcactcctcgccaggttgttcgagcacccgctgtacagagttgccgtgcccccactcaccgaagaggacgtactgttcaatgttaatagcgacactcgactgagcccaaaggccgccgagaacccggactggccccacgccggagccgagggcgctgaattcctgagccccggcgaggctgccgtggacagctatcccaactggctgaaatttcacattggcattaacagatatgagctgtactctaggcacaaccctgccattgaggccttattacacgacttaagctcacagcgcataacatccgttgccatgaagtcaggcggtacccaactgaaactcattatgacattccagaactatgggcaagctttatttaaaccgatgaaacagactagggaacaagagaccccacccgacttcttctatttcagcgactatgagaggcataatgcggagattgctgctttccatctggacagaatactcgacttccggagggtcccacccgttgccggaagaatggtgaatatgactaaggaaatcagggatgttaccagggataaaaagctctggaggacattcttcattagcccagctaataatatttgcttctatggggaatgttcctattactgctctactgaacatgccctgtgcgggaagcctgatcagattgagggatccctggcagcttttttaccagatctgtcactcgccaaacgcaaaacttggcggaatccctggagaaggtcctatcataaacgcaaaaaggctgaatgggaggtcgatcccgactactgtgaagaggtgaaacagacgcctccgtacgactcttcccaccggatcctggatgtgatggatatgactatctttgacttcctcatggggaacatggatagacatcactacgaaaccttcgagaaattcggtaacgagacttttatcattcacctggataatgggaggggctttggcaaatatagccatgatgagctcagcatacttgtcccgttgcagcagtgttgtaggataaggaagtctacttaccttcgcctgcagctgctggccaaggaagagtacaaactgagcctgctgatggccgaaagccttaggggcgaccaggtggcacctgtgctataccagcctcatcttgaggccctggacagaaggctccgagttgtgctaaaggctgtgagggattgtgtcgagcggaacggactgcactctgtagtagatgacgatctggacaccgagcaccgcgccgcgtccgctcgttag

SEQ ID NO: 116570 - DNA, 3957 bp, synthetic construct
  misc_feature 1..3957: note = Description of Artificial Sequence: Synthetic coding sequence
  source 1..3957: mol_type = other DNA
atgatgaatagaacaactcctgaccaagagcttgtcccagcatcagagccggtatgggagagaccatggtctgtggaggagatccgaaggtcttcccagagttggtcacttgcggctgacgccggcctgctgcagtttctgcaggagttctcacagcagacaatttcgcgcacccatgaaattaagaaacaggtcgatgggctgatacgtgagaccaaagccaccgactgccgcctccataatgtgttcaatgactttctgatgcttagcaacacgcaatttattgaaaatagggtatacgatgaagaggtcgaagaacccgtgctgaaagctgaggctgagaaaacagagcaggaaaagacaagggagcagaaggaggttgatcttatccctaaagtgcaggaggctgttaattacggccttcaggtccttgacagcgccttcgaacaactcgacattaaagcgggtaattccgactctgaagaggatgacgccaacgggcgggtggaactgatactggaacctaaagatttgtacatcgaccgcccgctgccctacctgattggctctaaactctttatggagcaggaggatgtggggctgggcgaactgagcagcgaggaaggcagtgtgggatcagacagggggtccatagtcgataccgaggaggagaaagaagaagaggaaagcgatgaggacttcgctcatcactccgacaatgaacagaatcagcacaccacccagatgtcagatgaagaagaagatgacgatggttgtgacctgttcgcggattccgaaaaggaggaagaggacattgaggacatcgaggaaaacaccagaccaaagcgatcaagaccaactagcttcgcagatgagctcgcagccagaatcaaaggggatgcaatgggcagagtggacgaggaacccacaactctgccctctggagaggccaagcctcgcaagacactgaaggaaaagaaggagcggaggacgcctagcgacgatgaggaagataatctgttcgcaccccccaagctaaccgatgaggatttttctccattcggttctggcggtgggctgttctctggcggcaaaggcctgttcgatgacgaggacgaagagtccgatctgttcacggaagcatcccaggaccggcaggctggggcgtccgtcaaagaagaatcttctagctcaaagcctggtaagaaaattcctgctggagctgtaagtgtgtttcttggtgataccgacgtgttcggcgccgcatcagtgcccagcctgaaggagccacaaaaacccgaacagccgacaccacgcaagtctccgtacggcccccctcctactgggctgttcgatgatgacgatggggacgacgatgacgacttcttttctgctccccatagtaaaccatccaagactcgtaaggtgcagagtacagccgatatttttggcgacgaggagggggatctgttcaaagagaaggctgttgcaagcccggaggcgactgtgtctcagacagatgagaataaagcccgggctgagaagaaagtaaccctgagctacagcaagaatctcaaacctagctctgaaacaaagacccagaagggactcttttccgatgaagaagattcagaggatctgttctcaagccagtcagcaagcaacttgaaaggggcctctctgctgcctggcaagctgcccacctctgtgtcccttttcgacgatgaagacgaggaggacaacctttttggcggtaccgcggccaaaaaacagaccctgagcttgcaggctcagagagaggagaaggccaaagcatctgagctgtccaagaagaaagccagcgccctattgttcagctcagacgaggaatggaatattcccgcaagccagacccatctggcttctgacagccggtccaagggggaaccaagagattcaggaactctgcaatcacaggaggccaaggcggtcaaaaagacatcactgtttgaagaagataaagaggacgatctatttgctatagccaaggacagtcagaaaaagacacagcgcgtgtcactgctctttgaagacgacgtcgactctggaggaagtctttttggttctccaccaacctcagtgcctcccgcgactaaaaagaaggaaacagtgtctgaagctccacccctgctgttcagcgacgaggaggaaaaggaggctcagctcggggtgaaatcagtggacaaaaaggttgagtcagccaaagagtcccttaagttcgggcgaactgacgtcgccgaatcagagaaagaggggcttcttaccaggagcgcacaggagaccgtgaagcactcggatcttttctccagctcctccccttgggataagggaaccaaaccacggacgaaaaccgtgctcagcctgtttgacgaggaagaagataaaatggaggaccaaaacatcatccaggcccctcaaaaggaggtggggaagggctgcgacccagatgctcacccaaaatctaccggagtgtttcaggacgaggaactcctttttagccacaagttacagaaggacaatgatcccgacgtggacctgttcgccgggacaaagaagaccaaactgcttgagccatccgtgggtagcctctttggcgacgacgaagatgacgatctgttctctagcgcaaaaagccagccactggttcaagagaaaaagagagtagttaaaaaggaccactcagtgaattcctttaaaaatcagaaacaccccgagtctatccagggaagtaaggaaaagggcatttggaagccggagactccccaagctaatctggccatcaaccccgccgcactgctgcccactgcggcaagccagatcagtgaggtgaaacctgtgctccctgagctggcatttcccagctccgagcatcgccgcagccacggcctagagtctgtgcctgttttgcctgggtctggcgaggccggggtgtctttcgaccttcccgcacaggcagacaccctgcactctgcaaataaaagtcgagtgaagatgcgaggcaaacgcaggccccagactagagcggctagacgcctggcagcccaggagtcctccgaggccgaagatatgtctgtccctaggggacctatcgctcaatgggcagacggggcaatcagtccgaacggtcaccggcctcagctccgtgcagcttctggggaggacagcacagaggaagcactggccgccgcagcagccccatgggagggaggaccggtccctggggtcgacacctcaccctttgctaagtccctagggcattcccgcggtgaagccgacctgtttgactcgggcgacatcttctctacgggaaccggctcacagtcggtggagagaacaaagccaaaggcaaaaatcgcagagaaccccgcaaacccccctgtgggcggaaaagctaagtctccaatgttccccgctctcggtgaggcatcatccgacgacgacctgtttcaatccgccaagccaaagccagcaaagaagactaacccttttcccctgcttgaagacgaagatgatctgttcacagaccaaaaggtgaagaagaatgaaaccaaatcaagcagtcaacaggatgttatcctgactacccaagacatatttgaagatgatatctttgcgacagaagccattaaaccatcacaaaaaactagagaaaaagagaaaacactggagtctaatctcttcgatgataatatcgatatcttcgcagatttgacggtgaaaccaaaggaaaaaagtaaaaagaaagtggaagctaagtctatcttcgacgacgatatggatgacattttttcaacggggatccaagcaaagacaaccaagcccaagtcacgctctgctcaggctgccccggaaccccgcttcgagcataaagtgagcaacatctttgacgacccgctgaacgctttcggcggtcagtag

SEQ ID NO: 116571 - DNA, 3789 bp, synthetic construct
  misc_feature 1..3789: note = Description of Artificial Sequence: Synthetic coding sequence
  source 1..3789: mol_type = other DNA
atgaaccggactacccctgaccaagagctggtgcccgcatccgaaccagtctgggagagaccctggagtgtggaagaaatcagaagaagtagtcagtcttggtcgctggcagcagacgctggacgcgtttacgacgaagaggtcgaggagcctgtcctgaaagctgaggcggagaaaaccgaacaggaaaaaacacgggagcaaaaggaggtggacctgatccccaaagtccaggaagctgtgaattacggactgcaggtgctggactctgcattcgagcagctcgatatcaaggcgggaaatagtgactctgaggaagacgatgcaaacggccgagttgaactgatattagaacctaaggatctgtacatcgaccggcctctgccctatctcatcgggtctaaactgtttatggaacaggaagatgttgggttaggtgaattatcttctgaggagggatcagtgggctccgacagaggctcaattgttgacactgaggaagaaaaggaggaagaagagagcgacgaggacttcgcccatcacagcgacaatgaacagaaccaacatacgacccaaatgagcgacgaggaagaggacgatgacgggtgcgacctgtttgccgacagtgagaaggaagaagaagatatcgaggatatcgaggagaatacgaggcccaagcgcagtcgcccgacatcttttgctgatgagctggccgccagaatcaagggggatgccatgggtagagtcgacgaggaaccaaccaccctgccttctggggaggccaagccgcgcaagacactgaaggaaaaaaaggagaggcgaaccccttccgatgatgaagaggataacctgtttgcccccccaaaactgacagacgaggatttcagtcctttcggctccggggggggcctgttttctggaggcaaggggctgttcgatgacgaggacgaggagtccgacttatttaccgaggcttcgcaggaccgacaggcaggcgccagcgttaaagaagagtcttccagttctaaaccgggcaagaagatcccagctggcgcagtgagcgttttccttggcgacaccgacgtcttcggagcggcgagtgtcccgagcctcaaagagcctcagaagcctgaacagcccactcctagaaagtctccatacggacctccccctacaggactcttcgacgacgacgacggagatgatgacgatgatttcttctccgcccctcactcgaagccctccaagacacgcaaggtgcagtcaacagcagatatcttcggagacgaagagggagaccttttcaaggaaaaggcagttgcttctccagaagcaactgtgagtcagaccgatgaaaataaagcccgggcagagaagaaggttactctgtcatatagcaagaatctgaagccatcatcagaaaccaaaactcagaaaggactgttctccgatgaggaagacagtgaggatctgttttctagccaaagcgctagcaatctgaagggcgcgagcctcctaccaggtaagctgcctacttctgtctccctgtttgacgacgaggacgaagaggacaatctatttggcgggactgccgccaagaaacaaacgcttagtctccaggctcaaagagaagagaaggcgaaggcctcagagttgtctaaaaaaaaggcgagtgccctgctgttcagctccgatgaagaatggaatatcccagccagccaaacccacctggcatctgactcgagaagtaagggtgaaccacgcgacagcggcacgttgcagtcccaagaagccaaagctgttaaaaagacttccctgttcgaagaggataaagaggatgacctgtttgcgatcgcaaaagattctcagaagaaaactcagcgggtcagcttactcttcgaagacgacgtggacagcggagggtctcttttcggatcacctcctacctcagtgccccctgccacaaaaaagaaagagaccgtttcagaggcaccaccactgctgtttagcgacgaagaggagaaggaagcacagcttggagttaagtctgtggacaaaaaagtagagagcgccaaagagagtctcaagttcggaagaacagatgtcgcagagtccgaaaaagaaggtttgctcacacgtagtgcgcaggaaactgttaagcattccgacttattcagcagttcctccccatgggacaaaggcaccaaaccgcggactaaaacagttctctctctatttgacgaggaagaagacaaaatggaggatcaaaatatcatccaagcaccacagaaagaagtggggaagggttgcgaccctgatgcccaccccaaatctaccggcgtttttcaggacgaggagttgctattcagtcataagttgcaaaaggataacgatcctgacgtggacctgtttgcaggtaccaagaaaactaaactgttggaaccctccgtgggtagcttgttcggcgatgatgaggacgatgacctgttcagttctgccaaaagtcaacccctagttcaagaaaaaaaaagggtcgtaaaaaaagatcacagcgtaaactcgttcaagaatcagaagcatccggagagcatacaagggtctaaggagaagggcatttggaagccagagactccccaggccaatcttgctataaaccccgcagcactgctgcccaccgcagcctcccaaatttccgaggtgaaaccggtgttacccgagttggcctttccatctagcgaacataggaggtcacacggccttgaatctgtcccagtgctgccggggtcaggagaggctggtgtgagtttcgaccttcccgctcaggcagacaccctccactccgccaacaagtctcgtgtgaagatgcggggcaagcgcagaccacaaacaagagctgctagacggctggccgcccaagagtcctcggaagccgaggacatgagtgtgcctcgcggtcctatagctcagtgggctgacggcgccatctctcccaacggccaccggccacagctccgcgccgcttccggtgaggatagcaccgaggaggccctcgccgccgccgcagcaccatgggaaggcggacccgtgccaggtgtcgacacaagccctttcgccaaatccctgggccacagcagaggagaggccgacctgttcgattctggggacatcttctctacagggaccggatcacaatccgtcgagcggactaagcctaaagcgaaaatcgccgaaaatccagcgaacccacccgtgggcggaaaggccaaaagccctatgtttcccgcccttggagaggctagcagcgatgacgatctcttccagtcagccaagccaaaacccgctaaaaaaaccaacccgttcccattattggaagatgaggacgacctgttcactgatcaaaaggttaagaagaatgagaccaagtctagctctcagcaagacgtgatcctgaccacccaggacatttttgaggatgatatcttcgccactgaggctattaagccgtctcagaagacccgtgagaaggagaagactctcgaatccaacctctttgacgacaacatcgatatctttgccgatctgactgtaaagcccaaagagaagagcaagaagaaggtcgaggcaaagagcatcttcgatgacgatatggatgatatcttctctaccggcatccaggccaagacaacaaaacctaagtctcgatctgcacaggcagcccctgagccaagattcgagcacaaggtttccaatatcttcgacgaccccttgaacgcctttggtggccagtag

SEQ ID NO: 116572 - DNA, 399 bp, synthetic construct
  misc_feature 1..399: note = Description of Artificial Sequence: Synthetic coding sequence
  source 1..399: mol_type = other DNA
atggaggatcagaatatcatccaggcgcctcagaaggaggtcggaaaagggtgcgatcccgacgcacaccctaagtcaacaggagtcttccaggacgaggagctgctttttagccacaagttacaaaaggataatgatcctgatgtagacttgttcgctggaactaagaagaccaaactcctggagccaagtgttggcagtctattcggtgacgatgaggacgacgacctcttcagcagtgctaaaagtcaaccactcgtgcaagaaaaaaaacgggtggtcaaaaaagaccactctgtgaattctttcaagaaccaaaaacaccccgagtcaatccagggctcgaaggaaaagggcatctggaagcctgagacccctcaggtgaggaatccgctctag

SEQ ID NO: 116573 - DNA, 3963 bp, synthetic construct
  misc_feature 1..3963: note = Description of Artificial Sequence: Synthetic coding sequence
  source 1..3963: mol_type = other DNA
atgatgaatagaaccaccccagaccaggaactggtgcctgcaagtgaaccggtatgggagcggccgtggtctgtggaagagataagaagaagtagccagagttggtcacttgccgctgacgcaggtctccttcagttccttcaagagttttcacagcagaccatatctaggactcacgagatcaagaaacaggtggatgggttaattcgggagacaaaggccaccgattgtcgactccataatgtcttcaatgattttctgatgctatccaacacacagttcatcgaaaacagagtgtacgacgaagaagttgaagaaccagtgttgaaagcggaagcagagaagaccgagcaggagaaaacaagagaacagaaggaagttgatcttatccccaaagttcaggaggcggtgaactacggcctgcaggtgctcgattccgcctttgagcagctcgacatcaaagcaggtaacagcgactccgaggaggacgacgctaatggaagagtggagctgatactggagcctaaagacctgtacattgatcggcctctcccatatcttattggctccaagctgttcatggagcaggaggatgtagggttaggcgagttgagttctgaggagggatccgttggttcagatcgcggctcgattgtcgacactgaggaagagaaggaggaagaagaatctgatgaggacttcgcccatcatagtgacaacgaacagaaccagcatactacccagatgagcgatgaggaagaagatgacgacggatgcgacctgttcgctgattcagagaaggaggaggaagacattgaggatattgaggagaatacacgtcccaagcgtagtcgtccaaccagctttgctgatgaattagccgcacggatcaagggagacgccatgggccgagtggacgaagaaccaacaacactgcctagcggcgaagccaagccgaggaagacccttaaagagaagaaagaaagacggaccccttcagacgacgaggaagataacctattcgcaccgcctaagctcaccgatgaggactttagtccctttggatccggcgggggcctatttagtgggggaaaggggctgttcgatgatgaggacgaagagtctgacctgtttaccgaggcctctcaggacagacaggctggcgcgtcagtgaaagaagagtcctcttcatcgaagcccggcaagaaaatccccgcaggggcggtttctgtgttcctcggggatactgacgtatttggggctgcctccgtaccttctctcaaagaaccacagaagcctgagcagccaacacccagaaagtccccctacggtccaccccccacagggctcttcgacgacgacgatggagatgacgacgacgacttcttttccgcccctcactctaaaccttccaaaacccgcaaagtgcagtcgactgccgatattttcggagacgaagagggcgacctattcaaagagaaagctgtagcatctcccgaggccacggttagtcagacagacgaaaacaaggccagggcagagaagaaagtgactctgtcttactctaagaatttaaaaccttcttcagagaccaaaactcagaaaggactgttttcagatgaagaggattcagaagacctgttttcgtctcagtcggccagtaacttgaagggggcttctctcttaccagggaagctgcctacgagcgtttcactgttcgacgacgaagacgaagaggataatttgttcggtggcaccgcagccaagaagcagactttatcattgcaggctcagagagaggaaaaagctaaagcttcagaactgagcaagaagaaggcctccgccctactcttcagcagcgatgaggaggaccaatggaacatcccagcttcccagacacatctggccagtgactccaggagcaaaggagagcctagggattcaggcactttgcagtcccaggaagcaaaagccgtgaagaaaacatctctgtttgaagaggacaaagaggatgatttattcgcaatcgctaaggacagccagaagaaaactcaacgggttagtctcctgttcgaggatgacgtcgacagtggcggcagtctgtttgggagcccgcccacatcagtccccccagccaccaagaagaaagagaccgtttctgaggcgccacccctcctgtttagcgacgaggaagaaaaagaggcccagcttggagtgaaatcagtcgataaaaaggtcgagtctgccaaggagagtctaaagtttggacgaactgatgtcgctgaaagcgagaaggagggtttactcactaggtcggcccaggagacagtgaaacatagtgatctgttcagcagcagttccccatgggacaaggggacgaagcctcgtaccaagaccgtgctatccctgtttgatgaagaggaggataagatggaagaccaaaacatcattcaggcaccgcagaaggaggtcgggaaggggtgcgaccccgacgctcaccccaaatccacaggagtcttccaggacgaagagttattgttttctcataaactgcagaaggataatgatcctgacgttgatctgtttgccggaactaagaagacgaagcttctggaaccgtcagtcgggtctttgttcggtgatgacgaagacgatgacttattttcaagcgcaaaaagccagcctctagtgcaggaaaaaaaacgcgttgttaagaaggaccacagcgtaaactccttcaaaaaccagaagcacccagaaagcatacagggtagcaaggaaaaaggaatttggaagcctgagactccgcaggcgaacctggccatcaatcctgctgctttactcccaactgcagctagtcagatttcagaggtgaagccagtgttgcctgaactcgcttttccttcctccgaacaccgtagatcgcacggcttggagagcgtcccagtgctgccaggcagcggcgaggccggggtgtcatttgatctcccagcccaggcagacacattacactctgcaaataagtcccgggtgaagatgagagggaagagacgaccacagacccgcgctgcacgccgtctcgccgcccaggaaagctcagaagccgaggacatgagcgtgccaagaggcccaatcgcccagtgggctgatggggcaatatcaccaaacggccataggccccagttgcgcgccgctagtggcgaggactctacagaggaggccctcgcagccgctgctgctccttgggaaggggggccagtccctggggttgatacatctcctttcgccaagtcccttggccattctagaggcgaggctgacctgttcgattcaggagacattttcagcacaggcactggctcccagtccgtcgaaagaaccaaacctaaggctaagatagctgagaatcctgcaaaccctcccgtcggcgggaaagcaaagtcgcccatgttccctgcactgggagaggcttcatctgacgatgacttgtttcagtcggctaaacccaaacctgcgaagaaaactaacccattccctctgcttgaggacgaagatgatctgttcacagatcagaaagtgaagaaaaatgagaccaaatcttctagtcaacaggatgttattctgactacccaggacatcttcgaggacgatattttcgcaacagaagctattaaaccttctcagaagacacgagaaaaagaaaagacactcgagtccaacctctttgatgacaatatcgatatattcgcagacctgactgtgaagccgaaagagaaatcaaaaaagaaagtggaggctaaatctatcttcgacgatgacatggatgatattttctccaccggcattcaggcaaaaactacgaagccaaaatcccgcagcgcccaggccgcaccagaacctcgcttcgagcacaaggtctcgaacatattcgatgatccccttaacgctttcggcggacagtag

SEQ ID NO: 116574 - DNA, 4026 bp, synthetic construct
  misc_feature 1..4026: note = Description of Artificial Sequence: Synthetic coding sequence
  source 1..4026: mol_type = other DNA
atgatgaatcgaaccacacccgaccaggagctggtgccagcgtctgagccagtgtgggaacgaccttggtcagttgaggagatccgcagatcgtctcagtcttggtcactcgcggccgacgctgggttgttacagttcctgcaggaattctcacaacagacaatctcccgtactcacgaaatcaaaaagcaggtggacggtctcatccgggagacaaaggcgactgattgcagactccataatgtgtttaatgattttctgatgctaagtaacactcaatttatagagaacagggtgtatgacgaggaagtggaggagcctgttctaaaggcagaggcagaaaaaacagagcaggaaaagacccgcgagcagaaggaagttgatctgatacctaaggtgcaggaggcagtgaactacggcctgcaggtgcttgattccgctttcgagcagcttgatataaaggccggaaatagtgattctgaagaggacgatgccaacggccgggtcgaactgattctcgagcccaaggacctgtatattgatagacccctaccctatctcattggctcaaagctctttatggaacaagaagacgtggggttaggcgagctgtcatctgaggaggggagtgtagggtctgaccgggggtctatagtggacacggaagaggaaaaggaggaagaagagtcagatgaggactttgctcaccactccgataatgagcaaaaccaacatacaacccagatgtccgatgaagaggaagacgacgatggctgcgatttgtttgcagacagtgaaaaggaggaagaggacatcgaggacattgaagaaaatacacggccaaagcggagccgtcctactagttttgccgacgaacttgcagccaggattaagggcgacgccatgggtcgggttgacgaagaacccacaaccctgcccagcggggaagctaagcccaggaagaccctcaaagagaaaaaagaacgtaggactcccagcgatgatgaagaagataacctattcgccccaccgaagctcacagacgaggattttagtcctttcggatctggcggtggcttgttctctggcgggaagggcctctttgacgatgaggatgaagagagcgatctcttcactgaggcaagtcaggatcggcaggcaggcgcttctgtcaaagaagagagctctagttcaaagcccggcaaaaaaattcccgccggggctgtctctgtgttcttaggggacacagatgtgtttggcgccgcgtcagtaccatccttgaaagagcctcagaaaccagagcagcccacaccccgtaaaagcccttatggaccaccccccactggactcttcgacgatgatgacggggacgacgatgatgactttttctctgccccccactcaaagcctagtaaaacaggaaaggttcagagcaccgcagatatcttcggtgatgaagagggtgatctttttaaagagaaggccgtggctagtccagaggctacggttagccaaacggacgaaaacaaagccagagcggaaaagaaggtcactctcagttacagcaaaaatctgaagccaagcagcgagaccaagacccaaaagggactcttttcagatgaagaggactccgaggacctgttctcgtcacagtccgccagcaatctcaagggcgcctccctactgcccggcaagcttcccacatccgtgagcctgtttgatgatgaagatgaagaagataacctgttcggagggacagcagcaaaaaaacaaacattgagtttgcaagcccagcgagaggaaaaagctaaggcttctgagctgagcaaaaagaaggcctccgctctgctcttcagttcagacgaggaagaccagtggaacattcctgcctcccaaacacatctggcctctgactcgaggtcaaagggtgagccccgtgactccgggacgttgcaatcacaggaggcaaaggccgtgaagaaaaccagcctgttcgaagaggacaaggaggatgacctgtttgccatcgctaaggacagccagaagaagacacaacgagtgagcctgctgtttgaggatgatgttgattcaggtgggagcctgttcggatcccctccaacctccgtcccacctgccaccaaaaaaaaagaaactgtcagcgaagcccctcccttactgttctctgacgaagaggagaaagaggcccagctgggcgtaaaatcagtggacaagaaagtggaaagcgctaaagaaagtctgaagttcggcaggactgacgtcgctgaatctgaaaaggaaggactgttgacgcgtagtgcccaagaaacggtgaaacacagcgatctgttctcctcttcctctccctgggataaaggcacaaagccaaggacaaaaacggtactcagcttattcgatgaagaggaggacaagatggaggatcagaatatcatacaggcccctcagaaagaagtcggcaagggatgcgatccggatgcccacccgaagagcactggagtgtttcaggacgaggagctgctctttagccacaagttgcagaaagataatgacccagacgtggatctgttcgcaggaacgaagaaaacaaagctcttggaaccctccgtgggatcactcttcggggacgacgaggatgatgacctatttagcagtgcaaaatcacagccactggtgcaggagaagaaaagagttgtgaaaaaggatcactctgtcaactcctttaaaaaccagaaacaccctgagtctattcagggctccaaagagaaaggcatttggaagcctgagaccccacaggattccagtggactggccccatttaagaccaaagaaccctctacacgtattggtaagatccaggctaacctcgccatcaacccagctgcactactgccaacagcagcgtcacaaatctccgaggttaagccagtgttgcccgagctggccttcccttcttccgaacatagacgttctcacggcctcgaatccgtgcctgtactccctggttctggcgaggccggagtatcatttgacctgcctgcccaagctgacactcttcatagcgctaacaaaagccgggttaaaatgcgcggaaaaagacggcctcaaacccgtgccgctagaagactggctgcccaggagagcagtgaagctgaagacatgtccgtgccccgcggcccgatagctcagtgggccgacggcgcaatcagtcctaacggccatagaccacagttgcgagccgcctccggtgaggatagcacagaagaagctcttgctgctgccgcagcgccttgggaaggcggccccgtgccaggggttgatacatctcccttcgcaaagtcacttggccactcaaggggcgaggcagacctgtttgactcaggcgatattttctccacagggacagggtctcagtcagttgaacgtacaaagccaaaggccaagattgccgagaacccagctaaccctcctgtgggtggaaaggcaaagtctcccatgtttcccgccttaggcgaggcgtcgtctgacgatgatctgttccaatcagctaaacctaagccagctaaaaagactaacccatttcccctgctggaagatgaggatgatttgttcacggatcagaaggtcaagaagaacgagaccaagtcttcaagtcaacaggatgtgatcctcacaacccaggatatttttgaagacgatatctttgcaactgaagccattaagcccagtcagaagacaagagaaaaagagaaaacgttggagtcaaacctgttcgatgacaatatcgacatctttgcagatttaacagtgaagcccaaagagaagtccaaaaaaaaagtggaggcaaagtccatctttgacgatgatatggacgatatttttagcacaggaatccaggctaagacaactaagccgaagagccggtctgcgcaagctgcaccagagccccgcttcgaacacaaagtgtctaatattttcgatgatcccctgaacgctttcggagggcagtag

SEQ ID NO: 116575 - DNA, 840 bp, synthetic construct
  misc_feature 1..840: note = Description of Artificial Sequence: Synthetic coding sequence
  source 1..840: mol_type = other DNA
atgatgaataggacaacccccgaccaggagctggtgccagcctctgaacccgtgtgggaacgaccctggagcgtcgaagaaatacggagaagtagccagtcctggagccttgccgccgatgctggtcgggtatacgatgaggaagtggaggaacccgtgctgaaagcagaggccgagaagacagagcaggagaagacacgggaacagaaagaagtcgatctgatccccaaggtgcaagaagccgtgaattatggacttcaggtgcttgactccgccttcgagcagctcgacatcaaagcaggtaattctgattcggaagaagatgacgcaaacggccgcgtcgagttgattctggagcctaaggatctttatatcgaccggccacttccctacctaattgggagcaagctctttatggaacaggaggacgttggcttaggtgagctgagtagcgaagaggggtctgtcggttccgaccggggaagtatagtggatactgaggaggagaaagaggaggaggaatcagatgaggacttcgcgcatcacagtgacaacgagcagaaccaacacacaacacaaatgtccgacgaggaggaagatgatgatggctgcgacctgttcgccgatagtgagaaagaggaggaggacatcgaggacatcgaagagaacacaagacccaagcggagtaggcccacctcctttgcagatgagctggccgctcggattaagggcgacgcaatggggcgagtcgatgaagaaccaactacattgccttccggggaggcaaagcctcggaagacgctgaaggagaaaaaggagcgacgaactccctcagactag

SEQ ID NO: 116576 - DNA, 3762 bp, synthetic construct
  misc_feature 1..3762: note = Description of Artificial Sequence: Synthetic coding sequence
  source 1..3762: mol_type = other DNA
atgccgcgcctgagcgggaagtccgtgcgggtctatgacgaggaagttgaggagcccgtcctaaaagctgaggcagagaagaccgagcaagagaagacgcgagaacagaaagaagtagatctcataccaaaggttcaggaagcggtaaattacggacttcaggtgcttgattctgccttcgaacagcttgacatcaaggccggcaactcagactctgaagaggacgacgcaaacggtcgcgtcgagctgatactggaacctaaagatctgtatatcgatcgccctttaccttacctaattgggagtaagctgtttatggaacaagaggacgtaggcttaggtgaactctcatcagaagagggtagtgtgggcagtgaccggggatctattgtggatacggaggaggagaaggaggaggaagagagtgacgaagacttcgcgcatcacagtgataacgagcaaaaccagcacactacacagatgtcagatgaggaggaggatgatgatggatgcgacctcttcgcggacagtgaaaaggaggaagaagacatcgaagacatcgaagagaatactcgcccgaaaagaagcaggccaactagctttgctgatgaattagctgcccggatcaaaggcgacgccatgggaagagttgacgaagagcccaccactctgccttccggggaagccaagcctcggaagaccctaaaagagaagaaagagagacggaccccaagcgacgacgaagaggacaacctctttgcacctcctaagttgactgacgaagattttagtccattcggtagcggaggagggctcttctccgggggcaagggtctgtttgatgatgaagatgaagagagcgacttatttaccgaggcaagccaagataggcaggcaggagcgtctgtcaaagaggaatcgtctagtagcaaaccaggcaaaaagatccctgccggtgcagtatctgtttttctgggtgacacagacgtgtttggggcagcctctgtgccgagcctcaaggagcctcagaaaccagagcagcctacacccagaaaaagcccttatgggcctccaccaacagggctattcgacgatgacgatggggatgacgacgacgatttctttagcgcacctcactcaaagccctctaagacaggcaaagtgcagagcacagccgacatatttggagatgaggaaggagaccttttcaaggaaaaggccgtggcgtcccccgaggccacggtctcccagacagatgagaataaggcacgcgctgagaagaaggtcacactttcctacagcaagaacctaaagccgtcatccgagacgaaaacacagaaggggctgttctctgacgaggaagattctgaagacctcttttccagtcagagcgcgagcaatctgaagggtgcatcactgctgcctggcaaactgccaaccagtgtgagcctatttgatgacgaggatgaggaagataatttgttcggcggtacggcggcaaagaaacaaactttaagccttcaggcccagagagaggagaaggctaaggcaagcgaactgtccaagaagaaagcttctgccctactgtttagctcagacgaagaggatcaatggaatattccagcatcacagactcatctggcatccgattccaggtcaaagggcgagccacgagactctggaacactgcagagtcaggaggcaaaggcggtcaagaagacatcactgttcgaggaagataaagaagacgatctgtttgctatcgccaaggattctcaaaaaaaaacacagagggtgtcgttactgttcgaggatgacgttgactccggtggatccctctttggatcgccaccaacgtccgtgcctcctgccaccaagaaaaaggaaacagtgtctgaagcaccccccctgctgttttccgatgaagaagaaaaggaagctcagctgggagtcaagtcggtggataagaaggttgagtccgccaaagaatctctcaagtttgggagaacagatgtggcagagtccgagaaagaaggccttcttactaggtcagctcaggaaacagtgaagcactctgacctgtttagtagtagtagcccatgggataaaggtaccaaacctagaacaaaaaccgttctctctctcttcgacgaggaggaagacaaaatggaagatcaaaatataatccaggcaccgcagaaggaggtaggcaagggatgcgatccagacgcacacccaaagtctacaggggtgttccaggacgaggagttactgttctcacacaaacttcagaaagataatgaccctgacgttgacctcttcgccggcaccaaaaaaacaaagctcctcgaaccctctgtcgggagcctgttcggggatgatgaggacgacgacctgtttagtagcgccaaaagtcagcctctcgttcaggagaagaagagagtggttaaaaaggaccactccgtgaattcttttaagaatcaaaagcatccagaatctatccaaggctctaaggaaaagggcatctggaagcccgagactccccaggattcctccggcctggctcctttcaaaacaaaagagccctcaacacgtattgggaagattcaggctaacctggccataaacccggctgctctgctaccaactgctgcctcacagatcagcgaggttaagccagtgctcccagagctcgccttcccatcttcagagcacaggagaagtcacggcctggagtcggttcctgtccttcctgggtccggcgaggccggagtgagctttgatctgcccgctcaggctgacactctccactctgccaacaaaagtagagtgaagatgcgagggaagaggaggccacagacacgtgccgcacgaaggttggccgcacaggaatctagcgaggccgaggacatgtcggtccctcgcgggccgatagcccagtgggccgatggagccatttcgcccaacggtcataggccacagctgcgcgcagcatccggcgaggacagcaccgaggaagcgttggccgctgccgcagccccctgggagggcggaccggtgcccggggtggatacttccccattcgcaaagagtctggggcacagcagaggtgaagctgatctgtttgatagcggggatattttcagtacggggactggtagccagagtgtggagcgcactaagccaaaagccaagattgctgaaaacccagcaaatccccctgtcggaggcaaggcaaaatcaccgatgtttcctgcgctgggcgaagcctcatcagacgatgacctctttcagtcagcgaagccgaagcctgcaaaaaaaactaatccctttccactccttgaggatgaggacgatcttttcacagaccaaaaggtcaaaaaaaatgagaccaagagctcaagtcaacaagatgtgatactgaccacacaggacatctttgaggatgacatttttgccactgaagctattaaaccaagccagaagacgcgcgagaaagaaaagacactcgagtctaaccttttcgatgataacatagatatcttcgctgatctgaccgtgaagcccaaggagaaatccaaaaaaaaggttgaggctaagagtatattcgacgacgatatggatgacatattttccacaggcatccaggctaaaaccacaaaacccaagtctcgttccgctcaagctgcccccgaacccagattcgaacataaagtcagcaacatattcgatgaccctcttaatgctttcggaggacagtag

SEQ ID NO: 116577 - DNA, 3738 bp, synthetic construct
  misc_feature 1..3738: note = Description of Artificial Sequence: Synthetic coding sequence
  source 1..3738: mol_type = other DNA
atgatgaaccggacaacgcccgaccaggaattggttccagctagcgagccagtctgggaacgaccatggagtgtggaggagatacgccgatcctcccagagttggtctcttgccgccgatgccggcctgctgcagtttctgcaagaattcagccaacagacgatttctcgtacgcacgagatcaaaaaacaagtggacggattgatccgagagaccaaggccaccgattgtcgtctgcacaatgtgttcaatgactttcttatgctgagcaacacccaatttatcgagaacagggtttacgatgaggaggttgaggagcctgtcttgaaagcagaagctgagaagacagaacaggagaagacccgggaacagaaggaagtggatctgatcccaaaagtgcaggaagctgtgaattatggtctccaggtcctggatagtgccttcgaacagctggatataaaggccggaaactcagatagtgaagaggacgatgctaatggccgggtggagttgatcttggagccaaaagacctgtatatcgatcgccccttaccttacttgatcggcagtaaactcttcatggagcaagaagacgtcggactcggagaactaagcagtgaggaggggtccgtcggctccgatagaggcagcattgtcgacaccgaagaagaaaaggaggaggaggaatctgatgaggactttgcccatcatagcgacaacgagcaaaatcagcataccacacagatgtctgatgaggaggaggacgacgatgggtgcgacctctttgctgatagcgaaaaggaagaggaagacatcgaggacattgaagaaaacaccaggccgaagcggtcgcgcccgacatcgttcgcagatgagctggcagctcgcattaaaggtgacgccatggggcgcgtggacgaggagcccaccaacgaagaggataacctgttcgctccccccaaattaactgacgaagatttctcaccattcggatctggcggcggtctcttcagtggcggtaaaggactatttgacgatgaagacgaggagagcgacctgttcaccgaagcaagccaggaccgacaggcgggcgcttccgtgaaggaggagagctccagctctaagccgggaaagaaaatccctgccggagccgtttctgttttcctgggcgatacggacgtgttcggagcagcctccgtgccctccctgaaggagcctcagaaacctgaacagcccactccccggaaatccccatacggccccccacctacgggattattcgacgacgatgatggcgacgacgacgatgacttcttcagcgccccccactccaagccgtccaaaacccgaaaggtgcagtctacggcggatatctttggcgacgaagaaggcgacctcttcaaggaaaaggcggttgcctccccggaggccactgtctcacagaccgacgagaataaggccagggctgaaaagaaagtgaccctgtcttattccaaaaatctgaagccatcctcagagacgaaaactcagaaaggactcttcagtgacgaggaggatagcgaggacttgttctccagccaatccgccagcaacctgaagggggcttccctgcttcccggcaaactgccaactagcgttagccttttcgacgatgaagatgaggaagataacttattcggcgggactgctgccaagaaacaaacgctgagcctccaggctcagagggaagagaaagcgaaggctagtgagctttccaaaaagaaagcatcagcccttttgttctcgtctgacgaagaagatcagtggaatattcctgcttctcagactcatctcgcctctgactcccgctctaaaggggaaccgcgcgatagcggaaccctccaaagccaagaggccaaggcggtcaagaaaacttcgttgttcgaggaggacaaagaggatgatctgtttgcaatcgccaaagactcccagaagaagacacaaagggtgagcttgctttttgaggacgatgtggacagcggtgggagtttatttggcagtccacccacttcagtgccgcccgctaccaaggaggggctgcttaccagaagtgcccaagaaactgtgaagcactctgacctgtttagctcttcgtcaccctgggacaaaggcaccaagccccggacaaagactgtcctctctcttttcgacgaagaagaggataaaatggaggatcagaacattatccaagcaccccaaaaggaggtcggaaaggggtgtgatccagatgctcatccgaaaagtactggggtcttccaggacgaagagctgctgtttagtcacaagctccagaaggacaatgatcccgacgtagacctctttgccgggacgaagaaaacgaaattgctcgagccctcagtcggcagcttgtttggggatgacgaagatgacgatctgttcagctctgccaaaagccagccccttgtgcaggagaagaagcgcgtcgtgaaaaaggaccactctgtcaactctttcaagaatcagaagcatcccgaaagtatccagggtagcaaggaaaaagggatttggaagcctgaaacacctcaggctaacttggccatcaatcctgctgccctgctgccgaccgctgcctcgcagatatctgaggtgaagcccgttcttcccgaactggccttcccaagttctgagcaccgccggagccacggactagagtccgtacccgtgctgcctgggtccggggaggccggggtttctttcgacctccccgcccaggccgacactctgcatagtgcaaacaagtcgcgagtgaaaatgagaggtaagcgccggcctcaaactcgagccgctcgcaggctggccgctcaggagagctccgaggcggaagatatgtctgtgccccgcggacctatcgcccagtgggccgacggggccatttcccccaatggtcaccgaccccagctcagagcagcctccggagaggatagcactgaggaggctttggcagcagcggccgcgccctgggaagggggacctgtgcccggtgtggacacatccccgttcgcgaaatcgttaggccatagccggggcgaagccgacctttttgatagcggagacattttctccaccggaacggggagtcagagtgtcgaaaggacgaaacctaaggccaagattgccgagaatcccgccaacccccccgttggagggaaggccaaaagccctatgttccctgctttaggcgaggctagtagcgacgatgacctctttcagtcggccaagccaaagcccgccaaaaagacgaatcccttccctctgttagaagatgaggatgatctcttcactgaccagaaagtgaaaaaaaatgagactaagagcagttctcagcaagatgtgatcctgactacccaggatatattcgaagacgatatatttgctaccgaggccatcaaaccttctcagaagactcgcgaaaaagagaagactctggagagcaatttgtttgatgacaatatcgatatcttcgccgacctcactgtgaagcccaaggaaaaaagcaagaaaaaggttgaagctaaaagtatcttcgacgatgatatggacgacatcttcagtaccggcatccaagccaagacgactaagcccaagagtcgttccgcccaggccgcgcccgagcctagatttgaacacaaggtttcaaacatctttgatgatccgctgaacgcctttggcggacagtag

SEQ ID NO: 116578 - DNA, 3840 bp, synthetic construct
  misc_feature 1..3840: note = Description of Artificial Sequence: Synthetic coding sequence
  source 1..3840: mol_type = other DNA
atgatgaacagaacaactcctgaccaggagctcgtgcctgcgtctgagcccgtttgggaaaggccttggtccgttgaagagatccggaggagttctcagagttggagtcttgcagccgacgccgggctgttacagtttctgcaggaatttagccagcagacaatcagtaggactcacgaaattaagaaacaggtggacggtctgatccgtgaaaccaaggccacagactgcaggctgcacaacgttttcaacgactttcttatgttaagcaatacgcagtttattgaaaaccgcgtatatgatgaagaggtggaggagccagttctgaaagctgaagcggagaaaaccgagcaggaaaagacaagggaacaaaaggaagttgacttgataccaaaggtccaggaggccgtgaactacggcttgcaggtactcgacagcgcttttgaacagctggacattaaggctggtaactcggactctgaggaagacgacgcgaacggcagggtggaactaattttggaacccaaagatctctatatagatcgccctctaccttatttaatcggcagcaaattgtttatggagcaggaagatgtcgggttgggagaattgtcctcagaggaaggttcagtgggaagcgacagaggtagtattgtggataccgaagaggaaaaggaagaggaggagagcgatgaggatttcgcacatcatagtgacaacgagcaaaatcagcatactacccagatgtccgacgaggaggaagacgacgacggttgtgacctgtttgctgattccgagaaggaagaggaggacattgaagacattgaagagaacacaaggccaaagagatctcgtcctacaagtttcgccgacgagcttgccgctagaatcaagggggatgcaatgggccgggttgacgaggagcccacaacactgccctccggcgaggcgaaaccgcggaaaaccttgaaagaaaaaaaagagcgccggacaccttccgatgatgaggaagataatctattcgccccacctaagctgactgatgaagatttcagccccttcggatcaggaggaggattattcagtggcggaaaaggcctgtttgacgacgaggacgaggagtcagacctcttcacagaagcatcacaggaccgccaggccggtgctagtgtgaaagaggaaagttcgtcctctaaacccggaaaaaagatccctgcgggcgcagtgtctgtgtttttgggggacacagacgtgttcggagccgcctctgtgccgtccttaaaggagcctcagaagcccgaacagccgactccccggaagtccccatatggtcccccaccaactggcctcttcgacgacgatgatggtgacgacgacgacgactttttttcagctcctcattcaaaacccagcaagactaggaaggtgcagagtaccgcagatatcttcggagatgaggagggagacctcttcaaggagaaggctgtagctagccccgaagccacagtaagtcagacagacgagaataaggcacgcgctgaaaagaaggtgaccctgagttactccaaaaacctaaagccatcctccgagacaaagacacagaagggcttgttctcagacgaagaggattcagaggacctattcagttctcagagtgcctctaatctcaagggagcatctctgttacccgggaagctgcccacctcggtgagcctctttgatgacgaggacgaggaagataatttgttcggaggtactgctgctaagaagcaaacattgtcactgcaggcccagcgtgaagaaaaggccaaggccagcgagttgtctaaaaaaaaggcgtctgcacttctcttcagttctgatgaggaggaccagtggaacattcctgcctctcagacacacctggccagcgatagcaggtctaaaggggagcccagggattccggtacactacaatcacaggaggccaaagccgtgaagaaaacaagcctgttcgaagaggacaaagaggatgacttgtttgctattgccaaggattctcagaagaagacccaacgggtgtcactcctctttgaggacgatgtcgacagcggaggttctctgttcgggagcccccccacatcggtgccacctgccacaaaaaaaaaagaaaccgtttctgaagctcctcctctgctgttctccgatgaggaggagaaggaggcccagctcggggtgaagtctgtcgacaagaaagttgagtctgctaaggagagtctgaaatttggacgaacggacgtggcggagagtgaaaaagagggtctgctgacgaggagcgcgcaggaaactgtgaagcacagcgacctattttcttccagctctccttgggataaggggaccaagcctagaaccaagacggtattaagcctgttcgacgaggaggaagacaagatggaggatcaaaatattattcaagcacctcagaaagaggtcggcaaaggatgcgatccagacgctcatccaaaaagcaccggagtcttccaagatgaagagctacttttttcgcacaagttacagaaggacaacgatcccgatgtggacctgtttgccggtactaagaagaccaagctcctggagccatcggtcggtagccttttcggcgacgacgaagatgacgatctgttctcgtccgctaaatcccagcctctggctaaccttgcaatcaaccctgctgccctcctgccaacagctgctagccagataagcgaggtcaaacccgtactgcctgagcttgcttttccgtctagtgagcaccgccgtagtcatgggctggaaagtgttccggtcctgcctggatccggcgaggccggggtgagtttcgaccttccagcccaggctgacacactccatagcgcaaataagtcccgcgttaagatgcgcggaaaaaggcgtccacagacccgcgccgcacggaggttggcagctcaggaatcctcggaagctgaagatatgtccgtccccagggggcccattgcacagtgggctgacggggcaatcagcccgaacggccataggccccagctgcgggccgcatccggcgaggacagcactgaggaagcactggcagctgcagcggccccgtgggaaggcggccccgtgcccggagtggatacatccccattcgcaaagagcttgggccacagccggggcgaagctgacttgttcgactctggggacatcttctcaactggcacggggagccagagcgtggagaggacgaagcctaaggctaaaatcgctgaaaacccagccaatcccccagtcggaggaaaggccaagagcccaatgtttcccgctctgggcgaggcctcaagcgatgacgacttgttccagtctgctaaaccaaaaccggctaagaaaaccaacccgtttcccttacttgaggatgaggacgatttattcaccgatcagaaggtcaagaaaaacgagacaaagagctccagccagcaggacgtgatcctgactactcaagacatatttgaggacgacatctttgcaacagaagccatcaaaccgtctcagaagacccgggagaaggagaaaactctcgaatccaatctgtttgatgacaacatcgatatttttgctgacctgacggtgaagcctaaagagaagagtaagaaaaaagtggaagcaaaatcaatttttgatgacgacatggatgacattttcagcacaggaatccaagccaagacgaccaaacctaagtccaggtctgcccaggctgctcccgagcctaggttcgagcacaaggtgtctaatatattcgacgaccccctgaacgcgtttggaggacagtag

SEQ ID NO: 116579 - DNA, 1329 bp, synthetic construct
  misc_feature 1..1329: note = Description of Artificial Sequence: Synthetic coding sequence
  source 1..1329: mol_type = other DNA
atggccgagggggaagggtattttgccatgtccgaggacgagctagcttgttcaccttacatcccactgggaggagactttggtggtggcgattttggaggcggcgatttcgggggcggggacttcgggggcggcggtagttttgggggacactgcttggactactgcgaaagccccactgcccattgtaacgtccttaattgggaacaagtgcaacgcctagacgggatcctgtccgaaactattcccatccacggtcgcggtaacttccccaccctggagctgcagccaagcttgattgtgaaagtggtgcggcggagactggccgaaaagcgtattggagtgcgggacgtgaggctgaatggctctgctgcctcacatgtgcttcaccaagactccgggttgggatacaaagatctggatctgatattttgtgctgatcttagaggagaaggagagtttcaaaccgtaaaagatgtggttctcgattgtctgctggattttctgcccgagggggtgaacaaggaaaagattacccctctcactcttaaagaggcctacgtccagaaaatggttaaggtgtgtaatgattccgatcggtggagcctgattagcctatcaaacaattcagggaagaatgtggagctcaagttcgtcgatagcctgaggcgtcagttcgagtttagtgtggacagctttcagattaaactggactcacttctgctgttttatgaatgctctgaaaaccccatgacggagacctttcatcctaccataattggagagtccgtatatggggattttcaggaggcatttgaccacctctgcaacaagattattgccacccgtaacccggaggaaattagaggcggtggtctgctcaaatactgcaacttactggtgcggggcttcagacctgccagtgacgaaattaagacactgcagaggtatatgtgcagccggttctttattgactttagcgatatcggtgagcagcagaggaaacttgaatcgtacctgcagaatcatttcgtaggcctcgaggatagaaaatacgaatatttaatgaccctgcacggtgtggtgaatgagagcaccgtctgcctgatgggacatgaacgccgtcagaccctgaacctcattacaatgctggctataagagtgttagctgaccagaacgttatcccaaatgtggctaacgtgacctgttactaccagcccgcaccttacgtggcggacgccaacttttctaattactatatcgctcaggttcagcccgtcttcacttgtcagcagcagacttattctacctggcttccatgtaattag

SEQ ID NO: 116580 - DNA, 1176 bp, synthetic construct
  misc_feature 1..1176: note = Description of Artificial Sequence: Synthetic coding sequence
  source 1..1176: mol_type = other DNA
atggccgaggaatcatcatgcacacgcgactgtatgtccttttccgtgcttaactgggatcaggtgtcaaggctgcatgaggttctaactgaggtggtgccgatccatgggagagggaacttcccaactctggagataacccttaaagacatcgtgcaaaccgttaggagtagattggaagaggccggcataaaggttcacgatgtgcggctcaatgggtcagccgccggacatgtcctcgtgaaggataacggcctgggttgtaaagaccttgacctcatctttcatgttgccctgcccactgaggcagagttccaactggtgagagatgttgtgttgtgtagcctcctcaattttctgcccgagggtgtaaacaagctcaagatatcacctgtcaccctaaaggaggcctatgtgcaaaagctcgtcaaggtatgcacggatactgacagatggagtctgatctctctttccaacaaaaatggcaaaaacgtggaactgaaattcgtggattctatacgaaggcagtttgaattctcagtcgattccttccagatcatactggactccctgttatttttctacgactgctcaaataacccaatcagtgagcactttcatccaactgtgattggagagagtatgtacggcgatttcgaggaggctttcgaccacctgcagaaccgactgattgcaacaaaaaatcccgaggagatccgaggcggcggcctgctgaagtatagcaatttgctggtacgagatttcagacccaccgatcaagaggaaattaagaccttggagcgatatatgtgtagcagattcttcattgatttcccggacatcctggaacaacagcggaaactcgaaacatatctacaaaaccacttcgccgaagaagaacgatccaagtatgactacctgatgatcctgagaagggtggttaacgaaagtactgtttgtctgatgggtcatgagagacggcagactttaaatctcatttccctgttagctctgcgggtgctggccgagcaaaatatcataccgtccgcaaccaacgtaacatgctactatcagcctgctccttacgtaagtgatggcaatttcagcaattactatgtggcccacccccccgtgacatacagtcagccatatccaacatggttgccttgtaattag

SEQ ID NO: 116581 - DNA, 2340 bp, synthetic construct
  misc_feature 1..2340: note = Description of Artificial Sequence: Synthetic coding sequence
  source 1..2340: mol_type = other DNA
atgcagcaagccctcgaactcgccctagatcgtgctgaatatgtcatcgaaagtgcaaggcaaagaccccccaaacgaaagtacttaagcagtggcagaaaatccgtgttccagaagctctatgacttatacatcgaggagtgcgagaaagagcctgaagtgaaaaagctgagacggaacgtcaaccttctggaaaaactcgtgatgcaggaaaccctgagctgtttggtggtaaacctgtacccgggcaacgaggggtactctctcatgttaagaggcaagaacggaagcgactctgagacaataagactcccctacgaggagggcgaactactagagtatcttgatgctgaggaactgccgccgatcctggttgatcttctcgagaaatcccaagtgaacatctttcactgtggctgtgtcatcgctgagataagagactatcgacagtcctccaatatgaagagccctggctaccagtcacggcatatcctccttcgacccactatgcagacactaatctgtgacgttcattcgatcactagcgataatcacaagtggacccaggaggataagctgctcctagagtcccaattaattctggcgacagctgaacccctgtgtctggaccctagtatcgccgtaacttgtaccgcgaatcgcttgctgtataacaaacaaaaaatgaacactcgccctatgaagcgctgcttcaaaaggtacagtcggtctagtctgaaccggcaacaggacctttcccactgtccaccaccaccccagctgcgtctcctggattttctccagaaaagaaaggaaaggaaagcagggcagcattacgatctgaaaatttccaaagccggcaattgtgtagatatgtggaagcgctctccttgtaaccttgccataccatctgaagtggatgtggagaaatacgccaaggtggaaaagagtatcaagtcggacgatagtcagccgaccgtgtggcctgcacacgacgtcaaggacgattacgtcttcgagtgtgaagcaggcacccagtaccagaaaactaagctcacgatcctccagtcactgggtgatcccctgtactacggaaagatccagccttgtaaggctgacgaggaaagtgactcccagatgtcgccatctcactccagcaccgatgaccacagcaactggtttattatcggctctaagactgacgcagaacgggtggtcaaccagtaccaggagctggttcagaatgaagctaagtgccccgttaaaatgtctcattccagttccggctccgcgagtctaagtcaggtgtcccctggcaaggagacagaccaaactgagaccgtgagtgtgcagtcttccgtgttgggtaaaggcgtcaagcacagacccccaccgatcaaactccccagttctagtggaaattccagcagcgggaactattttactcctcagcagacgagcagcttcctgaaatctccgactccccccccgagctctaagcccagcagtatcccacgcaaatcttcagtagatctgaatcaggtcagcatgttgtctcctgccgccctgagtcccgcatcgagctcccaacgtactactgctactcaggtgatggcgaactctgccgggctcaacttcatcaatgtggtaggttccgtatgcggggcacaggccctaatgtcaggcagtaatcctatgctgggatgtaacactggtgccataaccccagctggcatcaacttatctggcctgctcccctctggaggcctgctgcctaatgccttaccgagtgccatgcaagctgcctcccaagcaggggttccctttggactgaaaaacaccagctccctccggccattgaacctgttgcagctcccaggaggttctctgatatttaatacactgcagcagcagcagcagcagctgtcacagtttactcctcagcagccacagcagcccaccacctgttccccacaacagcccggcgagcaaggaagtgagcaagggagcacatctcaagagcaagccctgagcgcgcagcaagctgcggtaatcaatttgaccggcgtgggttcgtttatgcagtcacaggctgccgtgttgtcacagttgggcagcgccgaaaaccggcccgagcagtcacttccccagcaacgcttccagctctcctccgccttccagcagcagcaacagcagatccaacagttaaggttcctccaacaccagatggcgatggctgccgccgccgcccagaccgcccagctgcaccatcacaggcataccgggagccagagcaaaagtaagatgaaaagaggcacaccaactacgccgaaattttag

SEQ ID NO: 116582 - DNA, 2202 bp, synthetic construct
  misc_feature 1..2202: note = Description of Artificial Sequence: Synthetic coding sequence
  source 1..2202: mol_type = other DNA
atgcagcaggctctggagctggcccttgatcgagcagaatacgtcatcgaaagcgcgcgccagcgcccaccaaagagaaagtaccttagtagcggccggaagagcgtgttccagaagctgtatgacctgtatatagaggagtgcgaaaaggagcccgaagtaaagcagaagttgcgcaggaacgtaaatctcctcgagaagctggtgatgcaagagacattgagttgcctcgttgtcaacctgtacccaggcaatgagggttatagcctcatgctgcgcggtaagaacgggtcagattccgagacaattaggcttccctacgaggagggcgagctgctcgaatatctggacgctgaagagcttccaccaattctcgtggatttgttggagaagagtcaggtaaatatttttcattgcgggtgtgtgattgcagagatacgcgattataggcagagctctaacatgaagagccccggataccaatccagacatattctgttgcgaccgactatgcagaccctgatttgcgacgtccacagcattacaagcgacaaccacaaatggactcaggaggataaactgctgctagagtcgcagctcattctggccaccgcggagccactgtgtctcgacccctcaatcgctgtcacatgtacggcgaataggctgctgtacaacaaacagaaaatgaacacgcgccccatgaaaagatgtttcaaacggtattcccggtccagcctgaaccggcaacaggacctttctcactgtcccccccctccccagttaagactgctagactttctgcagaaaagaaaggagaggaaagccggccagcattatgacctcaagatcagtaaggcaggtaattgcgtcgatatgtggaagagatctccttgcaatctcgcgatcccctcagaggtggacgtggaaaaatacgctaaagtggagaagtccatcaagtcggatgattcacagcccacggtgtggccagctcatgatgtaaaagacgactatgtctttgagtgtgaagccgggacgcagtaccagaaaacaaagctgaccattctgcagagcctgggcgaccccctgtattatgggaaaattcagccctgcaaagctgacgaagaaagcgatagccagatgagccctagtcatagtagtaccgacgaccacagcaattggtttatcattgggtctaagaccgatgcggaacgggtcgtgaaccaataccaggagttagtgcagaatgaagccaaatgccccgtgaagatgagccacagctctagcggctcagcctctctcagtcaagtttcccccgggaaagagaccgatcagacggagaccgtgtccgtgcagtcctctgtgcttgggaagggagtgaagcatcggccacctccaattaaattacctagctcatctggcaattcaagttcaggcaattattttactcctcagcagacaagcagcttcctcaagtctccaacgccccctccatcaagcaaacccagctccatcccccgcaagagctctgtcgatctgaaccaggtgagcatgcttagtccagccgccctgagcccagccagctcgagccagcgcactaccgctacccaggtgatggcaaactcagccgggctcaactttatcaacgttgtgggctccgtgtgcggagctcaagctttaatgtcgggaagcaatcccatgctgggctgcaacacaggcgctatcacacctgctggaatcaatcttagtggccttcttcctagtggtgggctcctcccaaatgccctgccttcggccatgcaggcagcctctcaggccggcgtgcctttcggactgaagaacacatcaagccttaggccgttgaacctccttcaattgcccggggggtcacttattttcaacactttgcagcagcaacaacagcagctatcacagtttaccccccaacagccacaacagccaacgacgtgctccccgcagcagcctggtgaacagggatccgagcagggaagtacgagccaagagcaggcactgtcggcacagcaggcagcggtgatcaacctaactggagttggaagtttcatgcagagtcaggctgctgcggtcgcgattctcgccgcttctaacggatacggcagttctagttcgaccaacagctctgctacatcatcttccgcctaccgtcagcctgtcaagaagtag

SEQ ID NO: 116583 - DNA, 2202 bp, synthetic construct
  misc_feature 1..2202: note = Description of Artificial Sequence: Synthetic coding sequence
  source 1..2202: mol_type = other DNA
atgcagcaagcgctggaactggcacttgaccgtgcagaatatgtgattgaatctgcaaggcagagacctcctaagcgaaagtacctgagcagcgggagaaagtccgtgtttcagaagctttatgatttatacattgaggaatgcgagaaagagccagaagtgaaacagaagcttagacgaaacgtcaatctgctggaaaaactggtgatgcaagagacgctgtcctgcctcgtcgttaacctttaccctggcaacgagggttactcccttatgcttcggggaaaaaatggttcggatagcgaaactattcggcttccgtacgaggagggcgagttgttagaatacctagatgctgaagaactcccccccattctcgtcgacctcctagaaaaatcacaggtgaacattttccactgcggatgtgtcatcgccgagattcgggattaccggcagagctccaacatgaagtcccccgggtatcaatccaggcacatcctgctgagacccactatgcaaacactcatctgtgacgttcactctattacttccgataatcataaatggacccaggaagataaactgctgctagaaagtcagcttattctcgctactgcagagccattgtgtcttgatccgtcaatcgccgtgacctgtacagcgaaccgcctcctgtacaacaaacagaagatgaacacaagaccaatgaaaaggtgcttcaaaagatacagcaggagttcgcttaaccgccagcaggacctgagtcactgccctccaccgccccagctgcgactgcttgacttcttgcagaagagaaaggagcgtaaagctggacagcactacgatcttaagatctccaaggccggaaattgcgtagatatgtggaagaggagcccctgtaacttggccatcccaagcgaggtggacgtggagaaatatgcaaaggtggagaagtccataaagagcgacgatagccagccaacggtctggcccgcacatgatgtgaaggatgactatgtttttgaatgcgaggccggcacccaatatcaaaagacaaaactgaccattctgcaatcattaggcgaccctctttactatggtaagattcagccctgcaaagcagacgaagaaagcgattcccaaatgtctccgtcacactcttccaccgatgaccactccaactggttcataattggctcgaagacagatgccgagagagtcgtgaaccagtatcaggagctcgtgcagaacgaagccaaatgcccagtcaagatgagccacagttcaagcggcagcgcttccctgtcccaggtctcccccgggaaggagactgatcagactgaaacggtctctgtgcagtccagtgtactgggtaaaggagtgaagcaccgccctccaccaataaagctccctagtagcagtggcaacagtagttcgggcaactattttaccccgcagcagacatcttcattcctgaagagtcctactcccccaccttcttccaaaccatcgagtatcccgcgcaagtcaagtgttgatttgaatcaggtgtcgatgcttagcccagccgctctgtcacctgcaagcagcagccagcggactacagcaacacaagtgatggccaactcagcaggcctcaacttcattaatgtagtgggatccgtgtgtggcgcacaggctctcatgtctggctccaacccaatgctgggctgcaacaccggagccatcacgccggctgggattaatctatctggtttgctgccgtctgggggcttgctgcccaatgcactgcctagcgccatgcaggcggcgtcccaggccggggttccatttggcctaaaaaatacctcttctcttcgccctctcaaccttctgcagctccctggcgggtcgctgatcttcaatacactgcaacaacagcagcagcaactctctcaatttaccccccagcagccgcaacaacccactacatgctcaccccagcagcccggggaacagggtagtgagcaagggtcgaccagtcaggaacaggccctatccgctcagcaggctgctgtgatcaatcttactggtgtcggatcttttatgcaatcacaggcagcagctgtggccatattagcggcttcaaacggatacggcagcagtagttcaactaatagtagtgcgacatctagcagcgcctaccggcaacccgtaaagaaatag

SEQ ID NO: 116584 - DNA, 2202 bp, synthetic construct
  misc_feature 1..2202: note = Description of Artificial Sequence: Synthetic coding sequence
  source 1..2202: mol_type = other DNA
atgcaacaggcccttgagctggccctggatcgggccgagtatgttatcgaatccgcaagacaaaggccgccgaaaaggaaatatctgagctcaggcagaaaaagcgtgttccagaagctgtacgatttatacatcgaggagtgcgaaaaagagcccgaagtgaagcaaaagctccgtagaaacgtgaatctcctggaaaagctggtcatgcaggaaacattgagttgcctcgtcgtgaacctgtaccccggcaacgaaggatacagcttaatgctgagaggtaaaaacggttccgactctgaaaccattcgcttgccttacgaggagggtgaattactggagtacttagatgctgaggagctgccccccatcctggtggatctcctcgaaaagagtcaggtgaatatttttcactgtgggtgcgtaattgctgagatacgagactaccgtcagtcgtccaacatgaaaagcccaggttatcagtcgagacacatattgctgcgccccacaatgcagacacttatctgtgatgtgcacagcatcacatctgataaccacaagtggacacaggaggacaaactcctgctcgagagtcagttaatcctcgctacagctgaaccactgtgcctggacccttccattgccgtgacatgcactgccaataggctcctttacaataagcaaaaaatgaatactagaccaatgaaacgctgtttcaagcgctactccaggtccagcctcaatagacaacaggacctgtcccactgtccaccaccaccccaactccgcctgctagacttcttacagaagcgaaaggagcgcaaggcaggccaacattatgacctgaagatctccaaagcgggcaactgtgttgatatgtggaaacgaagtccctgcaacctggctatcccatcggaggtggatgtagaaaagtacgccaaggtggagaaatcaatcaaatctgatgactcccagccaactgtgtggccagcccacgatgttaaagacgactacgtgttcgaatgcgaagcaggcacccagtatcagaaaacgaagcttaccatcctgcagagcctgggtgatccgctctattatggcaagatacagccctgcaaggcggacgaggaaagcgattctcaaatgagtcctagccatagttcgacagacgatcatagcaactggttcataatcggcagcaagaccgatgccgaacgcgtggtgaatcagtaccaggaactggtacaaaacgaagcgaagtgcccagtgaaaatgtctcatagtagctccgggtcagcaagcctctcccaggtctcaccaggtaaagagacagatcaaacagagacagtgagcgtccagagctctgtcctcgggaagggcgtcaagcacagacccccccccattaaattacccagttcatcgggcaactcaagttctggcaactacttcaccccccagcagaccagcagcttccttaagtcccctacgccgcccccatctagtaagccaagctccatccctaggaaatcaagcgttgaccttaatcaggtgagcatgctctctcccgctgcactgagcccagctagtagttcacagaggaccacagctacacaagtgatggccaatagtgctggcttgaacttcattaatgtcgtgggaagcgtttgcggcgcgcaggcactgatgagtggctcgaacccaatgttagggtgcaatacaggcgctataacacccgctggcatcaatttaagcggcctgcttccatccggcggattactccccaacgcactgccgtccgccatgcaggccgcctcccaggcgggagtaccgttcggactgaaaaatacatcttctctcaggcctttaaaccttcttcagctgcctgggggctcattaatcttcaacacactgcagcaacagcaacagcaactgagtcaattcactccacagcagcctcaacagccaaccacgtgcagcccccagcagcccggggaacagggatcagagcaggggagcaccagccaggagcaggcactgtctgctcagcaggccgcagtcattaacctcaccggcgtggggtcatttatgcaatcccaggccgccgctgtcgccatcttggctgcctccaatggatacggaagttcaagctcaacgaattcaagcgcaaccagctcctcagcatacagacaaccagtgaagaaatag

SEQ ID NO: 116585 - DNA, 2217 bp, synthetic construct
  misc_feature 1..2217: note = Description of Artificial Sequence: Synthetic coding sequence
  source 1..2217: mol_type = other DNA
atgcaacaggcacttgagcttgccttagacagagctgagtatgttatcgagagtgcccggcagaggcctcctaagaggaagtacctgtcctccggtaggaaatctgtgttccaaaagctgtacgacctttatattgaagagtgtgaaaaagagcccgaggtgaagaagctgcgccggaatgtgaatttgctggagaagttggtcatgcaggagaccttgagctgtctggtggtgaacctctacccaggcaacgaaggatactcactcatgctgagagggaaaaacggaagtgacagtgaaacaatccggcttccctatgaagagggagagctgcttgaatatctggatgcagaagaacttccgccaatcctagtggatctgctggaaaaaagtcaggtgaatatttttcattgcggctgcgtgattgcagagatacgcgattaccgccagtcaagtaacatgaaatcccctggctaccagtcacgacatattctgctcagacccacaatgcagacgttgatctgcgatgtccactctatcaccagcgataatcataagtggacacaggaggacaagctgctcctggagtcccagttgattcttgccacagctgagcccctttgtttggaccccagcattgcggtgacctgtacagctaaccgccttctgtataacaagcagaaaatgaacaccaggcccatgaagcgctgttttaagagatacagcagatctagcttaaatcgccagcaggacttgagtcattgtccaccaccccctcagttgagactgctcgatttccttcagaaaaggaaggagaggaaagcgggacaacactatgatttaaagatctctaaggcaggaaattgcgttgatatgtggaagcgctcaccatgcaatttggcaataccatccgaggtggacgtcgagaagtacgctaaagtcgaaaaaagcatcaaatctgacgatagccagcctactgtgtggcctgcacacgacgtgaaagatgactacgtcttcgagtgtgaggccggaacgcaataccagaaaacaaagctcactatcctgcaatctttgggtgatcccttatactatggtaaaattcaaccgtgtaaggctgacgaagaatccgatagtcagatgtcacccagtcacagctctactgacgatcattcaaattggtttattattggctccaaaactgacgctgaaagggtagtgaaccagtaccaagaactggtacagaatgaagctaagtgccctgtgaagatgagccatagttcgtctggtagtgcaagcctttcgcaggtgagccctgggaaggaaacggaccagacagaaactgtatctgtgcagtctagcgtgctgggaaagggggtgaaacaccggcctccgccaatcaagctgccttctagtagcggcaactcctcatccggtaactactttacccctcagcaaacctcaagctttctgaaatcacccaccccccctccgagctctaagcctagcagtatcccccgcaagagcagtgtcgacttgaatcaggtgagcatgctatcccctgccgctttgagccccgctagctccagccagcgcacaacagccactcaggttatggccaacagcgccgggctgaacttcatcaacgtcgtgggctcagtatgcggtgcgcaggccctcatgtcagggtccaatcctatgctcggctgcaatacaggcgctatcacgcctgccgggatcaatctgtctgggctgctgccatccggtgggttactgccaaacgcactgccctcagccatgcaggctgcttctcaggcaggggtaccattcggcctgaagaacacaagcagcctgagaccactcaacctgctgcagctgccaggaggatctcttatcttcaatacactgcagcagcagcaacagcagctgtcccaatttaccccccagcagccacagcagccaactacctgctcgccccagcagcctggggaacagggttctgaacagggctcaacgagtcaggagcaggccctctcagcccaacaggccgctgtgataaacctcaccggcgtgggctcttttatgcagagccaggccgcagctgtcgcaattttggcggcttctaatgggtacgggtcatccagctctacaaattcctctgccacgagctcctcagcttacaggcagcccgacacacgggccctgaatcagaagaactag

SEQ ID NO: 116586 - DNA, 1497 bp, synthetic construct
  misc_feature 1..1497: note = Description of Artificial Sequence: Synthetic coding sequence
  source 1..1497: mol_type = other DNA
atgtatgtcatagaaagcgcacgtcagaggccgcctaaaagaaagtacctcagctccgggcgaaagagtgtctttcagaagctgtatgatttgtatattgaggagtgcgagaaagagcctgaggtaaaaaagttgagaagaaacgttaatttgcttgaaaaactggtaatgcaggaaaccctgtcttgcctcgtggtcaatctctaccctggaaacgagggctacagcctcatgctcagaggcaagaacgggtctgactcagagacaattagattgccttatgaggagggcgaattgcttgagtacctggacgccgaagaactgcctccgatccttgtggatctccttgaaaagtcccaggttaatatctttcattgtgggtgtgtgatcgctgaaattcgggactatagacagtcatccaatatgaaatcccccggttatcaatcgcggcacatcctgttacgccctacgatgcagactctaatttgtgacgtgcactcgattacgagtgataaccacaagtggacccaggaggataaactactgctggaaagccagttgattctggccaccgctgagccactgtgcttagaccccagcattgcagtcacctgtacagctaatagactgctttataataaacaaaaaatgaatacaaggcccatgaaacgctgtttcaagagatacagccgctcgtccttgaatcgtcagcaggacctgtcccattgtcccccgcccccacagctcaggttgcttgattttttacagaagaggaaggagcggaaggcaggtcaacattacgacctcaaaatcagcaaagccggaaactgcgtggacatgtggaaacggtctccatgcaacttggccattccttcagaagtggacgacgtcaaggacgattatgtgttcgaatgcgaggctggtacacagtaccagaaaacaaaactaacgattttgcaatcattgggggatccattatattatggaaaaatacagccatgtaaagcggacgaggagtcagacagtcaaatgtcgccatcgcactcctctacagatgaccacagcaactggtttattattggaagcaaaaccgacgcagagagggtcgtcaatcagtaccaggaactagtgcagaacgaagcaaagtgccccgtcaagatgtcccactcttcaagcggatctgcttctctgtcacaggtgagcccaggtaaagagacggaccagactgaaactgtgtcagtgcagagttctgtgctcggtaagggcgtgaaacatcggccgcctccaataaagttgccttcgtcttccggtaactcatcatctggcaattacttcacacctcagcaaacaagctcctttttgaagagccccactcctccaccatcaagcaagccgagttccattccaaggaagtcttccgtggatctcaaccaggtttccatgctttcccctgccgcactgagccccgctagtagttcgcagagacacgagtcttag

SEQ ID NO: 116587 - DNA, 678 bp, synthetic construct
  misc_feature 1..678: note = Description of Artificial Sequence: Synthetic coding sequence
  source 1..678: mol_type = other DNA
atgctgctcaccctggcgggcggcgcgctgttctttccaggcttatttgccctttgcacctgggctctcagacggtcgcagcccgggtggtcccgtaccgactgcgtaatgatctctacaaggttggtctcttctgttcatgccgtactcgccacaggcagcggcatagtgatcatccgatcttgtgatgacgttattaccggacggcactggctggcccgcgagtatgtgtggttccttataccatacatgatttacgactcatacgctatgtacttatgtgagtggtgtcggaccagggaccagaaccgggccccttctctcaccctgagaaattttctgagtaggaaccgcctgatgatcactcatcacgcggtgatactcttcgtacttgtgcccgttgctcagctcaaacaacagcatacccttctctataaggtcaatggcatccttaccctagcaacattcctatcctgccgcatcctcctgtttccttttatgtattggagctatggcagacagcagggtctgtcactgctacaggtgccatttagcattccattctattgcaacgttgcaaacgcatttttggtggcccctcagatttattggttttgtctgctatgccgaaaagccgtccggctcttcgatactccgcaagcaaaaaaggatggttag

SEQ ID NO: 116588 - DNA, 774 bp, synthetic construct
  misc_feature 1..774: note = Description of Artificial Sequence: Synthetic coding sequence
  source 1..774: mol_type = other DNA
atgctgctgactctcgcggggggcgcgctcttcttcccagggttattcgccttgtgcacctgggccctgcgccggagccagccggggtggagcaggactgactgcgtaatgatctccacccggctcgtgtcttctgtccatgctgtattggccacgggaagcgggatcgtgatcatccggagctgcgacgacgtgattaccgggcgtcattggctcgcccgggagtatgtgtggtttttaattccgtacatgatatacgattcgtatgccatgtacctatgcgaatggtgccggactcgcgaccagaatcgcgcaccaagcctcactttacgcaacttcctatctaggaaccgcctcatgattacacatcatgcagtgattttgttcgttttggtacccgtggcccaacgacttcggggcgacctgggagattttttcgtgggttgtatttttacggctgagttaagcactccctttgtgtctctgggacgggtgcttattcagctgaagcagcagcataccctgttgtacaaagtgaacggaatcctgaccctcgccacattccttagctgtcggatcctgttgttcccttttatgtactggtcctacgggagacagcaaggtctcagcctgcttcaggttcccttctcaattcccttttactgtaatgtcgccaacgcctttctcgtggccccccagatatattggttttgcctcctctgccggaaagctgttcgactgttcgatacaccccaggccaaaaaggatgggtag

SEQ ID NO: 116589 - DNA, 993 bp, synthetic construct
  misc_feature 1..993: note = Description of Artificial Sequence: Synthetic coding sequence
  source 1..993: mol_type = other DNA
atgatcagcacacgctaccgccggagacgcgacgctcctagaggacccggcagatgcccccctcatccaactcggccccgaggcccagggcgcaagcggggggcggcaggctcccccggtgcagctccatccgcatcaagacgcccagaattccctaaaccactgagagtgttgccttggagagaacgcggtaggggcggtcgagaatggcctatgtccctgagaagcccgctgccaacaagcgcttgtggctggggtgaatccggtcgaagaccaggccgcgccccctgcggccctcggactgggcttagtgcgagggccgttctctctgcaagagcccgccttgtctcatccgtgcacgccgtcctggcaacaggcagtggcattgtgatcatccgttcttgtgatgacgtgatcaccggccggcactggctggcacgggaatacgtctggttccttatcccttacatgatctatgactcttatgccatgtatctatgtgagtggtgtcggaccagggatcagaatagagccccgagccttacattacgcaacttcttgtcaagaaaccgacttatgatcacccaccatgccgtgattcttttcgtcttagttcctgttgcgcagaggctacggggtgacctgggcgacttctttgttggctgtattttcacggctgagctgtccacaccatttgtatccctgggcagggtgctgattcagctgaaacagcagcataccttactatacaaagtgaacgggattttgacccttgctacttttctctcctgtaggatcttattgttccctttcatgtactggtcatatggacggcagcaggggcttagcctacttcaggttccttttagtattccattctattgtaatgtcgcgaacgcatttctcgtggctccacagatctactggttctgccttctgtgccggaaggcagtccggttatttgacacacctcaagccaagaaagatggttag

SEQ ID NO: 116590 - DNA, 741 bp, synthetic construct
  misc_feature 1..741: note = Description of Artificial Sequence: Synthetic coding sequence
  source 1..741: mol_type = other DNA
atggaagcacccgaggcagccgagggaggtttgcagagaggggcacggagagctgccggggctcggtctcagggggccctcccatcaggcgaagttcatcacggaggcgtgaagctcggcatgcggtcaatcccgatcgccaccgcctgcacaatttatcataaatttttttgtgagactaacctggatgcatatgatccttatttaatcgccatgtcctctatctatttggctggcaaagttgaagaacagcaccttcgaactcgcgatatcatcaatgtcagcaatagatactttaatccatcgggcgaacctctcgaactcgactcgaggttctgggagctcagagattcaatcgtgcagtgtgaacttctgatgttgcgggtgcttagattccaagtgtcgttccaacacccgcacaaatatttattgcactatttggtaagtctccagaactggttaaaccgtcacagctggcagagaaccccagtagccgttacggcctgggccctcctgagggactcatatcacggcgccttgtgtcttcgctttcaggcacagcacatcgcagtggcagtcctgtatctggccctacaggtatatggcgtcgaggtgccagccgaggtggaggctgaaaaaccatggtggcaggtatttaatgatgacttaacaaagcctattatcgacaatatcgtatccgatctgatccagatctacaccatggataccgagattccttag

SEQ ID NO: 116591 - DNA, 585 bp, synthetic construct
  misc_feature 1..585: note = Description of Artificial Sequence: Synthetic coding sequence
  source 1..585: mol_type = other DNA
atggaggcgggggtcaaactgggaatgaggagtatccccatcgcgactgcttgtactatttaccacaagtttttttgcgaaaccaatctcgacgcctatgacccctatctgattgccatgagcagcatctatctagctggaaaagtggaggagcagcacctgcggactcgtgacatcatcaacgtttctaatcgctatttcaacccaagcggggaacccttggaactggatagtagattctgggaactccgcgactcaattgtacagtgcgagctgctgatgctgagggtcctgcgtttccaggtgtcctttcagcatccacacaagtacctgctgcactacctggtatcattgcaaaattggctgaataggcacagctggcagagaactcccgtggctgttaccgcttgggcactgttgcgggatagctatcacggggctctctgcctccgatttcaggcacaacatatcgctgttgcagttttgtatttggctttacaggtgtatggggtggaggttccagcagaggtcgaagccgagaaaccttggtggcaaatctacacaatggacactgaaatcccctag

SEQ ID NO: 116592 - DNA, 681 bp, synthetic construct
  misc_feature 1..681: note = Description of Artificial Sequence: Synthetic coding sequence
  source 1..681: mol_type = other DNA
atggaagcccctgaagcagcagagggaggcttacagaggggcgccagaagagccgccggtgcccggtcacagggcgcactgccaagtggcgaggtgcatcatgggggtgtcaagctggggatgcggtccatccccatcgccactgcatgtacgatataccacaaatttttctgcgagacgaacttggatgcgtacgacccatacttgatcgctatgtctagcatctaccttgctggtaaagtagaggagcagcacctccgaacccgtgacattataaatgtgtcaaacaggtatttcaatccatctggagagcctctcgaactcgattcccgcttttgggaacttcgggactccatcgtgcagtgcgaattgctgatgcttcgggtgcttagatttcaggtgtccttccagcaccctcacaagtacctgctgcattatttagtctcgctgcagaattggcttaacaggcattcgtggcagcggacccccgtggccgtgactgcgtgggctctcttacgagacagctatcacggcgctctctgcctgagattccaagcccagcatatcgcagtcgcagtcctgtatctggctttacaggtgtacggtgtcgaggtgcctgctgaggtggaagccgaaaagccctggtggcagatttataccatggatacagagatcccttag

SEQ ID NO: 116593 - DNA, 645 bp, synthetic construct
  misc_feature 1..645: note = Description of Artificial Sequence: Synthetic coding sequence
  source 1..645: mol_type = other DNA
atggaagctggcgtcaaactggggatgcggagtattcctatcgccaccgcctgcacaatataccacaagttcttctgtgaaaccaacctcgacgcatacgacccatatctgatagctatgagctcaatctacctggccgggaaagtagaagaacaacatcttcgcaccagagacattatcaacgtatctaacaggtatttcaacccatctggcgaaccattagagctggattcacgattctgggaattacgggattccatagtgcagtgcgagcttctgatgctcagagtcctccgatttcaggtttcttttcagcatccccacaaatacctgcttcattatcttgtgtccctccagaactggttaaaccgccacagctggcagaggacaccggtcgccgtgactgcgtgggccctgctgcgcgactcgtatcacggggccctctgccttcgttttcaggcgcagcacattgccgttgccgtgttgtatttggccctccaggtgtatggagtagaggtgccggccgaggttgaggctgagaagccatggtggcaggtgttcaacgatgacctgactaagcccattattgacaacatcgtcagcgatctaatccaaatctacaccatggatacagaaattccctag

SEQ ID NO: 116594 - DNA, 741 bp, synthetic construct
  misc_feature 1..741: note = Description of Artificial Sequence: Synthetic coding sequence
  source 1..741: mol_type = other DNA
atggaagcacctgagggcggaggtggaccggcggctaggggaccagagggtccggccccagaagctagggtccatttcagagtcgctagattcataatggaagctggcgttaaactgggcatgaggagcattccaattgccactgcctgtacaatttaccacaagtttttctgtgaaacgaatctggacgcctatgacccgtatctgatcgctatgtcttctatttatctggctgggaaagtggaggaacagcacctccgaactcgcgacatcatcaacgtctccaaccgctatttcaatccaagcggggagccactggaactggattctcgcttttgggagctgagggattctatagtccagtgcgagctcctgatgcttcgagtcctcagattccaagtatctttccagcacccccataagtacctattgcattatctagtaagcctgcagaattggttgaatcggcacagttggcagaggacccctgtggctgtgacagcttgggcgttattgcgagattcctatcatggagcactgtgtctcaggttccaagcccagcacatcgccgtggcagtgttgtacctggccctccaggtctatggcgtcgaggttcccgctgaagtggaggccgaaaagccttggtggcaggtgttcaatgacgatctcaccaaacccattatcgacaatatagtctctgacttgatacagatttataccatggacaccgagattccatag

SEQ ID NO: 116595 - DNA, 429 bp, synthetic construct
  misc_feature 1..429: note = Description of Artificial Sequence: Synthetic coding sequence
  source 1..429: mol_type = other DNA
atggaggcgggggtgaaactgggcatgcggagcataccgatcgccactgcttgcacaatctatcataaattcttctgtgagaccaacttggacgcatacgacccctatctcattgctatgtctagcatctatctggccggaaaagtcgaggaacaacacctgcggactcgtgatattataaacgtgagcaatcggtttatcccatggacccagcggtcacctaaagtgttggcacaggcctgcccaaaacggtcccccggctggagcgccgcctgggggcactgtcatcacgtggctatgacagcaggccctcatcgtacctcatgggaagactggttgtgctgttggcgacgcgctggggaggggaacggaatgctcccgctgtgtcagagtttggaggtagccgtacaggtgatggtgggagcctag

SEQ ID NO: 116596 - DNA, 285 bp, synthetic construct
  misc_feature 1..285: note = Description of Artificial Sequence: Synthetic coding sequence
  source 1..285: mol_type = other DNA
taagccgggaaggtggaggagcagcacctcagaacacgcgatatcatcaatgtgagcaacagatatttcaatccctcaggtgaacccctggagctggacagtaggttctgggaactgcgcgactcaatagtccagtgcgagctgttgatgctgagggtgctgcgcttccaggtgtcattccagcacccccataaagtcttcaatgacgacctcactaagcccataattgataacattgtcagcgacctgatacagatatataccatggataccgagataccatag

SEQ ID NO: 116597 - DNA, 366 bp, synthetic construct
  misc_feature 1..366: note = Description of Artificial Sequence: Synthetic coding sequence
  source 1..366: mol_type = other DNA
tgaaggtatttcaatccgtccggagaacctctagagctcgactcccgtttctgggagcttagggactctattgtccagtgcgagctcttgatgctgagggtcctgagatttcaggtctcatttcaacatccccataagaattggctaaacagacactcttggcagcggacacccgtcgcggtcaccgcgtgggcgttgctgagagatagctatcatggggcgctgtgcctgaggttccaggctcagcacatcgctgtggcagtgctgtatctagctttgcaagtgtacggtgtggaggtgccagcagaagtggaggctgagaagccttggtggcaaatctataccatggatacagagattccatag

SEQ ID NO: 116598 - DNA, 3207 bp, synthetic construct
  misc_feature 1..3207: note = Description of Artificial Sequence: Synthetic coding sequence
  source 1..3207: mol_type = other DNA
atgttggttggttcacaatcattcagccctgggggccccaatggcattatcaggtctcagagcttcgcgggatttagcggtttgcaggaacgacgctctcgctgcaactcattcatcgagaactcgagtgcccttaaaaaaccacaggccaagctgaaaaaaatgcacaatcttggccacaaaaacaacaatccccctaaagagcctcagcctaagagggtcgaggaggtgtaccgtgctctgaagaatggcctggacgagtatttggaggtgcaccagaccgaactggacaaacttacagctcaactaaaggatatgaaaagaaattctcgtttgggagtgctttacgacttggacaaacagattaagactatagagcggtatatgagacggctggagtttcatatctccaaagttgatgagctctatgaggcttactgcattcagcgcaggctgcaggatggggcatccaaaatgaagcaggcttttgcaacatccccggccagcaaagctgctagagaaagcctcacagagatcaaccggagcttcaaggaatacacagaaaacatgtgtacgatagaggtggaactggagaatctgcttggagagttcagcatcaagatgaaaggcctagcagggttcgccagactgtgtcctggagatcagtatgaaatctttatgaagtatggacggcaaaggtggaagcttaaggggaaaatcgaggtgaacggcaagcaatcctgggacggcgaagagacagtcttcttacccctgattgtgggcttcatctcaatcaaagtgaccgagttaaagggactggctacccatattctcgtggggagtgtgacttgtgagacgaaagagctgttcgcggcaagaccacaggtcgtggctgtggatattaatgaccttgggacaattaagctcaacctggaaattacgtggtacccatttgatgtggaggacatgaccgcgtcttctggcgcaggcaataaggctgcggcgctgcaacgacgaatgagtatgtattcccaaggcacgccagagacaccaacatttaaggatcacagcttctttcgctggttacacccctcccccgacaagcctcgccggctgtctgtgctatctgctctccaggacacattcttcgccaagctccaccgcagcagatcattttctgatctgccatccttaagacctagccccaaggccgtcctggaactgtatagtaacctgccagacgatatttttgagaatggaaaggccgctgaggaaaaaatgccattgtccctctcgttcagcgacctgccaaatggagactgtgccctaacgagccacagtactgggtctcctagcaattctactaacccggagattacaattacacccgccgagtttaatctgagttccttagcctcccagaacgagggcatggacgatacatccagcgcctctagcagaaacagcttaggcgagggtcaggaaccgaagtcacaccttaaggaggaggacccagaagagcctaggaagccagccagcgccccctccgaagcctgtcgacgccagagtagtggcgcgggcgctgagcacctcttcttggagaacgatgtagcagaagccttgctgcaggaatccgaagaagcgagtgagcttaaaccggtcgaactggatacgtctgagggtaacattacaaaacagctggtcaaaagattaactagcgcagaggtgccaatggctacagaccgacttctttctgaaggttcagttggtggggagtcagaggggtgtaggagttttctcgacggtagccttgaagacgcattcaacgggcttctgctggcactggaacctcacaaagaacagtacaaggaatttcaggatctcaaccaagaggtcatgaacttagacgatatcttgaagtgcaaacctgctgtctccagaagccggtcgtcctctctaagtctaactgtcgaaagcgcgcttgagtcttttgacttcctgaatacaagtgactttgacgaggaggaggatggcgacgaagtgtgtaacgttggtggaggagcggacagcgtcttcagcgatactgagaccgaaaagcattcctaccgctccgtccaccctgaggctagaggacatctgagcgaggccctgacagaagataccggtgtgggtactagcgttgccgggtcgcctttaccgttaaccaccggtaacgagagcctggacattaccatcgtgagacacctgcagtattgtacacaattggtacagcaaatcgtttttagctccaaaacccccttcgttgccaggtccctactggagaaactgagcagacagatacaggtcatggagaagttagcagccgtgagtgatgagaatatcggcaatatttcctcagtcgttgaagcaattccagaattccacaagaaactttcactcctgtcgttctggaccaagtgctgttcacccgtgggggtctatcattcaccagctgacagggtgatgaaacagctggaagcaagttttgcaagaactgttaacaaagagtaccctggcctcgccgaccccgtgttcaggactctggtgagtcaaatcctggatagagctgagcctttactgtctagcagtctctcaagtgaagtggtcactgtgtttcagtactactcgtacttcacatcccacggggtgtccgaccttgaatcctatctgtcacagttagcccgccaagtgtcaatggtgcagactctgcagagcctccgcgatgagaaacttttacaaaccatgtcagacctcgctccctcaaatcttcttgctcagcaggaggtcctcaggaccctggctttactcctgactagagaggacaacgaggtgagtgaggcggttacactgtatcttgccgccgcttccaagaaccagcactttagggagaaggcactgctgtattattgtgaagctcttacgaagactaatctccagctgcagaaggccgcttgtcttgctttgaaaattctcgaggccaccgagtcaatcaaaatgctagtgaccctgtgccagtctgatacagaggagattcggaatgtggccagtgaaactctcctgtccctaggagaagatggccgcctagcatacgaacagttggataagtttccgagagattgtgttaaagtgggcggaaggcacggaacggaagtggcaaccgctttttag

SEQ ID NO: 116599 - DNA, 1776 bp, synthetic construct
  misc_feature 1..1776: note = Description of Artificial Sequence: Synthetic coding sequence
  source 1..1776: mol_type = other DNA
atgctagtgggatctcagagcttcagtcccggtggacctaatggaattatcagatcgcagtcatttgcaggcttttccggcctgcaggagaggcgctcccggtgtaatagctttattgagaattccagtgcccttaaaaagccgcaggccaagctgaagaagatgcacaatttgggccacaagaataacaatcctcctaaggaaccacaacctaaacgagtcgaggaagtgtatcgggccctgaaaaatggtcttgatgaatacctcgaggtccatcaaacagaactcgacaaactgacagctcaactgaaggacatgaaaagaaattcccggcttggcgtgctgtatgacttggataagcagataaagaccattgagcggtacatgagacggctggagttccatataagtaaggttgacgagttatacgaagcctactgcattcaaaggagactccaggatggggcctctaaaatgaaacaggcctttgccacatcaccagcatctaaagccgcaagggagtccttaactgagataaaccgatccttcaaagagtacaccgaaaacatgtgtacaatcgaggtggagcttgagaacctgttaggtgagtttagtattaagatgaaaggcctggcgggcttcgcccgcctctgtcccggcgatcagtatgaaattttcatgaaatacgggcgtcagcggtggaaactgaagggaaagatagaagtgaatgggaaacagtcatgggacggggaagagactgttttcctgcccttgatagttggcttcatctcaatcaaggtgacagaattaaaaggcttggctacccatattctggtgggcagtgtgacttgcgaaactaaagagctgtttgcggcacgtccgcaggtcgtagcggttgatataaatgacctgggaaccatcaagctaaatctagagatcacttggtacccttttgatgtagaagatatgacagcatcctcaggcgctggaaacaaggccgccgcactgcagcgccgcatgagcatgtattcgcagggaactcctgagacgccaacctttaaggaccacagtttcttctctaacctccctgacgacatttttgaaaacggtaaggctgcagaggagaagatgccattgtctctaagcttttccgacctacctaatggcgactgtgccctcacaagccattccaccggaagccctagtaactcaacaaaccccgagattaccattacgcccgccgagttcaatctatcaagtctcgcctctcaaaatgaaggaatggacgacacctcgtctgcctcgtccaggaatagcttgggagagggccaagagccaaagagtcaccttaaggaggaagatcccgaggaaccaaggaaaccagcctcagccccgagtgaggcctgccggagacagagttcaggggcgggcgccgaacacttgttccttgaaaacgacgtggctgaagcactgcttcaggagagcgaagaagcgtcggaattgaagcctgtggaactggacacctctgagggaaacatcacaaaacagctggtgaagcgactcacctccgcggaagttcccatggcaacagatcgactgctttccgaaggaagtgtgggtggagaatctgagggctgcagatcttttctagacggcagtctcgaggacgcctttaacggcctacttctggccctggagcctcataaggagcagtataaggagtttcaggacctaaaccaggaagttatgaacctcgatgacattctgaaaaagtag

SEQ ID NO: 116600 - DNA, 1944 bp, synthetic construct
  misc_feature 1..1944: note = Description of Artificial Sequence: Synthetic coding sequence
  source 1..1944: mol_type = other DNA
atggtgctgccctcccgattacattggataagaaataggccgtggcgagataggatacgcagaaggcagctgaataggctgccaacgagattgccggagattatgctggtgggcagccaatcattctcaccagggggacctaatgggattataaggtctcagtccttcgctggttttagtggcctgcaagaacggcgctccaggtgtaatagttttatagagaactctagcgcactgaaaaagcctcaggctaagctgaaaaaaatgcacaatttgggccacaagaataataaccctcccaaggaaccacagcctaaaagggttgaggaggtgtatcgagctctgaaaaatggcttggatgagtatctggaggtgcatcaaacagaactggataagttgacagcacaactgaaagacatgaagcgcaatagcagattaggtgtcctatatgacctcgacaagcagataaagaccattgagaggtacatgcggagactagagttccacatttccaaagtggatgagctgtacgaggcttattgtatccagcgacgcctgcaggacggcgcctcgaagatgaaacaggctttcgcaacgagtcctgcctcaaaagccgctagagagtcactcactgaaatcaaccgatcatttaaggagtacacggagaacatgtgtacgattgaggtagaactcgagaacctgcttggggaattctcaattaaaatgaagggtctggccggtttcgcaagattgtgtcctggcgaccagtacgagatctttatgaagtacggcaggcagagatggaaattgaagggcaagatagaggttaatggaaagcagagttgggacggcgaagaaacagtttttctgccccttattgtggggttcatttctattaaggtcactgaactcaagggcctggcgacccatattctggtgggtagcgttacttgtgaaaccaaggaactgtttgcagcacgcccacaggtggtcgcagtggatatcaatgaccttgggaccataaaactaaacctcgagatcacatggtaccccttcgacgtggaagacatgacagcgagcagcggcgccggcaataaagcggccgcccttcaaaggcgcatgtccatgtacagccaagggacaccagagacacccacatttaaggaccatagcttcttttctaatcttcctgacgacattttcgagaacggcaaggcagcggaggaaaaaatgccgctgagcctgtcatttagtgatcttcccaacggcgactgtgctctcacctcccactcgactggttcaccttccaactccaccaatcctgagataactattacacctgcagagttcaatctctcatccttggcatctcagaatgagggtatggatgatacatcctccgcatcctcccgcaatagtcttggcgaaggccaggagccgaaatctcaccttaaggaagaagatcccgaagagcctagaaaacccgccagcgccccatctgaggcatgtagaaggcaatcctccggggccggagctgagcacttgtttttagaaaatgatgtcgcagaggccctgctccaggagagcgaagaagcatcggagcttaagcctgttgaattggacactagcgagggaaatattaccaaacagctggtcaaacgattgacgagcgcggaggtgcctatggcaacggaccggctgcttagtgaaggttccgtcggaggcgagtcagaaggctgccgaagctttctcgacggaagccttgaggacgctttcaatggactcctcttggcactggaacctcacaaggaacagtacaaggaatttcaggacctcaaccaggaggtgatgaatttggacgacatactgaaggacgctaagcatctggatgaccagaaactcaacggagccgctagctggactgagattaccgaaggcgagtag

SEQ ID NO: 116601 - DNA, 3144 bp, synthetic construct
  misc_feature 1..3144: note = Description of Artificial Sequence: Synthetic coding sequence
  source 1..3144: mol_type = other DNA
atgcagttcttcgatgccgaggagctgttggtggatgaggaggacgatgttttcggagaggggcttcctactcggctgccggaaatcatgcttgtggggtcgcagagcttttctccaggcgggccgaacggcattattcgtagtcaatcgttcgcaggcttctcgggcctgcaagaaagacgctcccgctgtaattccttcatcgagaatagtagcgcactaaaaaagccgcaggctaaacttaagaagatgcacaacctcgggcacaagaacaacaaccctccgaaggaaccacagcccaaaagggtcgaagaggtctaccgcgcactgaaaaacggactggacgagtacctggaggttcaccagaccgagctggataagctgacggcccagctgaaagatatgaaaagaaactcacggctgggcgttttgtatgaccttgacaaacagatcaagaccattgagaggtatatgaggcggcttgaattccatatcagtaaggtggatgaactatatgaggcctactgtatacagcgacgtctgcaggatggtgcctctaaaatgaaacaggcttttgcaacttcccccgcctctaaagcagcaagggaatctcttaccgagattaaccggtcttttaaagaatacacagagaatatgtgcacaattgaggtggaactcgagaatcttctgggagaattttccattaaaatgaagggactggccgggttcgctcgcctctgccccggggatcaatatgaaattttcatgaagtacggcagacagagatggaaacttaaagggaaaatagaagtcaacgggaaacagtcctgggatggagaagaaaccgtcttcttgccacttattgtcggctttattagcattaaagttacggagcttaaaggcctggctacacatatcctcgtcgggagcgtgacatgcgaaaccaaggaattgtttgctgcccgcccacaagttgtggccgttgatatcaatgacctgggtactataaagcttaacctcgaaattacatggtacccttttgatgtagaagatatgactgcctcgagcggagcgggcaacaaagctgctgccttgcaacgccggatgagtatgtactcccaggggactccggaaacgcctaccttcaaagatcatagcttcttcagcaaccttcctgacgatatctttgaaaacggcaaagcagcggaagaaaagatgcccctcagcctttcgttttcggacctgccaaacggggattgtgctttaacatcacactctacaggaagtcccagcaactccactaatcccgagatcacaatcacaccagccgagttcaacttaagtagtctcgctagccagaacgaagggatggatgacacgtctagcgcgtcaagtagaaattcactcggcgagggccaagagcctaagtctcacttaaaagaggaagaccccgaagagccgcgcaaacccgccagcgcccctagcgaagcttgcagacgccagtcttctggtgccggggcggaacacctcttcctggaaaacgacgttgctgaagcgctgctgcaggagtcagaagaagcctccgaactgaaacctgtggaactggacacctccgaggggaacatcacaaaacaactcgtaaagcgcctgacttctgcagaggtcccgatggccactgatcggttactgagtgaaggctctgtagggggcgagagcgaaggatgccgttcctttctcgacggcagcttagaagatgcttttaacgggctcttattggcgctggagccacataaagagcagtataaggaatttcaagacttaaatcaggaggtcatgaacctggacgacattctaaagtgtaagccagcagttagccgctcgaggtcctcttccctttcactgaccgtggaaagcgcactggagtccttcgatttcctgaacacttcagacttcgatgaagaggaggatggtgacgaggtatgcaatgtgggcggaggagcggactccgtcttttctgacacagagacggaaaaacacagttataggtccgtgcacccagaggccaggggacacctgtctgaagcactgactgaggataccggcgtcggcacctcagtggccggaagtcctttgcccttaacaaccgggaacgagagcttagacattaccatagtcaggcaccttcagtattgtacgcaactcgtgcagcagatcgtattctcatctaagactccctttgtggcgcgcagcttactggaaaagctgtctcgtcaaatccaggtaatggaaaaactcgccgccgtcagcgatgaaaacatcggcaacatatcttctgtcgtagaggcaattccagaatttcacaaaaaactgtctctgttatccttctggactaaatgctgctcacctgtgggggtgtaccacagtcctgcagaccgggtcatgaagcaactcgaggcatctttcgctcggaccgttaacaaggagtaccccggcctggccgacccagtcttccggacactcgtgtctcagatccttgacagagccgagcctctcctgtccagttcactttcctctgaagttgtgacagttttccagtactacagctattttacaagccatggcgttagcgatctagaatcctacctgagccagctggccaggcaagtcagcatggtacagacactccaaagcctgagggacgagaaacttctgcagacaatgtccgatctggcgcccagcaacctcctcgctcagcaggaagtgcttaggactctggccctgctcttgacccgagaagataatgaagtgtcagaagcagtcaccctgtatcttgccgctgcgagcaagaaccaacattttagggagaaggcactcctgtattattgtgaggccctgaccaagaccaacttacagttgcagaaagcagcctgcctggcccttaagatcctggaagccacggaaagtatcaaaatgttggtcactctctgccagtcggatactgaggagattagaaatgtcgccagcgaaacactcctctccctgggtgaagacgggagactggcctacgagcaactggataaatttccgagagactgcgttaaagtgggcggacgccacggtacagaggtagctacagctttctag

SEQ ID NO: 116602 - DNA, 1842 bp, synthetic construct
  misc_feature 1..1842: note = Description of Artificial Sequence: Synthetic coding sequence
  source 1..1842: mol_type = other DNA
atgctggtcgggtcccaatccttctcccccggtggtccaaatggaataatcaggtcacaatctttcgcaggattcagtgggctccaggagcgtcggtcacgatgcaattccttcatcgagaactcttccgccttaaagaagccacaggcgaaactgaagaagatgcacaacctcgggcacaagaacaataaccctcccaaagagcctcagcctaaaagagtggaggaggtttacagagcactgaagaatggccttgacgagtatctagaggttcaccaaaccgagctcgataagctcaccgcccagttgaaagatatgaaaaggaattctaggctgggagtgctatacgatctagataagcagattaagaccatcgaacgctacatgagaagactggaattccacatatcgaaagtggacgagctgtacgaggcctactgcatccaaagacggctacaggacggagcaagcaaaatgaaacaagcattcgctacatctcccgcctcaaaagccgcacgggaatccctcactgaaatcaatagatcctttaaagaatacactgaaaacatgtgcacaatcgaggtggaattggaaaacctcctcggagagttttcaattaaaatgaagggactggcaggtttcgcgcggctgtgtcctggagatcagtatgaaatctttatgaaatatgggcggcagagatggaaattgaaagggaagattgaggttaatggaaagcagagctgggatggcgaagagaccgttttcttacctctgatcgtgggcttcataagcataaaggtgacagagctgaaaggattggcgacccacattctggtcgggtccgtcacatgcgagaccaaagaactgtttgctgcacgccctcaggtcgtcgctgtcgacatcaatgatttgggaaccataaagctgaacctagagatcacgtggtacccgttcgatgtggaggacatgacagcttcgtcaggcgctggaaacaaagcagcagcactacaaaggcggatgtctatgtactcccagggaacgcctgagaccccgacattcaaggatcacagctttttctcaaatctacctgatgacatcttcgaaaacgggaaggccgcagaggagaagatgcccctgtccttgtccttctcggacctaccaaatggggattgcgcccttaccagccactcaacaggcagtccttcaaactcgacaaaccccgaaatcactattacccctgcagaatttaaccttagttctttggcttcgcaaaacgaaggtatggatgatacctcttccgctagtagtcgaaattcactgggagaagggcaggaacccaagtcccacctgaaggaagaagatcccgaggaacctcgcaaacccgcatccgccccaagcgaagcctgtcggcggcagtcaagcggcgctggggctgagcatttgttcctcgagaacgacgttgctgaggcactgctgcaggagtccgaggaggccagcgagctcaaacccgtggagcttgacacatccgaagggaacattacaaaacagctggtcaagagattgacttcagccgaagtaccaatggcgacggaccgactactctcagaggggtccgttggcggagaatctgaagggtgccgctctttcctcgatgggagcctggaggatgcttttaatgggctgctattggcactcgaaccacacaaagaacagtataaagagttccaggacctgaaccaagaggttatgaacctggacgatattctgaaggatgctaaacatttggacgatcagaagctgaatggggcagcatcttggacagagattaccgaaggtgagtag

SEQ ID NO: 116603 - DNA, 2673 bp, synthetic construct
  misc_feature 1..2673: note = Description of Artificial Sequence: Synthetic coding sequence
  source 1..2673: mol_type = other DNA
atgtccgctaacaattcaccgccaagtgcccagaagagtgtcctgccgacagctattccagccgtgcttccagccgcaagcccctgctcttctcccaagacagggctctccgcgcgcctctccaacgggtcattctccgcgcctagcttgacaaacagtcgcggctcagtgcatacagtgagtttcttactgcagatcggcctgacaagggagtccgtgaccatcgaggcacaggaactgagtctttccgcagtaaaggacctagtttgttctatcgtttatcaaaagtttccagagtgcggcttctttgggatgtatgacaagatactgttattcagacatgacatgaattccgagaacatacttcagctgattacatcagccgacgagattcacgaaggagatctggtggaagtcgtgctatctgctctcgctaccgtagaggatttccagatccggccacatactctgtacgttcatagttacaaagcacccaccttttgcgactactgcggcgagatgctttggggattagtgcggcagggcttgaagtgtgaggggtgcggcctgaattatcacaaacggtgcgccttcaaaataccaaataattgctcaggggtacgaaaaagacgtctgtcaaatgtttctttgccaggaccgggactttctgtgcctaggcccctccagccagagtatgtcgccctgccctcagaggagtcccatgtgcaccaggagccttctaaacgaattccctcctggagcggtcgccctatatggatggagaaaatggttatgtgcagggtcaaagtcccccataccttcgccgtgcatagctacacaaggcccactatctgtcagtactgtaagcggctcctgaagggactgttcagacaaggtatgcagtgtaaagactgtaaattcaactgccacaaaagatgcgctagcaaagtcccccgggactgtctcggcgaggtaacgttcaacggtgaaccttcatctctgggcactgacactgacataccgatggatatcgacaataacgatattaattcagatagctcccggggcttagacgataccgaagaaccatctcctcccgaggataagatgttctttctggatccttccgacctggacgtcgagagagacgaggaggcggtgaaaaccatctctccctccacttcgaacaacatccccctcatgagagtggtacagtctatcaaacataccaaaaggaagtcctcaaccatggttaaggaggggtggatggtgcattacacgtcgagagataacctgcggaaacggcactattggcggttagacagcaagtgcctgactttgttccagaatgaaagtggatccaaatactataaggaaattccgctatcagagatcctgagaatctcgtctcctagagactttaccaatatcagtcaggggagtaatccccactgcttcgagatcattactgataccatggtgtacttcgtaggagaaaataacggcgattcgtcccataacccggtgctggccgccaccggagtgggattggacgttgcgcaatcttgggagaaggccattcggcaggcactcatgccagttactcctcaggcctccgtgtgtacgtcccccggtcagggcaaggaccataaggacttatccacctccatctctgttagtaactgccaaatccaggaaaacgtggacatttctactgtgtatcagatcttcgccgacgaggttctgggatccggccagtttggcattgtgtacggcggaaaacatcgcaaaacaggcagggatgttgcgatcaaggtgatagataagatgcgtttccccaccaaacaggaaagccagttacgtaacgaggtcgcaattctccagaacctgcaccaccctggaattgtgaatctggagtgcatgtttgagacccccgagcgagtcttcgtggtgatggaaaagctccatggtgatatgctcgagatgatcttgtcatctgagaaatcacgtctccctgaacggatcactaaattcatggtcactcagattttggtagcccttcggaatctgcactttaaaaacatcgtgcactgcgaccttaagcctgagaacgtgctgctagcaagcgcagagccatttccacaggttaagctgtgtgacttcggattcgctaggattattggggagaagtcttttcgacgctcagtggttggcacaccggcttacctggcccccgaggtgctgcgctcgaaggggtacaatcggagcttggatatgtggtcggtgggtgtcatcatttacgtctcattgtctggaacctttcccttcaatgaagatgaggatatcaatgaccagatccagaatgccgcatttatgtatcccccaaatccgtggcgggagattagtggagaggcaatcgatctgattaacaatctcctccaggtcaagatgcggaagaggtacagcgttgataagagtctttctcacccttggttgcaggattatcaaacgtggctcgatctcagggagtttgagacgcgaatcggggagcgctacattacacacgagagtgatgatgcccgatgggaaattcatgcatatacacacaatcttgtttacccgaaacactttattatggccccaaaccccgacgacatggaggaagatccctag

SEQ ID NO: 116604 - DNA, 1233 bp, synthetic construct
  misc_feature 1..1233: note = Description of Artificial Sequence: Synthetic coding sequence
  source 1..1233: mol_type = other DNA
atgccgtactctactaacaaggaactcattctgggcattatggtcggaacggccggcatttccctcctgctcttatggtaccacaaggtgagaaaaccgggaatagccatgaaactgcccgaattcctgtccctgggcaatacatttaattctatcacactgcaggatgaaattcatgatgaccagggaacaaccgtcatattccaggaacgacagttgcagatactcgagaagttgaacgagctgttgacaaatatggaggaattgaaggaagagatcagattcctcaaagaagccattcccaagcttgaggaatatattcaagatgaactaggagggaaaatcaccgtccataagattagcccccaacacagggcaaggaagcgtagactgcccacaatccaaagctctgcaacaagtaattcctccgaagaggcagagtctgaaggtggatacatcactgcaaacactgacacagaggaacagtcttttcccgtacctaaggcctttaacactcgagttgaggaactgaatctggacgtgttactccagaaagtcgatcacctgcgcatgtccgaatccggcaaaagcgaatcctttgagctcctgagagatcacaaagagaaattccgagatgagatcgaattcatgtggcgttttgcccgggcctacggggacatgtatgaattgtccaccaacactcaggagaaaaaacattatgctaacattgggaagacgttatccgagcgtgccattaatagggcacccatgaatggccactgccacctgtggtatgcggtactctgcgggtacgtgagcgagttcgagggactacaaaacaagatcaactacggccacctctttaaggagcatcttgacatcgccattaaacttctccctgaagaacctttcctgtattacctgaaaggccgttattgttacactgtcagcaagttgagttggattgaaaagaagatggccgccactctgtttgggaaaattcctagctcaactgtccaggaggcgcttcacaactttctgaaggccgaagagctttgtccaggatatagcaacccgaattacatgtatttagctaagtgctatacagatttagaggaaaatcagaacgccctgaagttttgtaatctggctcttctgctcccaactgtcaccaaagaagataaagaggctcagaaggaaatgcagaagattatgacatctttaaaaagatag

SEQ ID NO: 116605 - DNA, 1233 bp, synthetic construct
  misc_feature 1..1233: note = Description of Artificial Sequence: Synthetic coding sequence
  source 1..1233: mol_type = other DNA
atgccctattcgacgaacaaagagctgatcttgggtatcatggttgggaccgctggtatcagcctcctgttgttgtggtatcacaaggtccggaaacctggtatagccatgaaattgcccgagttcttatccctagggaacacattcaacagtatcactctgcaagatgagattcatgacgatcagggaactacagtcatttttcaagaaagacaactgcagattctcgagaagttaaatgaactgcttactaatatggaggagctaaaagaggagatcagatttctgaaagaggccatcccgaagctagaagaatacatccaggatgaacttgggggcaagattacagtgcacaagatttctcctcagcatagggcaagaaaaaggcggctcccaactatccagtcatcagcaacttctaacagctcagaggaggctgagtcagagggcgggtacattaccgccaatacagacactgaggagcagagcttccctgtacctaaagcttttaatacaagagttgaagaactgaatctcgatgtcttactgcagaaagtagatcatctgaggatgtcagaatcaggaaagtcagaatcgtttgagctcctgcgagaccataaagaaaagttccgagacgaaatcgaattcatgtggcgtttcgcccgcgcctatggggatatgtatgagctctccaccaacacacaggaaaagaaacattatgctaatatcgggaaaacactctctgaacgtgcaattaatcgagcgccaatgaacggccactgccacctatggtacgctgttctgtgcggatatgtgtcagagtttgagggactgcaaaacaagatcaattatggacatctgtttaaggagcatcttgacatcgcaatcaaacttctgccagaggagcccttcctttactatctgaagggccgatactgctataccgtgtctaaacttagctggattgagaagaagatggcagcaacacttttcggcaaaataccatcctctacagtacaggaggcgctccataacttccttaaggctgaggagctatgcccaggttacagcaaccctaactatatgtacctcgccaagtgctacacagacctcgaagagaaccagaatgctttgaagttctgtaatctggcacttttgcttcccacagttaccaaggaagataaggaggcacagaaagagatgcagaaaattatgacctcgctcaagcggtag

SEQ ID NO: 116606 - DNA, 528 bp, synthetic construct
  misc_feature 1..528: note = Description of Artificial Sequence: Synthetic coding sequence
  source 1..528: mol_type = other DNA
atgccctattcaaccaacaaagaattaatcctggggatcatggtcggcaccgccgggattagcctcctgctgctttggtatcacaaggttaggaagcctggcatcgctatgaagcttccagaattcctcagccttggcaacaccttcaacagcattaccctacaggatgaaatccatgacgaccaggggacgaccgtgatctttcaggagcggcagctgcagatcctcgagaagctaaacgaacttctcactaacatggaggaactcaaggaagaaattcgtttcctaaaggaggccatccccaaactagaggagtatatacaggacgaacttggcggcaaaataaccgtgcacaagataagcccccagcaccgcgcaagaaaacgacggctcccaaccatccagagttctgccactagtaacagttctgaagaggccgagtctgaaggaggttatattacagctaacacagatactgaggaacagtcatttcccgtccctaaggcattcaatacccgggttgagtag

SEQ ID NO: 116607 - DNA, 798 bp, synthetic construct
  misc_feature 1..798: note = Description of Artificial Sequence: Synthetic coding sequence
  source 1..798: mol_type = other DNA
atgggaaagtgcttgaggtacataactgccaacactgacaccgaggagcagagctttcccgtgcccaaagcctttaatacacgcgtcgaagagttgaacctagacgtgctcttgcaaaaagtcgaccatctacggatgtcagagtctggtaagtctgagtcatttgagctgctgagggaccataaggaaaagtttcgagacgaaatcgaatttatgtggcgattcgcccgggcctatggcgatatgtatgaacttagtactaatacccaggagaagaagcattacgcaaacatcgggaagacgttgtctgagcgagcaataaatcgcgctcctatgaatggccattgccacctgtggtatgctgtcctctgcggctatgtgtctgaattcgagggactccagaataagatcaattacgggcatttatttaaggagcacctggatatcgccattaaactactccccgaggagcccttcctttactatttaaaaggccggtactgctacacagtgagcaagctgtcttggattgaaaagaagatggccgctacactattcggcaaaataccaagctctacggtccaggaggccctgcacaatttcctgaaggcagaggagctttgccccggatatagcaatcctaactatatgtacttggcgaagtgttacacagacctggaggaaaaccagaatgccctgaagttctgtaacctggctttgctgctgcccaccgtgacaaaagaggataaagaagctcagaaggagatgcaaaagatcatgaccagtcttaagaggtag

SEQ ID NO: 116608 - DNA, 453 bp, synthetic construct
  misc_feature 1..453: note = Description of Artificial Sequence: Synthetic coding sequence
  source 1..453: mol_type = other DNA
tgagtcctgtgcgggtacgtctccgagtttgaaggcctccagaacaagatcaattatggccacctctttaaggaacaccttgatatagctatcaagctcttgccagaggagcccttcctttattacctaaaggggagatattgctacacagtgtctaagttatcttggattgagaaaaagatggcagcaacgctgttcggcaagattcccagtagtaccgtgcaagaagcactacataatttcctgaaagcagaagagttatgcccaggctattctaatccgaattacatgtacctagccaagtgttacacagatctcgaggaaaatcaaaacgcacttaaattttgcaatctcgctctccttctgcctacagtgacgaaagaggataaagaggctcaaaaagagatgcagaaaataatgacctctcttaagcggctcagaaaaacaaaatag

SEQ ID NO: 116609 - DNA, 717 bp, synthetic construct
  misc_feature 1..717: note = Description of Artificial Sequence: Synthetic coding sequence
  source 1..717: mol_type = other DNA
atggggaagtgtctcaggtacatcaccgcaaataccgacacagaagagcagtcttttcctgttccgaaagcattcaacaccagagtcgaggagcttaacctcgacgttctcctgcagaaggttgaccatcttcgcatgagcgaaagcggaaagagcgagtccttcgagctcctgagagaccacaaggagaagtttagggacgagatagagttcatgtggcgtttcgcccgcgcctatggtgacatgtacgaactctccactaatacgcaggagaagaaacattatgccaatatcggcaagaccctgagtgaacgggccattaatagggcccccatgaacggacattgccatctgtggtatgccgtgctgtgcggctacgtttcagagttcgaaggactgcagaacaaaatcaactacggccacctgtttaaggagcacctggatatcgctatcaagctcttgccagaggaaccctttctctattacctcaaagggcgatattgttatacggttagcaaactctcatggattgagaaaaagatggctgcaacactctttggcaagataccctcatccacagtgcaggaagctctgcacaattttctgaaagccgaagaactgtgtcctggctacagtaatccgaattatatgtatttggccaaatgctatactgatctggaagaaaaccagaacgctctgaaattttgcaacttgtag

SEQ ID NO: 116610 - DNA, 1413 bp, synthetic construct
  misc_feature 1..1413: note = Description of Artificial Sequence: Synthetic coding sequence
  source 1..1413: mol_type = other DNA
atgtccagacttggtgcacttgggggagcacgggctggactggggctgcttctgggcaccgcagccggtctcggttttctatgtctcctgtattctcaaaggtggaaacgtactcaaagacacggtcggtcccagagccttcctaactctctggactacacacagacgtcagatccggggcggcacgtgatgctcctgagagccgttcctggaggagctggtgatgccagcgtgctgccatccttgccaagggagggccaggagaaggtgttagaccggctggatttcgtgctgacatctttggttgctcttagacgcgaagttgaggaactgagaagctccctgaggggtctggccggggagattgtcggggaagtgcggtgtcacatggaagagaaccagagggtggctagacggaggcggttcccgttcgtgagagaacgcagcgactctactggaagttccagtgtgtactttacagcttcatccggcgccacattcaccgatgccgagtccgagggagggtacacaaccgctaacgctgaaagcgacaacgagagagactccgataaagagagcgaggatggggaggacgaagtctcctgcgagaccgtcaagatgggccgcaaggactcccttgatctggaggaggaggctgcatccggtgcctctagtgccttggaggccggcggtagtagtggtctggaagacgtgctcccactgctccagcaagcagatgagttgcataggggtgatgagcaggggaaacgtgaggggtttcagctcctgctgaacaacaagcttgtgtatggtagtcggcaagatttcctgtggaggttagcccgggcctattctgacatgtgcgagctcacagaggaggttagcgaaaagaagtcttacgcactcgacggcaaagaggaagcagaggcagcgttagaaaagggagatgagagcgccgattgccatctctggtatgccgtactgtgcgggcagcttgccgaacacgaatcgattcagcgtcgcatacagtcagggtttagcttcaaggagcatgtcgacaaggctatcgctctccagcccgaaaatcctatggcacactttctgttaggcaggtggtgctaccaagtatctcacctgtcctggctcgagaaaaagacggccactgctctcctggaatccccactctctgccaccgttgaggatgcactccaatcatttctaaaagcggaggagctgcagccaggattttctaaggcgggtagagtgtacatttctaagtgttatcgtgaactgggcaagaatagcgaggctaggtggtggatgaaactcgccctcgagctcccggacgtcactaaggaagatctggccatccagaaagacctggaggaactggaggttattctgagagattag

SEQ ID NO: 116611 - DNA, 1413 bp, synthetic construct
  misc_feature 1..1413: note = Description of Artificial Sequence: Synthetic coding sequence
  source 1..1413: mol_type = other DNA
atgagccgcttgggagcgctaggcggggccagggccggacttggactgcttttaggcactgccgctggcctgggctttctgtgcctcctgtactctcagcggtggaaacgcactcagaggcatgggcggtctcaatccctgccaaacagtctggactatacccagacgtctgatccgggtcgacacgtgatgcttctccgcgcagtcccgggcggcgctggtgacgcctccgtgttaccctcactccctcgagaaggacaggaaaaagttctcgaccgattagactttgtgttgactagcttggttgcattgcgtcgggaagtggaagagctgcgcagcagcttacggggcctagctggagagatagtgggtgaagtccgatgccatatggaggagaaccagagggtggcacgccggcgtcgatttcccttcgtgagagaaagatcagattctaccgggagcagctcggtgtactttaccgcttccagcggggcaactttcactgatgcagagtcagagggaggttacacgacagctaacgcagagtctgataacgaacgggattccgacaaagagtctgaggacggggaggacgaagtttcatgtgagaccgtgaagatgggccgtaaggactcactggatcttgaagaagaggccgcatctggcgccagtagtgccctcgaggccggaggcagctccggcctggaggacgtgctgcctctgttgcagcaggcggacgaactgcaccggggtgatgaacagggtaaaagagagggttttcagcttctgctgaacaataagctcgtgtacgggtcacgacaggatttcctgtggaggctcgctcgggcttatagcgatatgtgtgagctgacagaagaggtatcagaaaaaaaaagctatgccctcgacgggaaagaagaagccgaggcagcgttggagaaaggagatgagtcagccgattgccacctttggtatgcggtgttatgtgggcagctcgccgagcacgagagtatacagaggaggatccaatcaggcttctcctttaaagagcacgttgataaggccatcgctctacagcccgaaaacccgatggcccatttcctccttggtaggtggtgttatcaggtgtctcacttgtcatggctagagaagaagaccgccacagccctgctggaatcccccctttctgcaactgtggaagacgccctgcagtccttcctcaaggctgaagagcttcagccagggttttctaaggcagggagagtttatatcagtaagtgctatagagaactgggaaaaaactctgaggctcgatggtggatgaagttagcactggagctccccgacgtgactaaggaagacctagcgatacaaaaggaccttgaggaactggaggttatactaagagattag

SEQ ID NO: 116612 - DNA, 1224 bp, synthetic construct
  misc_feature 1..1224: note = Description of Artificial Sequence: Synthetic coding sequence
  source 1..1224: mol_type = other DNA
atgcttctgagggccgtgcctggcggagccggggacgcatccgtcctaccttctctgcccagagaaggtcaggagaaggtgctggacagactggatttcgtactgacctcccttgtggccctgcggcgggaggtcgaggaattgagaagcagcctcagggggctggccggcgagatcgtaggggaggtgcgttgtcacatggaagaaaaccagcgtgtggcaagacggcggagattcccctttgtccgcgaacgatcagactctaccgggtcatcctccgtgtacttcacagcatcctccggagcaacttttacagatgctgaaagcgaaggcggttatacaacagcgaatgccgaatctgataacgagagagactcagataaggaaagtgaggacggtgaggatgaagtctcatgcgagactgtgaaaatgggccggaaagactctctcgatttggaagaagaggcagccagcggtgcctcctctgccttagaagcaggaggctcttctggtctcgaagacgtactgcccctgctgcaacaagccgatgagctgcatagaggggatgagcagggcaaacgcgaaggcttccagctccttcttaataataagttggtgtacggcagccggcaggacttcctatggcggcttgcccgggcatatagtgatatgtgtgagctgaccgaggaggtttcagaaaaaaaatcttatgcattggatggcaaagaggaggctgaggccgccctggagaaaggcgacgagagcgccgactgtcacctctggtacgccgtgctttgtggccaacttgccgagcacgaatctattcagcgcagaattcagtccggttttagttttaaagaacatgtcgacaaggctatcgccttacagccagaaaaccccatggcacattttctgctggggagatggtgctatcaggtgtcacatctgagttggctggagaagaaaacagccaccgcattactcgaaagccccctgtctgcaaccgtcgaggacgccttacagagttttcttaaggccgaggaattgcagccaggcttcagcaaagcgggacgtgtgtacatcagtaaatgttaccgggagcttggtaaaaactctgaggcccgctggtggatgaagctcgccctggaactcccagatgtaactaaggaagatctcgccattcagaaagacctggaggaactcgaagtcatcctccgcgattag

SEQ ID NO: 116613 - DNA, 864 bp, synthetic construct
  misc_feature 1..864: note = Description of Artificial Sequence: Synthetic coding sequence
  source 1..864: mol_type = other DNA
atgtcccgcctaggggccctgggcggagccagggccggcctgggattgttgctcggtaccgccgccggtctgggcttcttgtgcctcctttattcacaacggtggaagcggacacaaaggcacggtaggagccaaagcctgccgaactcactggactatacccagacctccgatcccggacgccacgtcatgctgctgagggcggtgccgggtggagccggcgacgccagtgtgcttccctcgctcccgcgggaaggacaggaaaaagtgctagatcgactcgatttcgtccttacttccttggtcgctctgcgtagggaagttgaagaactgagatctagcctccgtggcctcgcgggcgagatcgtcggagaggttcggtgccatatggaggaaaaccagcgcgtggcacgcagaaggaggtttcccttcgtcagagagcgctctgacagcaccggaagtagctcagtctacttcacagcgagctctggcgcaaccttcacagatgctgaaagcgaaggggggtatactactgccaacgctgaatcggataacgaacgcgattcagataaggagtccgaagatggagaggacgaagtatcatgtgaaacggtgaaaatgggcaggaaagactcgctggaccttgaagaagaagctgcaagtggagcaagctcggcactcgaagctggcgggagctctggactggaggatgtcctgcccctactgcagcaagcggatgagttgcacagaggcgacgagcagggcaaaagagaggggttccagctgctgctcaataataagttggtgtatggatcacggcaagatttcctttggagactggcccgggcttactctgatatgtag

SEQ ID NO: 116614 - DNA, 945 bp, synthetic construct
  misc_feature 1..945: note = Description of Artificial Sequence: Synthetic coding sequence
  source 1..945: mol_type = other DNA
atggctttggcagctagattgtggcggctcctcccctttcgccggggagcagctccgggatcccgcctcccagcaggaacttccgggagtagaggacattgcgggccatgccggtttcgggggttcgaagtgatggggaatccggggacttttaagcgaggcctgttactgtctgctctttcatatctgggatttgaaacctaccaagtgatctcgcaggccgccgtggttcacgccaccgcaaaggtagaggaaatcctggagcaagccgattacctgtatgaatcaggggagacagaaaagttatatcagctgctcacccagtataaggaaagtgaggacgctgaactactctggcggttagcgagagcaagccgggacgtagcacagctgtccaggacaagtgaggaagagaagaaactgcttgtgtacgaagccctagaatacgctaagcgcgcactcgagaagaatgagtctagcttcgccagccataaatggtatgccatttgcctcagcgatgtgggggattacgaggggatcaaggctaaaattgcgaatgcctatatcataaaggaacacttcgaaaaagcaattgaattgaacccgaaagatgcaacctctattcatttaatgggcatttggtgttacacattcgctgaaatgccatggtaccagagacgtatcgccaagatgctgtttgctacccccccctccagcacctacgagaaggctcttggctatttccatagggcggaacaagttgacccaaatttttactccaaaaatctgttacttctcggcaagacatacctgaagttgcataacaaaaagctggccgctttctggctgatgaaagccaaagattatcctgcccacacagaggaagacaagcaaattcagactgaagcagcccagctgttgacttccttttccgaaaagaattag

SEQ ID NO: 116615 - DNA, 855 bp, synthetic construct
  misc_feature 1..855: note = Description of Artificial Sequence: Synthetic coding sequence
  source 1..855: mol_type = other DNA
atggcactggctgctcgcttgtggcgtcttttgccatttagaaggggggccgcacctggaagccgcctgcccgctggtacgtctggaagccggggacattgcggcccctgccggtttagaggttttgaggttatgggcaaccccggcacatttaagcgcggcctgttactgagcgctctctcctatctagggtttgaaacttatcaggtgataagtcaggccgcagtggtccacgccacagctaaggtggaagagattctcgagcaggctgattatctatatgaaagcggggagaccgaaaaactataccagttactcacacagtacaaagaatctgaggacgcagagctcctctggcgtttggcaagggcttctcgcgacgtagcccaactgagtcgcacatctgaagaggagaaaaagctcctggtctacgaagcactggagtacgctaagagagcactggaaaagaacgagtccagctttgcttctcataagaaagcgattgagctcaacccaaaggacgccacttccatccacctgatgggaatctggtgttatacatttgcggaaatgccatggtaccagcgacggattgcaaaaatgctgtttgccaccccgcctagttcaacatacgagaaggcacttggctactttcatcgagcagaacaggtggatcccaatttttatagtaagaatctgcttcttttgggcaagacctacctcaaacttcacaacaagaagctcgcagctttttggctgatgaaggccaaggattatcctgcccacaccgaagaagacaagcagatacagacggaggcggcccagcttttgacttccttttccgagaagaactag

SEQ ID NO: 116616 - DNA, 3540 bp, synthetic construct
  misc_feature 1..3540: note = Description of Artificial Sequence: Synthetic coding sequence
  source 1..3540: mol_type = other DNA
atggcaagacgttcccagagctcatctcaaggagacaatccactggcgcctggttatctgccacctcactataaggaatattatcggttagccgtcgatgcactggccgagggcggttcagaggcatactccaggttcctggctaccgagggcgcccccgattttctctgccctgaagagcttgagcacgtgtccaggcatttaagacccccacagtatgtcacaagggagccgcctgagggcagccttctggacgtcgacatggatggttcctctggtacatattggcccgtcaactccgaccaggctgtgccagaattggacctcggatggccactgactttcgggttccagggaactgaggtcaccacccttgtgcagcctccacctccggacagcccatccatcaaagatgaagctaggaggatgatccgcagtgcacagcaggtggtggccgtcgtaatggatatgtttaccgatgtagacctgctctctgaggtcctggaagccgccgcccgacgtgtgcccgtctatattctattggacgagatgaatgcacaacattttctggatatggccgataagtgccgtgtaaatctgcagcacgtagattttctacgtgtgagaaccgtcgccggacccacctattattgccggaccggaaagtcattcaagggccacgtgaaggagaagttcctcttagtggactgtgccgtagtcatgagtgggagttattccttcatgtggtctttcgagaagattcatcggagcctcgctcacgtgtttcagggcgaactcgtcagcagttttgacgaagagttcaggatcctgttcgcacagagcgagcctctggtccccagtgccgctgcactcgcgcgaatggacgcttacgcacttgccccttacgcaggggctggtcctctagtgggcgtaccaggcgtgggagccccgaccccattttcattccctaagcgggcacacctcttattcccccccccgcgggaagaggggctgggctttcctagctttctagatccagacaggcatttcctctctgccttcagaagagaggaacctccccgtatgccaggtggcgccttggagccccacgccggtctgagaccgttgtcccggaggctcgaagccgaggcaggccccgccggtgagctggccggggcacggggatttttccaggctcggcacctggagatggacgccttcaaacggcatagctttgccaccgagggtgccggagcagtggagaactttgccgcggctagacaggtgagcaggcagacattcctgtcacatggggatgactttagatttcagacctcacacttccatagggaccagctgtaccaacagcagtatcagtgggatcctcaactgacacccgctcgccctcaggggttgttcgagaaactccgggggggccgcgccggattcgccgacccggacgacttcaccttgggagctgggccaagattccctgaactgggccctgacgggcaccagcgcctggattatgtcccttctagtgccagtcgagaggtgcgacacgggagcgacccagcatttgcccccggacctaggggcttggagcctagcggcgccccaaggcctaacctaacccagcgctttccatgccaggcagctgcacgtcccggcccagaccccgcccccgaggctgagccagagcggaggggtggcccggaaggaagagctggactcaggcgctggcgtctggccagctacctgtcaggatgccacggagaagatgggggcgacgatggccttcctgccccaatggaagccgaagcctatgaggacgacgtccttgcacctggcggaagagcaccagcgggagatctacttccctcggcgtttagagtgcctgctgccttcccaaccaaggttcctgtccctggccctggaagcggcggaaatggtccggaaagggaaggaccagaggaacccggtctggcaaagcaagactccttccgatcccggctgaatccgttggtgcagaggagtagtcgcctgcgttcctctctcattttctccacatcccaggccgagggcgccgccggggctgccgctgctactgagaaagtccagcttttacacaaggaacagaccgtctctgagactctggggcccgggggtgaggccgtccggtccgcggctagcactaaagttgcagagttacttgagaaatataaaggtccggccagggacccagggggaggcgccggggccatcacggtcgcaagtcattctaaggctgttgtgtcgcaggcctggcgagaggaggtggctgcccccggggctgtgggaggggagcgaagatctctggagtcttgcctcctagacctgagggattcattcgcccaacagctgcaccaagaggcagagaggcagcccggcgccgcctccctgacggccgcccagcttctggacaccctcggaagaagcggctccgataggctccctagccggttcctcagtgcacagtcccattcgaccagtccacagggtcttgacagccccctgcctctggagggctctggggcccatcaggtgctccataacgagtccaaggggagccccacatctgcttatccagagagaaagggctcgcctaccccaggttttagtactagaaggggttctcccaccaccggctttatagagcaaaagggcagtcccacatccgcatatcccgaacggcgaggttcgcctgtccctcccgtacctgagcgaagatcttctccggtgcctcccgtacctgaacggcggggatctctgacgctgacgatatctggcgagtcccctaaggcggggccagcagaggaaggcccaagcggtccgatggaagtcctgaggaaggggtccttgcggctgcgtcagttgctcagtcctaaaggcgagcgaaggatggaggatgagggtggattcccagtccctcaagagaacgggcagcctgagagtccacgtagactttctctgggtcagggcgattcaaccgaggccgccaccgaggaacggggaccaagagccaggctatccagcgccaccgcaaatgctttgtattcatccaacctgcgcgatgatacaaaggcaatcctggaacagatcagcgcacacgggcagaagcacagagctgtgcccgcacctagccccgggcctacacacaactcacctgaactcggacgtccacctgcagcgggcgtgttggcccccgatatgagtgacaaggataagtgctcagccatctttagatctgactccctgggaactcagggcagactctccaggaccttgcctgcttccgctgaggaaagagacaggctccttcggcggatggaaagtatgcgaaaagagaaaagggtgtacagccgctttgaggtgttttgtaaaaaggaagaagcgtctagcccaggggccggcgagggacccgcagaagagggtactagggattccaaagtggggaagttcgtgcctaaaatactgggaacctttaaatcaaaaaaatag

SEQ ID NO: 116617 - DNA, 933 bp, synthetic construct
  misc_feature 1..933: note = Description of Artificial Sequence: Synthetic coding sequence
  source 1..933: mol_type = other DNA
atgggaaatcaggtggaaaagttgacccacctaagctacaaggaggtgcctactgccgaccccaccggagttgatagagacgatggcccccgcattggagttagttatattttcagtaatgacgacgaggatgtagaacctcaaccacccccgcagggacccgatggtggcggactgccagacggcggggatggcccgccaccgccacaaccccagccttacgacccaagacttcatgaagtggaatgttccgtgttctaccgcgacgagtgcatataccaaaagtctttcgctccaggctccgcagcactttctacctatacacctgagaatctcctcaacaagtgtaagccgggggatctcgtagagttcgttagccaagctcagtatccccactgggcagtttatgtgggaaattttcaggttgttcacctgcatcgactggaagtgataaatagcttcctcaccgatgcgagccaggggcgcaggggccgggtagtgaacgacctgtacaggtacaaacccttgtcctccagtgcagtggttcggaacgcactagcccacgtgggcgctaaggaaagagagctgtcttggcgtaatagtgagtctttcgcagcttggtgccggtatggcaagcgggagtttaaaattggcggagagctcaggatcggaaagcagccctatcgcttacagatccagctcagcgcgcagcggagccacactctcgaatttcaatccctggaggatcttatcatggaaaagagaagaaacgaccagattggcagagccgctgtgctccaggaactcgcaacccacctgcatccggccgaacctgaagagggcgacagcaatgttgcacggactacacccccaccagggaggccaccagctccgtcatccgaagaggaggacggagaggctgtggcgcattag

SEQ ID NO: 116618 - DNA, 999 bp, synthetic construct
  misc_feature 1..999: note = Description of Artificial Sequence: Synthetic coding sequence
  source 1..999: mol_type = other DNA
atggaaccagtcggccggaaacgaagcagaaaggccgccaaagcccagcttgaggcccaggtcaccgcggcacagggagcaactaaagagggaagtggaatagccagcaacttccccggccagcccactatggagcccgtggggcgcaagcgcagtcggaaagcagcaaaggctcaactggaggcacaagtacgcgccgctcccgcgaagaaacataccggaaaagatcctgtgcgagacgaatgtgaagaacgtaatcctttcacagaaacccgagaggaggacgtcaccgatgagcacggggaacgcgagcctttcgctgaaaaggatgaacacactgggatccataccatgaagcttgagcatattgccgcagacatcaagaaaggcctcgctgcaaaacgggagatgatcaaaatcgacaaagctgcctacaggaaaaccaaaaatacaatcgagcgcgcacttaagaaaaaacagctgaagaggcagaagcgcgactatcgacacactaggaagctgctgaacgtgcttaaagagtatatcgctgagaagcagaaggatgacgaagcggaggaggccgaggcagctgccgccgccgccgaggccgcagccgccgcagaagcagcagcggccgccgctgaggtgattgtggtggaggacgaagaagaggaggagaaggaggaagaagaggaaaaggaagaagaggaggaggagggagaggaggaggggggcggagaggaaggagaggagggaggcgggggcggcgaaggtgaagaaacggaggaagaggaggaagaggaggaagaagaggaggaagaagagcagattaaggccttccaggaaaagcagaaaaggtggcagcaaccgaccggcgtccgcagctggcgccttagagagatgaaaccgctccttgagcagctccttaaggcagccaaggatactaaggataattattgcataattagttccagcgaagagtctgaactcgacaactag

SEQ ID NO: 116619 - DNA, 999 bp, synthetic construct
  misc_feature 1..999: note = Description of Artificial Sequence: Synthetic coding sequence
  source 1..999: mol_type = other DNA
atggaaccggtaggaaggaagcgctcccgcaaagcagcaaaagctcagctggaagcccaggtgaccgccgcacagggcgccacaaaggaaggctccggcatagcctcgaactttccaggtcaacccactatggagcctgttggtaggaagcgcagtcgcaaagctgcaaaggcccaactggaggcgcaggtccgggccgcgcctgccaagaagcacactgggaaagaccccgtgagagacgagtgcgaggagagaaacccctttaccgagacccgagaagaagacgtgaccgacgaacacggcgagcgggaacccttcgccgaaaaagacgagcataccggcatccataccatgaaattggagcatatcgctgctgacatcaaaaagggcctggcagccaagagagagatgatcaaaatcgacaaggctgcctaccgcaaaactaaaaatactatcgaacgcgccttgaaaaagaaacagctcaaacgccaaaagagagattatagacacacacgaaagctgcttaacgtactgaaagaatacattgccgagaaacagaaagacgacgaggccgaagaagctgaggctgccgccgcggccgccgaggcggccgccgcggccgaggcggctgccgccgccgccgaagtcattgtggttgaagatgaagaggaagaggagaaagaagaggaggaagagaaggaagaagaggaggaggagggtgaagaagagggagggggcgaggaaggcgaggaaggaggtggtgggggcgagggggaagaaactgaggaggaagaagaagaggaggaggaggaagaggaagaggaacagatcaaagccttccaggagaagcaaaagcgatggcaacaacctacaggagtgcgctcatggcggctgcgtgaaatgaaaccgctgctggagcagctgctcaaggcggccaaggatacgaaggacaattattgcatcattagctcctctgaagagagtgaattagacaactag

SEQ ID NO: 116620 - DNA, 561 bp, synthetic construct
  misc_feature 1..561: note = Description of Artificial Sequence: Synthetic coding sequence
  source 1..561: mol_type = other DNA
atggccgcctgggggaaaaagcatgccgggaaagatcccgtgagagacgagtgcgaagaaaggaacagattcaccgagactcgtgaggaagatgtaaccgatgagcacggtgaaagggagccatttgccgaaacagatgaacataccggcgcgaacacaaaaaagcccgaagacaccgctgaggacctgacagccaagcggaaacgcatgaagatggacaaaacatgcagcaagacaaaaaacaaaagcaagcacgccctgagaaagaaacagctgaagcggcagaagcgtgattacatccattcgttaaaacttctgaatgtgctcgaagaatacatcacagacgaacagaaggaagaggaggaagaggagggcgaagaagaggagttaattcgcatctttcaggaacagcaaaaaaaatggcagcaatatcggtccgtccgacgggagcgcctgaaagaaatgaaactgctccgggatcagttcgtgaaagctctggaggatttcgaggacctgtgcgaccgtgttttttcagatgaggactctgagctggacaactag

SEQ ID NO: 116621 - DNA, 681 bp, synthetic construct
  misc_feature 1..681: note = Description of Artificial Sequence: Synthetic coding sequence
  source 1..681: mol_type = other DNA
atgcctgggttcctgtcattcttgagcgtcagtcttagatcaccggggagtggtatagctagttcatttcccggccagccggctaccgatcctgtcggacgcagggctgcaaaagcccaactcgaggcgcagttcatggctgcttggggaaagaagcatgcaggcaaggacccagtgagggacgagtgcgaggaacggaacagattcacagaaaccagagaggaagacgtgacagacgagcatggggagagagagccatttgcagagaccgacgagcacacgggcgccaataccaaaaagcctgaagacaccgccgtaggggccaacaacttcaagaattatccagtgcacatcggggtgagttctgagcagcatattctgttggactgctctctgagcagacaaaaaagggattatattcattccctcaaattgctgaatgtcctggaggaatatattactgacgagcaaaaagaggaagaggaggaggaaggagaagaagaggagcttattagaatctttcaggagcagcagaaaaaatggcagcagtacagaagtgtgcggcgtgagcggctgaaagagatgaagttgctgcgagatcagttcgttaaggcccttgaggattttgaggacctatgcgatcgcgttttcagcgatgaggacagcgaactcgataattag

SEQ ID NO: 116622 - DNA, 561 bp, synthetic construct
  misc_feature 1..561: note = Description of Artificial Sequence: Synthetic coding sequence
  source 1..561: mol_type = other DNA
atggccgcctggggtaaaaaacacgcaggtaaggaccctgtcagagacgaatgcgaggagcgtaacaggtttaccgagacaagagaggaggacgtaacagatgagcacggtgaacgtgagcctttcgctgaaaccgacgagcataccggggccaatacaaaaaagcccgaagacactgccgaggacctgactgcgaaaaggaagcggatgaagatggataagacttgttctaagacaaagaataagagcaaacacgccttaaggaaaaagcagttgaaacggcagaaaagagattatatccattccttgaagctcctgaatgtgctggaggagtatatcaccgacgaacaaaaagaagaggaggaagaggagggggaggaggaagaacttattcgaatatttcaggaacaacagaagaagtggcagcagtaccgctctgttcgacgcgaaaggctcaaagagatgaaactcctcagggatcagttcgtgaaggccttagaggattttgaggacctctgtgatcgcgtctttagtgacgaggattcagaactggacaattag

SEQ ID NO: 116623 - DNA, 501 bp, synthetic construct
  misc_feature 1..501: note = Description of Artificial Sequence: Synthetic coding sequence
  source 1..501: mol_type = other DNA
atggcggccaaagaccagctggaggtgcaggtcatggctgcccaggagatggagctcgcaggaaaggatccggtgtcccacgaacatgaagagaggaaaccggttaccgagacgaaggaaggcgatgttaccgatgaacatggtgaacgtggttcatttgctgagacggatgaacacacaggcgtggacacaaaggagctggaggacatcgcagccgacataaaagaacacctcgcagccaaacggaagcggattgagaaaatcgctaaggcctgctctgaaattaagaatcggatcaaaaatgtgctcagaacaacccagctgaaacgccagaagcgggactatcgaatctcattgaaactccccaatgtgctggaggagtttatcaccgacgaacagaaggacgaagagggcgacggagaaaaggaagaacaaatcaagatttttcaagagcagcagaaaagatggcaacaggacgggaaaggcaccgagagagactag

SEQ ID NO: 116624 - DNA, 501 bp, synthetic construct
  misc_feature 1..501: note = Description of Artificial Sequence: Synthetic coding sequence
  source 1..501: mol_type = other DNA
atggcggctaaagaccagctcgaagtgcaagtgatggctgctcaggagatggaactagctggtaaggatccagtgagccatgagcatgaggagcgtaagcccgtgacggagactaaggagggcgacgttaccgacgaacacggtgaaaggggatcgtttgcggagactgacgaacatacaggcgtcgacactaaagaactggaggacattgccgccgatatcaaagagcatttggctgccaagcggaaaagaatcgaaaaaattgccaaagcttgtagcgagatcaagaacagaataaagaatgtcctgcgtaccacgcagctgaagaggcagaaacgggattatcgcataagcctgaagctgccaaacgtcctggaagaatttattacagatgaacagaaggacgaggaaggagacggcgagaaggaggagcaaattaagatcttccaagagcagcagaaacgctggcagcaggatgggaagggtaccgaacgcgattag

SEQ ID NO: 116625 - DNA, 381 bp, synthetic construct
  misc_feature 1..381: note = Description of Artificial Sequence: Synthetic coding sequence
  source 1..381: mol_type = other DNA
taggacgtgacagatgagcacggtgagcgcggcagcttcgcggagactgacgaacataccggcgtggacaccaaagagttagaggacattgccgcggatatcaaggagcacctcgcggctaaaagaaagcgcattgagaaaattgcgaaggcgtgcagcgaaattaaaaacagaattaaaaatgttttgcgcaccacacagctcaaacggcaaaaacgcgattacagaatttcattaaagctgcccaatgtcctggaggagttcattacagatgaacagaaagatgaggaaggtgacggagagaaagaggaacagatcaagatatttcaagagcaacaaaagcgctggcagcaggacggcaaggggaccgaacgggactag

SEQ ID NO: 116626 - DNA, 387 bp, synthetic construct
  misc_feature 1..387: note = Description of Artificial Sequence: Synthetic coding sequence
  source 1..387: mol_type = other DNA
atggcagctaaagatcagctcgaagttcaggtgatggccgcacaagaaatggaattagccggcaaagatccagtgagccacgaacatgaggagaggaagccagtgacagagactaaagaaggcgacgttacggacgagcacggggaacgcggctcctttgcagagaccgatgagcatacgggagtggataccaaagagcttgaggacatagcaggcatgttttatgaactgtttgttgtgtacgaaaactgcttccaaccctataatccatactctaggctttacgaactggttgacgataagactgtcctcaacgctttcttctcttatatagcttttaatgtgatctgcctcataattttcctcacttattttttcaattgttag

SEQ ID NO: 116627 - DNA, 1395 bp, synthetic construct
  misc_feature 1..1395: note = Description of Artificial Sequence: Synthetic coding sequence
  source 1..1395: mol_type = other DNA
atgatggcacggcgggatcctaagcccggcgccaaaagactcgttagggcacagaccctgcagaaacagcgcagggccccggttggcccacgggcaccgcctccagacgaggaggatcccagattaaagtgtaagaactgcgaagcattcggccacaccgcgcggtcaaccagatgccctatgaagtgctggaaagccgctcttgttccccccaacttcggggagaaggaaggtaaagagaatctgaagccctggaagccacaagtcgaggcaaatccagggccccttaataaagacaagggagaaaaggaagagcggccaaggccacaagacccacagcgaaaggcgctcctccatatcttcagccggaagcccccggagaaacccttgcctaatcagaagggatcaaccgagtccagtgattacctccgcgtggcgagtgggccgatgcccgtacacacaacttccaaaaggcctcgagtcgatccagtgttgagcgaccggtccgccaccgaaatgtccgaccgcggcagtgtgctggctagtctgagccccctacgaaaagccagtctgtcctcttctagtagcttgggccctaaagagcgccaaacgggagccgccgcggacatcccccaaacagctgtgcgacaccagggtccagagcccctgctggtggtcaaacctacccattcttctccagccggtggctgtcgcgaagtaccccaagcagcctctaaaacacacggtctgctgcaggccgtgagtccgcaggcacaggataagcgccccgcggtaacatcacagccttgccccccagccgctacccacagccttgggctgggaagcaatctgtcttttgggccaggcgcgaagcgctccgcccccgctcccatccaggcctgccttaactttccaaagaaacccaggctcggccccttccaaattccagaatctgccattcagggaggggagctcggagctccagaaaatctgcagcctcctcctgccgcaactgaattaggacccaggacatcaccccagaccggtaccaggaccccggctcaggtgctgtcaggcgataggcagccgcctcactcaagaccttgtctgcctaccgcccaggcgtgtaccatgtcccatcacccggctgcttcgcatgatggggcacagccactcagggttctgttcaggagattagaaaatggcagatggtcttcaagtctccttacagctccttcgtttcacagccctgaaaagccaggggcctttttggctcagtccccccacgtttccgaaaagagcgagggtccttgcgtgagagttcctcctagcgttttatatgaggatctccaggtgccgagcagtagcgaggacagtgacagcgatctcgagtag

SEQ ID NO: 116628 - DNA, 45 bp, synthetic construct
  misc_feature 1..45: note = Description of Artificial Sequence: Synthetic coding sequence
  source 1..45: mol_type = other DNA
atgatggccaggcgagacccaaagcctggcgctaaacgactatag

SEQ ID NO: 116629 - DNA, 1395 bp, synthetic construct
  misc_feature 1..1395: note = Description of Artificial Sequence: Synthetic coding sequence
  source 1..1395: mol_type = other DNA
atgatggcccgcagggatcccaaacccggagccaagagactggtccgggcacagaccctacagaaacaacgccgagctcctgtgggccctcgtgcgcctcccccagatgaagaggacccacgcttgaaatgtaaaaactgcgaagcattcggacacaccgcacggtccaccaggtgtccgatgaagtgttggaaagcggccctggtccctcctaattttggagagaaagaggggaaagagaacctgaagccctggaagccgcaggtcgaggcaaatcccggaccgctaaataaggacaagggcgagaaagaggaaagaccccggccacaggacccacaaagaaaggccctgctgcacatcttttcaaggaagccccccgaaaagcccctcccaaaccagaaaggtagtaccgagagcagtgactatttgcgcgtggcaagcggccctatgcccgtgcacaccacctctaaacggcctagggttgatcccgtcttgtccgatcgaagcgccacagaaatgtctgacaggggatcggtgctggccagcctgagtcccctcaggaaggcctctttgtctagctcaagcagtctggggcccaaggaaaggcaaaccggagccgcagccgacatcccccagacagcggtgcgccatcagggcccagagccgttgctcgtagtcaaaccaactcactctagtccagcaggtggttgtcgcgaggtgccgcaagcagcctccaagacccatggcctacttcaagcggtgtcaccacaagcgcaagacaagcggcctgccgtaacaagtcaaccctgcccacccgcggcaacacatagcctgggcctcggaagcaatctgtccttcggacctggtgcaaaaagatcagccccagcacctatccaggcttgcttaaatttccctaaaaagcccagactgggtccattccagataccggaaagtgcaatccagggcggggaactgggggcccctgagaacttacagccacccccggctgccacagagcttggcccacggacctccccacagacaggcacacgcactccagcccaagtcctgtccggggatcggcagcccccacactctcgcccgtgtctcccaacagcgcaggcctgcacaatgagtcaccatcctgctgcttcgcacgatggcgcccagcccctacgggtacttttccgtcgactagagaatgggcggtggtcctcatctctcctgacagccccctcctttcatagccccgaaaagcccggagcgttcttggcccagtctccccatgtctcagagaagtccgaggggccttgtgtgagggttccaccatctgtgttgtatgaggacctacaggtgccaagctcctccgaagactctgacagcgacctggagtag

SEQ ID NO: 116630 - DNA, 1143 bp, synthetic construct
  misc_feature 1..1143: note = Description of Artificial Sequence: Synthetic coding sequence
  source 1..1143: mol_type = other DNA
atggccgtcactgaagccagtcttttgcggcagtgcccactgctcctgcctcagaaccgctccaaaactgtgtacgagggctttatctccgcgcagggtagggatttccatttgcgcattgtgctcccggaggatctgcaactgaagaacgcaaggctgttgtgctcctggcagctgcgtacaattttaagcgggtaccatagaatcgtgcaacaacggatgcagcacagtcctgaccttatgtccttcatgatggagttgaagatgttgctggaggtggcactgaaaaatcggcaggagctgtacgctctccctcccccaccgcagttctactcgtcactcattgaagaaataggcaccctgggttgggataaattggtctatgcagacacatgttttagtacgatcaagctgaaagctgaagacgctagtggtcgcgaacatctcataacactcaagctgaaggccaaatacccggcggagagccccgactacttcgtcgatttcccagtgccgttttgcgcctcttggacaccacaagtcaacagtccgcagtcaagtttaatctccatctatagccaattccttgctgctatcgagtccctgaaggctttttgggacgtgatggacgaaatcgacgaaaagacatgggtgctggagcctgagaagcccccccggagtgccaccgcacgtcgtattgccctggggaataacgtgtccattaacatcgaagtggatccgcgccacccgacaatgctgccagagtgtttttttctaggggcggaccatgtggtcaaacctctcgggatcaaactgagcaggaatatccatctctgggacccagaaaacagtgtgttgcagaatctgaaggatgtgttggagattgactttcccgcacgggccatattggaaaaaagcgacttcactatggactgcgggatttgctatgcatatcagcttgatggcacaattcccgatcaggtgtgtgataacagccagtgtgggcagccattccaccagatctgtctgtacgagtggctgcgaggcctcctcacaagcaggcagagcttcaacattatctttggggagtgcccttattgttcaaagccaattacccttaagatgtccgggcgaaagcactag

SEQ ID NO: 116631 - DNA, 2580 bp, synthetic construct
  misc_feature 1..2580: note = Description of Artificial Sequence: Synthetic coding sequence
  source 1..2580: mol_type = other DNA
atgacctctaagcaggccatgtcgagtaatgaacaggagcgcttactgtgctataacggcgaggtcctggtgtttcagctctccaaaggcaattttgccgataaagaacctacaaaaaccccgatcctgcatgtgaggagaatggtcttcgatcggggcactaaagtcttcgtgcaaaagtcaacagggttcttcacaatcaaggaggagaactcccacctcaaaatcatgtgctgcaactgtgtttcggatttcagaactggtattaacctcccttatatcgtcattgaaaagaacaaaaagaacaatgtgtttgagtactttctcttgatcctgcactccactaacaagttcgagatgcgtctctctttcaagctaggctatgaaatgaaggatggcttgcgggtattgaatgggcccctgatcctgtggcggcacgtgaaagcatttttttttatcagctcccagacgggcaaggtggtgtctgtttccggaaatttctcttcaatacagtgggctggcgaaattgagaatctgggcatggtcctgcttggcctgaaagaatgctgcctatccgaggaggagtgcactcaggaaccttccaagtcggactatgctatatggaacaccaaattctgcgtatatagcctggaatcccaggaggtgctctctgacatctacattatcccccccgcatacagctcggtcgtgacatacgtccatatctgcgccactgagatcatcaagaaccagctgcgcatctccttgatcgctctgactagaaagaatcaattgatctcattccagaacgggacccccaagaacgtgtgtcagcttcccttcggtgacccatgtgccgtgcagttgatggattctggaggcggaaacctcttcttcgtcgtgtcctttattagtaataacgcttgcgcagtgtggaaagagtcgttccaagttgccgccaaatgggaaaagctgagccttgtgctgatagacgatttcattggtagcggtacggaacaggtgctgttgctttttaaagactcactgaactctgactgtcttacttcctttaagatcaccgatctgggtaaaatcaattattctagcgaaccctccgattgcaatgaggatgacctattcgaagacaaacaggagaaccgctacctcgtagtgccccccttggagacagggctgaaggtgtgtttctcaagcttcagggaactgaggcagcatctgctcttaaaagagaagataatttccaaatcctacaaagcactgataaaccttgtgcagggaaaggacgataataccagtagcgccgaagagaaggagtgtctggtcccactctgcggggaagaagagaacagcgtccacattctggatgagaaactcagtgataactttcaagacagtgagcagctcgtggagaaaatttggtaccgcgtgattgacgattccttggtagtgggcgtgaagactacctcctctctgaaactgagcctaaacgacgttactctgagtctgctgatggatcaagcacatgacagcaggtttcgtttgctgaagtgtcaaaatcgtgtgatcaagctatcaacaaaccctttcccggctccatacctgatgccctgcgagatcggattggaagctaaacgggtcaccctgaccccagactctaagaaagaggagtcattcgtgtgcgagcatcccagcaagaaggaatgtgttcagattattactgcagtgaccagcctgagtcccctgttaactttctccaagttttgttgtaccgtcctactgcagattatggagcgcgaaagtggaaactgtcctaaagatcgctacgtggtgtgtggcagggtctttctcagtctagaggatttgtcaacaggcaaatacctgctgaccttcccaaaaaagaagccaattgagcatatggaggatctattcgccctgctcgccgccttccacaaaagttgtttccagattacttcacccggctacgccctgaatagcatgaaagtgtggctgctggaacatatgaagtgcgagatcattaaggaatttcctgaagtctacttctgtgagaggcctggcagcttctatgggaccctgttcacatggaagcaacgcacaccatttgaagggatcctgatcatctactcgaggaatcaaactgttatgtttcagtgtctccataatcttatacgaatcctgccaatcaattgcttccttaaaaatctcaagagtggatccgaaaattttctgatcgacaatatggcctttactctagaaaaggagctggtgactctgagctccttgagctcagctatcgcgaaacatgagtcaaatttcatgcagcgctgcgaagtaagtaaaggcaagtcgtccgtggtggccgcagctctgtcagacaggcgagagaatatccacccttacaggaaggaactgcagcgggagaaaaagaaaatgcttcagaccaatctgaaggtgagcggagccctgtacagggaaatcactttaaaggtggccgaagtgcagctcaaatccgacttcgcagcacaaaagttaagcaacctatag

SEQ ID NO: 116632 - DNA, 2580 bp, synthetic construct
  misc_feature 1..2580: note = Description of Artificial Sequence: Synthetic coding sequence
  source 1..2580: mol_type = other DNA
atgacctccaagcaggccatgtcctccaatgagcaggagaggctgctgtgctacaatggagaagtcctggtgttccagttgagtaagggcaattttgcggacaaagaaccaacaaagaccccgatccttcatgtgcgtcgcatggtcttcgacagggggaccaaggtcttcgtgcaaaaatccacagggtttttcaccataaaggaggagaactcacacttgaaaattatgtgttgcaactgcgtgagcgatttcaggactggcatcaacctgccctatatcgtgatcgaaaaaaacaagaaaaataatgtgtttgaatacttcctgttaattctacactctaccaataagtttgagatgagattgtcgttcaagcttggatatgaaatgaaagatggtttgcgcgtgttaaatggacctctgatcctatggcgccacgtgaaagcatttttctttataagttcacagacggggaaggtggttagcgtaagcggcaacttctcctctatccagtgggctggcgaaatagaaaacttggggatggtgctgttgggcttgaaggagtgttgtctgagcgaagaggaatgcacacaagaacccagcaagtccgattacgctatctggaacacaaagttttgtgtctattctctggaatctcaggaagtgctgtccgatatatatattattccaccagcctatagcagcgtggttacatacgttcatatttgcgcgacggagataatcaaaaaccaactcagaatttctcttattgctctgacaaggaagaatcaactcatcagtttccaaaatgggacgcccaaaaacgtatgccagctgcccttcggggatccatgcgctgtccagctgatggatagtgggggcggaaacctgttctttgtggttagctttatttctaacaatgcgtgtgcagtatggaaagagtcctttcaggtagccgcgaagtgggagaagctaagtcttgtgctgattgatgactttatcgggtcagggaccgagcaggtgcttttgctctttaaagatagcttaaatagcgactgtctcacaagttttaaaataaccgatctggggaaaatcaattacagcagcgagccctcggactgcaatgaagacgatctgttcgaagataagcaggagaaccgttatctcgttgtacccccactggaaacaggcctgaaggtgtgtttttctagcttcagggagttgagacaacacctccttcttaaggagaagatcatttctaaatcctacaaagctctgatcaacctggtgcaggggaaagatgataacaccagcagtgccgaggagaaagaatgcctggtgcccctttgcggagaggaggagaatagcgtccacatacttgatgaaaaactatccgacaacttccaagattccgagcagcttgtggagaaaatctggtatagggttatagacgatagcctcgtagtcggggtgaagactacttcaagcttgaagttgtctttgaatgatgtgacacttagtttgctcatggaccaggcccatgattctaggttcaggctgctcaagtgccaaaaccgggttattaagctctctacgaatccatttccggcgccgtatcttatgccttgcgaaataggcttggaagccaagagagttaccctcacacccgacagcaagaaagaggaatcattcgtttgcgaacatccatctaagaaagaatgcgtacagatcataaccgcggtgaccagcctgagtcctctgcttacctttagcaagttctgctgcacagtgctgctgcagataatggagagagagtcaggaaattgccccaaggatcggtacgtcgtctgtggtcgagtgttcctgagtctggaggacctgtccaccggcaagtacctcctgacgtttcccaagaagaagcccattgagcatatggaagatttgttcgccctattggctgccttccacaagtcatgctttcagatcaccagcccaggatatgctctgaattccatgaaggtgtggttgctggaacacatgaaatgcgagattatcaaagaattccctgaggtttacttctgtgagcgacccggtagcttctacgggactttgttcacatggaagcagaggaccccttttgaggggatattgattatctattcccgcaaccagacggtcatgtttcaatgccttcacaacctcatacgcatactcccaattaattgtttcttgaaaaacctgaagagtggctccgaaaattttcttatagacaatatggcttttaccttggagaaagagctcgtgaccctgtcaagtctttcctctgccatcgcaaagcacgaatctaatttcatgcaaaggtgtgaggtgtcaaagggcaaaagctccgttgttgcagccgccttaagcgatcgcagggagaacattcacccctataggaaggagttgcagagagagaaaaagaagatgttacagaccaatctcaaagtcagcggggccttgtatagggagattacattgaaagtcgcagaagtgcagctcaaaagtgactttgcagctcaaaagctgtcaaacctctag

SEQ ID NO: 116633 - DNA, 2457 bp, synthetic construct
  misc_feature 1..2457: note = Description of Artificial Sequence: Synthetic coding sequence
  source 1..2457: mol_type = other DNA
atgacctcgaagcaggcgatgtcctcaaatgagcaagagaggctcctgtgttataacggagaggtgcttgtttttcagctgtcaaagggaaatttcgcagataaggagccaaccaaaacaccaatacttcacgtgcgtagaatggtcttcgatcgcggaactaaggtttttgtgcagaagtcaactggttttttcacaatcaaggaggagaactcccacttaaaaataatgtgctgcaactgcgtgtctgactttcgaactggtattaatcttccctatattgtaatcgagaagaacaagaaaaacaacgtattcgaatattttctgctgatccttcacagcacaaataaatttgagatgcgtctgagttttaaactaggatatgagatgaaggatggtcttcgggtcctgaatggcccactcatactttggcgccacgtcaaggccttcttcttcatcagttcccagaccgggaaggttgtgtccgtgagtggaaatttttctagtatccagtgggcgggagaaatagaaaaccttgggatggtcttgttgggactgaaggagtgttgcctcagtgaggaagaatgcacacaggagccctcaaaaagcgactatgcaatctggaacacaaagttttgcgtgtacagcctggagagtcaggaggtgctctctgacatatacattataccgccagcctatagctccgtcgtaacatatgtccatatttgcgccactgagatcatcaagaaccagctgaggattagcctgattgccttgacacgcaagaaccagttgatttcttttcaaaatgggacccctaagaatgtgtgtcagttgccctttggcgatccgtgcgccgtgcaactcatggactctggggggggcaacttgttttttgttgtgtccttcatatcgaacaacgcctgcgcagtgtggaaagagtccttccaggtggccgccaagtgggagaaactctccctggttttgatagacgactttattggtagtgggacagagcaggtgctcttgctgttcaaagacagccttaacagcgattgtttgacgtccttcaaaattactgatctcggcaaaatcaactattcttccgaaccctcggattgcaacgaggatgatctgtttgaggataaacaggagaaccgatatttagtggtcccaccattggaaacaggactgaaagtgtgtttctctagctttagagagctgagacagcatctgctgttgaaggagaaaatcattagcaagagctacaaggctctgattaatctcgtgcagggcaaagacgacaatacttcttcagccgaagagaaagagtgcctcgtgccattgtgcggagaggaagagaactccgttcatatcctggatgagaagttgtctgacaacttccaggattccgaacagcttgttgagaagatctggtacagagtgattgacgatagcctagtagtgggtgtgaagacaacctcctctcttaaactgtctcttaacgacgttacactctcactgctgatggaccaagcacatgactcccggtttaggcttctcaaatgccagaatagagtcatcaagctgagtactaatcctttcccggcgccgtatctcatgccatgtgaaattggcttggaggccaagcgggttactctgaccccagattcaaagaaggaggagagctttgtgtgcgagcacccgagcaagaaagaatgtgtgcagatcataacggcagtgacctcgctctcacccctgctgaccttttccaagttctgctgtactgtccttttgcagatcatggagagggagtcgggaaactgtcctaaagaccgctacgtcgtgtgcggtcgggtgtttctctcactggaggatctatctaccggcaagtatttactgacctttccaaagaagaagcccatagaacacatggaggatctgttcgccttgctggcagcttttcataagtcctgttttcagataacatctcctggctacgcattaaactccatgaaggtctggctcctggaacacatgaagtgtgaaattataaaagaatttcccgaggtctacttctgtgaacggcccggatctttttacggcactctgtttacatggaagcagagaacaccgttcgagggcatcctgattatttattcaaggaaccagacggtgatgttccagtgtctgcacaacttgattcggattctaccaatcaattgttttcttaaaaatctgaaatcgggctcggaaaactttctgattgataatatggcctttactttggagaaggagctggtaaccctcagtagcctgagctccgctatcgctaagcacgaaagcaattttatgcagaggtgtgaggtttctaaaggcaagtcttctgtagtggccgccgccctgtccgaccgtagagaaaacatacacccttatcgtaaggagctgcaacgctag

SEQ ID NO: 116634 - DNA, 1677 bp, synthetic construct
  misc_feature 1..1677: note = Description of Artificial Sequence: Synthetic coding sequence
  source 1..1677: mol_type = other DNA
atggctcaggacagcgtggatttaagctgtgactatcagttttggatgcaaaagctgagtgtctgggatcaggcgagcacgctagaaacacaacaagacacgtgcctgcacgtggctcaatttcaggagtttttacgcaagatgtatgaggcactgaaagaaatggattcaaacactgtgattgaacggttccctacaatcgggcagttactggctaaggcctgctggaatccgtttatccttgcatacgatgagtcacaaaagattctgatctggtgcctgtgttgcctcattaataaagagccccagaactccggtcagtcaaagctgaacagctggatccaaggggtcctctcacatattctgtcagcgctccgcttcgataaagaggttgccctgtttacccaggggctgggctatgcacctatcgattattatccaggactgctgaagaacatggtgctgagtctcgcttcagagcttagggagaaccatttgaatggctttaacactcaacgtaggatggcacctgaacgagtggcatctctctcgagggtgtgtgttccgctcatcaccttaaccgatgtcgaccccctggtcgaggccctactgatttgtcacgggcgggagccccaggaaattctacagcccgaattcttcgaggccgttaacgaggccattctgctaaaaaaaattagcctgcccatgtccgccgtggtttgcttgtggttgcggcacctaccaagtctggagaaggccatgctgcatctcttcgaaaagctcatttcctcggagcggaactgtctgcggcgtatagagtgtttcatcaaggattccagcctgccccaggccgcttgccatcccgccatctttcgcgtcgtcgatgagatgttcaggtgtgcattacttgaaaccgacggcgcacttgaaatcattgctaccattcaggtgttcactcagtgctttgtcgaggccctggaaaaggctagtaaacagcttaggttcgcattaaagacctactttccctacacaagcccgtccctggctatggtgctcctgcaggaccctcaagacatcccccgggggcactggttacagacccttaagcacatctccgagctcctgagggaagccgtcgaggatcaaacacacggatcttgcggaggacctttcgaatcatggttcttgtttatccactttgggggctgggccgaaatggtggcggaacagctgctcatgagcgccgccgagccacccactgcgctgctctggttgttagcattttattatgggccaagagatggacggcagcagagagcccagaccatggttcaggttaaagcggtcttaggccacttactggccatgtctagaagtagttccttatctgctcaggatctgcagacagtggcaggacagggtacggacacagacttgcgcgctccggcccagcaactcattcgtcatctgcttctgaacttcctgctgtgggctccaggcggtcacacaattgcctgggatgttattaccctgatggcccacacggctgaaattacccacgagatcatcgggtttctggaccagactttatatcgatggaatcggctgggtatagagtctccccgctccgaaaagctcgcaagagagctcctgaaagagttgcgaacacaggtgtag

SEQ ID NO: 116635 - DNA, 1677 bp, synthetic construct
  misc_feature 1..1677: note = Description of Artificial Sequence: Synthetic coding sequence
  source 1..1677: mol_type = other DNA
atggctcaggactccgtggatctttcctgcgattaccagttctggatgcagaagctcagcgtatgggatcaggcctctaccctggaaacgcagcaagacacctgcttgcatgtcgcccagttccaggagtttctgagaaagatgtacgaggccttaaaggagatggatagcaataccgttattgagcgctttcctactattggccagctacttgcaaaggcttgttggaacccctttatcctcgcttatgacgaatctcagaaaattttgatctggtgcttatgttgtcttattaataaagaaccccaaaactccggccagagcaagctcaactcctggatacagggggtcctgtcccatattctcagtgccctgagattcgacaaagaagtggccctgtttactcaggggctcgggtacgctccaattgactactatcccgggcttcttaaaaatatggttctctcattagccagtgagttgcgggagaatcatctcaacggatttaatacccaacgtcggatggccccagagagggttgccagcttgagtagggtgtgcgtgcctctaatcacactgactgatgtcgaccccctggttgaggctcttctcatatgccacggcagagagccacaggaaattctccagcccgagtttttcgaggccgtgaatgaagctattttgcttaagaaaatctccctgcctatgagtgcggtggtctgtctgtggttacggcacttgccctctctcgaaaaggcaatgctgcacctattcgaaaagctgatttctagtgaaaggaactgcctgcgccgcattgaatgcttcattaaagactccagtctccctcaggccgcttgtcatccggcaattttccgagtggtcgacgagatgtttagatgcgccctgctagaaaccgacggggccctggaaataattgcgacaatccaggtcttcacacaatgtttcgtggaagcacttgaaaaggcgtccaagcagctgcgttttgcactcaagacatatttcccatatacttctcctagcctggcgatggttttgctgcaggatccccaagatataccaagagggcattggctacagactttgaaacatatttctgaactcttgcgagaagctgtggaagaccagacccatgggagttgcgggggacccttcgagtcatggttcctattcatccatttcggcggctgggccgagatggtggctgaacagctactcatgagtgctgctgaacctcctaccgcgcttctctggttactggccttttattatggtccgcgggacggaaggcagcagagggcgcaaaccatggtgcaggtcaaggcagtgctgggtcacctgctggctatgagccgaagtagcagtctcagcgcgcaagatttgcagacagttgccggtcagggaactgacacggatctgagggcccccgcccagcagttgataaggcatttgctccttaattttctgctttgggctcctggtgggcacactatagcctgggatgtcatcactctaatggctcacaccgccgagataacacatgagatcatcggcttcctggaccagacactctaccgctggaacagactaggcattgagtctccgagatctgagaaactcgcaagagagctacttaaggagctccgaactcaggtctag

SEQ ID NO: 116636 - DNA, 453 bp, synthetic construct
  misc_feature 1..453: note = Description of Artificial Sequence: Synthetic coding sequence
  source 1..453: mol_type = other DNA
atggcacaggactctgtggatctatcttgtgactaccaattctggatgcagaaactttctgtttgggaccaggcatccactctggagacacagcaagacacctgcctgcatgttgcgcagttccaggaattcctgcgcaaaatgtatgaagccctcaaagagatggatagtaacacagtgatagaacgattccctaccatcggccagctgctggctaaggcctgttggaatccttttattctggcttacgacgaatcacagaagatcctgatttggtgcctttgttgtctcataaacaaagagccccagaattctggacagtctaaattaaatagttggatccagggggtgctctcccatattctatctgcgttgagattcgacaaagaagtcgccctgtttactcagggtctgggttatgcaccaatcgactattatccagggcttttatag

SEQ ID NO: 116637 - DNA, 4416 bp, synthetic construct
  misc_feature 1..4416: note = Description of Artificial Sequence: Synthetic coding sequence
  source 1..4416: mol_type = other DNA
atggtgagcaagagaagattgtctaaaagtgaggacaaagagtctctgaccgaggacgcaagcaagaccaggaagcagcccctgtccaaaaagacaaagaaatcacacattgctaatgaggtggaggagaacgactccatcttcgttaaactgcttaaaattagcggtattatcctgaaaactggcgagtcacaaaatcagctggccgtcgaccaaattgcctttcagaaaaagcttttccagacacttaggcggcacccatcatacccaaagatcattgaagagtttgtgtctggactagaatcatacattgaggacgaagattcattccggaattgtctgctgtcttgcgagaggctgcaagacgaagaggcctctatgggtgcctcttactcaaagagtttgattaagctgcttctgggcatagacatcctgcaaccagcaattatcaaaacgctgtttgagaagctccctgagtacttcttcgagaataaaaattccgacgagattaacattcccaggcttatcgtgagccagctgaaatggttggatcgcgtggtggacgggaaggatctaacaacaaagatcatgcagctgatctcaatagctccagagaatctgcagcacgatattattacttctctgcctgaaatactgggagattcccaacacgccgatgtcggcaaagagttaagcgatcttctcatagagaatacatccctcaccgtgcccattttagatgtgctctcctccttgcgcctggaccctaattttctgctcaaagttagacagctggtaatggataaactgtctagtatccggctggaggacttgccggttatcatcaagttcatcctacactctgtgacagcaatggacaccttggaggtaatttccgagctcagggaaaaacttgatttgcagcactgtgtgcttccctcacgactgcaagcttctcaggtgaaactcaagagcaaaggcagggcctcatctagcgggaaccaggagtcaagcggccagagctgtattattctattatttgatgttattaagagtgcaattaggtatgaaaaaaccatctccgaagcctggattaaggcaatagagaatacagcctctgtcagcgagcacaaggtgttcgatctggtgatgttattcatcatttactccactaatacccagactaaaaagtacattgaccgggtgctgcggaacaagatccggtcaggatgcattcaggaacagctcttacagagtaccttttctgttcactatcttgttctcaaagatatgtgctcctccattctatccctggcacagtccctgctacactcactggaccaatcaatcatctcattcggtagccttctttacaagtacgccttcaagttttttgatacgtactgccagcaagaggttgtaggagcccttgtgactcatatttgctcaggcaatgaggccgaggtggacaccgctctcgacgttctgctcgagttggtggttctcaatccttcggcgatgatgatgaacgcagtgttcgtgaaaggcattctggactatcttgataacatctcaccacaacagattcgcaagctgttctatgtactgtccactctggctttttccaagcagaacgaagcctccagccacattcaagatgatatgcacctcgtgattcgtaaacagctcagctccactgtgttcaagtataagctgatcgggattataggggccgtgaccatggcgggtatcatggccgctgatcgtagtgagagcccgtctctgacccaggaacgagcaaatctaagcgatgaacagtgcacccaggttacctctcttttgcagcttgtccattcctgcagcgagcagagtccccaggccagcgcattatactatgatgaattcgcaaacctgattcaacatgagaagttggatcctaaggccttggaatgggtcggccacactatttgcaatgattttcaagacgcattcgtagtcgactcatgcgtggttccagaaggcgatttcccctttcccgtgaaagcactgtacgggctggaggagtatgacacacaagacggcatcgccattaacttgctgccccttctgttcagtcaagatttcgcaaaggacggtggccccgttacttcacaggaatcaggccagaagctggttagtcctttgtgcctggctccgtatttccgtttgctcaggttgtgcgttgagcgccagcacaatgggaatcttgaggaaatcgacggtttgctggactgtcctatttttctgactgatcttgagccaggcgaaaagctggaatcgatgtctgcaaaggaaagatcttttatgtgcagcctgatctttctaaccctcaactggttcagagagatcgtgaacgccttttgtcaagaaaccagccctgaaatgaagggcaaggtgttaacccggcttaagcacatcgtggagctgcagatcatcttggaaaaataccttgcagttacccccgactacgtcccaccattaggaaatttcgatgttgaaacactggatatcacaccccatactgtgacagccatcagtgctaaaattaggaagaagggtaaaatcgaacgcaagcagaagactgacggttccaagacctcgtcttctgatactttatctgaggagaagaatagtgagtgcgatcctacgcccagccacagagggcagctgaacaaagaatttactggcaaagaggagaaaacaagtcttttgctgcacaactctcacgccttcttccgcgaactggacatcgaagtgtttagcatcctgcattgcgggcttgtcacgaagtttatactggatacagagatgcacaccgaagccacagaagtagtgcagctggggcctcctgagcttctgttcctgctggaagacctgagccagaagctggaatcaatgctgacaccgcccattgctaggcgtgtgccatttttaaaaaataaggggagtagaaacattggattcagtcacctgcaacagaggtctgctcaggagatagtccactgtgtttttcagctgctgacacccatgtgcaaccatttggagaatattcacaactactttcagtgcctggccgcagaaaatcacggcgtcgtggatggtcctggagtgaaggtgcaggagtaccacattatgtcaagctgttaccaaagactcctgcagatttttcatggactcttcgcatggagcgggttctcccaacccgaaaatcaaaatctgctgtatagcgccttgcacgttttgagctccagactcaaacaaggggagcatagccaacccctggaagaactgctgtcccagagtgtgcactacctccagaactttcaccagtcaattccaagctttcagtgcgcgctctatctgatcagactattaatggtaattctggagaagagtactgcaagcgctcaaaacaaagaaaagatcgcctctcttgctcggcagttcttatgccgagtgtggccttctggagacaaggagaagtcgaatatctccaatgatcagctgcacgcgctgttgtgcatctatctcgaacacacagagtctattctgaaggccatagaggagatcgccggggttggcgtgccagaacttattaactccccaaaggacgccagctcatccacttttcctaccctgaccagacatacttttgtcgttttctttcgggtgatgatggccgaactcgagaaaactgttaaaaagattgaacctgggactgctgctgactctcagcagatccacgaggaaaaactcctgtactggaacatggctgtccgggacttttccatcctaatcaatttaattaaggtcttcgatagccacccagtactccacgtctgccttaagtacggccgcctgttcgtcgaggctttccttaagcagtgtatgccgctcttagatttctcatttcgaaagcatcgtgaggacgtcctgtctcttctggagacatttcagctggacacaaggctcctgcaccacctgtgtgggcattctaagatccaccaggatacgcgcctgactcaacacgtccccctgctcaaaaaaaccctggagctgctggtatgccgagtaaaggccatgttaacgttaaacaactgccgcgaggcattttggctgggcaatcttaagaacagggatctgcagggagaagagatcaaaagccagaactcccaagagtccacagctgatgagagtgaagacgacatgagctcgcaagcatccaaatcaaaagcgactgaggtgtctctgcagaatcctccagaatcaggcacagatggatgcattttgttgattgtgctctcttggtggtctaggaccctgccaacgtacgtgtattgtcagatgcttttgtgcccatttccctttcccccttag

SEQ ID NO: 116638 - DNA, 3750 bp, synthetic construct
  misc_feature 1..3750: note = Description of Artificial Sequence: Synthetic coding sequence
  source 1..3750: mol_type = other DNA
atggtgtcaaagaggcgcctgtcaaagagcgaggacaaagagtctctaaccgaagatgcctcaaagaccagaaaacagcccctgagtaaaaaaactaaaaaatcccacatcgcaaacgaagtcgaggagaatgattctatcttcgttaaactgcttaaaatcagtgggataatcctgaaaacaggcgagagccagaaccagctcgcagttgaccagatcgcctttcagaagaaactgtttcagaccctgcggcggcatccatcgtacccgaaaataattgaggagttcgttagcggtctggaatcatatatagaagatgaagattcgttccggaattgcttactgagttgcgagagactccaggacgaggaggcgagtatgggagcttcctacagcaagtctcttataaagctcctgctcgggattgatattctgcagcctgctatcatcaagactctgttcgaaaagctgcccgaatacttctttgagaataagaattcagacgaaatcaatattccacgacttatcgtaagccaattaaagtggctagaccgagttgtggatggcaaagacctgaccactaaaattatgcagttgatatccatagcacctgagaatctccagcacgatataatcactagtttacctgagatcttgggggacagccagcatgctgatgtgggaaaggagttatccgatctgctcatcgagaatacaagcctaacagtccccatattggatgtacttagttccttacgccttgaccccaattttctgctaaaggtgcgccaactggtcatggataaacttagctcaataaggctcgaggaccttcccgtcatcatcaaatttattttacactctgtgaccgctatggacactctggaggtgatctccgaactcagagagaagctggacctgcaacattgcgtgttaccatcccgactgcaagccagccaggtcaagctgaagagcaagggtcgtgcctctagtagcggaaatcaggagtcgagcggacaatcctgtatcatactgttgtttgacgtcattaaaagcgctattcggtatgagaagacaatctctgaagcgtggatcaaagccatcgaaaacacggcctccgtgagcgagcacaaagttttcgatctggtaatgctctttattatttattcaacaaatacacagacgaaaaagtacattgaccgagtgctgcgcaacaagattaggagtggttgcattcaggaacagttgctgcagtctaccttctccgtgcattacctcgtactgaaggatatgtgttcctctattctatcactggctcaatctctgctgcactccttggaccagagcattatttccttcggttctctgctgtacaagtacgcttttaagttcttcgacacttattgccaacaggaggtcgtcggggcccttgtcactcacatatgctcagggaatgaagcagaggtggacacggccttagatgtattgctagaattggtcgtgctaaatccatccgccatgatgatgaatgctgtttttgtgaagggaattctagactacctggacaacatttccccccaacaaattcggaagctcttttacgtgctgtccacacttgctttctctaaacaaaacgaggcgtccagccacattcaggatgacatgcacctggtgatccgtaagcagctgtcatccacagtgtttaagtacaaactcattgggataattggggctgtaacaatggcaggaattatggctgccgataggagtgagagcccaagcctaacgcaggagcgcgccaatctctcagacgagcagtgtacacaggtgacctctctcctgcagctcgtgcactcttgttccgaacaatcgccccaggctagcgccttatactatgacgaattcgcaaacttgatccagcacgagaaactggatccaaaggcactggaatgggttgggcacacaatctgtaacgactttcaggacgctttcgttgtggactcatgtgttgtgcccgagggagattttcccttccccgtgaaagcgctgtatggcttagaggaatacgacacacaggacggtatcgccattaacctgctgcccttactcttctcccaggactttgccaaagatggcggaccggtaacgtcccaggaaagcgggcagaagctcgtttcccccctgtgcttggccccctatttccggctactaaggctgtgtgtcgagcgccagcacaatgggaatctggaggaaatagacggcctgctcgattgcccaatattcttaactgacctggaacctggcgagaagctggagtccatgagtgccaaggaaaggagttttatgtgttctctgatctttttgaccctcaactggttcagggaaatcgtcaacgctttttgtcaggaaacaagccctgaaatgaagggtaaagtgctcacccgcttgaagcacatcgtcgagctccagatcatactggagaagtacctagctgtgactcctgattatgtgcccccactgggcaactttgacgtggaaaccttggatatcactccccacactgtgacggctatatctgcgaagattcggaaaaaggggaagatcgagaggaagcaaaaaactgacgggagtaagacctccagttcagacacactctcggaggaaaaaaactctgaatgcgacccgactccttcccatagagggcaactgaacaaggaattcactgggaaggaggaaaagacttccctgctcctccacaatagccacgccttcttccgcgagcttgatatagaggtttttagtattcttcactgtggcttagtgactaagttcatcctcgacaccgaaatgcacactgaggccacagaggttgtccagttaggacctccagaattactgttcttactggaggatttgtcacagaaactggagagcatgttgacccctcccatcgcccggcgcgtgccattcctgaaaaataagggaagtcgaaatataggtttttcgcacttgcagcaacgatcagcacaggagatcgtgcactgtgtgtttcaactgctgacccctatgtgcaaccatctggaaaacattcacaactatttccagtgtctggcagccgagaatcacggtgtcgttgatggtccgggggtgaaggtacaggagtatcatataatgtcaagttgttaccagcgattgctgcaaatttttcacggcttgtttgcatggagtggcttctctcagccagagaatcagaatcttttgtatagtgcactccacgtgctttcatcacggctcaagcaaggggagcacagccagcccctggaggagctcctttctcaatccgtgcactatctgcagaactttcatcaatctattccgagtttccagtgcgctctgtacctcatccgcctgctgatggtgatcttagaaaagtccacagcatccgcccagaacaaggaaaagatagctagcctggcaagacagttcctgtgccgtgtatggccctcaggcgacaaggaaaaaagtaacatttccaacgaccagctgcatgctttactgtgtatttacctggagcacacagagtcaatactcaaggcaatagaggaaatagcaggcgtgggggtacccgaactcatcaacagccctaaagacgccagctccagtacttttcccaccttgactcggtttatgaagcggaatagttcgactggcacctggctttttgaaacatctgtgtcgtccagcacctag

SEQ ID NO: 116639 - DNA, 4356 bp, synthetic construct
  misc_feature 1..4356: note = Description of Artificial Sequence: Synthetic coding sequence
  source 1..4356: mol_type = other DNA
atggttagcaaacgcaggctcagtaaatcagaggataaggagtctcttacggaggatgcaagcaagacaagaaaacagcctctctccaaaaaaaccaaaaaatcccacattgctaatgaggttgaagagaacgactctatattcgtgaagttacttaaaatttctggcattattctgaaaacaggcgagtcgcagaaccagctggccgtggatcagatcgcattccagaaaaagctgttccaaactctgcgaagacacccatcttatcctaaaatcattgaagaattcgtgtccggactggaatcatatattgaagatgaggactcttttcggaattgtctactgagctgtgagaggctccaagacgaggaggcctcaatgggagcaagctacagcaaatcattgattaaactactgcttggtattgatatcttacagcccgctatcatcaaaaccctgtttgaaaagttgccagaatatttcttcgagaataagaatagtgatgagatcaacataccaaggctcatcgtgtctcagttaaaatggttagatcgcgtggtcgatggaaaggatctgacaaccaaaattatgcagctcattagcattgcccccgaaaatctccaacacgacattataactagccttccagagattcttggcgacagccagcacgccgacgttggaaaggagctgtcagatctcctgatcgagaacacaagcttgacagtacctattctcgacgtgctgtcctccctcaggctggatcctaattttcttttgaaggtcaggcaactggtgatggacaagctttctagcatccggcttgaggatctgcctgtgattatcaagtttatcctccatagcgtgactgccatggacacactagaggtaatcagtgagcttcgcgaaaagctggacctgcaacactgcgtcctcccgtccagactccaagctagccaggtcaagctgaagagcaaaggtcgcgctagttcaagcggtaatcaagagtctagtggccagtcctgtattattcttctatttgatgtgatcaagagcgctatacgctatgagaaaacaatcagtgaagcctggattaaggcaattgagaacacggccagtgtgagtgagcacaaagtgtttgatctggtgatgttgtttatcatctactctaccaacacgcagactaaaaaatacatcgatagggtgttgcgtaacaagatacgtagcgggtgcatccaggaacaattactccagtccacgttctccgtgcactacctcgtgctgaaagacatgtgtagtagcattctctcgcttgctcaatctctgttgcactccctggatcagagcatcattagtttcggctctttgctttacaaatatgcgtttaaattcttcgacacttactgtcagcaggaggtggtgggtgccttggtgactcatatatgctcagggaatgaggccgaagtggacaccgccctcgatgtcctgctggaactggtagtgctcaaccctagtgctatgatgatgaacgctgtgtttgtgaagggtatcctcgactacctggacaatatcagccctcagcaaatcagaaaactgttttatgtcttgagcacccttgcattctccaaacagaatgaggcctcctctcacattcaagacgacatgcatttggtaatccgcaagcagctgtcgagcaccgtttttaaatacaagcttatcggcatcattggcgcggtcaccatggctggtatcatggccgccgacagatccgaatctccttccctaacacaggaacgtgccaatctctcagatgagcagtgcacccaggttactagtctactacaactggtccactcctgctccgaacagtcacctcaggcatccgcactgtattacgatgagttcgcaaatcttatacagcacgaaaaactggaccccaaagcgctggaatgggtcggacataccatctgcaacgattttcaggatgccttcgtggtggacagctgtgtagtccccgagggagattttccgtttcctgtcaaagccttgtatggtttggaggaatatgatacacaggatggaattgctatcaacctgttgccactcctgttttctcaggactttgcaaaagacggcggccccgttacatcccaggagtctggccagaagctggtgtcacccctgtgtctggctccgtactttcggttactgcggctatgcgttgagcgtcagcataatggcaacctggaggagattgatgggctgctcgactgccctatatttctgacagacctggagcctggtgaaaagttggaatctatgagcgccaaggagcgcagctttatgtgctccctgattttcttaactcttaattggtttcgcgaaatcgtcaatgcattttgtcaggaaacctctccagaaatgaaaggcaaggtgttgacccggctcaaacacatagttgagttgcagatcatcctcgaaaaatacctcgcagtcacccctgactatgtcccccccctcggtaactttgatgtggaaacacttgatattacccctcacactgtgacagcgataagcgcgaagattagaaagaaaggtaagatcgaacggaaacagaagacggacgggtccaagactagcagttctgacacgctgtcagaagaaaaaaactctgaatgtgatccgacaccatcacaccggggccagctcaataaagaattcaccggaaaggaggagaagacgtccctcctcctccacaactcacacgctttctttcgagagctggacatcgaggtgttctcaatcctgcattgcggcttagtgaccaaattcattttggatacagaaatgcacaccgaagccacagaggtagtgcaactcggccccccagaactcctgttcttgctggaggatttgagtcaaaagctcgagagtatgctcacccctccaattgctaggcgcgttcctttcttgaaaaacaagggtagtagaaacatcggattcagccacctgcaacagaggtcggcacaagaaattgtgcactgcgtgttccaattgcttaccccgatgtgtaatcatcttgagaacattcataactactttcagtgcctggccgccgagaatcacggggtcgttgatgggcctggcgttaaggtccaagaatatcatatcatgtccagctgttaccaacgcctcctgcagatatttcatggcttatttgcgtggtcaggcttttcccaacccgaaaaccagaatctactttacagtgctttacacgtcctaagtagtcgccttaagcagggggagcattctcagccactagaagagttgctgtcccagagcgttcactatttacaaaatttccatcaatcgatccccagcttccagtgcgccctgtacctaatacgactactaatggtgatcttggagaaaagtactgccagtgctcagaataaggagaagattgccagcctggccagacagtttctgtgccgggtttggccctccggggacaaagaaaaatccaatatttccaatgatcaactgcatgcactgctctgcatttacctagagcataccgagtcgattcttaaagccatcgaagaaatcgcgggtgtgggcgtgcctgagctcataaattctcccaaggatgcgtcctccagtacattcccaacccttacgcgacatacattcgtggtgttcttcagagtgatgatggctgagcttgagaaaaccgtgaagaagatcgagcccggcacggctgccgatagccagcagatccatgaagagaagttgctctactggaacatggccgtaagagacttttctatcttaatcaacctgattaaagtcttcgacagccatccagttttgcacgtgtgcctgaaatatggtaggttgtttgtggaggcattcctgaaacagtgcatgcctctgctggatttttccttcaggaagcaccgtgaggatgttctgtctttactggagacatttcagctggacactcgactgcttcatcacctgtgcggtcattcgaagattcatcaggataccagactgactcagcacgtgcccttactgaaaaaaacattggagttgctcgtctgcagagtgaaggctatgctcaccttgaataattgccgggaggccttctggctaggcaatctcaagaacagagacctccagggggaagagatcaagtctcagaactcccaggagtccaccgcagatgaaagtgaagatgacatgtcaagccaggctagcaagagtaaggcgacagaagatggcgaggaggacgaggtgtccgccggtgagaaggagcaggactcggacgagagctatgacgactccgattag

SEQ ID NO: 116640 - DNA, 4356 bp, synthetic construct
  misc_feature 1..4356: note = Description of Artificial Sequence: Synthetic coding sequence
  source 1..4356: mol_type = other DNA
atggtgtctaagaggaggttgagcaagagtgaagacaaggaaagcctcactgaggatgcctcaaagactcgtaagcagcctctctctaagaagaccaaaaaaagtcatattgcgaatgaggttgaagaaaatgattccattttcgttaagttgctcaaaatcagcggaattatactcaagactggcgaatcccaaaatcagttggcagtggaccagatcgcttttcaaaaaaagctctttcaaactctgcgtcggcatccctcctacccaaaaatcatcgaggagtttgtatcgggcctggaaagttacatcgaagacgaagattcatttaggaattgcttgttgagctgtgaacgccttcaggacgaagaggccagtatgggcgctagttacagcaagtcactgatcaagctgctgctcggaattgacattctgcagccagcaataatcaagacactgttcgaaaagctccccgaatacttttttgaaaacaagaattctgatgagatcaacattcccagactcatcgtgtcacagctcaagtggcttgaccgggtggtggatgggaaggatcttaccaccaagattatgcagcttatcagtattgcaccggagaatcttcagcacgatatcattacatccctgcctgagatactaggagacagccaacatgcagatgtgggcaaagagttgtcggaccttttaatcgagaataccagtctgacagtcccaattcttgatgtacttagctcgctgcggctcgatcccaattttctgctaaaagtgaggcagttggtaatggacaagctgagctctatccggctggaagatctgcctgtgataatcaaattcattctgcacagcgtgaccgcgatggacactttggaggtgatttcagagctgcgggaaaagctcgatctgcaacactgcgtgctgcctagtagactgcaggcctctcaggttaaacttaagagcaagggtagggcatcgtcttcaggcaatcaggagagcagcggacagagttgcataatcctgttgttcgacgtcatcaagtctgctatcagatatgagaagacaatctcggaggcctggataaaagccatcgaaaacactgcgtctgtgtctgaacataaagtcttcgatttagtgatgctgttcattatatatagtactaatactcagacaaaaaaatacattgaccgtgtactcaggaacaagattcgcagtggctgcattcaagaacagctcttgcagtcaacattcagtgtgcactatctagtcctgaaagatatgtgttcctctatattatctctggcccaatccctgctgcactccctcgaccagagtatcatcagcttcggttctctgctgtacaagtacgctttcaagtttttcgacacttattgtcagcaggaggtggtgggtgctctcgtaacacacatctgttctggcaacgaagctgaggtggacaccgccctcgatgtgctgctcgaactggttgtcctaaacccttccgcaatgatgatgaacgcagtgtttgtaaagggaatcctggactacctggacaacatttcaccccagcaaatacgtaagttgttttacgtgttgagtaccctcgcatttagtaaacagaacgaagccagttcacacatccaggatgatatgcacctcgtcattcgcaagcagctaagcagtacagtttttaaatataagctgatagggatcatcggagccgtgacaatggctggcattatggccgctgatcggagcgaatccccctctctgacccaagagagagcaaacttgagcgatgagcagtgcacgcaggtcacgtcccttctgcagctcgtccattcttgctccgagcagtcaccacaggcatctgccctctattacgatgaatttgccaacctgattcagcatgaaaaactggatccaaaggctttagagtgggttggccacactatctgcaatgatttccaagatgcctttgttgtggactcctgcgtggtccccgagggtgacttccctttccctgtcaaggcactctatggattggaagaatacgacacgcaggacggaatcgcaataaacctgctgcccctgttattttcccaagacttcgccaaagacggcggcccagtgacctctcaggaaagtggccagaaactggtgtcacctctgtgcctcgctccgtatttcagactattgcggctgtgcgtggagaggcagcacaacggcaacttggaagagattgacgggctgctggattgtcctatcttcttgaccgacctggaacccggagagaagctcgagagcatgtctgcgaaagagagatctttcatgtgtagtcttatctttctgacactgaattggttccgggaaattgtgaacgccttctgtcaggaaacctcacctgagatgaaaggaaaggtgctgactagattgaaacatatagtcgagctgcagataatcctagagaagtacctggccgtaacccctgactatgtgcctcccctggggaattttgatgtcgagacccttgacataacgccccacaccgtaacagctattagcgcaaagattcggaaaaaaggaaagattgagcgcaagcagaagactgatggcagcaaaacgtccagcagtgacaccctatcagaggagaaaaattctgagtgcgacccaaccccctcacaccggggtcagctcaataaagaattcacaggcaaggaagagaaaacttcactcctgttgcacaattcacacgcattttttcgagaactggacatcgaggtattcagtatccttcactgcggtcttgttacaaagtttattcttgataccgagatgcacaccgaagctacagaggttgtacagctgggccccccggagctgctttttttgctagaggacctgtcacagaagctggagtccatgttgacacccccaatcgccaggagggtgcccttcttgaaaaacaaaggttcacggaatatcggtttctcccacctgcagcagcgctcagctcaggaaattgtccactgcgtctttcagcttctgacaccaatgtgcaaccaccttgagaacattcacaactatttccaatgcctggctgccgagaaccacggcgtcgtggatggtcccggggttaaagttcaggaatatcatataatgtcgagctgctaccaacgcctgctccagatcttccacgggctgttcgcatggtccggtttctcccagcccgagaaccagaatcttctgtactcagctctgcacgtcctaagtagccgcctgaagcaaggcgagcactcccaacctctggaagaactgctgtctcagagcgtgcattacctgcagaactttcatcagtcaatacctagcttccaatgtgctctatacttaatccggctgctgatggttatactcgaaaaaagtaccgctagtgcacagaacaaggaaaagattgcaagcctggcgaggcagtttctgtgccgggtctggccttccggtgataaagagaaatccaacatctccaatgaccagctacacgccctgctctgtatttatctagaacatacggaaagcattctcaaggccatcgaagaaatagcaggagtgggcgtgccagagctgattaatagtcccaaagacgcctcatcttccaccttcccaactctgacaaggcacacattcgtagttttctttagagtcatgatggcagagcttgagaaaacagttaagaaaatcgagccaggaaccgccgccgattcacaacagatacatgaggagaagctcctctattggaatatggcagttcgagacttctcaattctgatcaatctgatcaaagtgtttgattcacatcctgttctgcacgtgtgcttaaagtatgggaggcttttcgtggaagcctttctgaagcaatgtatgcccttactggatttcagctttcgtaaacacagagaggacgtgctgagcttactggagaccttccagctggataccaggctgttgcatcatctttgcggccattctaagatccaccaggataccaggctgacccagcacgtcccattactgaaaaaaactcttgagctgctggtgtgccgagttaaagcaatgttaaccctcaataattgcagggaggccttttggttgggcaacctgaagaaccgcgatctccagggagaggaaatcaaaagccagaacagccaggaaagcacggccgacgagagcgaagatgacatgtcttctcaggcctccaagagcaaagctaccgaggacggcgaagaggacgaagtatctgctggcgaaaaagagcaggattccgacgagagctacgacgatagtgactag

SEQ ID NO: 116641 - DNA, 1341 bp, synthetic construct
  misc_feature 1..1341: note = Description of Artificial Sequence: Synthetic coding sequence
  source 1..1341: mol_type = other DNA
atggattcctctgccgccccgacaaacgccagtaactgtactgacgctctcgcctactcttcctgttcacctgcgccctccccaggttcttgggtaaatctgagccaccttgacggtaatctgtcagacccatgtggaccaaatcgaactgacctcggggggagagattccctgtgcccaccaaccggatcgccgtctatgatcacagcgataacgataatggccctctactcaattgtttgcgtggtcggcctgttcggcaacttcttagtaatgtatgttattgtacgctatacgaagatgaagaccgcaactaacatctatatatttaaccttgcccttgcagacgcactcgcaacttccacgctcccatttcaatctgtaaattacttaatggggacctggcctttcggcacgatattatgcaaaatcgttatctctatcgactactataacatgtttacgtcgattttcactctctgtacgatgagcgttgacagatacattgctgtgtgccatcccgtgaaggcgctcgacttccggactcccaggaacgcaaaaatcatcaatgtgtgtaactggatcctctcttctgcgattggactgcctgtgatgttcatggccactacgaagtatcggcagggctcaatcgactgcacactcaccttcagtcatcccacctggtattgggaaaacctactcaagatatgcgtgtttatatttgccttcatcatgccagtgctgataattacagtgtgctatggcctgatgattcttcgtctgaaatctgttcggatgctgagcggcagcaaggaaaaagaccgcaatctgagacggataacccggatggtgctggtggtagtggccgtgttcattgtctgctggacccccatacacatctacgttataattaaggctctggtaacgattcccgagaccacattccagacagtctcctggcatttttgcatcgcactgggttacacaaactcatgtttgaaccccgtactttacgcctttctggatgaaaacttcaaacgatgttttcgagagttctgcataccaaccagctcgaacatcgaacagcagaacagcacacggatccggcaaaacacccgggaccacccgagcacggccaatactgtcgatagaactaatcaccaatgtcttccaattccttctctttcctgttgggccctcgagcaaggctgcctagtcgtctatccaggtcccctgcaggggccactggtccgttacgatctgcccgccatcctgcactccagttgcctgaggggcaataccgccccttcaccctccggaggggcctttctcttatcttag

SEQ ID NO: 116642 - DNA, 1125 bp, synthetic construct
  misc_feature 1..1125: note = Description of Artificial Sequence: Synthetic coding sequence
  source 1..1125: mol_type = other DNA
atggagtccttgctccaacaccttgatcgattctctgagcttttggccgtttccagcacaacatatgtatctacctgggaccccgccaccgtccggagggccctgcagtgggctaggtatttgaggcatatccacagaagatttggtcggcacggtcccatcagaacagccctggagagacggctgcataaccagtggcgccaggaagggggttttggtcggggccctgtgccaggcctggcgaatttccaggccctcgggcattgcgacgtactgctctctctgcggctgcttgaaaatagggccctgggtgatgcagcccgctaccacctggtgcagcagttatttccaggcccaggggttagagatgcggacgaagagactctgcaagaaagtctggctagactggcgcggaggcgatccgctgtgcatatgctgcgctttaacggatatagggagaatccgaatctgcaggaggacagtctgatgaaaacacaggccgaacttctcctcgaacggttgcaagaggtggggaaagctgaggccgagcggcccgccagattcttatcgagcctctgggaaagacttcctcaaaacaattttctgaaagtgatagccgtggccttattgcaaccccctctgtcccggaggccacaagaagaactggagcccggcattcataaaagccccggggagggttcccaggttctggtgcactggctgctgggaaacagcgaggtctttgccgccttttgtagagccttgccagcaggattgctcacactggtgacaagccgtcaccctgctctcagtccggtgtacttgggactgttgactgattggggacagcggttgcattatgacctgcagaaaggaatatgggtaggcaccgaatcacaggatgtgccctgggaagagctgcataaccgatttcaatcgctgtgccaagcccctcctcctctcaaagacaaggtactgaccgcgcttgaaacgtgtaaggcccaggatggtgacttcgaggttcctggactttccatctggacagatctccttctcgcactacgctctggcgccttcaggaaacggcaggtactcgggctctccgccgggctgagtagtgtttag

SEQ ID NO: 116643 - DNA, 3807 bp, synthetic construct
  misc_feature 1..3807: note = Description of Artificial Sequence: Synthetic coding sequence
  source 1..3807: mol_type = other DNA
atggatcagaagatattgagtctcgccgccgaaaagaccgcggacaagctgcaggagttcctgcaaactctgcgcgaaggagacctgaccaacctattgcagaatcaggcagtcaaagggaaggtggctggcgccctgcttcgggctatttttaaaggatctccatgcagcgaggaagccggaacgctccgccggcggaagatctatacgtgttgcatccagttagtggaaagcggagatctgcagaaggaaatcgcgagtgagatcattgggctgctgatgctcgaagcgcaccattttccaggccctttgctcgtggagttggcaaatgagttcatatctgccgtgcgggaggggagcttagtcaacggcaagtccctggagttgttgcccatcatcttaactgccttggccactaaaaaggaaaacttagcatacggtaagggggttctttccggtgaggaatgtaagaagcagctgattaataccctgtgcagcggtaggtgggatcagcagtacgttatccagctgacgagtatgttcaaggatgtgcccctgacggctgaggaggtggagttcgtagtcgaaaaagctctttcgatgttttccaaaatgaatctgcaagagatcccccccttagtgtaccaactgctggtgctttccagtaaagggtccagaaaaagcgtcctggagggcatcatcgcgttcttcagtgccctagataagcaacacaacgaggagcagtctggtgatgagcttttggatgtagtgaccgtaccgtccggagaacttaggcacgtggagggaactattatccttcatattgtgtttgctataaaattagattacgaactcgggcgagaactggtcaaacatctcaaggtgggtcagcagggagacagtaataataacctttccccattctctattgccctgctgttatccgtgacacggatccaacgcttccaggatcaggtcctcgacctcctgaaaacttctgtggtcaagagttttaaagatctgcagctcctgcagggaagcaagttccttcaaaatctggttccacatcgctcttatgttagcactatgattttggaagtggttaagaactcggtgcactcttgggaccacgtgacacagggactggtggaactgggctttatcctcatggacagttacggacccaaaaaggtgctggacggtaagactatcgagacctctccgtccctatctaggatgcctaaccagcacgcatgtaaactcggcgccaatattctactcgagaccttcaagatccatgagatgattagacaagaaatattagagcaagtgctgaaccgtgtggtaactagggcttcctcccctatatcccactttctggacctactgtccaacatcgtcatgtacgctccgctcgtactgcagagctgctcctctaaagtcaccgaagccttcgattatctgagttttcttcccctgcaaaccgtgcagcgcctattaaaggcggtgcagccgctgctaaaggtgagtatgtcaatgagagattgcctaattctcgtgctgaggaaagccatgtttgccaaccagcttgatgcacgaaagtctgccgttgccgggtttttgctgttgctgaagaacttcaaagtcttgggaagcctcagctctagccaatgctcccagtctctgagcgtttcgcaggtgcacgtggacgttcattcacattataactctgtcgctaacgagacattttgtctggagattatggactcactaaggcggtgcctctcacagcaggcagacgtgcgcctgatgttgtatgaggggttttacgatgtgctcaggcgcaattctcaactggccaattcggtgatgcaaacgctgctcagtcaattgaaacagttctacgaacctaaacccgatttactccctcctctcaaactggaggcgtgcatcctgacgcagggagacaagatcagtttgcaggaaccgctggactacttattgtgttgcatacaacactgcctcgcatggtataagaatactgttatcccccttcagcaaggggaggaggaagaagaggaagaagaagctttttatgaagacttagacgacatcctggaatctatcaccaacagaatgattaagagtgagctggaagatttcgagcttgataagtcagctgatttttcgcagtccacctcaatcggcatcaagaacaatatatgtgcattcctcgtcatgggagtgtgcgaggtcctgattgaatataatttttctatctcctctttttctaaaaacagattcgaggacattctgagtctgtttatgtgctacaagaaactgtctgacattctgaacgagaaggccggcaaggcaaagacgaaaatggccaacaagaccagcgatagcctgctctccatgaaatttgtcagctcactgttgaccgctctgtttcgagtgctgctgtggaggtatacttcgatccccacgtcagtggaggagagcggcaaaaaagaaaaaggaaagagtattagcctgctttgcctcgagggtctgcaaaagatcttcagtgcagtgcagcagttctaccagccaaagatccagcagttcctccgcgcgcttgacgttaccgataaggagggggaggagcgtgaggatgctgacgtatccgtgacccagcgcacagccttccaaattcggcaattccagcggtcactgttgaatttgctgagctcacaagaagaggattttaatagcaaagaggcactcttgttggtaacggtcctgactagtctgtccaagttgctcgaacctagcagcccccagttcgtgcagatgctgagctggacttccaagatttgcaaggagaactcacgcgaagacgcactcttctgtaagtcactaatgaatttactgttttctcttcacgtgtcatacaagtccccagtaattttgcttcgagacctgagccaggacatccacgggcaccttggcgacattgaccaggatgtggaggtggagaaaacaaatcacttcgcaattgttaatctgagaaccgccgccccaaccgtatgcctactggtgctctcacaggctgaaaaagttcttgaagaagtcgattggttgatcacgaaactgaagggccaagtgtcccaggaaacccttagtgaggaggcatcttctcaggccacgttgccaaaccagccggtggaaaaggctatcatcatgcagctcggaacgttgctcacctttttccacgagctggtccagaccgcgttaccctcagggtcatgcgtcgacaccctgcttaaagacctgtgtaagatgtacactactctaaccgcgcttgtgcggtactatctccaagtgtgccagtcatccggcggcatccctaagaacatggagaaactggtgaagctatcaggttctcacttgacccctctgtgctattcattcatatcatacgtgcaaaacaagagcaagtctctgaactatacaggggaaaaaaaagaaaaaccggctgccgttgccactgctatggcccgcgttttaagagaaactaaaccaatccccaacctgatattcgctatcgaacagtacgagaaattcctgattcacctcagcaaaaagtccaaggtgaacctcatgcagcatatgaaactgtcaacctctcgcgattttaagataaagggcaacatcctcgatatggtgttaagagaggatggagaagacgaaaacgaggagggtacagcctccgaacacggcgggcaaaacaaggagcctgctaagaagaaacgcaaaaaatag

SEQ ID NO: 116644 - DNA, 3987 bp, synthetic construct
  misc_feature 1..3987: note = Description of Artificial Sequence: Synthetic coding sequence
  source 1..3987: mol_type = other DNA
atggatcaaaagatactctctctggccgccgagaagactgccgacaaactacaggaatttctgcaaactttgcgggagggagatcttactaacctgctccaaaatcaagcggtgaaagggaaggtagcgggagcacttctccgggcaatctttaaaggtagcccttgttctgaagaagctggtaccctgagacgtcggaagatttacacttgttgtattcagctggtagagagcggagacttgcagaaagaaatcgcttcagaaattattgggttgctgatgctcgaagctcatcactttccggggcccctgcttgtagagctggccaatgaatttatatctgccgttagagaggggtccttggtgaatggcaagagtctggaactgctgcccatcattttgaccgcactggctacaaagaaagagaacctggcatatggaaagggtgtgttatctggcgaagaatgtaagaagcaactcatcaataccctctgttctgggcgctgggatcagcagtatgttatccaactcacgtctatgtttaaggacgtgcccctcaccgcagaggaagtggagtttgtcgtcgagaaggccctgagtatgttctcaaaaatgaacctgcaggaaataccccccctcgtataccagttgctggttctgtctagcaaggggagtcgaaaatctgttttggaaggtatcatcgccttttttagcgccctagacaaacagcataatgaagagcagagcggggatgagctgttggacgtggtgaccgtgccaagcggtgagcttaggcatgtcgaggggactatcatactccacatcgtgttcgccattaaattggactatgagctgggacgagagctcgtaaaacacctgaaagtggggcagcagggggactcaaataacaacttgtccccctttagcatcgctctcttgctgtctgtcacgcgcatacagcgattccaagatcaggtgctggatcttttaaaaacatctgtagtcaagtccttcaaggacttgcagctgctacaggggtccaaatttctgcagaatcttgtgcctcatcggtcatacgtcagtactatgatcttagaggtggtgaagaattctgttcacagttgggaccacgttacacagggactggttgaactggggtttatcctgatggacagttatggaccaaagaaggtgttagatggcaaaaccattgagacatctccctcactgtctaggatgccaaaccagcacgcttgtaaattgggcgctaacatccttctagagactttcaagatacacgagatgatacgacaggaaatcctcgaacaggtccttaacagggtggttacacgggcctcgtctcctatctcccactttttggatctgctgtcgaacatcgttatgtacgctcccctcgtgttgcagtcctgcagtagtaaggtgacagaagctttcgactatctgagcttcttgccccttcagactgttcaaaggttacttaaggctgtccagccactgcttaaggtgtcaatgtccatgcgagattgtctgatcctagtgctgaggaaggcgatgttcgcaaatcagcttgatgcccgcaagtcagccgtggctggttttctgctgctgctaaaaaactttaaagtgctgggttccctcagcagctcccaatgcagtcaatccctctcagtgtcccaggtccacgtggatgtgcactctcactataattcagttgcaaatgagaccttttgtttagaaatcatggactctctgagacgatgtctatcccagcaggcggacgtccgtttgatgctgtacgagggattttatgacgtcctacggcggaattcgcagttggccaatagtgtgatgcaaaccttgctatctcagttaaagcaattctatgagcccaagccagacctgttgcctccactgaaactggaggcctgtatcctcactcagggcgacaaaattagccttcaggaaccccttgattacctgctgtgttgcatacaacactgtctcgcctggtacaaaaacaccgtgatacctttgcagcaaggcgaggaggaggaggaagaggaggaggctttctatgaggatctcgacgatatacttgaatcaattactaacaggatgattaagtctgagctcgaggacttcgaactggacaagtcggcggactttagccagtcgacttcaattggaatcaagaataatatttgtgcctttctggtaatgggggtctgcgaagtgttgatcgagtataactttagcatctcaagcttttcaaagaacaggtttgaagatatcctttctctgttcatgtgctacaagaaactgagtgacatcctgaatgagaaagcaggcaaagccaagacaaaaatggccaataagacgtccgatagccttctctcgatgaagtttgtttcatcactgctgaccgctctctttagggacagcattcaaagccatcaggagtccctgtccgttctgcggtctagtaatgagtttatgagatatgctgtcaatgtggcgctgcaaaaggttcagcagctgaaggaaacaggccatgtgtccgggcccgacggtcaaaacccagagaaaatattccagaacctatgtgacatcaccagggtgctcctctggcggtacacctcgattccgacctcagtggaagagtccgggaaaaaagagaagggtaaatccattagcctgctatgcctggagggtctgcaaaaaattttttccgccgttcagcagttttaccagccaaagatccagcagtttttgagagccctcgatgtgaccgataaggaaggcgaagaacgagaggatgcagatgtttcggtaactcagcgaacggcttttcagatacggcagtttcagaggtctctgctgaatcttctgagtagtcaggaagaagatttcaactccaaggaagccctcctccttgtgaccgtcttgacctcactgtccaagctgctggagccgtccagcccccaatttgttcagatgctctcttggacgagtaagatttgcaaggaaaactccagagaggatgccctcttctgcaagagcctgatgaatctcctgttctctctccacgtgagctacaagagccctgtgatcctgttgagagacctcagccaagacattcacgggcatctgggagatatcgaccaagacgtggaggtggaaaaaaccaatcatttcgccattgtgaatctgaggacagctgctcctacagtttgcctgcttgttctttcccaggccgagaaggtgctggaggaagttgattggctcattacaaaactcaagggccaggtctcccaggaaaccctcagtgaagaggcatcttcccaggccacgctacccaatcagcccgtcgagaaagccatcatcatgcaactggggaccttactgacgttttttcacgaactggtccagaccgctctgcccagcggctcctgcgtcgatacactgcttaaagacctgtgcaagatgtacaccacactgacagccttggtgcgctactaccttcaagtgtgccaatctagtgggggaattcccaagaacatggagaaactggtgaagctaagtggtagtcacctgacccctttgtgttacagctttatctcttacgtgcagaacaaatctaagagcttgaattatacaggcgagaagaaagagaagcctgctgccgtggcaacagcaatggcacgagtgctcagggaaacgaaacccatccccaatctaatatttgctattgagcagtacgagaaattcttgatacacctgagtaagaagagcaaggtcaacctcatgcagcatatgaagctgtcaacctctcgggactttaaaatcaagggtaatatcctggacatggtcctgcgtgaagatggggaagacgaaaacgaggaagggacagccagcgaacacggggggcagaataaagagccagcaaagaagaagaggaagaagtag

SEQ ID NO: 116645 - DNA, 3288 bp, synthetic construct
  misc_feature 1..3288: note = Description of Artificial Sequence: Synthetic coding sequence
  source 1..3288: mol_type = other DNA
atggatcagaaaatactgagtcttgcagctgagaaaacagccgataaactacaggaatttctccaaacactcagggagggcgatctgaccaatctacttcagaaccaagcagtgaaagggaaggtggcgggggccctcctccgcgccattttcaaagggtcaccatgttcagaggaagcagggactttgcggagacgaaaaatttatacttgctgtatccagctggtggaatcgggcgacctgcagaaagaaattgctagcgagataattggcctactcatgctcgaagcacaccacttcccaggcccactgctcgtagaactcgcgaatgaatttatatcagcagtgcgcgagggatccctagttaacggtaaaagtctggaactactgcccatcatcctcactgcattggctactaaaaaggaaaatttggcttacggaaaaggagtgttgtcaggagaagagtgcaagaagcagttgataaacacactctgttcgggtcgatgggaccagcaatatgttatccagttgaccagcatgtttaaagatgttcccttgactgccgaagaggttgagtttgtcgtggagaaagccctgtcaatgttctccaagatgaatcttcaggagattcctccactggtgtatcagcttctggtcctttcaagtaaaggcagcagaaagtccgttcttgagggaattatcgccttcttttccgccctggacaaacaacacaatgaggagcagagtggagatgaactgctggacgtggtaactgtcccttctggagagctccgccatgttgaaggcacaatcatcttacatatagtgttcgccattaagctggactacgagctgggacgagagctggtgaagcacttgaaagtggggcagcagggagactccaataacaacctctccccttttagtatagctctgttgctgtccgttaccaggatccaacggtttcaggaccaggtgctcgatttgttgaagacaagcgtagtgaagagctttaaggacctccaactgctgcagggctctaagttccttcagaatctcgtccctcaccgctcctacgtgtctacgatgatacttgaagtagtcaaaaattctgttcatagttgggaccatgtgactcaaggccttgtcgagttgggatttatcctcatggactcctacggccctaagaaggttctggacggcaagaccatagagacatctcccagcttatctcgcatgcccaatcagcacgcttgtaaactgggggcaaatattttgctggaaaccttcaagattcacgagatgattaggcaggagattctagagcaagtgttgaacagagtggtcacacgtgcctcttcacccattagccactttctagacctgctgagcaatatcgtgatgtacgctccccttgtccttcagtcctgttctagcaaggtgactgaggcattcgattacctctcatttctgcccctacagacggtacagagattgctgaaggctgtgcaaccactcttgaaagtgagcatgtctatgagagactgtctgatcctggtccttcggaaggccatgttcgccaatcagttagacgcacgcaaatctgctgtcgccgggttcctgttgctgctgaaaaactttaaggttttaggttccctcagctcatcccagtgctctcaaagcctcagtgtcagccaggtgcatgttgacgtccattctcattataatagcgtggcaaacgaaacattttgtttggagattatggactctcttagacgctgtctctcccaacaggcagacgtccgcctaatgctgtacgagggattctatgacgtgctgaggcgaaactctcagcttgctaatagcgttatgcaaaccttactctctcagctgaagcaattctacgagccgaaaccagacctccttccacccctgaagttggaggcttgtattctgacgcagggagataagatttcattgcaagagccactcgattacctcttgtgctgtatacagcattgcctggcttggtataagaacactgttattcctcttcagcagggcgaagaggaggaagaagaggaggaagctttctacgaggacctcgatgatatactcgagagtatcaccaaccgaatgatcaagagcgaacttgaagattttgaattggacaaaagtgccgatttttcacaaagtaccagcatcggtatcaagaacaacatctgtgcttttctggttatgggtgtgtgcgaagtgctgatcgagtataacttttcaatatcaagcttctcaaagaatcggtttgaagatattctgtctcttttcatgtgctataaaaagcttagcgatatcctgaacgagaaagcaggcaaggcaaaaactaagatggctaataaaactagtgatagtctgctgagcatgaagtttgtgtcatctctcctgactgccttgtttagagtgctgctgtggcggtacacctctattcctacttccgtcgaagaatccggtaagaaggagaaaggaaaatctatcagtttattgtgcctcgagggacttcagaagatcttttctgctgtgcaacagttttaccagccaaagattcaacagtttctgcgggcgcttgacgtcactgacaaagaaggagaagaacgtgaggatgctgatgtctccgttacccaaaggacggccttccaaatacgacagtttcagcggtccctccttaatttactctctagtcaggaagaggattttaatagtaaggaagcgttactactggttacggttttaacaagtctgagcaagctgctggaaccgagtagccctcagtttgtgcagatgctttcatggacatctaagatctgcaaagagaacagtcgtgaggatgctctcttttgtaagagtcttatgaacctattgttcagccttcacgtcagctataagagccctgtgatcctactccgggacctcagccaagacattcacgggcatctcggcgacatcgatcaggatgtggaagtagagaaaaccaatcacttcgccattgtgaatctgcggactgcggccccaacggtgtgcctgctagtcctttcacaggccgagaaagtactggaggaggttgattggctgatcaccaagttgaaaggacaggttagccaggagacactctcagtaagccctggcgtgagcgaactgcgcaggaacagcaaaaagtatggaaaagctggggaagcagtctggttctcctctgacccgccggtcctgttcttccatttcctcagaaccgaatag

SEQ ID NO: 116646 - DNA, 222 bp, synthetic construct
  misc_feature 1..222: note = Description of Artificial Sequence: Synthetic coding sequence
  source 1..222: mol_type = other DNA
atgtttaaagatgttccactgactgctgaggaagtagaattcgtcgtggagaaagctttgtccatgttcagtaaaatgaatcttcaggagatcccaccccttgtgtatcagctgcttgtgctctcatcaaaggggagcaggaaaagcgtgctggagggtatcatcgccttcttttccgccttggacaaacagcataatgaggagcaatcaggagatgagtag

SEQ ID NO: 116647 - DNA, 501 bp, synthetic construct
  misc_feature 1..501: note = Description of Artificial Sequence: Synthetic coding sequence
  source 1..501: mol_type = other DNA
atggctcagacttcctcttacttcatgctaattagttgtctgatgttcctctcccagtcacagggccaagaagcccaaaccgaactgccacaagcgagaataagctgtcccgaaggcactaacgcctatcgcagctattgctactattttaacgaggaccgagaaacctgggtggacgccgacctttactgtcagaatatgaatagcggcaatctcgtctccgtccttacccaggcggagggggctttcgtggccagtctcattaaagaatcaggaactgacgacttcaacgtgtggattgggttacacgacccgaaaaagaacaggagatggcactggagtagcggctcactggtctcttataaatcttggggcattggagcccccagttccgttaatccaggctattgtgtctcactgacttcatctacaggctttcagaagtggaaagatgtaccctgcgaagacaagttttcctttgtgtgtaaatttaaaaactag

SEQ ID NO: 116648 - DNA, 384 bp, synthetic construct
  misc_feature 1..384: note = Description of Artificial Sequence: Synthetic coding sequence
  source 1..384: mol_type = other DNA
atggctgtcactgaagcctctctcctccggcagtgccctctccttctgccacaaaaccgctcaaaaaccgtgtatgagggcttcatttctgctcagggacgggatttccatctgcggatcgtcttgccggaagatctgcagctgaagaatgctagactcttatgcagctggcagttacggaccattttgtcgggctatcaccgcatcgtacagcagcgcatgcagcactctccggacctgatgagtttcatgatggagctcaaaatgctgctggaagttgcactcaagaatagacaggagctgtatgcattgccaccacctccgcagttttattccagtctgatagaagagattggtacactcgggtgggacaaggccccctag

SEQ ID NO: 116649 - DNA, 6147 bp, synthetic construct
  misc_feature 1..6147: note = Description of Artificial Sequence: Synthetic coding sequence
  source 1..6147: mol_type = other DNA
atgagtggccgccaaagaacgcttttccagacatgggggtctagcatctctaggagctccggaactcctggctgcagctccggtacggaacgcccacaatcgcccggctcgagcaaagcacccctacccgctgcagctgaagcacagttggagagcgatgatgacgtgctcctggtggcagcttacgaggccgagagacaactttgtctggagaatggaggcttctgtacatccgcgggagccctctggatatatcctaccaattgccccgttcgagattaccagctccacatctctcgtgctgccctgttttgcaacactctggtgtgtcttccaactggactgggtaaaacttttattgcagccgtggtgatgtacaatttctatcgatggttcccatccggtaaagtcgtgttcatggcaccaacaaagcctctcgttactcagcagattgaggcctgttaccaggtgatgggaattcctcagagccacatggcggagatgacggggagtacacaggcctctactcgcaaagagatttggtgctcaaaacgcgtgctcttcctgacaccacaggtgatggttaatgacttgtcacggggcgcctgccccgccgcagagattaaatgccttgtcatcgacgaagctcacaaagccctaggcaattacgcatactgccaggtagttcgggaactcgtgaagtacacaaatcatttccgtatcttggctctgtcagctacccctgggagtgacatcaaagcagttcagcaagtcataacgaatctgctgataggccagattgagctgagatccgaagacagtcccgacatccttacatactcccacgaaaggaaagtggagaaactcattgtgccgctgggagaggagttggcggccatccagaaaacctatattcagattctggagtccttcgcgcggtctcttatccaacgtaacgtgctgatgaggagggacatccctaacctgaccaaatatcagattatcctggccagggatcagtttcggaagaatccgtcgcccaatatcgtgggcatccaacagggtatcatcgagggcgaatttgccatctgtatctctctgtatcatggttacgaactgctccagcagatggggatgaggagcctctacttttttctatgtgggattatggacggcactaagggcatgactagatccaagaatgagcttggacgcaatgaagacttcatgaagctgtataaccatctggaatgcatgttcgcccgtacccgcagtacatctgcaaacgggatctcggccattcagcagggagataagaacaagaagtttgtttatagtcaccctaaacttaagaaactggaagaggtggtcatcgagcacttcaaatcttggaacgcggagaacacaactgagaagaaaagagacgaaacacgggtgatgatattctcttctttcagagacagtgtccaggaaattgcagagatgctttcgcagcaccagccgatcattagggtcatgacattcgtgggacatgcaagcggaaagagtacaaaggggttcacccagaaggagcaattagaggtggttaagcagtttcgagacggaggatataacacactggtgtcaacctgcgttggggaggaaggactagatattggcgaggtagaccttatcatttgtttcgactctcagaaatcacccatccggctggtccaacgaatgggcaggacgggacggaagaggcagggacggatcgttattattctgagcgagggtcgagaggagaggatatacaaccaaagccagtcaaataaacgatcaatatacaaagctattagctctaataggcaggtgctgcatttctaccaacggagtcccagaatggtacctgatggcataaatcctaagttgcacaaaatgttcattacccacggggtgtatgagcccgaaaaaccctctagaaacctgcagcgcaagagctcaatcttcagctaccgagatggaatgcgccaatccagcctgaagaaagattggtttctgagcgaagaggaatttaagctgtggaacagactctatcgattgagggactcggatgagatcaaagaaatcactctcccccaggtccagttctccagcctccagaatgaagagaacaaaccggcccaggagagtacaaccggcattcatcagcttagcctgagcgaatggcggctgtggcaggatcaccccttgcctacccatcaggtagatcactccgatcgttgcaggcattttatcggcctgatgcaaatgattgaggggatgagacatgaggagggtgaatgtagttatgagctggaagtggagtcttacctgcagatggaagatgtcacatctactttcatagcccccagaaatgagagcaacaacctggcttctgacacattcattacgcacaaaaagagttctttcattaagaatataaatcagggatcctcgagcagcgtgatagaaagtgatgaagaatgtgcagaaatcgtgaaacagacgcatattaagccgactaaaattgtgtccttgaagaaaaaagtcagcaaagaaataaagaaggatcagttaaaaaaagagaataaccacggcattatcgattcggtcgataacgataggaactctacagtcgagaatatatttcaggaggatctgcctaacgacaagaggacctctgacactgacgaaattgccgccacatgcaccatcaacgagaacgtgattaaggagccttgcgtattgctaacagagtgtcagttcacaaataagagcaccagtagtctggccggtaatgtgctggattccggctacaatagctttaacgatgagaagtcagtgtcctccaatctgttcctgcctttcgaagaggagctttacatcgtcaggacagacgaccagttctacaactgccacagccttaccaaggaggtcctggctaatgtggagcgctttttatcctactcgcctccgccactgagtggcctgtccgacctggagtacgaaattgcaaagggaactgccctagaaaatctgctgtttctgccatgcgccgaacatctaagatccgacaagtgcacatgcctgcttagccactctgccgtgaattctcagcagaacctcgaactgaatagtctgaaatgtatcaactacccttctgagaagtcctgtctttatgacattcctaatgacaacatctccgatgaaccgagcctgtgcgactgcgatgtgcataagcacaatcagaacgagaatttggtgcctaacaaccgcgtgcagattcatcgttcacccgcccagaacctcgttggcgaaaacaaccacgatgtcgataacagcgatctccctgtcttgtcaacagaccaggatgaatccctgctgctgttcgaggacgtgaacaccgaattcgatgatgtttcactgtcaccccttaactcaaagtcagagtccctacctgtttcagataagaccgctattagcgaaaccccactggtttctcaattcctgatctcagacgagctgctgttagataataatagcgaactgcaggaccaaatcacgcgtgacgccaacagcttcaagtcaagggaccagcgcggggtgcaggaagagaaagtcaaaaatcacgaagatattttcgattgctctcgggacctgttcagcgttactttcgatctgggattttgttctcccgattctgacgatgagattctcgagcataccagcgactctaatcgcccactcgatgacctgtacggccggtacctcgagattaaggagataagcgacgctaattatgtgtctaaccaggctttgatacccagagaccattcgaaaaattttaccagtggcaccgttattataccttcaaacgaagacatgcaaaatcctaattacgtacatcttcccctgagtgcggccaagaacgaggaactgctttcgcctggctattcccagttttctctccctgtccaaaagaaggtgatgtccacaccattatcaaagtcaaacaccctcaacagcttcagcaagatccgcaaggaaattctgaagacgcctgattcaagcaaagagaaagtgaatctgcagcgtttcaaagaggccttgaatagcactttcgactacagtgaattctccctggagaagagtaaaagcagcggacctatgtacttacataaatcctgccacagcgtcgaggacggacagctcctgaccagcaacgagagcgaagacgacgagatctttcgcagaaaggttaaaagagccaaagggaacgtcctgaattcgcctgaagatcaaaagaattctgaggtggactcgccgctccacgccgtaaagaaacgcagattccctatcaacagatcggaactgagcagctccgacgagtcagaaaattttccgaagccgtgttctcagctggaggactttaaagtctgcaacggcaatgccagaaggggaatcaaggtcccaaagaggcagtctcacctgaaacatgtagcacgcaagttcctggacgacgaagctgaattatcagaggaggatgctgaatatgtcagttctgacgagaatgatgagtccgaaaacgagcaagatagtagccttctggactttttgaacgacgagacacagttatcccaggcaatcaacgattcagagatgagagctatctacatgaaatcactccgatcccccatgatgaataacaagtataaaatgatccacaagactcacaaaaacattaacattttctctcagatcccagaacaggatgagacttacctggaagattcattctgcgtggacgaagaagagagctgcaaaggtcagtcttctgaggaggaggtgtgtgtggacttcaatcttattactgacgactgtttcgctaatagtaagaagtacaagacaagacgagccgtgatgctgaaagaaatgatggagcaaaattgcgcccattctaagaagaagctctctaggattatcttacctgatgatagttctgaagaggagaataacgtgaatgataagcgcgaatcaaacatagccgttaatccctcaacagtaaaaaagaataagcagcaggaccattgtttgaactcagttcctagcggcagctccgctcagtctaaggtccgcagcactcccagggtgaacccacttgccaagcaatccaagcaaacgagtctgaatctgaaagataccattagcgaggtgtcagatttcaaacctcagaatcacaatgaggtccagtcaaccactccacctttcaccactgtggatagccagaaggactgtcgaaagttcccggtgcctcagaaggatggctccgcactcgaagattcatccacttccggggcctcttgcagtaaaagtagaccacacttagcagggacgcatacatctctgcggttgccccaagagggaaagggcacctgcatactggtgggcggtcatgagattacttcgggtctagaggtcattagctccctgcgggccatccatgggctccaggttgaggtgtgcccgttgaacggctgcgactatatcgtcagtaacagaatggtggtcgaacggcgcagtcagtccgaaatgctgaattctgtgaataagaacaagttcatagagcagatccagcacctgcagtcaatgttcgagagaatatgtgtcattgtcgaaaaggaccgcgagaaaacgggcgacacctcaagaatgttccgccgaaccaagtcctatgatagtctcctcacaacgctcattggagcgggaatacgcatattatttagttcatgccaagaggaaacagcggacctgttgaaggagttgagcctggtcgaacaacgcaagaatgtcggtatacatgtgcctaccgtggtgaacagcaacaagagtgaagcactgcaattctatctctcaattcccaatatctcctacatcacagcactgaatatgtgccaccagttcagctcagtgaaacggatggcgaactcaagcctacaagaaatctcaatgtacgcccaggttactcatcagaaggcagaggaaatctatcgctacattcactatgtcttcgatatccagatgcttcctaatgacctcaaccaggacaggctgaaatccgacatttag

SEQ ID NO: 116650 - DNA, 2010 bp, synthetic construct
  misc_feature 1..2010: note = Description of Artificial Sequence: Synthetic coding sequence
  source 1..2010: mol_type = other DNA
atgtctggtcgtcaacggacactgttccagacctggggtagcagcatttcaagaagcagcgggacccccggctgctcatctggaacagagcgaccacaatctcctggcagttctaaagcacccctccccgcggccgctgaagcacaactcgaatccgatgacgacgtgttgcttgtggctgcatacgaagccgagagacagctttgtctggagaacggggggttttgcaccagcgcaggcgccctttggatttatcctacaaactgtcctgtgcgagattaccagctgcacatctctcgcgctgccttattttgcaacacactagtatgcttgcccactggactgggcaagacatttattgctgctgtcgtgatgtacaacttctatcggtggtttccctcaggtaaagtcgttttcatggctccaacaaaacctctcgtcacacagcagattgaagcctgctaccaagtgatgggcatccctcagtcccatatggcggaaatgaccggctccacccaggcatcgacaagaaaggagatttggtgtagcaagcgggtcttattccttacgccacaagtaatggtgaacgacctgtctcggggggcgtgtcccgccgcagaaatcaagtgcttggtcattgatgaggctcataaagccctcggaaactatgcatattgtcaggtcgtcagagaactagtcaaatatacaaaccattttcggatcctcgctttgtctgctacacccggttcagatattaaggccgtacaacaggtaatcaccaacctgttaatcggccagatcgaactgcgctcggaggatagtcctgatattctaacatactcgcacgaacgcaaggtagagaagctgatcgttcccctcggggaggagctggccgcaatccaaaagacatacatccagatccttgaatccttcgccagatctctgatccagaggaatgtcctaatgaggcgcgacatcccaaatcttaccaagtaccaaatcatcctcgccagagaccagtttcgcaaaaacccttcaccaaatattgtgggaatccaacaggggatcatcgagggtgagttcgccatttgcatcagcctttaccacggctatgaactgctgcaacagatgggaatgagatccctgtattttttcctgtgcggaattatggatggtaccaagggaatgaccagaagcaagaatgaactaggacgcaacgaagacttcatgaaattgtacaatcacctggaatgcatgttcgcccgaacgcggagcacaagtgctaacgggatctcagctatccagcagggagacaagaacaaaaagttcgtgtactcgcatcccaagcttaagaagctcgaggaagtggtgatcgagcactttaaatcttggaatgctgaaaacacaactgagaagaagagagacgagacgcgggtcatgatattttcctccttcagggatagcgtgcaggagatcgcggagatgcttagtcagcaccagccaattattcgggtgatgacttttgtcggtcacgcctccggcaaaagtacgaagggattcacccagaaggagcagcttgaagtggtgaaacagttccgagacggcggatacaacacgctggtgagcacatgtgtgggagaggagggacttgacataggagaagtagatctgataatctgcttcgatagccagaaaagtccaatccgcctagtacaacggatgggaaggacaggtcggaagagacaaggaagaatcgttatcatcctctcagaaggccgtgaggagcggatttacaaccagtcccagtccaataagcgctctatctacaaggcaatctctagcaaccgacaggtccttcacttttaccaacggagccccagaatggtacccgatgggatcaaccccaaattgcacaaaatgttcatcacccacggggtttatgagcctgagaagccatcacggaatctgcagcggaagagtagcatcttttcttaccgggatgggaaatag

SEQ ID NO: 116651 - DNA, 1968 bp, synthetic construct
  misc_feature 1..1968: note = Description of Artificial Sequence: Synthetic coding sequence
  source 1..1968: mol_type = other DNA
atggctgactatagcacagtacccccaccatcctctggaagtgccggcggcgggggcggaggtggaggcggggggggggtcaatgatgccttcaaagacgcactccagcgtgcccggcaaatcgccgcaaagattgggggtgatgcggggacctctctgaacagtaatgactacggctacggaggtcagaagcgaccattggaggacggcgatcaacctgatgctaaaaaagttgctccccaaaatgactcttttggaactcagctgccccctatgcaccaacagcagtcgcgcagcgtgatgacggaagagtacaaggtgcccgacggtatggtggggtttattatcgggaggggtggcgaacaaatctcacgaattcaacaggagagcggttgtaagatccagatcgccccagactctggcggcttgcccgaacgttcttgtatgctgactggcaccccagagagcgttcagtccgccaagaggctattggaccagatcgttgagaaaggccggcctgcgccaggcttccaccacggcgacggacctgggaacgctgtgcaggagatcatgattcccgcttctaaagccggactggtgattggaaaagggggagagactatcaagcagcttcaggagcgcgctggcgtgaaaatggttatgatccaggacggaccacagaatactggtgccgacaaaccactcagaattactggcgatccctataaggttcaacaggcaaaagagatggttctcgagctcataagggaccagggtggatttagagaggtccgtaatgaatacggcagtaggattggcggaaatgagggaattgacgttcctatcccgagatttgctgtcggaatcgtgattggccgtaacggcgagatgattaagaaaatccagaacgatgcgggagtacggatccagtttaagccagacgacggaacaacccccgagagaatcgcacagatcacaggccctccagataggtgtcagcacgccgcagagattataacggacttgctgcggtctgtgcaggcaggaaatcctggcggccccggccccgggggcaggggtcgcggccgcggacaaggcaattggaacatggggcccccaggcggtctgcaggagtttaacttcattgtccctacaggaaagacaggccttataatcggaaaaggcggcgaaacaataaagagcatctcccagcagtcgggcgcacgcattgagctgcagaggaatccgccacctaatgccgaccctaacatgaaactgtttacaatccgggggaccccacagcagatcgactacgctcggcagcttattgaggaaaagatcggcggccctgttaatccactgggccccccggtgccccacggcccgcacggcgtgcctgggccccacggacccccgggaccccctggcccgggcactcccatgggaccgtacaaccccgccccttacaaccctggaccacccggccctgctccacacggcccaccagcaccttacgcaccccagggttggggtaacgcttaccctcactggcagcagcaagcaccccctgaccctgcaaaggccgggaccgaccccaatagcgccgcatgggcagcctattatgcccactattaccagcaacaggcccagcccccaccagccgctcctgcaggggcacccacaaccacacagaccaatggccagggtgatcagcaaaatccagcccccgctggacaggtggactacacaaaagcttgggaagaatactataaaaaaatggggcaagctgtaccagcaccgactggtgcccctccaggcgggcagccagactatagcgctgcctgggcagaatactataggcagcaggccgcatactacgctcagacctctccacagggcatgcctcagcacccccccgctccgcagggatttgcaaaccatgctaggtcccatcaccacctttactag

SEQ ID NO: 116652 - DNA, 1935 bp, synthetic construct
  misc_feature 1..1935: note = Description of Artificial Sequence: Synthetic coding sequence
  source 1..1935: mol_type = other DNA
atggccgattactcgaccgttccacctcctagttctggatccgccggtggcgggggaggtggaggcggcgggggaggagtgaatgacgcttttaaagatgcattgcagcgggctcggcagatcgctgctaagatagggggagacgccggcacatccctgaattctaacgactacggctatggaggccagaagcgccctttggaggatggggaccagcccgacgccaagaaagttgcaccacagaatgattccttcggcacacagttgccaccaatgcatcagcagcaatctcggagcgtgatgacagaggagtacaaagtcccggatggaatggttggtttcattatcggacgcggaggcgaacagatctcgaggatccaacaggaaagcgggtgcaaaatccagattgccccagactctggtgggttgccggaacggtcttgtatgctgaccgggactccggaaagcgtgcagagtgccaaacggcttctcgatcagatcgtcgaaaaaggcagaccagcccctggttttcaccacggcgatggacctggtaacgctgtgcaggagatcatgattcctgcctccaaagccggccttgtgatcgggaaaggaggcgagaccatcaagcaattacaggaacgggctggggtcaagatggtgatgatccaggatggtccacagaacacaggcgctgacaagccgttgagaatcaccggggatccttacaaagtccagcaagctaaagagatggttctggaactgattcgcgatcaaggcggttttcgggaagtcagaaacgaatatgggtcaagaattggagggaacgaggggattgacgttcccatccctcgtttcgcagtgggcatcgtaattggacgaaacggagaaatgataaaaaagatacaaaacgatgctggcgtgagaattcagtttaaaccagacgacgggactacccccgagaggatcgcgcaaattaccggaccgccggatagatgtcagcatgctgcggagatcattaccgacctcctaaggagcgttcaggctgggaaccccggggggcccggccccggggggaggggtagaggaagagggcaaggaaattggaatatgggcccgccaggaggtctgcaggaattcaacttcattgttcctacggggaagacagggctgattattgggaaggggggggaaaccattaaatcgatttcacagcagagcggagctcggattgagctgcagcggaaccctccccctaatgccgatccaaacatgaaactctttacaatcaggggaaccccacagcagatcgattacgcccgtcagttaatcgaggagaagatcgggggccccgtcaaccccttgggacctcccgtaccccacggcccccacggcgtgcctggccctcacgggcctccgggcccaccagggcctggcacccctatgggtccctacaatcctgctccttacaatccaggcccgccagggccggcaccacacggaccccctgcaccttacgcacctcagggctggggaaatgcgtacccccattggcagcagcaggccccgccagatcccgccaaagctgggactgatcctaacagcgccgcatgggcggcctactatgcacattattaccagcaacaggcccaaccccctcctgctgctccggccggagcccctacaactacccagactaacgggcagggcgatcagcagaaccctgcaccagccggtcaggtggattatacaaaagcttgggaagagtactacaaaaagatgggacaggcagttcctgcccctacgggagcgccaccaggtgggcagcctgactactcagctgcctgggcagagtattaccgccagcaagccgcttattatgctcagacgtcgccacaaggtatgccccaacacccccctgcccctcagggacagtag

SEQ ID NO: 116653 - DNA, 1965 bp, synthetic construct
  misc_feature 1..1965: note = Description of Artificial Sequence: Synthetic coding sequence
  source 1..1965: mol_type = other DNA
atggcggattacagcaccgtgccaccaccatccagtggaagcgctggcggcggtggggggggagggggaggagggggagtgaatgacgctttcaaagacgccctccagcgcgcccgacagattgccgccaagatcggaggcgatgccggcacatctcttaatagtaatgattacggatatgggggacagaaaaggccattggaggatggtgatcagcctgacgcaaaaaaggtggcccctcagaatgactcattcggtacccaattgccgccaatgcatcagcagcagcgtagcgtaatgacggaagagtataaggtaccagatggcatggtgggattcattataggacgcggcggagaacagatttctagaatacaacaggagagtggctgtaagattcagatcgcaccagactctgggggactgcccgaacggtcttgtatgctaactggaacaccagaatcagtgcagtcagccaagagactgctggaccagattgtcgagaaaggaagacctgctcccggatttcatcatggtgatgggccgggaaacgcggtgcaagagatcatgatccccgctagtaaggccggacttgtcatcggcaaggggggcgagactatcaagcagctgcaggagcgcgcaggggtgaagatggtgatgatccaggacggccctcagaacaccggcgccgataaaccacttcggattacaggagacccatacaaagtgcagcaagcgaaggagatggttctagagctcattagagaccagggaggattcagggaggtgagaaacgaatatggaagtcgcatcggaggaaacgagggaattgatgttccaattccccgctttgctgtgggcatcgtgatcggaagaaacggagagatgatcaagaaaatacagaatgatgccggagtccgaatccagtttaagcctgacgatggaacaacgccggagcggatcgcccagataactggcccccctgaccggtgtcagcacgccgccgagatcatcacagatctgctgcggtccgtccaggctggtaacccaggcggtcccggtcctggggggagggggcgcgggagagggcagggcaattggaatatgggtccacccggaggtttacaggagtttaactttatcgtcccgaccggcaagaccgggttgatcattggtaaagggggtgagaccatcaagtccatctcccagcaatcgggggcccgtatcgaactccagaggaacccgccaccaaacgcagaccccaatatgaagctttttacaatcaggggcacacctcagcagatagattatgctaggcagcttattgaagagaagattgggggtcccgtgaatcctctcggcccacctgtccctcacggaccacacggcgtgccggggccacatggccctcccgggcccccgggacctggaactcctatgggaccttataaccccgcgccatataaccctgggccacccggtcctgctccacatggtccgcctgccccatatgccccccagggctgggggaacgcctatccgcattggcagcaacaagcccctccagatcctgcgaaagccggtaccgatcctaactcagccgcttgggctgcgtactacgcccactactatcagcagcaggcccagccccccccagctgctcctgctggcgccccaaccactactcagacgaacggccaagagggtgatcagcagaatcctgcccccgctgggcaagttgattacacaaaagcatgggaggaatactacaaaaagatggggcaggcagtccccgctccaaccggcgctccacccggggggcagcccgactactcagccgcctgggctgaatactatagacagcaggcagcatattatgctcaaactagtccccagggaatgccccagcacccacccgcgccacagtgtcgatttgatcccgccagcattgagcttgccctgtag

SEQ ID NO: 116654 - DNA, 1890 bp, synthetic construct
  misc_feature 1..1890: note = Description of Artificial Sequence: Synthetic coding sequence
  source 1..1890: mol_type = other DNA
atggcagactactctacggtgccccccccatcatcagggtctgctggaggcggaggaggaggaggggggggcggaggcgtaaatgatgcatttaaggatgcgcttcaacgcgccagacagatcgccgccaagattggcggcgacgcgggcacatctctgaatagcaacgattacggatacggtggtcagaagcggcccctggaggatggcgatcaacccgacgctaaaaaagtggcaccccagaacgattcctttggaacccagcttccacccatgcaccaacagcagaggtcagtgatgactgaagagtacaaagttcccgacggcatggtgggatttataatcggaagggggggcgagcagattagccgaatacagcaggagagcggctgcaaaattcagatcgcgcctgacagcggggggctgccagagcgttcctgcatgctaacaggcaccccggaatccgtacagtccgcaaagcgcctcttggatcagatcgtcgagaagggacgcccagcaccgggatttcatcacggtgacgggcccggcaatgccgtgcaggaaattatgatcccagctagcaaggcgggactggttataggtaagggcggagaaacgataaagcaactgcaggagcgggctggggtgaaaatggtgatgattcaggatgggccacaaaacaccggcgcggacaaacctttacgaataaccggagacccttacaaagttcagcaagccaaagaaatggtgttagaattgatcagagatcaggggggattccgggaggtcagaaacgaatatgggtcccggatcggtggcaatgaagggatcgacgtgcccatcccccgctttgctgtcgggatcgtgataggtcggaatggcgagatgattaagaagattcaaaacgacgcaggtgtccgtattcagtttaaacctgacgatggaactaccccggagcgcatcgcccaaattactggaccacccgaccgctgccagcacgcagccgagattattactgaccttctgcggtctgtgcaggcgggcaatcccgggggccccgggccagggggtagaggccgggggagagggcagggcaactggaatatggggccgcctggaggattgcaggagttcaatttcatagttccaactggcaagacgggactcattatcggtaagggtggggagacaatcaaatcaatctctcagcagagcggcgctaggattgaattgcaaagaaatcctccgccaaacgcagacccaaatatgaagttgttcacgatcaggggcacccctcagcagatagactacgctaggcagcttatcgaggaaaaaatcgggggacccgttaatccgctgggtcctccggtcccccacggtccaccagggacacctatgggaccctacaacccagcgccctataatcctggtcctccgggtcccgcccctcacggccctcctgcaccctatgctccccagggttggggaaatgcctatcctcactggcagcagcaggcccccccggaccctgcgaaagccgggacagacccgaatagcgccgcctgggccgcgtattatgctcattactaccaacagcaggcccagccgccccctgctgcaccagccggagcccctacgaccacacaaactaatggccagggggaccagcagaacccagctccagcgggccaagtggactacaccaaggcctgggaggagtactataagaaaatgggccaagcggtccctgcacccacgggtgctccacctggaggccagcctgattactctgccgcttgggcagaatactatcgacagcaggcagcctactatgctcaaaccagcccccagggcatgccacaacatccccctgccccgcagggacagtag

SEQ ID NO: 116655 - DNA, 699 bp, synthetic construct
  misc_feature 1..699: note = Description of Artificial Sequence: Synthetic coding sequence
  source 1..699: mol_type = other DNA
atggcggattattcaaccgtccctccccccagctctggctctgctgggggcggtggcggaggtggtggcgggggcggcgtgaacgacgctttcaaggacgcactgcaaagggcacgacaaatcgccgcaaagattggtggagacgctggaactagcctgaactccaacgactacggttatggcggacaaaagcggcccctggaagacggggatggcagctggaccagtccttcttccacaacacattgggaggggatgccctccccattcaaagatcaacctgacgccaaaaaggtggccccccaaaacgatagctttggcacccaattgccccctatgcatcaacagcagcggtccgtgatgaccgaagagtataaagtgcccgatgggatggtgggcttcattattgggaggggcggcgagcagattagtcggatccaacaggagtcaggatgtaagatccagattgccccagattcgggtggcctgccggaacgctcatgcatgttgaccggcacccctgaatctgtgcagagtgccaaaaggctgttggatcaaatcgtcgaaaagggtagacctgcccctggtttccatcacggagacggccccgggaatgccgtccaagaaatcatgattcctgcctcaaaagcaggccttgtgattggaaaagggggggaaaccataaaacagttacagtag

SEQ ID NO: 116656 - DNA, 1998 bp, synthetic construct
  misc_feature 1..1998: note = Description of Artificial Sequence: Synthetic coding sequence
  source 1..1998: mol_type = other DNA
atggcagactacagcacagtgcctcctccatcatctggcagcgccggaggcggtgggggaggcgggggaggcggtggggtcaatgatgcctttaaagacgctttgcagcgcgcacgacaaattgctgccaagattggcggggatgctggaacttccttgaactccaacgattatgggtatggagggcagaaaaggccactggaggatggagatggctcatggacatctccgagctcaaccacacactgggagggaatgccatcaccttttaaagaccagcccgatgccaaaaaggtggctccacagaacgatagcttcgggacccagctcccacctatgcaccagcaacagagccgtagcgtcatgaccgaagaatacaaagtgcctgacggaatggtgggctttattattggcagggggggcgaacaaattagtagaatccagcaagagagcggctgtaagattcagattgcccccgacagcggggggttaccggagcgatcatgcatgctcaccggcacaccagagagtgtccaaagcgccaagcgattgctggaccagatcgtggagaaagggaggcccgctcctggattccatcacggcgacggtccgggtaacgcggtccaggagattatgataccagccagtaaggctggtctggtaattggtaagggaggtgaaaccattaagcagcttcaagaacgggctggagtcaagatggttatgattcaggatggacctcaaaacacgggggcagataagcctctgaggatcacaggggatccctataaagtgcagcaggcaaaggaaatggtcctcgagctcattagagatcagggaggcttcagagaagtgcggaatgaatacggcagccgtatcgggggcaatgaaggcattgatgtccccatacccaggttcgctgtcgggatagtcatagggagaaatggcgagatgattaaaaagatccagaacgacgctggagtgcggattcagttcaaaccagatgatgggacaacgccagaaaggattgcgcagatcactgggcctccagataggtgccagcacgctgcagaaatcatcacagatctgttgaggtcagtgcaggcggggaaccctggggggccgggtcccggcggccggggaagggggcgcggccagggaaactggaatatggggccccctggcgggctgcaggagtttaatttcatcgtgccaaccggtaagaccgggctgatcattggcaaaggtggagaaaccatcaagtcgatatcccagcagagcggcgcacggatcgagctgcagcgcaatcctccaccaaacgccgaccccaacatgaaattgtttacaataagggggacacctcaacagatcgattatgcccgtcaactgattgaagagaagattggtgggccagttaatcccctcggtccaccagtaccacatgggccccatggtgttcctggtcctcatggccctccagggccccccggacctggtaccccaatgggtccatacaatccagcgccctacaatccgggaccaccaggtcccgctcctcacggaccacctgccccatatgccccccagggatggggcaacgcttacccccactggcagcaacaggcccctccagatcccgcaaaagccgggacagaccccaatagcgcggcgtgggccgcatattatgcccactattaccagcagcaagcccagccccccccggctgcgcccgccggagcgcctacgactacacagacaaacggtcaaggggatcagcagaaccccgcaccagccggacaggttgattacactaaagcatgggaggagtattataaaaagatgggccaggcagtgccagcacccacgggggcaccgccaggcggtcagcctgactactcagcagcatgggcagagtattaccgccaacaggccgcatactacgcacagacgagcccccagggcatgccacagcaccctccagccccacagggccaatag

SEQ ID NO: 116657 - DNA, 1260 bp, synthetic construct
  misc_feature 1..1260: note = Description of Artificial Sequence: Synthetic coding sequence
  source 1..1260: mol_type = other DNA
atgcctctgagcagatggcttcgcagcgtaggggtcttcctgctgccagcaccatattgggcgcctagagaacggtggttaggcagtctccggagaccatctctggtgcacggctaccccgttttggcgtggcactcagcccggtgctggtgccaagcatggacagaagaacctagagctctctgttctagtctccgcatgaacggcgaccagaattccgacgtctatgcccaagaaaagcaggatttcgtgcagcactttagccagatcgtgcgcgtgttaacagaggacgagatgggccaccctgagattggcgacgccatagccaggctaaaagaagtacttgagtataatgccatcggcggcaaatataaccgggggctgactgtggtcgtggccttcagagagctcgtggagccccgaaaacaggatgctgacagccttcagagagcttggaccgttggttggtgtgttgaacttcttcaggctttttttctcgtggcggatgatatcatggacagctccctgaccagacgcggtcagatttgttggtatcagaaaccaggggtgggactggatgctattaatgatgctaatctgctcgaagcttgcatttaccgcctcttgaaactctactgtagagaacagccctattacttaaacttgatcgagctcttcctccagtcctcatatcagacagaaatcgggcagacactggatctcctcacagcgccccagggaaatgtagacctggtgaggtttactgagaagcgctataaaagcattgtcaaatacaaaaccgcattctatagcttttatctccccatcgctgcagctatgtacatggccgggatagatggagaaaaggagcatgccaatgcaaagaaaattctcctggagatgggagaattcttccagattcaggatgactacctcgatctcttcggcgatccatctgtgaccgggaagattggcactgacattcaggataataagtgctcttggctcgttgtgcagtgtttacagcgcgcaacacctgagcaatatcagattctgaaagagaattatggccagaaggaagccgaaaaagtggccagggttaaagccctgtacgaggagctggacctgcccgctgtgttcctgcagtatgaggaggactcctattctcatatcatggccctgatcgaacagtacgccgcaccattaccaccagccgtatttctgggcctggcccgcaagatctacaaaagacgcaagtag

SEQ ID NO: 116658 - DNA, 1260 bp, synthetic construct
  misc_feature 1..1260: note = Description of Artificial Sequence: Synthetic coding sequence
  source 1..1260: mol_type = other DNA
atgccactcagcaggtggcttcgcagcgtcggcgttttcctgttgcccgcaccatattgggccccacgagagcgctggctgggttcactgcgaagaccatctttggtccacggctatccggtgctcgcctggcattccgccagatgttggtgtcaggcatggacagaggaacctcgagccctgtgtagcagcctgagaatgaatggtgatcagaattcagacgtctatgcacaggaaaaacaggactttgtccagcacttcagtcagattgtacgcgtgctcacggaagatgagatggggcacccggagataggtgacgccattgccaggctgaaggaggtcctagagtacaatgctatcggcggcaagtataacaggggcctcaccgtggtggtggcatttcgggagcttgtggagcccagaaagcaggacgcagatagcctgcagcgcgcttggactgttggttggtgtgtggaactgctgcaggcatttttcttagtggccgatgatatcatggactcttcactgactaggagagggcaaatatgctggtaccaaaagcctggcgtgggacttgacgccatcaatgatgccaaccttcttgaggcctgtatttatagacttctgaaactatactgccgcgagcaaccctactatctgaacctgattgaactcttcctccaatccagctaccagactgaaataggacaaacactggatctgctaaccgcccctcagggcaacgtggacctggtcaggttcactgaaaagcgctacaaaagcatagtcaaatataagacagcattttattctttctaccttccgatcgccgcggcaatgtatatggctggtatcgatggcgaaaaggagcatgctaacgcaaaaaaaatacttctggagatgggcgagttcttccagatccaagacgactacctggacctcttcggcgatccctcagtaacaggtaagataggcactgatatccaggataataagtgttcctggctcgttgtccagtgtttacagcgagccactcctgaacaataccaaatcttgaaggagaattacggtcagaaagaggccgagaaggtggcaagggtgaaagcactctacgaggagctggacctgccagctgtgttcctccagtatgaagaggattcttattcccacataatggcattgatagaacagtacgcagcgccactaccgccggctgtctttctgggattagctagaaagatatacaagcggagaaaatag

SEQ ID NO: 116659 - DNA, 1062 bp, synthetic construct
  misc_feature 1..1062: note = Description of Artificial Sequence: Synthetic coding sequence
  source 1..1062: mol_type = other DNA
atgaatggagatcagaatagtgatgtgtacgcgcaggaaaagcaagattttgtgcagcacttttcccagatcgttcgcgttttgacggaagatgagatgggccaccctgaaatcggcgatgctatcgcccggctcaaggaggtgctggagtataatgctattggtggcaaatacaacaggggtttgacagtggtggtggcctttcgcgagcttgtcgaacctaggaagcaggatgcggactctctacagagagcctggaccgttggctggtgcgttgagctgcttcaggcattcttcttagtggccgacgacataatggactcgtctctgacgcgccgcggccagatttgctggtaccaaaagcccggggtaggactcgacgctatcaatgacgcaaacctgttagaagcatgtatttatagactccttaagttatattgccgggagcagccctactacttgaacctgattgaacttttcctgcaatcatcataccagacagagattggtcaaaccctcgatttgttgaccgcaccacagggaaacgtggaccttgtgagattcaccgaaaaacgttacaaaagcattgtcaagtacaagactgcattctactctttttaccttcctatcgccgctgccatgtatatggctggcatcgatggggagaaagaacacgctaacgccaagaagatcctcctggaaatgggagagtttttccagatccaggacgattatctcgatttgttcggagatccatcagtgacagggaaaataggaactgacattcaggacaataaatgtagctggttagttgtgcagtgtctgcagcgggccacacctgagcaatatcagattcttaaggaaaattatgggcaaaaggaagccgagaaagtagcaagggtgaaagcgctctacgaagaactggatcttcctgcagtgtttcttcaatatgaggaagattcctacagccacatcatggccctgattgagcagtacgctgcccctctcccacccgcggtgttcctcgggttagctcggaaaatctataaaaggaggaagtag

SEQ ID NO: 116660 - DNA, 2760 bp, synthetic construct
  misc_feature 1..2760: note = Description of Artificial Sequence: Synthetic coding sequence
  source 1..2760: mol_type = other DNA
atgactggttacaccatgctgaggaatggtggagcggggaacggaggccagacctgtatgcttcggtggtctaatcgaatacgacttacatggctgtctttcaccctttttgtcatacttgtgttttttcctctgattgcccattactacttgacaactctcgatgaagccgatgaagccgggaagcggatctttggaccaagagttggcaatgaactttgtgaggtcaagcacgtcctcgatttgtgccgaattagagaaagcgtcagtgaggaactgctgcagctcgaggcaaaacgtcaagagctgaactctgaaatagccaaattgaatctgaagatcgaagcgtgcaaaaaatccatcgagaatgccaaacaagacctgctgcagttgaaaaatgttatatcacagacagaacattcgtacaaagagctgatggcccagaatcagcccaagttaagcctgccaatccggctgctgcctgaaaaagacgatgccggacttcctcccccaaaggctacccgaggctgccgacttcacaactgttttgattattctagatgcccactgacaagcggtttccccgtttatgtttacgattctgaccagtttgtgttcgggtcttatctggaccccctcgtaaaacaggcgtttcaggcaacggcacgggctaacgtatacgttactgaaaacgccgatatagcttgcttgtatgtgatcctcgtcggggagatgcaagagcccgtggtgctgcgaccagccgagctggaaaaacagctgtacagccttccccactggcgtaccgacggacacaatcacgtgataatcaatctgtcacggaagtccgacacccagaatctcctgtacaacgtctcaaccgggcgggccatggtcgcgcagagcaccttctatactgtgcagtacaggcccggctttgacctggtggtctctccactggttcatgcaatgagcgagcctaattttatggaaatcccccctcaggtcccagtcaagagaaagtatttatttacttttcaaggagagaaaatcgaaagtctgcgatccagcctgcaggaagcacggtcatttgaggaggaaatggagggcgaccctcctgcagactacgatgaccgaattatagccacgttgaaagctgtccaggatagcaaactggaccaagtgctggtggaattcacctgcaagaatcagccaaaaccgtccttaccgactgagtgggcattgtgtggcgaaagggaagataggctggaattgcttaaactgagtacatttgccttgatcatcactcccggcgatccaagattagtgatcagcagtggatgcgctacaaggctgttcgaagctctggaagttggcgccgtgcccgttgtcctcggggaacaggtgcagctgccctatcaggacatgctgcaatggaacgaggcagcattggtcgttcctaagcccagagtgaccgaggtgcattttcttctccgttctctgtccgactccgatctcctggcaatgcgcagacagggtcgtttcctgtgggagacatatttcagcactgccgattcaatatttaacactgtgttagccatgattcggacccggattcaaatacctgccgcgccaatccgtgaggaagcagctgcggagatcccacaccgctccggaaaagcagccggtacggacccaaacatggcagacaacggagatttggacctgggaccagtggaaacagaaccaccatatgcatccccaagatatctgcgcaatttcaccttgacagtgaccgacttttacagatcctggaactgcgctcccggaccatttcatctgttcccacatactccatttgaccccgttcttccctcggaggctaaattcctaggatcaggcaccggatttcggccaataggaggcggcgctggaggaagtggaaaagaattccaggccgcgctaggcggtaatgtgcctcgagagcagtttactgtggtaatgctgacttacgaacgggaggaggtcctgatgaattcattagagcggctcaatggcttaccatatctcaataaagtagtcgttgtctggaacagtcctaagttgccatctgaggacttactgtggccggatattggagtgccaattatggttgtaagaacggagaaaaactcgctgaacaacaggtttctgccatggaacgagatcgagaccgaggccatcctctctatcgatgatgacgctcaccttagacatgatgagatcatgtttggatttagagtatggagagaagcacgcgatcggatcgtgggctttccaggtaggtatcacgcatgggatatcccgcatcagtcatggttatacaattccaattactcatgcgaactaagcatggtgctgactggcgctgccttctttcacaagtactatgcctacctgtattcctatgttatgcctcaggccatcagggatatggtcgatgagtatattaactgcgaggacattgctatgaacttcctggtgagtcacattactaggaaacctcctatcaaagtcacctccaggtggactttcaggtgtccgggttgcccccaggcactctctcatgatgattcacactttcacgagaggcacaagtgcataaatttcttcgttaaagtgtatgggtatatgcctctgctgtacacccagtttagagtggatagcgttctgttcaagacacgcctgccccatgacaagaccaagtgtttcaaatttatatag

SEQ ID NO: 116661 - DNA, 1125 bp, synthetic construct
  misc_feature 1..1125: note = Description of Artificial Sequence: Synthetic coding sequence
  source 1..1125: mol_type = other DNA
atggaattcgtgaagtgcttgggacacccggaggaattctacaacctcgtccggttccggattggcggcaagcggaaagtgatgccaaagatggatcaggactccctgtcctcttcactcaagacttgctacaaatatctcaaccaaacaagcagaagctttgccgccgttattcaggctctcgatggcgaaatgaggaatgctgtctgcatcttttaccttgtgctaagagcactggacactctggaggacgatatgactatctccgtcgaaaaaaaagtcccgctgctgcataattttcactccttcttataccagcccgattggcggtttatggaaagtaaggagaaagaccgacaagttctggaagacttcccgacgtattgtcactacgtagctggcctggtgggtattggactctcccggcttttcagtgcaagcgagtttgaagatcctctggtgggggaggacaccgagagagctaacagcatgggtttgttcctgcagaaaaccaatataattcgcgactacctagaggatcaacagggcggccgggaattttggcctcaggaggtgtggagtagatatgtgaaaaagctgggcgacttcgcaaaacccgagaacatagacctggcagtccagtgtttgaacgaattgattaccaatgcactgcaccatatccccgacgtgattacctacctgtcgcggcttcggaaccagtctgttttcaacttctgcgctattccacaggtgatggccattgcaacgctggcagcctgctacaataaccagcaggtctttaaaggcgctgtgaaaattcgtaagggccaggccgtgactttaatgatggacgccactaatatgcccgcagtcaaggccatcatctaccagtatatggaggaaatctatcacaggattccggactcggatccatctagctctaagactaggcagatcatttcaacaatcaggacacagaacctcccaaactgtcagctgataagccgaagccactacagtcccatctacctgtcttttgtaatgctactcgcagcactgtcctggcagtaccttaccaccctgagtcaggtgactgaagactacgttcagactggcgagcattag

SEQ ID NO: 116662 - DNA, 999 bp, synthetic construct
  misc_feature 1..999: note = Description of Artificial Sequence: Synthetic coding sequence
  source 1..999: mol_type = other DNA
atgactatttctgtcgaaaaaaaagttcccttactccacaacttccattcatttctgtatcaaccagattggcggtttatggaaagtaaggagaaggaccgacaggttctcgaggatttcccgaccatttccctggaattcagaaatctggccgagaaataccaaacagttattgctgatatttgtaggaggatgggaatcgggatggctgagtttctggacaaacatgtgacgagcgagcaagaatgggataagtactgtcattacgtggccggactggtaggcatcggtttgagtagactgttctcagctagcgaattcgaggaccccctagtcggagaagacacagaacgcgctaacagcatggggctatttctgcaaaaaacaaacattatcagagactatctggaggatcagcagggtggtcgggaattttggccacaggaggtctggagtcgctacgtaaagaaacttggtgatttcgccaagcccgaaaacatagacctggctgtacagtgcctcaatgaacttattactaacgcactacatcatatccctgatgtgatcacctacttgagccgccttcgcaatcagagtgtatttaacttttgcgctataccgcaggtcatggcgatcgccacgttggctgcatgctacaacaaccagcaggtgtttaaaggggctgtgaaaatccggaagggacaggctgtgacgctgatgatggatgcaactaatatgccagccgtcaaagccataatttaccagtacatggaagaaatctatcacagaatacctgattcagacccgtcctcatctaaaactaggcaaatcatctccaccataagaactcagaatctgcctaactgccagctgatctcacgctcacattatagtcctatctatcttagcttcgtgatgctcctcgctgccctgtcttggcagtacttgactacccttagccaagtgacggaggattatgtccagaccggcgaacactag

SEQ ID NO: 116663 - DNA, 1233 bp, synthetic construct
  misc_feature 1..1233: note = Description of Artificial Sequence: Synthetic coding sequence
  source 1..1233: mol_type = other DNA
atggagttcgtaaaatgccttggacaccccgaagagttttacaatctggtaaggtttcggattggtggaaagcgaaaagactccttgtcaagctccctcaagacgtgttataaatacctgaatcagacatctcgttcgtttgctgcggtcattcaggccctcgatggagagatgagaaatgctgtgtgcatattttacctcgttttaagggccctggacactctggaggacgatatgacgatttccgtggagaagaaggttccccttcttcacaactttcacagcttcttgtatcagccagattggcggttcatggaaagtaaggaaaaagacaggcaggtgctggaggacttccctactatcagcctggagtttcggaacctagcagagaaataccagacagtaatagccgacatttgcaggcgtatgggtatcgggatggcggagtttctggacaaacacgttacgtcagagcaagagtgggacaagtattgccactatgtcgcagggcttgtcggtatcggcttgtcccggctgtttagcgccagcgaattcgaggatcctctggtgggagaggacaccgaaagggcaaatagcatgggtttgttcctgcagaagactaacatcatccgggactacctggaagatcaacagggcggacgggagttctggccccaagaggtgtggagtcgttatgtgaaaaagctcggggattttgccaagccagaaaacattgacctggccgtccagtgcctaaatgagctgattaccaacgctctgcaccacattccagatgtaattacctacctctctagattaaggaatcagtccgtatttaatttttgtgccattccccaggtgatggccattgccactctagccgcatgttacaataatcagcaggtgttcaagggggccgtgaagatcagaaaagggcaagcagtcactctcatgatggacgctaccaatatgccagcagtcaaggctattatttatcagtacatggaggagatctaccacaggatcccggactccgatccaagtagcagcaagacacgtcagattatttcaacaattagaacccaaaacctgcccaattgtcagcttatcagcagatctcactatagccccatctacctctcatttgtaatgttactcgctgctctctcttggcagtatctgacgacgcttagccaggtcaccgaagattacgtgcagactggagagcattag

SEQ ID NO: 116664 - DNA, 999 bp, synthetic construct
  misc_feature 1..999: note = Description of Artificial Sequence: Synthetic coding sequence
  source 1..999: mol_type = other DNA
atgactatttctgtggagaaaaaagtgccactattacacaatttccactctttcttataccagcctgactggcgcttcatggagagcaaagaaaaggaccggcaggtgttggaggactttccaaccatcagtctggaattcagaaatctcgccgaaaagtaccagaccgttatagccgatatttgcaggcggatgggaataggaatggctgaattccttgataaacacgttacatccgagcaagagtgggataaatattgtcactatgttgccggattggttgggattggcctcagccggctgttctccgcaagcgagttcgaggatcctcttgtgggggaagacactgaacgggcgaattctatgggactgtttctccagaagaccaatataattcgggattacctcgaggaccaacagggaggacgcgagttttggcctcaagaagtgtggtcccggtatgtgaagaaactgggcgactttgcaaagcccgagaatattgatctagctgtgcagtgtctgaatgagctcatcacgaatgccttacaccacattcctgacgtgatcacgtatctcagccgtcttcgcaaccagagcgtcttcaacttttgtgccatcccgcaggtcatggctattgctactttggctgcttgctataacaatcagcaagtgtttaagggagccgtaaaaatccgtaaaggacaggccgttacacttatgatggatgcgactaacatgcctgccgtaaaggccattatttatcagtacatggaggaaatataccataggatacccgattctgaccccagcagctcaaagacgaggcagatcatctccactatccggactcagaacctcccaaactgccagctgatcagcagatctcattactctcctatttatctaagttttgtgatgcttctcgcagctctatcctggcagtatctgactaccctttctcaagtcaccgaagattatgtacagactggcgaacactag

SEQ ID NO: 116665 - DNA, 1062 bp, synthetic construct
  misc_feature 1..1062: note = Description of Artificial Sequence: Synthetic coding sequence
  source 1..1062: mol_type = other DNA
atgagaaatgcagtgtgcattttttatcttgttttgagggccctggacacccttgaagatgacatgacaatcagcgttgaaaagaaagtccctctgctgcacaacttccacagtttcctctatcagcccgattggcgcttcatggagtcgaaagagaaggaccgccaggttttagaggattttcctaccatcagcctggagtttaggaacctggccgagaaatatcagaccgtcatagccgacatctgtcgccgtatgggtattggtatggcagaatttctcgacaaacacgtcacgtccgaacaagagtgggacaagtattgccattatgtcgccgggctcgttgggattggcctgtctagactttttagcgccagtgaattcgaggacccacttgtgggggaagacactgagagagcgaattccatgggcctgtttctgcagaaaactaatattatcagggactacctggaggatcagcagggcggtcgcgaattttggccacaggaggtgtggagcaggtatgtgaagaagctgggtgactttgccaaaccagaaaacattgacctggccgtgcagtgcctgaacgaactgattactaatgccctgcaccacattcctgacgtcatcacttacctttcaaggttacggaatcaaagcgtgtttaatttttgtgcgataccccaggtgatggctatcgcaaccttggccgcttgttacaataatcagcaagtgtttaagggagcagtaaaaatcagaaagggccaagccgttacattgatgatggatgcgactaacatgcctgcagtcaaggccatcatttatcagtacatggaagaaatctaccaccggatcccagattccgatccttctagttccaaaactcgtcagattattagtactataagaacacaaaaccttcctaattgccagttaatctcccggtctcactattcaccaatctacctgtcattcgtgatgctgctggctgctctttcctggcagtacctcacgaccctgagccaagtgacagaggattacgttcagaccggcgaacactag

SEQ ID NO: 116666 - DNA, 1062 bp, synthetic construct
  misc_feature 1..1062: note = Description of Artificial Sequence: Synthetic coding sequence
  source 1..1062: mol_type = other DNA
atgagaaatgccgtctgcattttttacttggtgttacgtgcgctggacacactcgaagacgatatgactatcagcgtggagaaaaaggtgccgctgctccacaactttcacagcttcctctatcagcctgattggcgctttatggagtctaaagaaaaagatcgccaagtgctggaggatttccccacaataagcctggagtttaggaatttggcagagaagtaccaaacagtcatcgctgatatttgccggaggatgggtattggtatggccgaattcttggacaaacatgtaacatccgagcaggagtgggacaaatattgtcactatgtggccggcctcgtagggattggcttgagtcgcctgttctccgcctcagagtttgaagacccgctggtcggggaagataccgagcgggccaactctatggggctgtttctccagaaaacaaacattattcgggactatcttgaagaccagcagggcggccgagaattttggccacaagaggtgtggagtcgctacgtgaaaaaactgggggactttgccaagccagagaatatcgatctggctgtgcagtgcctgaacgagttgatcacaaatgccttgcatcacatcccagacgtgattacatatctgtcgagactgcgaaatcagtcagtgtttaatttctgcgcgattccgcaggtgatggctatcgccacattagcagcctgttacaataatcagcaggtcttcaaaggcgctgtcaagatccgcaaaggccaagcagtcactctcatgatggacgccaccaacatgccagccgtcaaggcaattatttaccagtatatggaggaaatctatcaccgcatcccagattctgacccgagcagctccaagacccgacagatcatctctacgatccgcactcagaacctgcctaattgccagcttatttctcgctcccattattcacccatctacctcagctttgtgatgctgttggctgccctgtcatggcagtaccttacaactttaagccaggtcacagaggattacgtccagaccggcgagcattag

SEQ ID NO: 116667 - DNA, 921 bp, synthetic construct
  misc_feature 1..921: note = Description of Artificial Sequence: Synthetic coding sequence
  source 1..921: mol_type = other DNA
atggaatccaaagaaaaagaccgacaggtgctggaggatttccccaccatcagcctcgagttcagaaatctcgctgaaaagtatcaaacagtaatcgctgatatctgtcgtcggatggggatcggcatggcagaatttctggacaagcatgtgacttccgagcaagaatgggataagtactgtcattacgtagccggactggtggggatcggccttagcaggctgttctccgctagtgagttcgaagatcctctggtgggcgaggatacagaacgtgcaaatagtatgggcctgttcctgcagaagacaaacattattagggactacttggaagatcagcaaggaggccgtgagttctggcctcaggaggtatggtcacgatatgttaaaaaactgggggattttgccaagccagagaatattgaccttgcagtccagtgtctgaatgagttaatcactaacgctcttcatcatatccctgacgttattacttatctcagccggttgcggaatcagtctgtgtttaacttctgcgctattcctcaagttatggctattgcaacccttgctgcgtgctacaacaaccagcaggtgtttaagggtgcagttaaaatcaggaagggccaagctgtgacactcatgatggatgccacaaatatgcccgccgtaaaagcaataatttaccagtatatggaagagatttaccacaggattcctgattccgacccaagcagttctaagactcggcagattatcagcacaattcgcacacagaatctgcctaactgccaactcattagcagatcccactattcgccaatctatctgtcattcgtgatgttgctagccgccctttcttggcaataccttaccactttgtcgcaagtgactgaggactatgtccagactggggagcattag

SEQ ID NO: 116668 - DNA, 1140 bp, synthetic construct
  misc_feature 1..1140: note = Description of Artificial Sequence: Synthetic coding sequence
  source 1..1140: mol_type = other DNA
atggccgctacagaaggggtaggagaggccgcccagggaggtgagcccggccagccggcacagcctccccctcagccgcacccacccccgccgcagcagcagcacaaggaggagatggccgccgaagcaggtgaagcagtcgccagccctatggacgatggctttgtgtcactggacagcccatcctacgttctgtaccgggatcgcgctgagtgggccgacattgatcccgtgccccaaaatgacggccctaaccctgtggttcagatcatttactccgataaatttcgcgacgtttacgattactttcgggccgtgctgcagagggacgagaggtccgagcgcgcgtttaagctcacacgcgatgccatcgaactcaacgccgccaattatactgtgtggcacttccggagagtcttactgaaatctctccaaaaggacttgcatgaggaaatgaactacatcacagctattatcgaggagcagcctaagaactatcaggtgtggcatcatcggagggtgctcgtcgagtggttgagggacccttcccaggagcttgagttcatcgcagatattctcaatcaggatgcaaaaaactatcatgcatggcagcaccgacaatgggtgattcaagagttcaagctgtgggataatgaactgcagtacgtggatcaattattgaaggaggacgtcagaaataactccgtctggaaccagcggtactttgtgatttccaacaccaccggttacaacgatagggccgtgcttgagcgggaggtccagtacacattggagatgataaaactggtcccccacaatgaatccgcctggaactatctgaaggggattttgcaagaccggggcctctctaaataccccaacctgctgaaccagctgctcgatcttcaaccgtctcattccagcccatacctaattgccttcctcgtagacatctatgaagacatgctggaaaaccagtgcgataacaaggaggacattctgaataaggcactggagttgtgtgagattttggctaaagagaaggatacaatccgcaaggaatactggcggtatatcggccggtctctgcagtccaagcactcaacagaaaacgattcccccaccaatgttcagcagtag

SEQ ID NO: 116669 - DNA, 939 bp, synthetic construct
  misc_feature 1..939: note = Description of Artificial Sequence: Synthetic coding sequence
  source 1..939: mol_type = other DNA
atggccgcgacagaaggcgtaggtgaagctgcacagggtggggagcctggccagcctgcacaaccccccccacaacctcaccctcctccgccgcagcaacagcacaaagaagaaatggccgcagaagccggagaggccgtcgcctctcccatggacgatggctttgtctccctggatagtccatcttacgtgctatatagacacttccgcagggtcttgttgaagtccttgcagaaggacctgcatgaggaaatgaactacattaccgctatcattgaagaacagccaaaaaactatcaagtttggcaccatcgaagagtgttagtggaatggttaagagatccaagccaggagctggagtttatcgccgatatcctaaaccaggatgctaagaattatcatgcgtggcagcataggcagtgggtgatccaggagtttaaactgtgggataatgagctccagtatgtagaccagttattgaaagaggacgtgagaaataacagcgtgtggaaccaacgttactttgtgatctccaacactacaggctataacgacagggccgtcttagagcgggaggttcagtatacactcgagatgattaaacttgtgccccacaatgagtccgcttggaactacctgaagggcatcctacaagatcgggggctaagcaagtatcccaatttgttgaaccaactgctggacttgcagccttcgcacagctccccctacctaatagcatttttggttgacatttacgaagacatgctggaaaaccaatgcgacaataaggaggatattttgaacaaggctctggaattatgcgagattctcgccaaggaaaaggatactataaggaaggagtattggcggtacatcggcagatccctgcaaagtaagcactccacagaaaacgatagtccaaccaacgttcagcagtag

SEQ ID NO: 116670 - DNA, 1314 bp, synthetic construct
  misc_feature 1..1314: note = Description of Artificial Sequence: Synthetic coding sequence
  source 1..1314: mol_type = other DNA
atggctagtcccagctcattcacctactactgcccgccatccagctcccccgtttggagcgagcccctgtacagtctgagacctgagcatgccagagagcgattacaagacgactctgtggagacggtaacaagcatcgagcaggctaaggtggaagagaagattcaggaagtgttttcttcatacaagtttaatcatctggtcccgcgcttggtcctgcaacgtgagaagcatttccactacctcaagcggggcctgcgtcagttaaccgatgcatacgaatgcctggacgctagtcgaccctggctctgttattggattctccacagcctggaactgctcgatgagccaatcccacagattgtggcaactgacgtctgccaattcctggagctttgccaatcacccgagggaggctttggaggcggcccagggcagtatccccatctggcccctacctatgccgctgtgaacgcattatgcattatcgggacagaagaagcatacgacatcattaatcgtgaaaagctgctgcaatacctgtattctctgaaacaacccgacggttccttcctaatgcacgtgggcggggaggtcgacgttagaagtgcttactgcgcggctagcgtggcctcgctgacgaatatcataacaccggacctcttcgaagggaccgctgagtggattgcacgctgtcagaactgggagggaggaattggcggagtgcctggcatggaggcacatggtggctataccttttgtggtttagcagcactggtcatacttaagagggagcgctcacttaatttgaagagccttttacagtgggtcacatctcggcagatgcgatttgaaggtggatttcagggtcgatgtaataaacttgtcgacggatgttactcattctggcaggctggactgctgccgctgctccatcgagctctgcatgcacagggtgatcctgcactgagtatgagccattggatgttccaccagcaagccctgcaggagtacattctcatgtgttgccagtgtcccgccggcggcctgcttgacaagccagggaaatcccgagatttttaccacacctgttactgtctgtctggcctgtctatcgctcagcatttcggctctggcgccatgttacacgacgtggtacttggcgtccccgaaaatgccctgcaacccacacacccggtgtataatataggccctgataaggttatccaggcaacgacatattttctgcagaaaccagtaccggggtttgaggagcttaaagacgaaacatcagcggagcccgcgacggattag

SEQ ID NO: 116671 - DNA, 1953 bp, synthetic construct
  misc_feature 1..1953: note = Description of Artificial Sequence: Synthetic coding sequence
  source 1..1953: mol_type = other DNA
atggcttcaaatatggacagagaaatgatacttgccgacttccaggcctgcactggcatcgagaatatcgacgaagcaatcactctcttagagcagaacaattgggatctggttgccgcgattaatggagttatcccacaggaaaacggaattctgcagagcgaatacggaggagagactatcccaggtccagcatttaacccagcatcccacccagcatccgctcccaccagtagctcctctagcgcctttagacccgtgatgcccagcaggcagatcgtagagcgccagccaagaatgttggattttagggttgagtatagggatcgtaatgtggacgtagttctggaggacacttgtactgttggcgagatcaaacagattctggaaaatgaactgcaaattcctgtcagtaagatgttgcttaagggatggaaaactggggacgtcgaggactcaacagttctgaagtctctccacctgcccaagaacaacagcctctacgttctcacgcctgatttgcctccaccatccagctcctcccatgccggcgcactccaggagtcccttaaccagaacttcatgctgatcatcacgcacagggaggtacagcgggagtacaatctgaacttcagcggttcctccaccatccaggaggtgaaacgaaatgtgtacgacttaacctccatcccagttaggcatcagctctgggaggggtggcctacttccgccaccgacgatagcatgtgtctcgccgaatcaggtctgtcttatccctgtcaccggctgacagttgggaggcgctctagtcctgcccaaacccgcgagcagtctgaggagcagattactgacgtgcatatggtttccgactcagacggcgatgattttgaagacgccacggagttcggcgtcgatgatggtgaagtgtttggtatggcctcttcagcactgcggaaatccccaatgatgcctgagaacgcagagaatgagggcgacgcactgcttcagttcacagcagaattttcttcacgatatggcgattgtcaccccgtcttttttattggctctcttgaagcagccttccaagaagccttctatgtgaaagcgagagatcgaaagctgctagccatttatcttcaccacgacgagagtgtgctaaccaacgtattctgcagtcaaatgttgtgcgccgagtcaatagtgagctatcttagccaaaactttattacttgggcatgggacctcactaaggactctaaccgcgcaaggttcctgaccatgtgcaatcggcattttggttctgtagtagctcaaactattagaacgcagaaaactgatcagtttccattgttcctgattatcatgggaaaacgcagtagtaatgaggtgttgaatgtaattcaaggcaacacaactgtagacgaactcatgatgcgactaatggctgctatggagatttttacggctcagcaacaggaggatataaaggacgaggatgagagggaggcccgcgagaacgttaagcgcgagcaggacgaagcttatcggctgagtctagaggcagatagggctaagcgtgaggcacacgaaagggagatggccgaacagttcaggctcgagcagattcggaaggaacaagaggaggaaagggaagccatccgactgagcctcgagcaagcactgcctcccgagcccaaggaagagaatgccgaaccagtgagcaagctgcgtattcgtacgccatccggcgagttcctggaaagaaggtttctggcctcaaataagttgcaaattgtgtttgattttgttgcatctaagggcttcccatgggacgagtacaaacttctgtccacatttcccaggcgcgacgtgactcagctggatcctaataaatcgcttctcgaggttaagctttttccccaggaaacgttattcctcgaggcaaaagagtag

SEQ ID NO: 116672 - DNA, 1473 bp, synthetic construct
  misc_feature 1..1473: note = Description of Artificial Sequence: Synthetic coding sequence
  source 1..1473: mol_type = other DNA
atgattttagccgactttcaggcctgcacaggtatcgaaaatatcgatgaagcaatcaccctcctcgagcaaaacaattgggacctcgtagcggcgattaatggggtgatcccccaggagaacggtatattacagagcgaatacggtggtgaaaccattcccggccctgcattcaatccggcatcccacccagccagcgcgcccactagttcatcctcaagcgcatttcgccccgtcatgcccagccggcagatcgtggaaaggcagccgcgtatgttggattttagggtcgagtatagagacaggaacgttgatgtggtcctggaggacacttgcaccgttggcgagatcaaacagatcctggaaaatgaactccagattccggtcagcaagatgctgctgaagggctggaaaactggggatgttgaggactctacagtactgaaaagtttacatctgcccaaaaacaattctctctatgtgctgacccctgacctgccccccccgtctagctcaagccacgccggagccctccaggaattctcttctaggtacggcgattgtcaccccgtgttttttattggaagccttgaggcagccttccaggaggcattttatgtaaaggcccgggacagaaaacttctggccatctacctacaccatgatgaatctgttcttacgaatgtcttctgtagccagatgttgtgcgcagagtcaattgtttcttacttgtcgcaaaattttataacatgggcatgggacctcaccaaggactccaatcgggcccgctttctgacgatgtgtaatcgacactttggctctgtagtggcgcagactatcaggacccagaaaaccgaccagttccctttgtttctcatcattatgggcaaacgatcgtctaacgaggtgcttaacgtcattcaaggcaatactacagttgacgaactgatgatgcggctcatggcagctatggaaatcttcactgctcagcagcaggaagacataaaagacgaagatgagcgtgaagccagagaaaatgttaagcgagaacaggacgaagcataccggttgagtctggaagccgaccgcgcgaagagggaagcccatgagcgggaaatggcagagcagttcagactcgaacaaatcaggaaggaacaggaggaggaacgtgaagccatccggctgtcattggagcaagccctcccccctgagcctaaagaagagaatgccgagcccgtgtccaaactacggatcaggactccatctggtgaattccttgagcgccggttcctcgctagcaataaactgcaaatcgttttcgacttcgttgcaagcaaaggctttccgtgggacgagtacaaacttctgtccacctttccccggcgcgatgttacacaacttgaccctaacaagagtcttctggaggtgaaactctttccacaagagaccctcttccttgaggccaaagagtag

SEQ ID NO: 116673 - DNA, 1953 bp, synthetic construct
  misc_feature 1..1953: note = Description of Artificial Sequence: Synthetic coding sequence
  source 1..1953: mol_type = other DNA
atggcgagtaatatggacagagagatgattctggctgattttcaggcctgcaccggaatagagaatatcgacgaagccataaccttactcgaacagaacaattgggacctggtcgccgccattaatggggtgatcccccaggagaatggaattctgcagtccgagtacggcggcgagacaatacccgggcctgccttcaaccctgcatcccatcctgcctctgccccaacgtccagtagtagctccgcctttcggccagtaatgccttcaagacaaattgtcgagcggcagccacgtatgttagacttcagggtggagtatagggatagaaacgtcgacgtggtgctggaagacacttgtaccgtcggagaaattaaacagattctggagaacgaactccagatccccgtctccaaaatgctcctcaagggctggaagaccggtgacgtcgaggattccaccgtgctgaagtccctgcacctccctaagaataactccttatatgtcctcactcctgacctgccccccccatcatcctcttctcatgctggagctctgcaggagagcctgaaccagaatttcatgctcatcatcactcatagagaggtgcagagggagtacaaccttaacttctctggcagttcgacaatccaagaagtgaagcgaaacgtgtacgacttgacctctattccggttcgtcatcagctgtgggagggatggcccacttcagcaacagacgactcaatgtgcttggctgagtccggtctctcctacccgtgccatcggcttaccgttggacgccggtccagccctgcacagacccgcgagcagtctgaggagcagattacggacgtccacatggtgtctgacagtgacggcgatgactttgaggatgctacagagttcggagtggacgatggagaagtttttgggatggcctcttcagccctgaggaaatcacccatgatgccagagaatgcggaaaacgaaggtgatgcactcctgcagttcacagcggagttctcaagcagatacggcgactgtcaccccgtctttttcatcgggagcctagaagcggcatttcaagaagccttctacgtaaaggctcgtgatcgcaagctgttggcaatttacctgcatcatgacgagtctgtacttactaatgtattttgcagccagatgctgtgcgcagagagcattgtctcttatctgtcacagaactttatcacttgggcatgggacctaacaaaggacagtaacagggctagatttctaaccatgtgtaacaggcattttgggtctgtggtcgctcagaccatccggactcaaaagacggaccaattccccctattcctaataatcatgggcaaacgctcaagcaacgaagtgctgaacgtcatccaaggcaacaccaccgtcgacgaactgatgatgcgccttatggcagcaatggaaatttttacggctcaacagcaggaagatataaaggacgaggacgagagggaggcccgtgaaaatgtgaaacgagagcaggacgaagcctatcgcttaagtctggaagccgacagagccaagagagaagcacacgagcgcgaaatggccgaacagttcagactggaacagatccgtaaagaacaggaggaggaacgagaggctatcaggctaagtctggagcaggcccttccgcctgagcctaaggaagagaatgctgaacctgtgtccaagcttcgtatccgcactccgtccggtgagttccttgagagacgctttctcgcctccaacaagctgcagatcgtatttgatttcgtcgcatctaaagggtttccatgggatgaatacaaattgttgtcaacctttcccagacgtgacgtaacacagctggatcctaacaagagcttactggaggtcaaactcttcccccaggagaccctatttctcgaggcaaaagagtag

SEQ ID NO: 116674 - DNA, 1497 bp, synthetic construct
  misc_feature 1..1497: note = Description of Artificial Sequence: Synthetic coding sequence
  source 1..1497: mol_type = other DNA
atggcctcaaatatggaccgcgagatgatcctggccgacttccaggcctgcaccggcatagaaaatattgatgaggctatcaccctgcttgagcagaacaactgggacctcgtggcagcgatcaacggggtcatcccccaggagaatgggattctgcagtccgagtatggcggtgaaacgatccctggacccgcctttaatccggccagccaccctgcttccgcgcccacaagctcctcatctagcgccttccgtccagtgatgccaagcaggcagattgtggaacggcagccaagaatgctggattttagagtggagtacagggacagaaatgttgacgtcgtattagaagatacttgcaccgtgggcgaaattaagcagatactggaaaacgaactgcaaattcccgtatcaaagatgcttctgaagggatggaagactggggacgtggaagatagtacagttctgaaaagccttcacctgccaaaaaataacagcctgtacgtattgacacctgatcttccaccccctagtagctcttcccatgccggcacacttcagcagttcagttatcgatacggcgactgccatccagtatttttcatcggttcacttgaagccgccttccaggaggcgttctacgtcaaagctcgcgatcgcaagttgttggctatctacctccaccacgacgagtctgtgctgactaatgttttttgttcccagatgctgtgcgccgaaagcatcgttagctatctctctcagaacttcatcacctgggcctgggacctgaccaaggattctaatagggcccgctttctcacaatgtgtaacaggcacttcgggagcgtcgtggcccagactatacggactcagaagacagatcaatttcccctttttctgataatcatggggaaaagaagctcaaatgaagtgctgaacgtgattcaggggaatactacagtcgacgaattgatgatgaggctgatggccgctatggagatatttaccgcgcagcaacaggaagatatcaaggacgaggatgaaagagaagcacgcgagaacgttaaaagggagcaggatgaagcttaccgactctctttggaggccgatagagccaaacgagaagcacatgagagagaaatggccgaacaattccgcttagagcagattagaaaggaacaagaagaagagcgtgaggcaattcgtctcagtctggagcaggccctgccccctgagcccaaggaggagaacgccgagccagtctccaagctgcggatccgcactccaagtggcgaatttctggagcgacgcttcctcgcttccaacaaactacagatcgttttcgacttcgtggcttccaagggattcccatgggacgagtataagctgttatccacattcccgaggagggatgttacccagctggatcccaataagagtctcctggaggtcaaattgttccctcaggaaacactgtttcttgaggcaaaggaatag

SEQ ID NO: 116675 - DNA, 1227 bp, synthetic construct
  misc_feature 1..1227: note = Description of Artificial Sequence: Synthetic coding sequence
  source 1..1227: mol_type = other DNA
atgagaaatctgctggagatgtgtctggccgagagtggtctgagttatccctgccatagactcacagttgggcgccgctctagccccgcacagacgcgggagcaaagcgaggaacagatcaccgacgttcatatggtgagtgatagtgacggcgatgatttcgaagacgctacggagtttggagtggacgacggagaagtgtttgggatggcctcttctgccctacggaagtctcctatgatgcccgaaaatgcagagaacgaaggtgatgccctgttgcaattcaccgcagaattttcatctaggtatggcgattgtcacccggttttctttatcggttccctggaggccgctttccaggaagctttctatgtgaaggcaagggatcgcaagcttcttgccatttatctacatcacgacgagtccgtccttactaatgtgttttgcagtcagatgctgtgcgctgaatctatcgtgtcctatctgtcccaaaactttatcacatgggcttgggatctgactaaggattccaatcgggctcggtttctcacaatgtgtaacagacactttggttccgtggtggcccagaccattcgaactcagaaaactgatcagtttccgctgtttctgattataatgggcaaaaggagttcaaacgaggtactcaacgtgatacaaggaaacacaaccgtggacgaactgatgatgcggctgatggccgctatggagattttcacagctcaacagcaggaagacataaaagatgaggacgaaagggaggctagagagaacgtgaaacgggagcaagatgaggcctacaggttatccctggaggcagatcgggccaaacgagaggcccatgagagggaaatggctgagcagttcaggttggaacaaatacgaaaagagcaggaggaggagcgtgaggctatccgtctgagcctcgagcaggcactcccacctgaacccaaggaggaaaatgccgagcctgtgtccaagctgagaatcaggacaccttcaggggagttcctcgaaaggagatttttggcctccaacaagcttcagattgtgttcgactttgttgcatctaagggcttcccctgggatgaatataaactcctctctaccttcccaagacgcgacgttacccagttggaccctaacaaaagtctcttggaagtaaaactgtttccccaggagaccctgtttcttgaggcaaaagagtag

SEQ ID NO: 116676 - DNA, 951 bp, synthetic construct
  misc_feature 1..951: note = Description of Artificial Sequence: Synthetic coding sequence
  source 1..951: mol_type = other DNA
atgacccagggcaagctgagcgtggccaataaggccccgggcacggagggacagcagcaggttcacggcgagaagaaagaagcccccgccgtgcctagtgccccaccatcatacgaggaggcaacgtcaggggagggtatgaaagcaggcgcatttccacccgctccaaccgctgtgccactgcatccttcttgggcttatgttgatccaagctcttcctcctcatacgacaacggatttcctaccggagatcacgagctgttcaccaccttctcttgggacgatcagaaggtgcggcgtgtattcgtacgcaaagtgtacaccatcttattaatccagcttttggttaccttagccgtggttgcactgttcaccttctgcgacccagtgaaggactatgtgcaggctaaccctggttggtattgggccagctacgccgttttctttgcaacctatcttactctggcatgttgcagcggcccacgccgccattttccctggaatcttatcctcctgaccgtatttacgctcagtatggcttatcttaccgggatgctgtcctcatactacaatacaacatcagtgctgctctgcctcggcatcaccgcactggtctgcctctcagtcaccgtcttcagctttcaaaccaagttcgattttaccagctgtcagggcgtcctgtttgtgttattgatgacactgttcttcagtggactgatcctggccatactgctgccattccagtatgtcccttggctgcatgctgtatacgctgctcttggagctggcgtgtttacattgtttttagctctggacacccaactattgatgggaaacagacggcacagtttgagccctgaggagtacattttcggcgcactcaacatttatttagatatcatctatattttcacttttttcttgcaactctttggaactaaccgggagtag

SEQ ID NO: 116677 - DNA, 951 bp, synthetic construct
  misc_feature 1..951: note = Description of Artificial Sequence: Synthetic coding sequence
  source 1..951: mol_type = other DNA
atgacacaggggaaactgtccgtcgcgaacaaagcccctggtaccgagggccaacaacaggtgcatggtgagaaaaaagaagcacccgccgtaccaagcgcgcccccatcctacgaggaggccacatctggcgagggcatgaaggccggtgcctttccccctgctccaactgctgtcccactgcaccccagttgggcctatgtcgatccttcaagctcgtcttcgtacgacaatggctttcccacaggcgaccatgagttatttaccacctttagttgggatgaccagaaggtccgccgcgtctttgttaggaaagtctatacgatcctcctgatccagttgttagtaaccctcgctgtggtcgctctgtttaccttttgcgatccagtaaaggactatgtgcaggcaaatccgggatggtattgggcttcttacgccgtgttctttgccacataccttaccctcgcatgttgctcaggccctcgacgtcactttccctggaacctcattctcctgaccgtcttcacactgagcatggcatacctgacgggtatgctttcatcttactacaacaccacctccgtactgctctgtctgggcattaccgccctggtgtgtctttctgttacagtgttcagtttccagaccaagttcgacttcactagctgccagggcgtgctgtttgtccttctcatgacactcttcttcagcggcctcatcctggccatcttgctgcccttccagtacgtgccctggttacatgccgtgtacgccgccctgggcgcgggcgtttttacacttttcctggcactcgacacccagcttctaatgggcaaccgccgccattccctgagccctgaagaatacatctttggcgccctgaatatctacctggacataatttacattttcacgttcttcctgcaactttttggtaccaatagagagtag

SEQ ID NO: 116678 - DNA, 813 bp, synthetic construct
  misc_feature 1..813: note = Description of Artificial Sequence: Synthetic coding sequence
  source 1..813: mol_type = other DNA
atgaaagcaggtgctttcccccctgcccccactgccgtgcccctgcacccctcttgggcttatgttgatccctcctcatcaagttcttacgataatggctttcccacgggcgaccatgaactgttcactactttctcctgggacgatcagaaggttcgaagagtgttcgttcgaaaagtgtatacaattttgttgatccagctgctcgtgacactggccgtggtggccctgtttaccttttgtgatcctgtcaaggattatgtgcaggccaatcctggctggtactgggctagctacgccgtgttcttcgccacgtacctgactctggcatgttgctctggtcctcggcgtcatttcccttggaacttaatcttactcaccgtctttacattgtcaatggcatatcttactggtatgttatccagctactataatacgacttccgtgctgctgtgtttaggtattaccgctcttgtgtgcctctccgtgaccgtgttctcttttcagaccaagtttgacttcaccagctgccagggcgtcctattcgtgttgctgatgactctgttcttcagcggcctgattctggcaattttgttgcccttccaatacgtcccctggttgcacgcagtatacgctgctctgggcgccggagtgttcaccttgttcctggcgctagacacacagttgcttatgggtaataggagacacagtttgagccctgaggagtacatctttggtgcattaaatatatatctggacatcatctatatatttactttcttcttacaactgtttggcaccaaccgggagtag

SEQ ID NO: 116679 - DNA, 1173 bp, synthetic construct
  misc_feature 1..1173: note = Description of Artificial Sequence: Synthetic coding sequence
  source 1..1173: mol_type = other DNA
atggacttctggctgtggccactctatttcctacctgtctcgggggccctgagaatcctccctgaggttaaagtcgagggcgagctggggggtagcgtgacaatcaagtgtccacttcccgaaatgcatgtccgcatctacttgtgtagggaaatggctgggtccgggacttgcggtaccgtggtgtcaacgactaatttcattaaggctgagtacaaaggtagagttactctgaagcaatacccccggaagaacctgttcctggtcgaagtgacccagctgaccgaatctgacagtggagtatacgcatgtggggcagggatgaatactgataggggaaagacccaaaaagtgaccttgaacgtccactctgagtacgaacccagctgggaggaacagcccatgcctgagactcctaaatggttccatctgccttacctattccagatgccagcgtacgcatcctcttcaaagttcgtgaccagagttaccactcctgcacagcggggtaaagtccccccagtccaccactctagtccaactactcagatcactcataggccccgggtgtcccgagccagcagcgtggccggcgataaaccaaggactttcctcccgagtacaactgcctcaaagatctccgcactcgagggacttctgaaacctcagacaccatcctacaatcaccatacccggttacatcgacagcgggcattggactacggcagccaaagcggcagggaggggcagggtttccatattctcatacctactatacttggactattccttctggccttgttgggcctggtggtcaaaagggccgtggaaaggcgaaaagccctctcacggcgagctaggaggctggccgtgagaatgcgagcccttgaatcatcccagaggccacgaggctccccaaggccaaggtcacaaaataatatttacagcgcatgccctcgccgagctcgaggagcagatgctgctggaaccggcgaagctcctgtcccagggccaggcgcgccgctgcctcccgctcccctgcaagtgtcggagtccccttggttacacgcccccagcttgaaaactagttgtgaatatgtcagcttgtatcaccagcccgcggcgatgatggaggatagcgactccgatgactatatcaatgtccctgcttag

SEQ ID NO: 116680 - DNA, 921 bp, synthetic construct
  misc_feature 1..921: note = Description of Artificial Sequence: Synthetic coding sequence
  source 1..921: mol_type = other DNA
atggacttttggttgtggcctttgtacttccttccggtgtcaggggccttgcgcatactgcctgaggtaaaagttgaaggcgagctcgggggaagtgtgaccattaaatgccctttgccggagatgcacgtacgtatatatttgtgccgagagatggccggaagcggaacatgtggcacagtggtgtccactaccaattttatcaaggctgaatacaaaggtagggtgacgctgaagcagtacccacggaagaatctgttcctggtggaggtgacccagctgacagagtccgattctggcgtctatgcctgcggagcaggaatgaacaccgacagaggcaaaacccagaaggttacacttaacgtccacagcgaatatgaaccaagttgggaagaacaaccaatgcctgaaactccaaaatggtttcatcttccctatctgtttcagatgcccgcctacgcttcgtcctccaaattcgtgaccagagtgacaacgcccgcacagaggggcaaagtcccccctgtccatcattcttcgccaacaacgcagattacacaccggccgcgggtctccagagctagttccgtggccggcgacaagcctcggacctttttgcctagtaccactgcaagcaaaatcagtgcgttagagggcctgttgaagcctcaaacgcccagctataaccatcacacccgcctgcatagacagtctcctttacaggccggaccgcccactgggcgcgaggatgcacgccctggtgaattgccagaagccccaagagttgccgcgactgcactccccaagcagcacctacagaggctgcccgccgcacggagctggagcggccgctgccgtcaccgcggcggccctaggtctcgtcctagatccgctgtggcccctagaccagccgcgggagtctag

SEQ ID NO: 116681 - DNA, 837 bp, synthetic construct
  misc_feature 1..837: note = Description of Artificial Sequence: Synthetic coding sequence
  source 1..837: mol_type = other DNA
atggatttttggctctggccgctttacttcctacccgagtatgaacctagctgggaggagcagcccatgcccgagactccgaaatggttccatctgccctacctcttccagatgcccgcttacgctagctcgtctaagtttgtgacgagagtcactaccccagcacagaggggaaaggtgccacccgtgcaccactcttcccctaccactcaaatcactcaccggccccgggtaagccgtgcttcctctgtggccggagataagcctcgtacttttctcccctctactactgcttcgaagatttcagccctggagggactcctcaaacctcagacaccttcctataatcatcatactcgactgcacaggcagcgagccctggactatggctcccagagcggacgtgaggggcagggctttcacatactgatccccacaattctgggccttttcttgcttgcactgttgggcctggtggtcaagcgcgcagtggagcgaagaaaggccctaagccgccgtgcgcggcgtctggccgtgcggatgagagcgttggaatcaagccaaagacctaggggaagcccaagacctcgaagccagaacaatatatacagcgcatgtccccgccgtgccagaggggcagacgccgccgggacaggggaagcacctgtcccaggccctggtgcccctcttccccccgcacctctccaggtgagcgagtcaccctggcttcacgccccatctcttaagacttcctgtgaatatgtgtccctttatcaccagcctgcagccatgatggaggactctgacagcgatgattacatcaacgtaccagcgtag

SEQ ID NO: 116682 - DNA, 456 bp, synthetic construct
  misc_feature 1..456: note = Description of Artificial Sequence: Synthetic coding sequence
  source 1..456: mol_type = other DNA
atggacttctggctgtggccgctgtatttcctcccggtgtcgggagcactacgaatccttcctgaagtgaaggtggagggtgagctgggaggatcagtaactatcaagtgcccattgcctgaaatgcatgtacgtatttacctgtgtcgggaaatggccgggagtggcacttgtggaactgtggtaagcactaccaacttcatcaaggcggaatataagggcagggtgacactgaagcagtacccacgcaaaaatctgtttcttgtggaggtcacgcaactcaccgagtccgattctggggtctacgcctgtggcgccggaatgaacacagatcgcggcaagactcagaaagtgacgttgaatgtgcactcggagtacgagccatcttgggaagaacagcctatgcccgaaactccaaaatggttccatctaccctatcttttccagatgccttag

SEQ ID NO: 116683 - DNA, 444 bp, synthetic construct
  misc_feature 1..444: note = Description of Artificial Sequence: Synthetic coding sequence
  source 1..444: mol_type = other DNA
atggacttctggctctggccattgtacttccttcctgtgtccggcgcacttagaatactgcctgaggtcaaggtggagggcgaattaggtgggagtgtgacgattaaatgccccttaccagagatgcatgtgcgaatatatttatgcagggaaatggccggtagtggaacctgtggcacggtcgtgagcacaactaacttcattaaagctgaatacaaggggcgggttacattgaagcagtatccacgaaagaatctttttttggtagaggtaacacagctgacagaatcagactctggagtgtacgcttgcggtgcaggcatgaataccgatagagggaagacacagaaagtcactctgaatgttcatagcgagtacgagccctcttgggaagagcagccgatgccagaaacccccaagtggtttcatttaccgtacctgtag

SEQ ID NO: 116684 - DNA, 426 bp, synthetic construct
  misc_feature 1..426: note = Description of Artificial Sequence: Synthetic coding sequence
  source 1..426: mol_type = other DNA
atggatttctggctgtggccattgtatttcctaccggagatggagagctgttgtgtggcacaagatggattggaactggtcgctttatccgatccccctgggtccgcgtctcagtcagctggtatcacggtttcaggtgccctcagaattctgccagaagttaaggtcgaaggcgagctgggtggaagtgtgactattaagtgtcccctgccggaaatgcacgttcgcatctacttgtgccgcgagatggctggctccggcacttgcggtactgtcgtgagtaccaccaattttatcaaggctgaatataaggggagggtgacactgaagcagtatccaagaaagaatttgtttctggtggaggtgacccaactgactgaatctgactccggtgtgtacgcttgtggcgcgggcatgaatacctag

SEQ ID NO: 116685 - DNA, 1398 bp, synthetic construct
  misc_feature 1..1398: note = Description of Artificial Sequence: Synthetic coding sequence
  source 1..1398: mol_type = other DNA
atgcgcagacccaggggcgagcctggtccccgagctccacgtcccaccgaaggggctacttgcgctgggcctggagaatcttggtctccctcccctaattcaatgctccgggtactgctctcggctcaaacgtcacctgctagactctccggtttattattgattccaccagtacagccttgctgtctcggccctagcaaatggggagatcgcccagttgggggggggcccagcgcaggccctgtacagggtctccagcgtctcctggagcaggctaagtcgccgggggagttgttgagatggctgggccagaacccttctaaggtacgcgctcatcattacagtgtcgccctgaggcggcttgggcaactactagggtcccgccctcgtcctcctcctgtcgaacaggtgacactgcaggaccttagtcagttgatcattcgaaattgtccatcgtttgatatccacacaattcacgtttgcttacacctagctgtgctgctcggcttcccttccgacgggccactggtgtgtgcactcgaacaggaacggcggttgcggctgcccccgaagccaccccccccattgcagccacttcttcgtggcggacagggcttggaggcagcactgagttgtccacgttttctgaggtacccccggcaacatcttatttcttccctcgccgaagctaggccggaagaattaaccccacacgtaatggtgctgctcgcccagcacttagccaggcatcgactaagagagccacaattgctggaggcgattgcccactttcttgtagtgcaggagactcaactatcttctaaagttgtgcagaagttggttttgccatttggacgcctgaattacttacctttggagcagcaatttatgccgtgccttgaacgcatcctggctcgagaggccggcgtagcccccctcgcgacagtgaacatcctgatgtctctctgtcaattgagatgcttgcctttccgggctctgcactttgtcttcagccctgggttcatcaattatatctccggaacccctcacgccttaatcgtgcggcgctacctgtccctgcttgacactgccgtagagctagagctgcctggctatcgcgggccacggctcccgagaaggcaacaggtgcccatttttcctcagccacttattacggaccgggcccggtgtaaatattcccacaaagatatcgttgctgaagggctccgccagctgctgggggaagagaagtataggcaggatctgacagtgccgccaggctattgcactgatttcctcctctgcgcctcctctagcggagcagtgcttcctgtgaggacacaggatccctttttaccctatcctcccagagcctgcccatcttcccgtgctacttag

SEQ ID NO: 116686 - DNA, 1650 bp, synthetic construct
  misc_feature 1..1650: note = Description of Artificial Sequence: Synthetic coding sequence
  source 1..1650: mol_type = other DNA
atgagacggccccggggcgagcctggaccccgggcgcctaggcctaccgaaggcgcaacctgtgctggtcccggggagtcatggtcaccttccccgaacagtatgctgagggttctgctgtcagcacagacttcccctgcacgactttccggactgctgctaattcctccagtacaaccttgttgtctcgggccctctaagtggggagacaggcccgtgggcgggggccctagcgcgggccccgtacagggattacaacggcttctcgagcaggcgaagtctccgggggaactgcttcgttggttgggccagaacccctcaaaagtgagagcacatcactacagtgttgccctgagacggctgggccaactgcttggttcccgcccgcgaccccccccagttgagcaagtgactctgcaggacctgtcccaactgatcattcggaactgccccagtttcgatattcatactattcatgtctgccttcatcttgcagtactgctggggttcccttccgatggcccgctggtgtgtgcactggagcaggagaggaggttacggctccctcccaaacccccgccgccactacagccccttttaagaggtggacaaggccttgaggccgctctgtcttgtccacgtttcctgaggtacccaagacaacatctgatcagcagtctcgccgaagcgaggcctgaagagctcaccccccacgtaatggttctgctcgcgcagcacctggcccggcaccggctgagagaaccccagctgctggaagccatcgcccacttcctcgttgtgcaggaaacccagttatcttcaaaagtagttcagaagctggtgctcccattcggcagattaaactacctgccactggaacagcagtttatgccgtgtctggaacgtattctggctagggaagctggcgtcgcgccgctggcaactgtgaacatccttatgtctttatgtcagctgcggtgcttgccatttagggcactccattttgtcttctctccgggcttcattaattatatctcgggaactccacatgctctgatcgtgcgacgatatctgtctctccttgataccgccgttgaattggaattacccggctatcgcggccccaggctgccccgacgacagcaggtcccgattttccctcaaccactaatcaccgatagggcacggtgcaaatattcccacaaagatatagtcgctgaggggctacgacagctgctaggagaagagaagtatcggcaggatctgacggtgccacccggatactgcaccgacttcctattatgcgcgtctagttctggagccgtactgcctgtgcggacccaggatccgttcctcccgtaccctccccgtagttgcccgcagggccaggccgcttctagcgccactacccgagatccagcccagcgggtggttttggtcctgcgggagcgctggcatttctgtagggacggccgagtgttgttgggttctcgggcccttagggaacgccacctcggcctgatgggttatcagcttctccctcttcctttcgaggaactggagtcccagaggggcctacctcaactgaagagttacctgcgacaaaagttgcaggctctggggctgcgctggggcccggaaggcggttag

SEQ ID NO: 116687 - DNA, 1227 bp, synthetic construct
  misc_feature 1..1227: note = Description of Artificial Sequence: Synthetic coding sequence
  source 1..1227: mol_type = other DNA
atgcgtcgccctcgtggcgagcctggacctagagcaccaagacccacagaaggtgcaacatgcgcagggccaggagagagttgtttcccaagcgatggccctcttgtttgtgccctggaacaggagcggagactgcggcttccgcccaaacccccacccccgttacagcccctgctcaggggtggccaaggacttgaggcagccttaagttgcccaaggtttctgagatacccccgtcagcacctgatcagtagtctcgccgaagcacggccagaggagcttactccacatgtgatggtgttattggcacaacacctggctagacacaggctgagggagcctcagttgctcgaggcgatcgctcatttcctagtggtgcaggaaacccagttgtcgtcgaaagttgtgcagaagcttgtcctgccgtttgggcgcctgaactacctgccactagagcagcagttcatgccatgcctggaaagaattctcgctcgagaagcgggggtcgcccctcttgctactgtgaacatattgatgagtctgtgccaactgagatgcctgcccttccgagctctccattttgtgttttctccaggttttattaactacatttctggcacacctcatgccctgatcgtacgacgctacttgtccctattggataccgccgtggagctggagctgccaggctaccgaggacccagactaccaagaaggcagcaggtgcccatctttccgcagcccctgatcactgacagagcccgatgcaaatatagccacaaggacattgtggcggagggtcttcgccagctgctgggggaagagaaataccgtcaggatctcacagtcccaccgggatattgcacggacttcctgctttgcgcatcttcatccggtgctgttctgccagtgagaacacaggatccatttctcccttatccgcccagaagttgccctcaagggcaggctgcatcctcagcaacgactcgggaccccgcccaacgggtcgtgctcgtcctgcgggagagatggcatttctgtcgtgacggacgcgtgctcctcgggagccgggccctcagagaaaggcatctggggttgatgggttatcagctcctcccactgccatttgaagagttagagtcccagcgcggcctacctcaactcaagtcatatttgcgccagaaactgcaggctctgggtctgagatggggacccgaaggcggttag

SEQ ID NO: 116688 - DNA, 480 bp, synthetic construct
  misc_feature 1..480: note = Description of Artificial Sequence: Synthetic coding sequence
  source 1..480: mol_type = other DNA
atgttaagagtgcttctgtcagctcagacatctcccgcgcgcctctccggactacttctaatcccgccggtgcagccttgctgcctaggcccaagtaagtggggcgatcggcctgtcggagggggcccctccgccgggccagtgcagggcctgcagaggctcctggaacaagccaagtcacctggtgagttgctgcgctggctcggacagaatcctagcaaagttagagcacatcactattcagtcgctctgaggcggttgggtcagctcctggggtcccgccctcgccctccacccgtcgagcaggttacactacaagacttgtcacaattgattattcgcaattgtcctagcttcgacatacacactattcacgtatgtttgcacctggccgtgctgctcggaggaacagaagtggggcccgcactgtgggcaacggagctgccagcccccggaaccgccgtatacgccctcccctag

SEQ ID NO: 116689 - DNA, 1569 bp, synthetic construct
  misc_feature 1..1569: note = Description of Artificial Sequence: Synthetic coding sequence
  source 1..1569: mol_type = other DNA
atgaggcgcccccgaggcgagcccggaccccgggcccccaggcctacagaaggggctacgtgtgcaggtccaggcgaatcttggtctccaagtccaaactccatgctgagagtacttctgtcggcccagacaagccctgccaggctgagcggcttactgttgatcccgcctgtgcagccgtgttgcttgggcccctctaagtggggggatagaccagtcggcgggggaccctccgctggaccagttcaaggacttcagagacttcttgagcaggcgaaatcccctggggagttgctgaggtggttgggccaaaatcccagcaaagtgagggctcatcactattcagtcgccctgcggcggctcgggcagttgctcggctcacggcctcgtcctcctcccgtggaacaagtgaccctacaagacctgagccaactgatcattaggaattgtccctccttcgacattcacaccatccacgtgtgcctgcacctggccgttctgttaggcttcccttccgacggcccactcgtctgcgcactggagcaagaaagacgcctgaggctccctccgaaaccgccccctccacttcagcccctgcttcgtgaagctagaccagaagagctcacccctcacgtgatggtgctacttgcccagcacttggcccgacaccggctcagggagccacagctgttggaggctatagcccattttctggttgtgcaagagacacaactgagtagcaaagtggtgcagaagctggttcttcccttcggaaggctcaactatctgccattggaacagcagttcatgccgtgcctcgagagaattcttgccagagaggctggcgtggcgccgttggccaccgtgaacattctcatgtccctctgtcagctcagatgtctgcctttcagagcactacacttcgttttttcaccaggctttatcaactacatctccggaacccctcacgcactcatcgtcagaaggtatctcagtctgctggacacagctgttgaactggagctacccggttataggggccctagacttcctcggagacaacaggtgcccatctttccccaacctctgattacagaccgtgcaaggtgtaagtattctcacaaagacattgttgccgaaggtctgaggcaactgttgggcgaggaaaagtaccggcaggaccttacagtccccccgggctactgcaccgattttcttctctgtgcctcgtcttccggggctgttctgccagtaaggacccaggatccatttttgccataccccccacggtcttgtccacaagggcaagcagctagttcagcgaccacacgggaccccgcacagagggtcgtcttggtgttgagagaacgatggcacttttgccgagacggtcgggtcctcctgggctccagggcactgcgcgagcgtcacctgggactgatggggtaccaactgcttccactgcccttcgaggaactcgaatcacaacggggcttgccacaactcaagtcttacttgaggcagaagcttcaggccttggggttacgctgggggcctgaggggggatag

SEQ ID NO: 116690 - DNA, 1179 bp, synthetic construct
  misc_feature 1..1179: note = Description of Artificial Sequence: Synthetic coding sequence
  source 1..1179: mol_type = other DNA
atggaggcaccactcgtctctctggatgaggaatttgaggacctgaggccctcttgcagcgaggaccccgaggagaaaccccaatgtttctatggcagctctccacatcacctcgaagacccgtctctgtccgagctggagaacttttcctccgagattatttcttttaagtcaatggaagacctggttaacgaatttgacgagaagctaaatgtctgcttccggaattataacgccaaaactgagaacttggccccagtgaaaaatcagcttcagattcaggaggaggaagagacactacaggacgaagaggtgtgggatgccctaacagataactatatcccaagtctgtcagaggactggcgcgaccccaatattgaggcccttaacggcaactgttccgacacagaaatccatgaaaaggaggaggaagagttcaatgaaaaaagtgagaacgactctggcattaacgaggaacccttgctgaccgccgaccaggtgatagaggagattgaagagatgatgcagaatagtcccgacccagaggaggaagaagaggtgctggaagaagaagatggtggtgaaacatcttcccaggccgactctgttttactccaggaaatgcaggcactgacacagacctttaacaataattggtcctatgagggcctgagacacatgagtggatccgagctaaccgagctccttgaccaggtcgaaggagctatccgcgacttttcagaggaacttgtacaacagctggcacgccgagatgagctcgaattcgaaaaggaggtgaagaacagtttcataacagtacttatcgaggtccagaacaaacaaaaagaacagcgagaactgatgaagaaacgtcggaaagaaaaagggctgagcctacagtcaagtaggattgagaaagggaaccagatgccattgaagaggttctctatggaggggataagtaacattcttcagagtggaattcgtcaaaccttcgggtcgtcaggaacggataaacagtatctgaacactgtgattccctacgaaaaaaaagcctcacctccatctgtcgaagatctccagatgttgactaatattttattcgccatgaaagaggataatgaaaaggtgccgaccctgttgaccgattacattctcaaggtgttgtgtccgacgtag

SEQ ID NO: 116691 - DNA, 315 bp, synthetic construct
  misc_feature 1..315: note = Description of Artificial Sequence: Synthetic coding sequence
  source 1..315: mol_type = other DNA
atggaggcaccgctggtgtcgcttgacgaagaattcgaggatttgaggccaagctgcagtgaagaccccgaagaaaagccacagtgtttctatggatcctcaccccaccacctagaggacccaagcctgtccgagctagaaaatttttctagtgagattatcagtttcaaatctatggaagatcttgtcaacgagttcgacgaaaagcttaatgtatgcttccggaattataatgctaagaccgaaaaccttgctccggttaaaaaccaattgcagatccaggaggaggaggaaaccctgcaggatgaggagtag

SEQ ID NO: 116692 - DNA, 315 bp, synthetic construct
  misc_feature 1..315: note = Description of Artificial Sequence: Synthetic coding sequence
  source 1..315: mol_type = other DNA
atggaggcccctcttgtgtctctcgacgaggagtttgaagatctgaggccatcatgtagcgaagatcctgaggaaaagcctcaatgcttttatggctcgagtccgcatcacttggaggacccttcactctctgagctcgagaacttctcttctgagataatcagcttcaagtcaatggaagatctcgtcaatgagttcgatgagaaattaaacgtctgctttcgcaactataacgccaaaacggagaatctggctcctgtgaaaaaccagctgcaaatccaggaggaggaagagaccctacaggatgaagaatag

SEQ ID NO: 116693 - DNA, 1419 bp, synthetic construct
  misc_feature 1..1419: note = Description of Artificial Sequence: Synthetic coding sequence
  source 1..1419: mol_type = other DNA
atgacagctaacggcactgccgaggctgtccagattcaattcggactcatcaactgtggtaataaatacctgaccgcagaagcctttggtttcaaagtgaacgcttccgccagctctctcaagaagaaccacctaggtagatatctcgctgctgacaaggacggaaacgtgacatgcgagcgcgaggtaccgggcccagactgccggttcctgattgtggcacacgatgacggccgttggtctctgcagtctgaggctcacaggaggtattttggtggcactgaagatcgtctgagttgtttcgctcaaacggtctcccccgccgagaagtggtccgttcacatagctatgcacccacaggtcaatatttattccgtgacaagaaagcgttacgcccacttgtccgcaagacccgccgatgagatcgccgtggatcgggacgtaccttggggggtggactcactgatcacacttgcattccaggaccagcgttatagtgttcaaacagccgatcacagattccttagacacgatggaagactcgtagcaagaccagaacctgctactgggtacaccctggaattcaggtcaggtaaggtggctttccgggattgcgagggtaggtacttagctccctctggcccttccggaaccctcaaagctggaaaagccacaaaggtgggaaaggacgagctctttgctttagagcagtcatgcgcccaagtggtattgcaggctgcaaacgaaagaaacgtatcgacacggcaaggcatggacttgtctgctaaccaagacgaggagaccgaccaggaaactttccagctggagattgaccgcgataccaagaagtgcgccttccgaacccatacaggtaagtactggactctgactgccacgggtggggtgcagtctaccgcctcatctaagaatgccagctgctattttgatatagaatggagggatcgaaggataactctgagagcttctaacggtaagtttgttactagtaaaaagaatggacagctggcagcttccgtagaaactgcaggggattcagaactgttcttgatgaagctgataaatagacctatcatcgtctttaggggcgagcacggattcattggctgccggaaagtgacggggacccttgacgccaaccgaagctcttatgacgtgttccagctggagtttaatgacggtgcctacaatataaaagactccaccggcaaatactggactgttggaagcgactcggcagtgacttcctccggtgacacacctgtggactttttttttgagttctgcgactataataaagtcgccatcaaggtcggcggaaggtatcttaaaggggaccatgctggtgtgctcaaagcttccgcggaaacagtggatccagcaagcctgtgggagtactag

SEQ ID NO: 116694 - DNA, 1482 bp, synthetic construct
  misc_feature 1..1482: note = Description of Artificial Sequence: Synthetic coding sequence
  source 1..1482: mol_type = other DNA
atgacggccaacggaaccgcagaagcagtgcagatccagttcgggttaataaactgcggtaataagtacctaacagccgaagcttttggatttaaagttaatgcttcagcaagctccctcaagaaaaagcagatctggacgttggagcagcccccagacgaagccggttccgcggccgtctgtttgcgcagccacctcggcagatatctcgcagccgataaagacggtaatgtgacatgtgaaagggaagtacccggccctgactgccgctttctgattgtagctcacgatgacggccgttggtctttacaaagcgaagcccacagacggtacttcggaggcaccgaggatcgtctgtcctgcttcgcccaaacggtgtcccctgccgagaagtggagcgtgcacattgccatgcacccccaggtgaatatttactctgtaacccgaaagaggtacgcacacctttcagcaagacctgcggatgagatagctgtcgatagagacgtcccttggggggtagactccctcatcacgctcgcatttcaggaccagcgttattccgttcaaacagctgatcaccgctttttacggcacgatggacgcctcgtggcgaggcccgaaccggccacagggtatacccttgaattccgatcgggaaaagtagctttcagagactgcgaggggagatacctagccccctcgggcccatcaggcaccctgaaggcaggcaaggctacaaaagttgggaaagatgagttgttcgcattagagcaatcctgcgcacaggtggtgctgcaggcagctaatgaaaggaatgtttccactagacaagggatggatctgagcgccaatcaggacgaggaaaccgaccaggagaccttccagttagagatcgaccgggatacgaagaagtgtgcctttcggacacacacagggaaatactggactttgacagccactggcggtgttcagagtactgcttctagtaaaaacgctagctgttacttcgatattgagtggagggacaggagaattacactccgggcatccaacggaaaattcgtgaccagtaaaaagaacggccagctggcagcctcggtcgaaactgctggtgacagcgagctgttcctgatgaagctgattaatcgccccattatcgtgttcagaggcgagcacggctttataggctgccgaaaagtcacgggcacattagatgccaacaggtcctcttatgatgtgtttcagcttgaatttaatgacggtgcatacaacatcaaagactcaaccggcaagtattggaccgtgggttctgactccgcagtgacaagttctggcgatactccagtggactttttctttgaattttgcgattataacaaagtggccatcaaggttggaggaaggtacctgaagggtgaccacgcaggcgttttgaaggcttcagctgaaaccgtagaccccgccagtttgtgggaatattag

SEQ ID NO: 116695 - DNA, 648 bp, synthetic construct
  misc_feature 1..648: note = Description of Artificial Sequence: Synthetic coding sequence
  source 1..648: mol_type = other DNA
atggatctgtccgctaatcaggatgaggaaactgaccaggagacatttcaactcgagattgaccgggacacgaaaaagtgtgcatttcgtactcacacaggaaagtattggactttgacggctactggaggcgtgcagtctactgcgtcctctaagaacgcttcgtgttatttcgacatagagtggcgggacaggcggatcacgctgcgcgcctccaacgggaaatttgtgacgtcgaagaagaatggccagctggcggcaagcgtggagaccgcaggcgattcagagctgttcctgatgaagttgataaatcgcccaatcattgttttcagaggcgagcacgggtttattggttgccgcaaggtgacaggcaccctggacgcaaacaggtcctcttacgacgtctttcagctcgagttcaacgacggtgcctataacatcaaggactccaccggcaaatactggacggtcggatccgacagtgctgtaacgagctccggggacaccccagtggacttcttttttgagttctgtgattacaacaaagtggcgataaaggtaggaggcagataccttaagggagaccacgcaggagtgctgaaagccagtgccgaaactgtcgatcccgcctccctgtgggagtactag

SEQ ID NO: 116696 - DNA, 1551 bp, synthetic construct
  misc_feature 1..1551: note = Description of Artificial Sequence: Synthetic coding sequence
  source 1..1551: mol_type = other DNA
atgcctaccaatggccttcaccaggtgctaaagatacaatttggtcttgttaatgacactgaccgctacctcaccgcggagagctttggctttaaggttaacgccagcgccccttccctgaagcgcaaacaaacatgggtattggagccagacccaggccagggaacagcagtgctcctcaggtcatcccatctgggtcgctatctgtcagcagaggaggacgggcgggtggcttgcgaggccgaacagccgggccgggattgccgtttcctcgtgctgccgcagccggacgggcggtgggtcttgcgtagtgaacctcatggcagattctttgggggaaccgaggatcagcttagttgttttgctaccgcagtgtcaccagctgagctgtggacagtccacctcgccatccacccacaggcccacctcctgtcggtgagccggcggcggtacgtgcacttatgtccccgggaagatgaaatggcggcagacggtgacaagccctggggtgttgacgctttactcaccctcatatttcggtctcgccggtactgcttgaagtcctgtgatagcagatacctgaggtccgacgggagactggtatgggagcctgagcccagggcctgctacacattggagtttaaggctggcaagttagcttttaaagattgcgatggtcactacctcgctccagtaggcccagccgggaccttaaaagccggccggaacaccagacctggaaaggacgagctgtttgacttagaagagtcccacccccaggttgtgctcgtcgctgcgaaccacaggtatgtgtctgttaggcaaggggtaaacgtttccgccaatcaggatgacgagctcgaccatgagacgttcttgatgcaaattgatcaggagacgaagaaatgcactttttactccagcaccggtgggtactggaccctagtcactcatggaggcatccacgccaccgccacgcaggtgagtgctaacaccatgttcgagatggaatggcgggggcggcgggttgcgctgaaagcatctaatgggaggtacgtctgtatgaaaaagaacggccagctcgctgctatcagcgactttgtcgggcctccaccaaggcccgcgtggactgggaaggtggccggtggggcagcccagcagactctgtcccctccaggaaaggacgaggagttcactctgaagctgatcaatcggcccatactcgtgctgcgcggcttggatggcttcgtgtgccatcaccgcggcagcaaccagctcgacactaacagaagcgtgtatgacgtcttccatctgagttttagtgacggtgcctaccgcatccgcggtcgtgacggggggttctggtacacaggcagtcatggttccgtgtgtagcgatggagaacgcgcggaagattttgtattcgagtttcgggagcgggggaggcttgctatccgggcccgctctggaaaatacctgagaggcggcgcctcgggactgctgagagccgacgcggatgcaccggctggaactgcgctttgggagtactag

SEQ ID NO: 116697 - DNA, 1479 bp, synthetic construct
  misc_feature 1..1479: note = Description of Artificial Sequence: Synthetic coding sequence
  source 1..1479: mol_type = other DNA
atgcctacgaatggactccaccaggtgctgaagatacagtttgggctcgtcaacgataccgaccgctacctgactgcggaatctttcggatttaaagtgaacgctagtgcccctagcctgaaaaggaagcagacatgggtgcttgagcctgaccccggacagggcaccgctgtactcttgcggtccagccacctaggcaggtacctatccgctgaagaagacggtagggtggcctgtgaagcagagcagcccggaagagattgtcgatttttggtgctgccgcaacctgacggacgatgggtgttgcgaagcgagccacacgggcgcttctttggaggcacagaagaccagctgagctgttttgccacagctgtgtctccagccgaattgtggactgttcacttggctatacatcctcaggcgcatctcctatcagtgtcacgtcggagatacgtccatctgtgtccccgtgaagacgaaatggctgccgacggcgataagccatggggagttgacgcactgctcacgttaatcttccgtagtcggcgctactgtttgaagtcttgtgactcacgctacctccggtccgatggtagactcgtgtgggagcccgaaccccgagcatgttacacactcgaatttaaagctggcaagttagccttcaaggattgcgatgggcattatctggctccagtcggtccagctggcactctgaaggcagggcgcaataccaggcccggaaaggacgaactcttcgatctcgaagaatctcacccccaggtggttctcgtggcggcaaaccaccgttacgtatccgttaggcagggtgtcaacgtgagcgccaaccaggacgacgagctcgaccacgagacattcctcatgcagattgaccaggaaactaaaaaatgcacattctattccagtactggtggttactggactctggtgacacatggaggaatccatgcgactgccactcaggtgagcgcaaacacaatgttcgaaatggaatggaggggccggagggtcgcactgaaagcctcgaacggacgatacgtctgcatgaagaagaacggacagctggccgccatctctgacttcgttggcaaggacgaggaattcaccttaaaacttatcaacaggcccattctcgtgctccgagggctggacggcttcgtctgccaccaccgtggctccaaccagctggacacaaaccgtagtgtctacgatgtgttccatctgagctttagcgacggcgcataccgcatccgagggagggatggaggattctggtacactggcagccacggcagcgtgtgttctgacggcgagcgggctgaagacttcgtcttcgagttcagagagcgcggacgccttgccatcagggctaggtctggaaagtatttgagggggggcgccagcgggttactgcgggcagatgctgacgctcccgcagggaccgcactctgggaatattag

SEQ ID NO: 116698 - DNA, 2133 bp, synthetic construct
  misc_feature 1..2133: note = Description of Artificial Sequence: Synthetic coding sequence
  source 1..2133: mol_type = other DNA
atgcttacaactctaaagccctttgggagcgtctcagtcgaaagcaaaatgaacaacaaggccggctccttcttctggaatttacgccaattttctaccttggtttcaactagcaggaccatgcgactgtgctgcctgggcctgtgcaagcctaaaatcgtacactcaaactggaatatattgaacaactttcacaaccgtatgcagtccaccgatatcattcgctatctttttcaagacgcatttattttcaaatccgacgtcggatttcagactaaagggatctccacacttacagctctgaggatagagcgccttctctacgccaaacgcctgtttttcgacagtaagcagagcctggtgcccgtggataagtctgacgatgaactcaaaaaggtgaacctgaatcacgaggtcagtaacgaggacgtcctaaccaaagaaacgaaaccgaaccgcattagctctagaaagctgagtgaagagtgcaattcccttagtgacgtcctcgacgcgttttcaaaagctccaaccttcccgagcagcaactattttacagctatgtggacaattgccaaacgcttgtcagacgatcagaagagatttgaaaagaggcttatgttctctcatcctgcattcaatcagctttgtgaacacatgatgcgggaggccaagattatgcagtacaagtacctgctatttagtctgcacgccatcgtgaagctcggcatcccccagaacacaatcctagtgcagaccctcttgagagtgacccaggagagaattaacgagtgtgatgaaatatgcctgtccgtgctgagtacagtattagaggcgatggagccttgcaagaatgtccatgtcctgcgtacagggttccgcatactcgtcgaccagcaggtgtggaaaattgaggatgtgtttaccctgcaggtggtgatgaaatgcattgggaaagacgcccccatcgcattaaagaggaagctggagatgaaagctctcagggagctggaccggtttagcgtgctgaatagtcagcacatgtttgaagttcttgccgccatgaatcatcgctctctcatcttgttggacgaatgttcaaaagttgtcttggataacatccatggatgtcccctccgcatcatgattaacatattacagtcttgcaaggatttgcagtaccacaacttggacttgttcaagggcctggctgattatgtggccgccacattcgacatttggaagttcaggaaggttctgttcattctgatattattcgagaatttgggattccgccccgtaggccttatggacctgttcatgaagcgcatcgtggaggaccccgagtcccttaatatgaagaatattttatccattctgcacacttattctagcctgaatcatgtgtacaagtgtcagaacaaagaacagttcgtagaagttatggcttcagctctcactggataccttcatactatctcatcagaaaatctgctcgacgccgtgtatagcttctgcctcatgaactattttcccctggccccctttaaccagttgttgcagaaggacatcatctccgaactcctcactagcgatgacatgaaaaatgcctataaactacacacgcttgatacttgcctaaaactggacgacactgtatatctgagggatatcgctctgagcctcccccagcttccacgggaactgccttcaagccacacaaatgccaaggtggcagaagtgctgtcgtcactgcttggcggagaagggcactttagtaaagacgtgcacctcccccataattatcacattgactttgaaataaggatggacactaaccgaaaccaagtactgcctctgtcggacgtggacacgacaagcgccaccgatatccagcgggtggccgtgctatgtgtctcccggtcagcttactgtcttgggtccagccacccacgcggatttcttgccatgaaaatgcgacacttgaacgccatgggcttccacgtcattttggtgaacaactgggaaatggacaaactcgaaatggaggacgcggtgaccttcctgaagaccaagatctacagcgtggaagctttacccgttgcggccgtcaatgtccagtctacccaatag

SEQ ID NO: 116699 - DNA, 2133 bp, synthetic construct
  misc_feature 1..2133: note = Description of Artificial Sequence: Synthetic coding sequence
  source 1..2133: mol_type = other DNA
atgttaacgacacttaaacctttcggaagcgtgtccgttgaatctaaaatgaataacaaggccggctcatttttctggaatttacgacagttcagcacgctcgtgagtacaagtagaactatgaggctatgttgcctagggctgtgtaagcccaagattgtgcattcaaattggaatatcctgaacaatttccacaatagaatgcaaagtaccgatattattaggtacctctttcaggatgcgttcatttttaagtccgacgttggcttccaaaccaaagggattagcacactcactgcactgcggatcgaacgtcttctgtacgcaaagaggttgtttttcgacagcaagcagtcactggtgcccgttgacaaaagcgacgatgagctcaagaaagttaacctgaatcacgaggtctcaaatgaagatgtgttaacgaaggaaacaaagcccaaccgcatcagctctagaaagcttagcgaagaatgcaattctctgagcgatgtgcttgacgctttttctaaggctcctacattcccatctagcaattactttacggccatgtggacgattgccaagagactgtccgatgaccaaaaaagattcgaaaaacgtcttatgtttagtcaccctgcattcaatcagctttgtgaacatatgatgagagaagctaagattatgcagtacaagtatctgctgttttccctccatgccatcgtcaaactgggtattccccagaacacaatactagtgcagactttgttgagggtaacacaggaacgcataaacgagtgcgacgaaatttgcctaagcgtgctaagcactgtgctggaagccatggagccctgtaaaaatgtgcacgtgctgaggacagggtttagaatccttgtcgatcagcaagtgtggaaaatcgaggacgtgttcaccctgcaggtggtaatgaaatgtattggcaaggatgcaccaatcgcactcaagcgaaaattagagatgaaagccttgagggagttggaccgcttctccgtgctgaactctcaacacatgtttgaagtgctagcagctatgaatcacaggtctctgatcttgctcgatgaatgcagtaaggtcgtgttggacaatatccacgggtgtcctctccggattatgattaacatccttcagagctgtaaggacttgcagtatcataacctggacctgttcaaaggcctcgctgattatgtcgcagccacatttgacatatggaagttccgaaaggttcttttcattctgatcctgttcgaaaacctggggtttcgtcccgtgggccttatggatctgttcatgaagaggatagtagaggatccagagtcgttgaatatgaagaacattctatcaattctccatacatactccagcctgaatcacgtgtataaatgccagaacaaggagcagttcgtcgaagttatggcatccgcgctcaccggctatctgcacacaatctcctcagagaacctactagacgctgtatattctttctgcttaatgaattatttcccgcttgcccctttcaaccaactgttgcagaaagatatcataagcgagctcctgacatccgacgacatgaaaaacgcctacaaactgcatactctcgacacctgcctcaaactcgatgatacagtgtacttaagagatatagcactgtcactcccacagctgccaagggaactcccatcttctcatacgaacgctaaagttgcggaggtgctttcgagtctgttgggcggggagggacatttctctaaagatgtgcacttacctcacaactaccatatcgattttgagattcgcatggacacaaatcgaaaccaggtgttgcctctttcagacgtcgacaccacatccgcaactgacatacagagagtggcagtgttgtgtgtcagtagatcggcgtactgtttgggatcttcccacccccgcggatttctggccatgaaaatgcgtcatctgaatgccatggggtttcatgtgatcctcgtaaacaactgggaaatggataagctggaaatggaggacgccgtgacctttctgaaaaccaagatctacagcgtcgaggcgctccccgtcgccgccgtcaacgtgcagagtacccagtag

SEQ ID NO: 116700 - DNA, 2133 bp, synthetic construct
  misc_feature 1..2133: note = Description of Artificial Sequence: Synthetic coding sequence
  source 1..2133: mol_type = other DNA
atgttgaccactctgaagcctttcggatctgtgagcgtggagtcaaagatgaacaacaaagcgggcagtttcttttggaacttgaggcagtttagcactcttgtctcgacaagtcggaccatgcggctctgttgtcttgggctttgcaagccaaagattgtacactccaattggaatattctgaacaacttccacaaccgaatgcagtcaaccgacataatccgttatctgttccaggacgccttcatttttaagtctgatgtcggctttcagacgaagggcatatcaacactgactgcactcaggatcgaacgacttctctacgcgaaacggctgtttttcgattcaaagcaaagtctcgtgcctgtagacaaaagcgacgacgagttaaagaaagttaatctgaaccatgaggtgtccaacgaagacgtcctaactaaggagaccaagcctaaccgaatctcttcaagaaaattgtctgaagaatgtaacagcctgagcgacgtgttggacgctttcagcaaggcacccactttcccgtcctccaattacttcacagcaatgtggacgatcgccaagaggctttcagacgaccagaagaggttcgaaaagcgtctgatgttttcccatccagctttcaaccagctctgcgagcacatgatgagagaagccaaaatcatgcaatataagtatctgctattttctctgcatgctatcgtgaaacttgggattccccaaaatactatccttgtgcagactctgctaagggtaacacaggaaaggatcaacgaatgcgatgagatttgcctctctgtgctctccaccgtgcttgaagccatggagccctgcaaaaatgtacacgtgctcaggaccggttttcgtatcctggtagatcagcaggtgtggaaaatcgaggacgtgttcactctgcaagtggtaatgaaatgcattggcaaagacgcaccgatcgcgcttaaacgcaagttagaaatgaaggccctgagggagctggaccggttctcggtgttgaatagccagcacatgttcgaagttctggctgctatgaatcatagatctctgattctgctcgacgaatgctccaaggtggtactcgacaatatccatgggtgccccttgagaataatgatcaacatcctccagtcttgcaaggatcttcagtatcacaatctcgacctgttcaagggtctcgccgattacgtcgctgccacctttgacatctggaaattcaggaaggttttattcatcctgatactgtttgaaaatcttgggttccggccagtagggttgatggacttgtttatgaagcgaattgtggaggatcccgagtctcttaatatgaaaaacatattgtccattctgcacacttattcctctttaaaccatgtctataagtgtcaaaataaggagcagttcgtcgaggtgatggcaagcgctttaacaggatatctacacaccatcagttccgaaaatcttctggatgctgtctactccttctgcctgatgaattactttccactcgctcctttcaaccagcttctgcagaaggatataatctctgaactgttaacatcagacgacatgaagaacgcttataagctgcacactctggatacttgcctcaagttagacgatacagtgtatctgcgggatatcgctctatctttaccccagttgccccgggagctacctagcagtcacacaaacgccaaggtcgctgaggttttgtccagcctactgggcggcgaaggacatttttccaaggacgtgcacttaccgcacaattatcacatcgacttcgagattcggatggataccaaccgcaaccaggtgctgcctctgtcagatgtggacacaaccagcgcgacagacatacagagggtggccgtcctctgcgtgtctcgatctgcctattgtctagggagtagccacccacgcggctttctagcaatgaagatgcgtcacctgaacgctatgggctttcacgtgattctcgtgaacaattgggagatggacaaattagagatggaagatgctgtcactttcctaaagacaaagatctactctgtggaagctctgcccgttgcagccgtcaatgtgcagagtacccagtag

SEQ ID NO: 116701 - DNA, 375 bp, synthetic construct
  misc_feature 1..375: note = Description of Artificial Sequence: Synthetic coding sequence
  source 1..375: mol_type = other DNA
atgctgaccacgctgaaaccctttggtagtgtaagcgtggagtctaaaatgaacaacaaagcaggcagcttcttctggaatttgagacagttttctactttggtcagcaccagccgaaccatgaggctctgctgccttgggctctgcaagccaaagatagtccattccaattggaacattctgaacaacttccataatcgaatgcagtcgacagatatcatcaggtacctgttccaggacgcgttcatctttaagtccgacgtgggattccaaactaaggggatatcaacccttaccgccctgagaatcgaacggttgttgtatgctaagcgtctcttttttgactccaagcagtcgttagtgcccgtggattag

SEQ ID NO: 116702 - DNA, 2295 bp, synthetic construct
  misc_feature 1..2295: note = Description of Artificial Sequence: Synthetic coding sequence
  source 1..2295: mol_type = other DNA
atggccgcaaccctgaaatctctcaagctggtgaggtaccgagcgttttgcagcccaagcgcattcggggctgtcagatccgtcagttattggaatgtgagttcaacacagcacggggggcaggaccctcccgagcacatctcactctgccacagtgctaagaaggttaaaaacatttgttcaaccttttcttctcgcagaatcctgaccacaagttcagcccatcccggactggagttcagtaagacctcttcctccaaagcctcaaccctgcagctcgggtcacccagagccaccggcgtggacgaggaggatgtggaagtattcgactcatttgaaaacatgcgggtgttcctgcagctccgaccagagtatcgcgtgcattcttacaatgccagcgaaacaagccagttacttagcgtgagcgagggagaattgatcctacataaagtgagggttaaccagaataacttgcaggcacaggtcattgtggattacctgtgtaaactgtccagcctacctgcagaacagcaccctgtgctgttgggcagtaccagcttcgccttgttgtgccaactgtccgtgaaaaaaatccagttgttcgatacacaggacctgataaatgtgctgaaggctttcgtgattttgggcattccgcatagccacagcatgcttgatgtatatgagaccaagtgttgccaccaggtgtgggagatgaatatggaccaactgctattagtagcagacctttggagatatttggggcgcaaagtacccagatttctcaacattttctcttcctacctgaacctgcactggaaagaccttagcctatctcagctcgtccatctgatttatgtgataggtgagaatcggcaggtttcacaggatcttatgcagaagttggagagcctcatcttaaaatacatagatctgattaacctggaggaggtgggaaccatatgtctcgggttcttcaaatccagtaccaacctgagcgagttcgtcatgagaaaaataggcgacctcgcatgtgccaacatccagcacctgtcttcaagaagcctggtaaacatcgtgaagatgtttaggttcacacatgttgatcacataaactttatgaaacaaataggggagatcgcgcctcagcgcattccctcactcggggtccagggcgttatgcacctcacgttgtattgttcagccctcagatttttaaacgagggtgtgatgaacgccgtcgccgcttcacttccacctagggtggctcactgcaggtctaaggacgttgcaaaaatattatggagcttcggcaccttgaattataagccccctaacgccgaagagttttacagctccctaatctctgagattcaccgcaagatgccggagttcaaccaatacccagaacatctgccaacatgcctgctgggtctcgcttttctggagtattttccggtggagctcatcgacttcgcgctctctccagggtttgtacgactggcccaggagcgaaccaagtttgaccttctgaaggagctgtataccttagacggcacagtgggtattgaatgcccagactaccgcggtaaccgcctcagcacgcatctccagcaggaggggagtgagctcctgtggtatttggcggagaaagacatgaactcaaaacccgagtttctggagaccgtgttcctccttgagacgatgctgggaggaccacaatatgtcaaacaccacatgattctgccacacacacgcagtagcgatctggaagtgcagttagacgtcaacctgaagccactgccctttaatcgcgaagcgactcccgccgagaacgtggctaagctgcgcctagaacacgtaggggtctccctgactgacgacctcatgaacaagctgctcaaggggaaagcccggggccattttcagggcaagacagagtcagagcccggacagcagcctatggagcttgaaaataaggcagccgtcccactgggtggctttttgtgcaatgtcgctgataaaagcggtgctatggagatggccggtttatgccccgctgcttgcatgcaaacaccacgcatgaaacttgcagtacagtttactaaccgtaaccaatattgttacggcagccgggacctgctcggcctgcacaatatgaagaggaggcaattggcaaggctgggatatagagtcgtggaactgtcctattgggagtggctgccactgctgaaaagaacgcgcctggagaagctggccttccttcatgagaaggtgttcacctctgccctttag

SEQ ID NO: 116703 - DNA, 183 bp, synthetic construct
  misc_feature 1..183: note = Description of Artificial Sequence: Synthetic coding sequence
  source 1..183: mol_type = other DNA
atggcatgccaaggtcgcgaggagtgctggtgccaatctaggattgctcgcacactgcctgctgaccaaaaacccgaatgtcgcccatactgggagaaagatgacgcgtcgatgccacttccatttgatctgactgatatagtgtcagaacttcgaggccagctgctggaagccaaaccatag

SEQ ID NO: 116704 - DNA, 630 bp, synthetic construct
  misc_feature 1..630: note = Description of Artificial Sequence: Synthetic coding sequence
  source 1..630: mol_type = other DNA
atgttggatgatctaaacgcaacacatcaacactgcgtgctggccggcagtcaaccaaggtttagctcgacgcaccgagtggcggaatgttccactggaaccttggactatattttacaaagatgccagcttgccctgcagaacgtctgcgacgacgtggataatgatgatgttagcctgaaatcctttgagcccgccgtcctgaagcagggggaggagatccataatgaagtggagttcgagtggcttcgacagttttggttccagggcaaccgatatcggaagtgcacagactggtggtgtcagcccatggcccaactagaggctctgtggaagaaaatggaaggcgtgaccaacgctgtgttgcacgaggtgaagcgggagggcctgcctgtggagcagcggaatgaaatcctgaccgcgattcttgccagtctgacggcacgccagaacctaaggcgggagtggcacgcccgctgtcaatcacgcatcgcacggacactgcccgccgatcagaaacctgagtgccgaccttactgggaaaaggatgatgcttccatgcctctgcctttcgacctgaccgacattgtgagtgagcttcgtggacagctgctcgaagctaagccttag

SEQ ID NO: 116705 - DNA, 321 bp, synthetic construct
  misc_feature 1..321: note = Description of Artificial Sequence: Synthetic coding sequence
  source 1..321: mol_type = other DNA
atggcacagctagaggctctttggaagaaaatggagggtgttaccaatgctgtcctgcatgaggtcaaaagagaaggattgcccgtggaacagcggaacgaaatattgacagctatccttgcgtccctgaccgcccggcagaaccttcgccgagaatggcacgcccggtgccagtcgcggatagcccggacacttcctgccgaccagaagccagaatgccgaccctactgggaaaaagatgacgcaagcatgcccctcccttttgacctgactgacatcgtctctgagttaagggggcagctccttgaagccaaaccttag

SEQ ID NO: 116706 - DNA, 321 bp, synthetic construct
  misc_feature 1..321: note = Description of Artificial Sequence: Synthetic coding sequence
  source 1..321: mol_type = other DNA
atggctcaattggaggccctgtggaagaagatggaaggagtgactaatgctgtcttacacgaggtgaagcgggaggggctcccggtggaacagcggaacgagattctgacagctatcctcgcctccctgaccgcccgccagaatctgcgacgggagtggcatgcacgctgccaatctcggatagccaggacgttacccgccgatcagaagcccgagtgtcggccctattgggaaaaagatgacgcaagcatgccgctccccttcgatttgaccgacattgtgagtgagcttcgcggccaactgctggaggcgaagccctag

SEQ ID NO: 116707 - DNA, 384 bp, synthetic construct
  misc_feature 1..384: note = Description of Artificial Sequence: Synthetic coding sequence
  source 1..384: mol_type = other DNA
atggaatggcgaaaagtgtccgagtgtaactctgtggagccctgtagggaggtaaaaaagtggccctaccggtgcattcaccacggaaaaaatttttctcggatgacaaatgccgtgctccacgaggtaaagcgcgaagggctgcctgtggagcagcgaaacgaaatcttgacggccattctggccagtctcactgctagacagaacctgaggagagaatggcatgctcggtgtcaatcgcgaatcgcacgaacgctcccagcggaccaaaagcctgaatgtcggccttactgggagaaggacgatgcaagtatgccattaccatttgatttgactgatatagtcagcgagctccgagggcagttgctggaggctaagccatag

SEQ ID NO: 116708 - DNA, 1518 bp, synthetic construct
  misc_feature 1..1518: note = Description of Artificial Sequence: Synthetic coding sequence
  source 1..1518: mol_type = other DNA
atgaagcgcacacctaccgccgaggagagggagagagaggctaagaaactgcggctcctagaagaattagaggatacatggctcccttacttgactcctaaagatgatgagttctatcagcagtggcagctgaaatacccaaaactcattttgcgcgaagcgagttctgtgtcagaggagctgcacaaggaggtgcaggaggccttcttgacgctgcacaaacacggatgcttgtttagagacctggtccgcatccaggggaaggacctccttacacccgtttctcggattctcattggtaaccccggctgcacatataaatatctgaatactaggctcttcaccgtgccatggcccgtgaagggcagtaacatcaaacacactgaggcagagattgccgccgcctgcgagacatttctcaagctgaatgactatctgcagatcgagacgatccaagcgttggaggagttggctgcgaaagagaaggccaacgaggatgccgtcccactgtgcatgtctgctgacttcccccgcgtgggaatgggaagctcttacaacggccaagatgaggttgacataaaatctcgggccgcctataacgttacccttctcaatttcatggatccacagaaaatgccctacctgaaagaggaaccctatttcggcatgggcaaaatggccgttagctggcaccacgatgaaaacttggtcgacaggtctgccgtcgcagtttactcgtattcctgcgagggacccgaagaggagtcagaggacgactcccacctcgaagggagagatcccgatatttggcacgtggggtttaaaatctcttgggatatcgagacacccgggttggccatcccgctccatcaaggcgattgttatttcatgctggatgatctcaatgccactcatcaacactgtgtgctcgccggttcccaaccccggttttcctcgacacatcgtgtcgctgaatgctccacaggtacactggattacatcttacagaggtgccagctggctctgcagaatgtgtgtgacgatgtggataatgatgatgtatctttgaagagcttcgaaccagcagttctgaagcagggcgaggaaattcacaatgaagtcgagttcgaatggctgcggcagttttggtttcaaggcaacagataccgtaaatgcaccgattggtggtgtcagccgatggcccaacttgaggccttatggaaaaaaatggaaggtgtgaccaacgcagttttacacgaagtgaagagagagggactccctgttgagcagcggaatgagatccttacagcaatcctggccagcctgactgctcgtcagaatcttcgaagagaatggcacgcgaggtgtcaatctagaatcgctcggacactgccagcagaccagaagcccgaatgccgaccatactgggagaaagacgatgcctcaatgcctctcccatttgatctgaccgacatagtttcagagctccggggccagttgctcgaagctaaaccatag

SEQ ID NO: 116709 - DNA, 321 bp, synthetic construct
  misc_feature 1..321: note = Description of Artificial Sequence: Synthetic coding sequence
  source 1..321: mol_type = other DNA
atggctcaactcgaggccctgtggaagaagatggaaggagtgaccaacgcagtgctgcacgaggtcaaacgggagggcctgcccgtggagcaaagaaacgaaattctgactgcaatcctggctagcctgaccgcgagacagaatctgaggcgagagtggcatgcacggtgtcagagcagaattgccaggaccttacccgcagaccagaagcccgagtgccgcccttactgggaaaaagacgacgcctctatgcccctgccctttgacttgaccgacattgtctcggagctgcgaggacaactactcgaagcaaagccatag

SEQ ID NO: 116710 - DNA, 13050 bp, synthetic construct
  misc_feature 1..13050: note = Description of Artificial Sequence: Synthetic coding sequence
  source 1..13050: mol_type = other DNA
atgaccatcgcccttctgggcttcgctatctttctgctgcactgtgccacttgtgagaaaccactggagggaattctgagctcgtctgcatggcacttcacccactctcattacaacgccacaatctacgagaattcttcccctaaaacctacgtggaatcattcgagaagatgggaatctatctcgccgagccgcagtgggccgtccggtacaggataatcagtggtgacgtcgctaatgttttcaagactgaggagtacgtggtggggaacttctgttttcttaggatccggacaaaaagctcaaacaccgcgctgctcaatagggaggtccgggatagctacacactgatcatacaggctaccgagaagacactggaattggaggccctcacccgcgtggtggttcacatcctagaccagaacgatcttaagcctcttttttcccccccatcctatagagtgaccatatcggaggatatgcctctgaagtccccaatctgtaaagtcacagctactgatgcagatctggggcagaatgcggagttctactacgctttcaacaccaggtctgagatgtttgcgattcatcctacctctggtgtggtgactgtggccggcaaacttaacgtgacatggcgtggcaaacatgagctgcaggttctcgctgtggataggatgagaaaaatttctgagggcaacggtttcggcagtctcgccgccctggtcgtccatgtcgagccagccctccgcaaaccgcccgctatcgcctccgtcgtagtgacaccaccagattctaacgatggcaccacatacgccaccgtgctggtcgatgcaaactcaagcggagctgaagttgagagcgtagaagttgtgggaggcgaccccgggaagcattttaaagcgattaaatcatacgccagaagcaacgagttctccctggtgtccgtgaaagacattaattggatggaatatcttcacggattcaatctgtctcttcaggcacggtcaggatccggaccatacttttactctcagatcaggggtttccacctccctccctcaaagctgtcatccctgaagttcgagaaggctgtgtatagggtgcagcttagtgagtttagcccaccagggagcagggttgtgatggtgcgggtcacaccagcattccctaacctccaatacgtcttaaaaccctctagtgagaatgtgggatttaagttgaacgcacgcactggtctgataacaaccacaaaactcatggattttcatgatcgagctcattaccagttgcacattcgcacctcaccagggcaggcctctactgtggtggtaattgacattgtggactgtaataatcatgccccactgttcaatcgctcaagctatgacggtactctcgatgagaatatccctccaggcacgtcagttctggctgtcaccgcaaccgatagggaccacggagagaatgggtacgttacatactctatagctggcccaaaagccttgccgttctcgatcgatccctacttgggaattatttctacgagcaaacctatggactatgagttgatgaagaggatctacacatttagggtccgagcctccgactgggggagccccttccggagggagaaggaagtttctattttcctgcagcttcgaaacctgaacgataaccagccaatgttcgaggaggtgaactgtacaggatctataaggcaagactggccggtaggaaagagtatcatgacaatgtctgcaatcgatgtcgacgagctgcaaaatcttaagtatgagatcgtgtctgggaacgagttggaatacttcgacctcaaccatttttcaggcgtcatatctctgaaaaggcccttcatcaatctgaccgcaggacagcctaccagttatagcctcaaaatcacagcgagcgacgggaaaaattacgcctcccctacaacccttaacattacagtcgtgaaagaccctcattttgaggtgccagtgacttgtgacaagacgggggtactaactcagtttacgaagacaatcctgcattttatcggtctccagaaccaggagtcctccgacgaagagtttacttctctgtctacctaccaaatcaatcactacacacctcagttcgaagatcatttcccacagagcatcgatgtgttggagagcgtgcccatcaataccccactcgccagacttgccgctacagatcctgacgctggatttaacgggaaactcgtgtacgtgattgccgacggaaacgaagaaggttgtttcgacattgagctggagaccgggttgctgacagtcgcagccccattggattatgaagctaccaacttctacattctgaatgtgaccgtatatgaccttggtactccacagaagagtagttggaagctgctgaccgtgaacgtcaaggactggaatgacaatgcccctcgcttcccacccggaggctatcagttgaccataagtgaggatacagaggtgggcaccacaatagctgaactgactaccaaggatgcggattctgaagacaatggcagagtccgctacacactgctcagtccaacagaaaagttctccctccaccccttaaccggtgagctagtagtcactggccacctcgatcgagagtctgagcctaggtacatactgaaagtggaggcaagagatcagcccagcaaggggcaccagctttttagtgtaaccgacttaattattactcttgaggacgtgaatgacaactcaccacagtgcattacagaacacaatcgccttaaggtgcccgaggatctgccccccggaactgtcctgaccttccttgatgcctcggacccagatcttggccctgccggcgaagtacggtacgtcctgatggacggcgcccacgggacttttagagtggacctcatgacgggagctcttatacttgagcgggaattggatttcgagcggagggctggttacaatctgtccctctgggctagcgatggcggacgcccactcgcacgccggacactttgtcatgttgaggtaatcgtattggacgtgaatgagaatttgcaccccccccattttgccagctttgtgcaccaagggcaggtacaggaaaactcgcccagcggtacccaagtcattgtcgtcgcagcccaggatgacgactctgggctggatggtgaattgcagtactttcttagagcagggaccggactggcagcgttctcaataaaccaggatacaggcatgatccagacattagctcctctggatagggaattcgcctcctactattggttgaccgttctggctgttgatagaggcagcgtgcctctgagtagcgtgactgaagtgtacatagaggtcacggacgcgaatgataatcctccacagatgagccaggccgttttctacccatctattcaggaggatgcgcccgttggaacatccgtgctgcaactggacgcctgggacccagattcttcatcgaaggggaaattgacctttaatatcacaagcggtaactatatgggtttttttatgattcacccagtgaccgggttgctgtcaaccgcccagcaactggatagagagaacaaagacgaacatatcttagaagtgaccgtattagacaatggcgagcctagtttgaaatcaacctctagagtcgttgttggcattcttgacgtgaacgacaatccaccgatcttctcacataagctgtttaatgtgagacttcccgagagactcagccccgtgagccccggaccagtgtaccgccttgtagcttccgacctggatgaaggcctgaacggtcgggtgacgtactctattgaggatagcgatgaggaagctttttcgattgacttagttaccggagtggtatcaagctcgtccaccttcaccgccggagagtataatattctgacaattaaggctacagactctggtcagcctccgttgtcagcctcggtccgcctgcacattgaatggattccgtggcccaggccatctagcattcctctcgccttcgacgagacatattacagtttcactgtgatggagacagatccagtgaaccatatggtcggcgttatctcagttgagggcagacccggcctgttttggtttaacatctctggtggtgataaagacatggatttcgatattgagaaaactaccggcagtattgtgatcgcgaggccactcgacactcgaagacgcagtaactacaatcttactgtagaggtaacagatgggtcgcggactatagcaacacaggttcatatctttatgatcgctaatataaaccaccaccgtccccaattcttagaaacacggtatgaggtcagagtgccccaggacactgtgccgggggtggagctgttgagagtccaggccatcgaccaagataagggtaagagcctgatttatacgatccatgggagtcaggatcctggttcagcaagcttgtttcagcttgatcccagctctggtgttctggtaaccgtggggaaattggacctcgggtccgggccgtctcagcacacattgacagtgatggtgagagatcaagagattcccataaagaggaatttcgtctgggtaaccatccacgtggaggacgggaacctccatccaccacgcttcacccaactccactatgaggcgtctgtcccagacacgattgctcctggtactgagctgctgcaggtgcgggcaatggacgcggacaggggggtcaatgcggaggtgcactactcgctgttgaagggaaatagcgagggcttttttaacataaacgccctcctgggcatcattacgctggcccagaagttggaccaggccaaccatgctccacataccctgaccgttaaggcagaggaccaaggctcgcctcagtggcacgacctggctaccgtgatcatccacgtgtatccctcggaccgttcagcaccaatattcagtaaaagcgagtacttcgtggaaattcccgagtccatccccgtcggcagtccgatactgttagtctcagccatgtctcctagtgaagttacatacgaactgagagagggtaataaagatggtgtgttctctatgaattcttacagcggactgatcagcacccaaaagaagctagaccatgagaaaatatcttcctaccagctgaaaatccgaggctcaaacatggctggagcctttacggacgttatggtggttgtagacatcatcgatgaaaacgacaacgcccccatgtttttgaaatcaactttcgttgggcaaataagcgaagccgcaccgttatacagtatgattatggataagaacaacaacccattcgttatccacgccagtgactcagataaagaggctaattcattactcgtctataaaatccttgagcctgaagccttgaagtttttcaaaattgatcctagtatgggcaccctcacaatcgtgtccgagatggactacgaaagcatgccaagtttccagttctgcgtgtatgtccacgaccaggggagtccggtcctattcgcacccagacccgcacaagtgatcatacatgtaagggacgtgaacgattctcctccaaggttctctgaacagatctacgaggtcgctattgtggggccaattcacccgggcatggagctcctgatggtaagggcaagcgacgaggatagtgaggttaactactccattaagaccggaaatgccgatgaggctgtcactattcatcccgtaactgggtccatctcagtccttaatccagcctttttgggactgagtcggaaactgacaattagagcgtctgacggtctgtaccaggacactgccctggtgaagatcagcctgacacaagtcctcgataaatccctgcagttcgaccaagatgtgtactgggccgccgttaaggagaatctgcaggacagaaaagccctggtgattcttggggcccagggaaatcacctcaacgataccttgagttatttcctgctcaacggcacagacatgtttcatatggtgcagagtgctggcgttctgcaaacacgcggagtggctttcgatcgtgagcaacaggacacgcatgagcttgcagtggaggtaagagacaatcgaactccccagcgcgtggcccaagggctggtgcgggtttcgattgaagacgtgaacgataacccgcctaagtttaaacatcttccgtactacactatcatccaggacggcactgaaccaggggatgtcttgttccaggtttctgctaccgacgaggacctcggcaccaatggagccgtcacatacgagtttgccgaagactacacatacttcagaatagacccttatctgggagatatctccttgaaaaagccatttgactaccaggccctcaataaataccacctcaaggtcattgcaagggacgggggcacccccagcctgcaaagcgaggaggaagtcctggtgacggttaggaataaaagcaaccctctgtttcagagcccttactataaagtcagagtacctgagaacattacactctatactccgatcctccatacacaggcaagatcaccagagggacttaggttgatttacaatattgttgaggaggagcccctgatgttgtttactaccgacttcaaaactggagtgctgaccgtcactggccccctggattacgaaagcaaaaccaaacacgtctttactgtgcgggcaactgataccgccctgggcagttttagtgaagccactgtggaagtgctggtggaggacgtgaacgataatccgcccacattctcacagctggtatacactacctccatttcagagggtttgcctgcgcagacccccgtgatccaactgctggccagcgatcaggacagtggacgcaatcgggatgtgtcttatcagattgtcgaggatgggtccgatgtcagcaagtttttccagattaacggctctacaggggaaatgtccaccgtgcaggagctggattatgaggcacaacagcactttcacgtgaaggtgcgagccatggataagggcgatcctccccttaccggcgaaactcttgtcgtggttaacgtttccgacattaacgacaaccctccagaattcaggcagcctcagtacgaagctaatgtgtctgaattagctacatgcggtcaccttgttttgaaggtgcaggctatcgaccctgattctcgtgatacatcccgtttggaatatctgatattaagtggaaaccaggaccggcactttttcataaacagttcgtcgggaatcatttcgatgtttaatctttgcaagaagcacttggatagttcttataacctccgtgtcggcgcttcagacggcgtgtttagggccaccgtccctgtgtacatcaatacgactaacgcaaacaaatattcacccgaatttcaacagcatctctatgaagccgagcttgctgagaacgctatggtgggaacaaaggttattgacttgcttgctattgataaagactctggcccctatggtaccatagactacacaatcattaataagctggcgtctgagaaattctctatcaatccgaacggccagatcgccaccctacagaaactcgaccgggaaaacagtactgaaagggtgatcgccattaaagtgatggcacgggacggcggcggtagggtagctttttgcacggttaaaatcatcttaaccgatgaaaatgacaatcctccacaattcaaggcctcagagtacaccgttagtatacagagcaacgtttctaaagacagccctgttatccaagtgctagcgtatgatgcagacgaaggacagaacgccgacgtgacctattcagtgaatcccgaagatcttgtgaaggatgtgattgagatcaaccccgttaccggagtcgtgaaggtcaaagatagtctcgtggggcttgagaaccaaacactcgatttttttatcaaggctcaagacggtggtcccccccactggaacagcctggttcctgtccgtctccaggtggtacctaagaaggtgtcgctgcctaaattctccgaacccctgtatactttttcagcccccgaagacctacccgagggctctgagatcggcattgtgaaggcagtggctgcccaagaccctgtgatatacagcctcgttcggggtaccacccctgaatctaacaaagacggagtgttctcactggatcccgataccggcgtgatcaaggtgcgcaaaccaatggatcatgaaagcaccaagttgtatcagatcgatgtaatggctcattgcctgcagaacaccgatgttgtgtcgttagttagtgtcaacatacaggtcggcgatgttaacgataaccgaccagtgttcgaagcagatccttacaaagctgttctaaccgagaacatgccagtgggtacctctgtcattcaggtcaccgcgatcgataaagacaccggccgggacggtcaagtgtcttaccgcctgtctgcagaccccggttcgaatgtccatgaattattcgctatcgacagcgaaagcggatggataactaccttgcaggagctggactgcgaaacgtgccagacctatcacttccacgtcgtggcttatgatcatggccagacgattcagctgtcttcccaggcactggtccaggtctcaatcacagacgagaatgacaatgctccccgctttgcctcagaggagtacaggggatccgtcgtcgagaactctgagcccggagagcttgtggctacactgaagacccttgacgccgacataagcgaacagaataggcaggtgacttgttacattacagaaggcgatcccctcggccagttcggcatttcgcaagtgggagacgaatggcggatcagctcccggaaaactttggacagggagcacaccgctaaatacctgctgagggtgacagcctccgacggaaagttccaggccagcgtgacagtcgagatatttgtcctcgacgtaaatgacaacagccctcagtgctcccagctgctctacaccggcaaagtccatgaggacgtattccctggccactttattctcaaggtctccgccacagacttagatacggataccaacgcccagattacatactctctccacggcccgggagcacacgaattcaagctggacccacatactggcgaacttaccacgctgaccgctctcgaccgggagcggaaagatgtgttcaacttagtcgccaaagcaactgacggcggtgggagatcatgtcaggctgacataactctgcatgtagaggacgtgaatgacaatgccccgaggttcttccctagccactgtgctgtggctgtatttgataatactacagttaagactcctgttgcagtagtgttcgccagagatccggaccaaggcgcaaatgctcaagtcgtgtattctctgccagatagcgccgagggccatttttccattgatgcaacgacgggcgtaatccgactcgagaaacccttgcaggtcaggcctcaggcccccttggaacttacggtgcgggccagtgacctggggacacccatccctttgagtacactgggtaccgtcacagtctctgtcgtcggcctggaggactatcttcccgtcttcttgaacactgaacatagcgtgcaggtgcctgaggatgcaccacccggcaccgaagtgctccaactggcaacactgacacgacccggagccgagaaaaccggatatagggtagtgtccggaaacgaacagggtaggttcagactggacgctaggaccggaattctgtacgtaaatgcttccctcgacttcgaaacatcacccaagtattttctgtctatcgaatgttctagaaaatcttcatcaagcctctccgacgtaactactgtcatggtaaatattacagatgtgaatgaacatcggcctcagttcccccaggacccttattctacaagagtgctggagaatgccctcgtgggcgatgtcattttgacagtgtccgcgaccgatgaggacggccccttgaattccgacattacatacagcctaattggcggaaaccaacttggccactttactatccatcccaagaaaggcgaactgcaggtcgctaaggctcttgatagagagcaggcctccagttattccctaaagcttcgggccaccgactccggtcagcctcctctgcatgaggacactgacattgccattcaagttgcagacgtcaatgataatcccccgcgcttcttccagctcaattacagcaccacagttcaagagaacagtcccataggttctaaagtgttgcaattgattctaagtgaccctgattcgcccgagaacggacccccatatagctttagaattacaaaggggaacaacggttcagcctttagagttactccagatggatggctcgtgactgcagagggtttaagccggagagcccaggagtggtaccaactccagatccaggcatcagatagtggtataccaccactgtcctcactgacctccgtacgcgtgcacgtgacagagcagagccactatgcaccaagcgctctgccactggagatcttcattacagtgggcgaggacgagtttcagggcggcatggtgggtaaaatccatgccacagatagagaccctcaagacactctgacatactcattggccgaggaagaaacattaggtaggcacttttcggtcggggctccagatggaaaaataatagctgcccagggactcccaaggggtcactatagttttaatgtcacggtgagtgacgggacatttaccaccactgctggcgtgcacgtgtatgtgtggcacgtggggcaagaagcccttcaacaggcaatgtggatgggcttttatcagttgacaccggaagaactggtctccgaccactggagaaacttacagcgctttctctcacataaactggatataaagcgagcaaatatccatttggccagtttacaaccagctgaggccgtcgccggggtggatgtgttattggtgtttgaggggcacagtggtacattctacgagtttcaggaactggcctccatcatcacacattctgccaaagagatggagcactctgtgggggtacagatgcgatcagctatgccgatggtaccgtgccaagggcctacctgccagggccagatttgtcataacaccgtgcatttggaccctaaagtcggacctacctacagtacggcgcgtttaagcatcctaacaccaaggcaccatctacagagatcttgcagctgtaacggcactgccactaggttctccggccaatcttatgtcaggtaccgcgctccagccgccaggaactggcacatacacttttatctcaagaccttacagccccaagccatcttactgttcacaaacgagaccgccagtgtatccctgaagcttgcgtctggagtgccccagctcgagtaccactgcttaggcggcttctatggcaatctctcatcccagcgacacgtcaatgaccacgagtggcattctattctggtggaggaaatggacgcttcaatccggctaatggttgattccatgggaaatacctctttggttgtcccagagaactgtcggggcctaagaccggaacggcacctgctgctgggaggcttgatcctgttacacagcagtagcaacgtctcccaaggctttgaaggatgtctcgatgccgtggtggttaacgaagaggcattggacttacttgcaccaggcaagactgtggctgggctgctcgagacgcaggcacttacccagtgttgtctgcattctgattattgctcccagaacacctgcctgaacggtggcaaatgtagctggacacatggtgctggctacgtgtgcaagtgtccaccccaattctccgggaagcactgtgaacagggtagagagaactgtacattcgccccgtgcttggagggggggacttgtatcctgtctccaaagggagctagttgcaactgtccgcatccttacacgggcgacaggtgtgaaatggaggcaagggggtgtagtgagggtcactgtctggtgacacctgagattcaaaggggagattgggggcaacaggaactcctgatcatcaccgtggccgtggccttcatcatcatcagcacggtgggcttgctgttctactgtcggaggtgtaaatctcacaagccggtggctatggaagatccagatctactggccaggagtgtcggagtagacactcaggctatgcccgctatcgagttgaaccccctctcagcctcgtcatgtaataacttaaatcagcctgaaccatctaaggcctcagtgcccaatgaactggttacttttggtcctaattcaaagcaaagaccagtggtgtgttcagtcccgccacgcctgccacctgccgcagtgccatcccacagcgacaacgaaccagtcataaaacgcacatggtcttccgaggaaatggtctacccgggaggagcaatggtttggcccccgacatattcccgtaacgaaaggtgggagtatccccattctgaggtaactcaaggtccactgccaccctccgcccaccggcatagcacccctgtggtgatgcctgagcccaatggcctctatggcgggttcccatttccactggagatggagaacaaacgagcaccactgccaccccgctattctaaccagaacttggaagacctcatgcccagtagacctccatcaccgcgcgagagactcgtggctccctgcctaaacgagtataccgccatcagttactatcacagtcagtttaggcaggggggagggggaccatgtctggcagatggcggctataagggcgtgggtatgagacttagccgagccgggccatcatacgcggtttgcgaagttgagggtgctcccctggcagggcaaggacagccccgggtaccgccaaactacgaggggtctgatatggtcgagagtgactacgggagctgcgaggaggtgatgttttag

SEQ ID NO: 116711 - DNA, 13770 bp, synthetic construct
  misc_feature 1..13770: note = Description of Artificial Sequence: Synthetic coding sequence
  source 1..13770: mol_type = other DNA
atggacattattatgggccactgcgtgggaaccagaccacccgcatgctgcctcatactactgttatttaagctgcttgcgactgtgagccagggtttacctggcacagggcctctgggctttcactttacacattcaatttacaatgcaaccgtttacgagaatagcgcggcccgcacttacgttaactctcaatcgcgaatgggcataactctgatagatcttagttgggacatcaagtacaggatcgttagtggcgatgaggaagggttcttcaaagcggaggaggtgatcatcgccgatttctgttttcttagaatccgaactaagggaggcaactcagcaattttgaatcgggaaattcaggacaattacctgcttattgttaagggttctgtgcgcggagaggatctggaagcctggacgaaagtcaatatacaggtgctcgacatgaatgatctgagacctctgttcagcccaacaacatattccgtcacaattgccgaaagcactccactgcgtacatcagtcgcacaggtgactgccacggacgctgatataggctcaaatggggaattctattattatttcaaaaataaggtggacctgttctctgtccatcctaccagcggcgttataagtctttcaggtaggctgaactacgacgagaagaatagatacgatttagagattcttgccgtcgaccgcggtatgaagctctatgggaataacggtgtctcctcaacggctaagctctatgtgcacattgaaaggataaacgaacacgctccgactattcacgtcgtcacccatgtgccattctctcttgagaaggaacctacatacgctgtagtcacggtcgacgacctcgacgacggcgccaacggggagatcgaaagtgtttctatcgtcgcaggtgaccccctggaccagttcttcctggccaaggaaggcaagtggctgaacgagtataaaattaaagaacgcaagcagatagattgggaaagtttcccttatggctacaacctcaccctgcaagcaaaagacaagggcagtccacagaagtgctccgcactgaaggctgtgtacatagggaacccgacccgggatacagtacccatccgctttgagaaagaggtatatgacgtttctatctccgagttttcacctccaggtgtggtggtagccattgtgaaactcagtcctgagcccatcgacgtcgaatataagctgtcacctggagaagatgctgtgtatttcaaaattaatcctcggtcaggtctgatcgtaacagcaaggcctctcaataccgtcaagaaggaagtttacaagctcgaggtaaccaataaagaaggggacctcaaggctcaggtgactattagtattgaggatgccaatgaccatacgccagagtttcagcagccactctacgatgcttacgtaaatgaatcagtgcccgtggggacatcagtattgacagttagtgcttccgacaaggataaaggggaaaatgggtacataacttatagtatcgccagcctcaacctgctcccttttgtaattaatcaattcactggggtgattagtacaaccgaggagcttgatttcgagtcctcccctgagatctaccggttcattgtgagagcttcagactggggttccccttaccgtcacgagagtgaggtcaatgtgacaatcagaattggtaacgtgaatgataattccccactattcgagaaggtggcctgccagggagtgatttcatacgactttccagtcggcggtcacatcaccgccgtgtctgccattgacatcgacgagctggagctggtgaaatacaagatcatcagtgggaacgagctcggatttttttatttgaacccagattctggcgtgttacagctgaagaagagcctgactaactcaggaattaagaatgggaatttcgctttgagaattacagctacagacggcgagaatttggctgaccctatgagcatcaatataagtgtactgcatgggaaggtgtccagtaagtccttctcttgccgggagacgagggtcgcccaaaaacttgcagagaaactgctgatcaaagccaaggctaatggtaaactgaacctggaagatggcttcctggacttttattccatcaacaggcaagggccgtactttgataaaagttttccctctgatgtcgctgtgaaggaagacctgcctgttggagctaacatcctgaagatcaaagcctacgacgcggacagcggctttaacgggaaagtgctcttcactataagcgacggaaatacggatagttgttttaatattgacatggagacaggtcagctgaaagtcttaatgccaatggaccgcgaacatactgatctataccttcttaacatcactatttatgatctcggaaacccccagaagagtagctggaggttgttgacaatcaatgtggaagacgccaatgacaacagcccggttttcattcaggattcttactctgtgaacattctagagagttccggtatcgggaccgagatcatacaagtggaagcgagggacaaggacttgggatctaatggggaggttacttattcagtgttgacagacactcagcagtttgcaatcaatagttccactggcattgtgtatgtagccgatcagctggacagggagagcaaggcaaattacagtcttaagatcgaagccagagataaggctgaaagcggacagcaactgttcagtgtcgtcacgttgaaggtcttcctggatgacgtaaacgattgttcgcctgcatttatcccatcgtcttactctgtgaaagtgttagaggatcttcctgtggggacagtaatagcctggttggagacccatgacccagatctcggcttgggcgggcaggtgaggtactccctggtgaacgattataacggcaggttcgagatagataaagcgtccggggctattaggctgtccaaagagttagactacgaaaagcagcagttctacaacttaaccgtgagagctaaagacaaagggcgcccagtttctttgtcaagcgtcagcttcgtcgaagtagaagtggtggatgttaacgagaatctccacacaccatactttcctgactttgctgttgttgggtctgtcaaggaaaacagccgcataggcacaagtgtgctgcaggtgactgcaagggacgaggattcgggtcgagacggtgaaatccagtacagcattagagacggctccgggctgggcagattctcaatcgatgacgagagtggggtcatcaccgccgcagatatattagatagggagaccatgggcagttattggctcactgtctatgccacggacagaggagtcgtccccctttatagtactatcgaggtgtacattgaagtggaagacgtaaacgacaatgcgccactgacctcagagccaatttattaccccgtggtcatggaaaactcaccgaaagatgtatccgttattcaaatacaggcagaagatcccgactcttcaagcaacgagaagcttacataccggataacttctggcaacccccagaatttcttcgcaatcaacatcaaaacaggccttataactactacaagtcgcaaactggatagggagcaacaagccgaacacttcctagaagtgactgtgaccgacggagggccatcacctaaacagtccacaatatgggttgtagtccaggtgctggacgagaatgataacaaaccacagtttccagagaaggtgtatcaaatcaaactccctgaaagggatcgaaaaaagcggggagagcctatctaccgggcgttcgcattcgacagagacgaaggaccaaatgcagaaatttcttacagcatcgtggacggaaatgatgacggaaagttctttatcgatccaaagaccggcatggtgtcaagcaggaaacagtttacagcggggtcctacgacatcctgactattaaagccgtggacaatggaaggccccagaagagttccacagccagactgcacatcgagtggatcaagaaaccaccccctagccccatccccttgactttcgacgagccattttacaacttcacagtgatggagtctgatagggttactgagatcgtgggagtggtctccgtgcagccagccaacactcctctgtggttcgatatagtgggaggtaacttcgactctgcttttgatgctgagaaaggagttggaaccattgtcatcgcaaaacctctcgatgcagagcagcgctctatctacaacatgagtgtcgaggtgaccgatggcacgaacgtggccgtcacccaggttttcatcaaggtgttggacaacaatgacaatgggccggagttctcacagccaaattatgacgtcacaatctccgaagatgtgctccccgataccgagatcctacagatcgaggcaactgaccgcgacgaaaaacataagctctcctataccgtccacagcagtatcgatagtatcagcatgaggaagttccggatcgacccctctacaggtgtcttgtacaccgctgagcgactagaccacgaggcacaagacaaacatattttgaacataatggtgagggatcaagagtttccttatagaaggaatcttgcacgggtcatcgtgaatgttgaagatgctaatgaccatagcccatactttaccaatcccctgtatgaggcatctgtttttgagtccgctgctctgggaagtgcggtgctgcaggtcactgccttggacaaggataagggggaaaatgccgaattaatttatacaatcgaggccggcaataccggaaatatgttcaagatcgaaccagtcttgggtattattaccatctgcaaggagccagacatgacaaccatgggccaattcgttctgtccattaaagttaccgaccaggggtccccccccatgtctgctaccgcaatcgtgcgcatttccgtcaccatgtccgataactcccatccaaaattcatccacaaagattaccaggcggaggtgaatgagaatgtcgacattggtacttctgtaattctgataagtgcaatatcacagtccacactcatatacgaagtgaaagatggagacatcaatggcatatttaccatcaacccttacagtggggtaatcactacacagaaagccctggattacgagagaacttcatcttaccagctgatcatacaggcgacaaacatggctggcatggcttccaatgccaccgttaatatccagatcgtcgatgagaatgataatgcacccgtcttcctatttagccagtacagtggttccctcagcgaagccgcaccaataaattcaatagtcaggtccttggataactcccccctggtgatcagagccactgatgctgattcaaacagaaacgcccttttggtatatcagatcgtagaaagtaccgctaaaaagtttttcactgtggacagctcaactggcgctatccggaccatcgcaaatctggatcacgaaaccatcgcgcatttccattttcacgtgcatgtccgggattccggttctccccagctcactgccgagagcccagttgaggtgaatattgaagttaccgacgtaaacgataaccctcctgtctttacccaggcagtttttgagaccatcctgctcttgcccacatacgtcggggttgaagtactgaaagtgtctgctactgatcccgattctgaagtgcctccggagcttacctattcactgatggaaggcagtctggatcacttcctcatcgactcaaactcaggggtgctcacaattaaaaacaataatctcagtaaggaccactacatgctaattgtaaaagtctctgacgggaagttctatagtacatcaatggtgacgatcatggttaaagaggcgatggattccggactgcattttactcaatcattctatagcacaagtatcagcgaaaataacaccaacatcacaaaagtggcaattgtgaatgcagtcgggaaccgcctcaacgagcctctcaagtacagcatcctcaatcctggaaataagtttaagatcaagagcactagtggcgttattcagacaaccggcgtgcctttcgacagagaggagcaggagctgtatgaactagttgttgaggcgagcagagaactggatcatttgagggtcgcaagggtggtggtcagagtgaatatagaggacatcaatgataatagccccgttttcgtcggactcccatactatgcagccgtgcaggtggacgccgaacccggcacgttaatttaccaagtcactgctatcgacaaagacaaaggccccaacggtgaggttacatacgtcctccaagatgactacggacattttgagatcaatccaaattctggcaatgtcatattgaaggaggcctttaactctgatttgagcaatatagaatacggcgtgaccattctggctaaagatggcggcaaaccttcgctatctacctctgttgaactgcccatcaccatcgtgaacaaagccatgccagttttcgacaagccattttacacggcctcggtgaacgaggatatacggatgaatacgcctatcctctctatcaatgcaacatccccggagggccagggcatcatctacatcataatcgacggcgaccccttcaaacagttcaatatcgactttgacacgggagtgcttaaggtggtctctcctctggattacgaggttacttccgcttataaacttacaatacgagcctccgacgccctgaccggagcacgggcagaagtgacggtggacctgctggttaacgacgtcaatgacaacccccctatttttgaccagcccacctataacaccacactgtccgaagctagcttgattgggacacctgtgcttcaggtggtgtctatcgacgctgacagcgagaataataagatggtgcactatcaaatcgtccaggatacttataactccaccgattacttccatattgatagctcctcaggactgatactgaccgcaaggatgctggatcacgagctggtgcagcactgcactctgaaagtgaggtctatcgactcgggttttccgtccctgtcctccgaagtgctggttcacatctatataagcgacgtcaatgataacccaccagtcttcaaccagcttatttacgaatcttacgtctccgaacttgcaccgcgcggacattttgtcacctgcgtgcaagcctctgatgctgattcttccgacttcgaccgactcgagtacagcatcctaagtgggaacgacaggacatccttcctgatggactcaaagtctggcgtcataacattaagcaatcacaggaagcagagaatggagcccctgtattccctcaacgtcagtgtctctgacggcctgttcacaagtactgcccaagttcacatccgcgtgttgggcgccaatctgtattcccccgctttttcccagagcacctatgtggccgaagtacgcgaaaatgtggctgccgggacaaaggtcattcacgtgcgagccactgatggcgaccccgggacctacggtcagatctcttatgcgattatcaacgactttgccaaagataggttcctgatcgatagcaatggacaagtgataactaccgagcgacttgaccgggaaaatcctctcgagggcgatgtgagcatatttgtgagagccctcgacggaggtggccgaacaacgttttgcactgtcagagtgatcgttgtggacgagaatgacaatgctccacagttcatgactgtggagtatagggcttcggtgcgcgcagatgtgggccggggacatctggtaacacaggtgcaggcaatagatcccgacgacggtgcaaacagccggatcacttacagcctctatagcgaggcctctgtaagcgtggccgatctcttggagattgatcccgacaacggctggatggtgaccaagggaaattttaatcagcttaaaaacacggtgctgtcttttttcgtcaaagcggtggacggggggatcccagtcaagcatagcctgattccagtctatatacacgtgttaccccccgaaacgttcctcccctccttcacacaatcccagtacagctttacaattgctgaggatacggctatcgggtcaactgttgacacattgcgaatcttgccatctcagaatgtgtggttttctaccgtgaacggcgagagaccagagaataacaaagggggcattttcgttatagagcaggagacaggcacgatcaaactggacaaaagacttgaccgggaaacctctcccgcatttcactttaaggtggcggccacaatccctctggataaagtggatatagtgtttacggtggatgtcgacattaaggtgttggatctgaatgacaacaagccggtgtttgagacatcaagttatgacacaatcatcatggaggggatgcccgtcggcaccaaactcacccaggtgcgggctatcgatatggattggggagctaacgggcaggtgacttattccctccactccgatagtcaaccggaaaaagtcatggaagcattcaatattgattctaacactggctggattagtacactcaaggatctggatcatgaaactgacccaacctttaccttctctgtggtggcgtcggacctgggggaagcatttagcctgagctctacagctttagtctccgtacgcgtgacagacattaacgacaatgcccctgttttcgcacaggaggtttaccgagggaatgtcaaagagtctgacccacccggggaggtcgtggccgtgctcagtacttgggaccgcgacacctcagacgtcaatcgccaggtcagttaccacataacagggggaaatccccgggggaggtttgccctgggcttagtccagtctgaatggaaagtgtacgttaagcggccactggatagggaggaacaggacatctacttcctgaacattacagctaccgatgggttgtttgttacacaagcaatggtggaggtttcagtgagtgacgtgaatgacaattcccccgtgtgcgaccaggtcgcatacactgccttgttgccggaggacataccctcaaataagatcatccttaaggtgtccgcaaaagacgccgatataggctccaatggctacattaggtacagtctgtacggtagcgggaacagcgaattctttcttgatcctgaatctggggagttgaaaaccttggccctactcgatagagagagaattcctgtgtatagtctgatggccaaggccacagatgggggtggccgtttttgccagagcaatattcatttgattctggaagacgtcaatgacaaccctcctgtctttagctcagatcattacaacacctgcgtttatgaaaatactgccactaaggcgctgctgacccgcgtccaagcggttgaccccgatatcggcattaacaggaaagtggtttactctctcgccgattccgccggtggagtttttagtatcgactcaagcagcggcatcattatcttggaacagcctctcgatcgggagcagcagtcgtcctataacatcagtgtgagggcaaccgatcagagtccaggccagagcctgtcctccctcaccactgtgaccatcacagtgctggacattaatgacaatccccccgttttcgaacggcgcgactatctggtgaccgtccccgaggacactagtcctgggactcaggtactggctgttttcgccacttccaaggatattggtaccaacgccgagatcacttatctgattcggagcggtaatgaacagggcaagtttaaaattaatcccaaaacaggcggcatctctgtgtcggaggttctggattatgaactgtgcaagagattctacctggtggtggaggcgaaagatggtggcacacccgccctgagtgccgtggccaccgtgaacatcaacctgaccgatgtgaacgacaacccacccaaatttagtcaagatgtctacagcgccgtaatatccgaagacgcccttgtgggcgactctgtcattctgctgatcgcagaagatgtggactcgcaacccaatggtcaaattcatttcagtattgtgaacggcgatagagacaatgaatttaccgtggatcccgtgttgggattggtgaaggttaaaaaaaaactagatagagagcgggtctctggttatagtctgctggtgcaagctgtcgattccggaatccccgccatgagctccacagcaactgtcaatattgatataagtgacgttaacgataactctcccgtgttcacacctgctaactatactgcggtgatccaggagaataagcccgttgggacaagcatcctgcaactcgtggtgacggacagagactctttccacaatgggcccccattttctttttccatcctgagcggtaacgaagaggaagagttcgtactggaccctcatggaattctccgtagtgctgtcgtgttccagcacacggaatccctggagtatgtgttgtgtgtgcaggccaaagactccgggaaaccccagcaggtttcgcatacatatatccgagtgagagtgatcgaggaaagcacccataagccgactgcaatacccctggaaatcttcatagtgacaatggaagatgactttcccggaggcgtgatagggaagatccacgcaaccgatcaagatatgtacgacgtgcttacgtttgccttaaagtccgagcagaagagtctgtttaaggtcaatagccacgatggcaagatcattgcactgggtggacttgattctggaaagtacgtgctaaacgtgagtgtgtccgacgggagatttcaggtgcccatcgacgtcgtggtccacgtggagcagctcgtccatgaaatgctgcagaataccgttactatccgcttcgaaaacgtctcccccgaagactttgtcgggctgcacatgcacggcttcaggcgcacactccggaacgcggtgttaacccagaaacaggactcgttgcgtattatctctatccagccggtcgccgggaccaaccagctggatatgttgtttgcagtcgaaatgcactcgtctgaattttacaaacccgcgtacctaatccagaagctgtcaaatgccaggaggcatcttgagaatataatgcggatatcagctatcttagaaaagaactgtagcggtctggactgtcaggaacagcactgcgagcagggcctgagtctggattcgcacgcacttatgacatattccacagctagaatcagctttgtctgtcctcggttttatagaaacgttcggtgtacctgcaacggcggcctgtgtccaggttccaacgatccctgtgtcgagaagccctgccctggggacatgcagtgtgtatcttatgaggcatcccgtagacctttcctctgccagtgccctcctgggaaattgggcgagtgttcgggtcatacttctctgtcctttgccggtaattcctatataaaatataggctctccgaaaacagtaaggaggaggattttaaactggcactcaggctgcgcaccctgcagtcaaacggcatcattatgtacacaagggctaacccctgcattatcctcaaaatagtggacggaaaactgtggtttcagctggactgcggctcgggccccgggattctgggtatttcaggccgcgctgtgaacgacggatcctggcattcagtctttttggagctaaaccggaactttacatccctcagcctagatgactcttatgtggagcgtcgtagagcccccctctattttcaaaccctgtcaactgagtcttctatttattttggcgccctggtgcaggctgacaatattcgctccctcacagacactagagtcacacaggtattgtcaggtttccagggctgtctggacagcgtaattttaaacaacaacgagctgccccttcagaacaagagatcttcattcgctgaggttgtgggtctcacggagctcaagttaggatgtgtgctgtacccagacgcttgtaagcggagcccgtgtcagcatggaggctcctgcaccggtctgccatccggcgggtaccagtgtacatgtctaagtcagttcactgggcggaattgcgagtccgaaatcaccgcatgcttccctaacccctgccggaatggcggctcatgcgacccgatcggaaacacgttcatatgtaattgcaaggccggtttgaccggcgtgacatgcgaagaagatattaatgagtgtgaacgggaggagtgtgaaaatggaggctcttgtgtgaacgtgttcggtagcttcttgtgcaactgcaccccggggtacgtgggccaatactgcggtctgcggcccgtggtggttcccaacatccaagccggacactcgtatgttgggaaggaggaattgatcggaatcgctgtggtcttattcgttatatttatcctggtagtgctgttcattgttttccgaaagaaggtgtttcggaagaactacagtcgaaataatatcacgctggtgcaggatccagccaccgcagcccttctgaacaagtccaacggaatcccctttaggaacttgcgcggttctggagatgggaggaacgtgtaccaggaagtggggccgccccaagtacctgtgcgacccatggcatacacgccgtgcttccagagtgattcaaggtccaatcttgataagattgtggacggcctcggaggggaacatcaggaaatgaccacttttcacccagaatccccacgtatactgacagcacgacggggagtggtggtctgttcagtggcacccaatctgccagccgtgtcgccttgtaggtctgactgcgactccatcagaaagaacggctgggatgccggaacagaaaacaaaggcgtggatgatccaggagaggttacgtgtttcgccggttctaataaaggcagcaattctgaggtccagtctctgtcttcctttcagagtgactcaggagatgataacgcatcaatcgtgacggtcattcaactggtgaataatgtcgtggacaccatcgagaatgaagtctcggtgatggaccagggacagaattataaccgtgcctaccactgggatacctccgattggatgcccggtgcacgcctttctgacattgaggaggttcccaactatgagaaccaggatggtgggtcggcacaccagggttctactagggaactggagtccgattactatcttggaggttacgacatagatagtgagtaccccccgcctcatgaagaggaattcctgagtcaggatcagctcccaccaccgctgcccgaagactttcccgaccaatacgaggcgctgccccccagccagcccgtgagcctcgcttccaccctgagccctgactgtcgaagaaggccccagtttcatccttcccagtatctaccaccacaccctttccctaacgaaacagatttagtcggccctccagcctcttgcgagttttcgacctttgccgtctcgatgaaccagggcaccgaacccacaggccctgccgactccgtgtcattatccctgcacaactcccgcggtaccagttcctctgacgtgtcagccaattgtgggtttgacgattctgaagttgctatgagtgactacgagtctgtcggtgaactatcacttgcctctctccatattccgtttgttgaaacccagcaccagacccaggtctag

SEQ ID NO: 116712 - DNA, 13674 bp, synthetic construct
  misc_feature 1..13674: note = Description of Artificial Sequence: Synthetic coding sequence
  source 1..13674: mol_type = other DNA
atggacatcattatggggcattgtgtggggactcgtccccctgcttgctgcctcatactgctactgttcaaactgttggctaccgtctcccagggcttgcctggtacgggaccgcttgggttccatttcacacactctatctacaacgccaccgtgtatgaaaactctgccgcaaggacctacgtcaacagccagtcccgcatgggaatcaccctgatcgacttaagttgggatattaagtatcgaatcgttagcggagacgaggaaggattctttaaagcggaagaggtaattatcgccgacttctgctttctgcggatccgaacaaaaggcgggaattcagcaatcctcaatcgcgagatccaggacaattatctgttgatcgtcaaggggagcgtgcgaggcgaggatctggaagcctggaccaaagttaatatacaggttctggacatgaacgacctgcgccccctgttcagcccaaccacctatagtgttactattgccgaatcgacacctctccggacttccgtggctcaggtaacagccaccgatgccgatatcgggagcaatggggagttttactactattttaaaaacaaagtggacctgttttcggttcatccaacttccggagtcataagcctgagcgggcgtctgaattacgacgagaaaaatagatatgaccttgaaatactcgcggtcgatcgcggtatgaagttatatgggaacaatggagtcagcagtacagctaagctgtatgtccatatagaaaggattaatgaacatgcaccaacgattcacgtcgtgacacacgtgccatttagcttggaaaaagagcctacctacgcggtcgtcaccgttgacgacctagacgacggtgcaaatggcgagatcgaatcggtgtcaattgtggcgggagatcccctagatcagttcttcctcgccaaagagggtaagtggctcaacgagtataaaatcaaggaaaggaagcagatcgactgggaaagttttccctatggttacaatctaactttacaagccaaagacaaaggcagcccacaaaaatgcagtgccctgaaggctgtgtacatcgggaacccaaccagagatacagtgcctatacgtttcgagaaagaagtgtatgacgttagcatatctgagttctcgccaccaggcgtcgtggtggccatagtaaagctgtcccctgagcccattgacgtggaatacaaattgagccccggagaagacgccgtctacttcaaaataaaccctcgtagcgggctgatcgtgacggcgcgccctctgaacaccgtgaagaaagaggtgtataagctcgaggtcacaaacaaagaaggagatctaaaggcccaagttaccatcagcatcgaagatgccaatgatcacactcctgaatttcaacaacccctgtacgacgcctatgtgaacgagtcggtaccagtcggaacttcagtgctgaccgtatctgcttcagacaaagataagggagaaaacggttatattacctactcaattgccagcctgaatctcctgcctttcgtcattaatcagttcaccggcgtgatatctacaacagaagaactggacttcgaaagtagcccagagatatatcgatttatcgtccgcgcttccgattggggtagtccttatcgacacgaaagtgaggtcaacgttaccatccggattggcaacgtgaatgacaacagtcccttgtttgagaaggtagcatgtcagggagtgattagctacgactttcctgtgggagggcacatcaccgctgtgagcgctattgacatcgatgagctcgagttggtgaaatataaaattattagtgggaatgaactcggctttttctatttgaatcccgactccggggtgcttcaactgaaaaagagtctcacaaactctggtattaagaacggtaactttgctttacgaataaccgctaccgatggggaaaaccttgctgatccaatgtcgatcaacatttccgtcctgcacggtaaggtgagttctaaatcattcagttgtcgagagactagagtcgcccaaaaactggcagagaagttacttattaaggcgaaggcaaacgggaagctcaacctggaagatggatttctggacttttatagcatcaaccgccaggggccgtatttcgacaagagcttcccatcagatgtggccgtgaaagaagacctgcctgtaggcgcaaacatcctgaagatcaaagcgtacgatgccgacagtggattcaacggcaaagtactgttcacaatctcagacgggaataccgattcatgcttcaacatcgatatggagacagggcagctgaaagtcttgatgccgatggatagagagcacaccgatctgtacctgctaaacatcacgatttatgacctgggaaatccacagaaatccagctggcgcttactcacaattaacgtagaggatgcaaacgacaatagccctgtatttatacaggacagctactcagtgaacattctcgaaagttcaggaattgggaccgaaataatccaggtagaagcaagagacaaggatcttggcagtaatggcgaagtgacttactccgtgttaactgatacacagcagtttgccatcaacagtagcaccgggattgtttacgtggccgaccagctggatagagaatctaaagcaaactactccctcaaaattgaggcccgcgataaagccgagtcaggacagcagctctttagcgtcgtaacgcttaaggtgtttcttgatgatgtgaacgactgctcccccgctttcataccctcatcttactcagtaaaagtgctggaggatctccccgtgggtaccgtcatcgcttggctcgaaacgcatgaccctgatctaggcttgggcggccaggtgcgctacagcctggtcaatgactacaacggcaggttcgagatcgacaaagcctcaggagccatccgcctcagtaaagagctggattacgagaaacagcagttttataacctaactgtgagagccaaagataagggccgcccggtaagcttgtcttccgtttccttcgtggaagtggaggtggtcgacgtcaacgagaacctgcataccccttacttccccgactttgccgtcgtggggagcgtgaaagagaacagccgaatcggcacatcggtattacaagtaacggcgcgcgacgaggacagcggcagagacggtgaaatacagtacagcatacgcgacggcagcggcctgggcaggttttccatcgacgatgagagcggtgtcattaccgccgctgacatcctggatcgggaaacaatgggctcttattggctcactgtctatgccaccgatcggggcgtggtgcccctctactccacaattgaggtgtatatcgaggttgaggatgtgaatgataacgccccgctcacgtcggaacccatctactatcccgttgtgatggagaatagtcccaaggacgtctccgttattcagattcaggcagaggacccagacagttcgagcaacgagaaactcacctatcggatcacatccggcaatccacagaactttttcgccatcaacatcaaaaccggattaatcaccaccaccagcagaaaactagatcgcgaacaacaggccgaacatttcctggaagtcaccgtgaccgatgggggcccaagcccgaagcagtcaaccatttgggtggtggtgcaagtgctggatgagaatgacaataaaccccagtttcccgaaaaggtctatcagattaagctacctgagcgagatcggaagaaaagaggggaaccaatttacagagctttcgctttcgatcgcgacgaaggccctaacgcagagattagttatagtatcgtcgacggaaacgatgacggcaaattctttatcgacccaaagacgggtatggtgtcatctaggaagcagttcacagccggctcttacgatatcttgacaatcaaggccgtagacaatggccggcctcagaaatctagtaccgctcgacttcacatcgaatggattaagaaaccaccgccaagtcctatcccactcacattcgacgagccattctataacttcacagtcatggaaagtgaccgagtgacggagatcgtgggggtcgtctccgtgcagcccgcaaatacacctttgtggttcgatatagttggaggcaacttcgactccgccttcgacgcagaaaagggagtggggacaattgtgatcgctaaaccactggacgcggagcagcggtccatttataatatgagtgtggaagtcacagacggtactaacgtcgccgtgactcaggtctttattaaggtgttggataacaacgacaatggcccagaattttcccagcccaattatgacgttacaatcagcgaggacgtgcttcctgacactgagatactgcagatcgaagccactgatcgggacgagaaacacaagctgagttacacagttcactcttccatagatagtatcagcatgcgcaaattccgaattgatcccagcacaggggtcctttacacagcagaacgactagaccacgaagcccaggataaacatatcctgaacataatggtgcgggatcaagagttcccttaccgccgcaacttggctcgggtaatcgtaaacgtcgaagatgccaacgaccattccccttactttacaaatcctctttacgaagcatcagtgtttgagtccgctgccctgggatcagcggtgctacaggtgaccgccctggataaggataaaggggaaaacgcagaactgatttatacgattgaggccggcaatactggcaatatgtttaaaatcgagccagtcctgggaattatcactatttgtaaggagcccgatatgacgaccatgggccagttcgtactctcgatcaaggtgacagatcagggtagtcctccgatgagtgccactgccatcgtcagaatctccgtgaccatgtcagataactcacatcctaaattcattcacaaggactatcaagcagaggtgaatgaaaatgtggacattgggaccagtgtgattctgatttcagctatctctcagagtacgctaatttacgaagtgaaagatggtgatattaatgggatttttaccataaatccatactcaggggttattacaacccagaaggctctcgactacgagagaaccagctcctaccagctcattattcaggctaccaacatggctggcatggcctccaacgcaactgtgaatatacagatcgttgacgaaaacgataacgcccctgtctttttattctctcagtactcgggaagtctgagcgaagctgctccgattaatagcatcgtgagaagccttgacaattccccacttgttatccgcgccaccgatgccgattccaatcgtaacgctttgttagtctaccagattgtcgagagcactgcaaaaaagttcttcaccgtggactcttctaccggggccatccgcactatcgccaacttggatcacgaaacgattgcccacttccactttcatgtgcatgtcagggactctggatctccacagctgaccgccgaaagcccagtcgaagtgaatatcgaggtgactgatgtcaacgacaacccaccagtttttacgcaagccgtgtttgagaccatcctcctgctgccaacttacgtaggagtggaagttttgaaggtgagcgcgacagatcccgactctgaggtgcccccagaacttacatatagtctgatggaaggatccttagaccacttcctcatcgatagcaattccggcgtcctcaccatcaagaacaacaacttaagtaaggaccactacatgctgatcgtcaaggtgtccgatggtaagttctacagcaccagcatggtgactatcatggtgaaagaagccatggatagtggactccacttcacccagtctttttactcaacttccatttctgagaacaacacaaatatcacaaaggtggctattgtcaacgcagtcggtaatcgcttaaacgagccactgaaatattcgatcctgaacccaggcaataagtttaagatcaaatcaacttccggggtcatccagaccacaggagttccctttgatcgggaagagcaggagctgtatgaactcgtggtcgaagcctccagggagctcgatcacctacgcgttgcccgggtagtcgtaagggtaaacattgaagatatcaatgacaatagtcccgtctttgtagggcttccctattacgcagccgttcaggtggatgcggagcccggcactcttatctatcaggtgactgcaatcgacaaggacaagggccctaacggcgaggtgacgtacgtgttgcaggatgattacggacactttgagattaaccctaattctgggaatgtcatactgaaagaggcgttcaattctgatttaagcaacatcgagtatggtgtcacaattcttgctaaagatgggggcaaaccctctctgagcacttccgtggaactaccaatcaccatcgttaataaagctatgccagtctttgacaaaccattttatactgcaagtgttaatgaggacattcgaatgaatacacccatcctctccataaacgcaacaagccccgaaggacaggggattatctacattataatcgacggggatccctttaagcaattcaacatagacttcgacaccggcgtcctgaaggtagtgtcgccacttgactatgaagttacttccgcatataaattgaccatcagagcatccgacgcgcttacaggggccagagctgaagtcactgtggatctcctcgtcaacgatgtgaacgataaccccccaatatttgatcagccgacatataacaccaccctgagtgaggcttcccttattggaacccccgtcctgcaggtagtgagtatcgacgccgactccgagaacaataaaatggtacattaccagatagtccaggacacatataattccactgattattttcacattgacagtagctcagggctgattctcacagcccggatgctggatcatgaactagtacaacactgcaccctgaaggtgaggtcgatagactctggctttccatccctctcctccgaagtcctggtgcatatatatataagcgacgtgaatgataacccgccggtttttaatcagctcatttatgagtcttatgtgagcgagctggcaccacggggccatttcgtgacttgcgtacaagcctccgatgccgactcctccgactttgatcgcctggagtactctatcttgtcaggaaatgacagaacaagtttccttatggactcgaaatcgggagtgataaccctgtctaaccacaggaagcagcgcatggagccgttgtactcgctaaacgtttctgttagtgatggtctgttcaccagtacagcacaggtccacatcagagttctgggagcgaacttatattctccagccttcagtcagagtacttacgttgccgaagtaagggagaatgtcgccgccggaaccaaggtgatccacgtcagagcaactgacggagaccccgggacatacggacaaatctcgtacgctataattaacgattttgctaaggatcgctttttgatcgatagtaacggtcaggtgataacaactgagagactggatagggagaaccctctagaaggtgatgtgagcatattcgtgcgggctttagatggaggcgggaggaccactttctgcaccgtaagggttatcgtcgtggacgaaaacgacaacgcgccacagttcatgacagtggaatacagggcctccgttcgggcagatgtaggtcggggacatctagttacacaagtgcaggctattgatcctgacgatggggcaaacagtcgcataacgtatagcttatactccgaagcctctgtttctgtggccgatcttctggagattgatcctgataacggttggatggtaacaaagggcaatttcaaccagctgaagaataccgtactgtctttttttgttaaagcagtagatggcggaattccagtaaaacattctctgatcccagtttacattcatgttctgcctccagaaacctttctgccttcttttacacagagtcagtatagtttcaccatcgctgaggatactgctataggttctacggtagacacgttgcggattctcccaagccagaatgtgtggtttagcaccgtgaacggtgagcgccccgagaacaataagggcggcatcttcgtcattgaacaggagactggaacaattaagctggacaaacgtctggaccgcgagacatcccctgcttttcacttcaaagtggctgccactataccactggacaaggttgacatagtgttcacagtggatgttgatatcaaggtcctcgacctcaatgataacaagcccgtttttgagacctccagttacgatacgatcattatggaaggaatgcctgtaggcaccaagcttacccaggttcgcgccatcgacatggactggggcgctaatgggcaggtcacctattcactccactccgacagtcaacctgagaaagtgatggaggcttttaatatcgactcaaatacaggatggattagtaccctcaaggacctggaccacgagacggatccaacattcacgtttagtgtggtcgcgagtgacctgggagaggccttctcattgagctcaactgctctcgtgtctgtgcgcgttacagatatcaacgataacgcccctgttttcgcccaggaagtgtaccggggtaacgtgaaagaaagcgatcctccaggggaggtcgttgcggtactatctacttgggatcgggatacaagcgacgttaatcggcaggtttcgtaccatattaccgggggaaatccacgcggcagattcgcacttggactggtgcagtccgaatggaaggtttatgtgaaacggcctctggatcgcgaggagcaagacatatactttctaaacatcactgcaactgatggcctgtttgtgactcaggcaatggtggaggtgagcgtaagtgatgtcaacgataacagcccagtttgtgatcaggtggcttacaccgccttgttgcccgaagatatacccagcaataagatcattctgaaggtgtccgcgaaggacgccgatatcgggagcaacgggtacatcagatacagcctctatggaagcggtaattcagaatttttcctcgatcccgagtcgggtgaacttaagacattggccttgctggatagggagcgtatacccgtgtactccctgatggctaaagccacagacggagggggacgtttttgccaatctaatattcatctgatcctcgaggatgtaaatgacaaccctcccgtgttcagctctgatcattacaatacttgtgtgtacgagaacaccgccaccaaggcactgctgacccgcgtgcaagcagtagatccggatattggaattaatcggaaagtagtatactccctggctgattccgccggaggcgtattcagcatcgacagctccagcgggatcatcatactggaacaacccctggacagagagcagcagagcagttataacattagcgtaagggcaaccgatcaaagtcctggtcaaagtctctccagtttgacaacagtcacaatcaccgttcttgatatcaacgataaccctcctgtgtttgaacgtagggattacttggtgaccgtccccgaagacaccagtcccgggacccaggttttagcagttttcgctacctccaaggacattggaacaaatgccgagatcacttacctcattcgttccgggaacgaacaggggaaattcaaaatcaaccccaagaccggagggatatctgtctctgaagtgctggactatgaactctgcaaaaggttttatctggtcgtagaggctaaggacgggggaactccagccctcagcgccgtcgcaaccgttaacatcaacctgacagacgtcaacgacaatccccccaagttcagtcaagacgtgtatagtgccgttatcagcgaggatgccctagtgggcgattccgtgattctgctgattgccgaggatgtcgactcccaacccaacggtcagattcactttagcattgtcaatggtgatcgcgataatgagttcaccgttgaccccgtcttaggacttgtaaaggtcaagaaaaagctcgatcgggagagagtctccggttacagcctcctcgtgcaagcggtagattccggaattccggccatgtcctctaccgctaccgtgaatattgacatctccgacgtgaacgacaattcacctgtgttcacccccgcaaactatactgctgttatccaggaaaataaacctgtgggcacttcgatactgcaattggtggtgacggatcgggattctttccacaatggcccgcccttttccttcagtatactgagtggtaatgaagaagaagagtttgtgctggacccacacggtatcctgagaagcgctgtggtcttccaacatacggagagtctcgagtatgtcctctgtgtgcaggccaaagactcaggtaaaccacagcaggtctcacacacgtatatcagggtcagggtcatagaggagtccacccataaacctactgcgatacctttggagatcttcattgtgaccatggaggacgacttcccgggcggagtgatcggaaagatccacgccaccgatcaggatatgtacgacgtgcttacatttgcattgaagagcgagcagaagtctctgttcaaggttaatagccacgacgggaagatcatagccctcggtggtttggatagtggtaaatacgtcctgaacgtgagcgtctctgacggccgcttccaagtgcccattgacgtagtagtccacgtggagcagcttgtgcacgaaatgctgcagaacactgtcactataaggtttgagaacgtctctccagaagatttcgtaggtcttcacatgcacggctttcgtagaaccctaagaaatgccgtgctgacacagaaacaggattctctgaggattatctctattcagccagtggctggcactaaccagctggacatgctgtttgcagtggagatgcacagcagtgagttctataaaccagcatacctgatccaaaaactgtctaatgcaaggagacatctggagaacatcatgcgtattagcgccattctggagaagaactgctctggccttgattgccaggagcagcattgcgagcagggcctctcccttgacagccacgctctcatgacatactctactgctaggattagcttcgtctgccccagattctatcggaatgtgcgctgtacctgtaatggcggcctgtgtccaggaagtaatgacccctgcgtggagaagccatgtcccggtgacatgcagtgtgtgagctacgaggcgtcaagaagaccttttctctgccagtgcccccctggtaaacttggggagtgtagcggacacacttcactgtccttcgctggcaatagctacattaaataccgtttgtcagaaaactctaaagaagaggattttaagctggccctgagactcaggacccttcagagcaacggcattattatgtacacgagggcaaacccatgcattatactgaagatcgtcgacgggaagctgtggtttcagctggactgtggctccggacctggtatactgggaatctccggaagggccgtcaatgatgggtcctggcatagtgtatttctagagctgaatcgtaacttcacctccctgagcctggatgacagttacgtggaaaggcgccgagccccactctactttcagaccctttctactgagtcctccatctactttggagctctcgtacaggcggataatataaggagtcttaccgacactagggttactcaggtgctcagcggctttcagggctgtcttgatagcgtgatcctcaacaataatgagctcccactccagaacaaacggagctccttcgctgaagtggtaggccttacagagctaaaactagggtgtgtcctttatcctgatgcctgtaaaagaagtccctgccagcatgggggcagttgtacaggccttccaagtgggggctatcagtgcacgtgtttgtctcagtttactggcaggaactgcgagtctgagatcaccgcctgtttccccaatccctgccgaaatggcggctcttgcgatcctatcgggaacactttcatctgtaactgtaaggccgggctcacaggcgtcacttgcgaggaagatattaacgagtgtgaaagagaggagtgcgagaatgggggatcatgcgtgaatgtgtttggcagttttctgtgtaactgtactcccgggtacgtgggtcaatactgcggcttgagacctgtggtggtacccaacatccaagccgggcacagctacgttggcaaggaagagttgatcggaatcgcggtcgtgctctttgttatcttcatcctcgtggtgttgttcatagtgttccggaaaaaggtgtttcggaagaactatagtaggaataacataacactggttcaggatccagccacagctgctctgctgaacaaatctaatggtattcctttccgcaatctcagaggatcaggtgatggcaggaacgtgtaccaggaggtaggccccccccaggtgcctgtccgacctatggcttatacaccctgctttcaaagcgacagcagatccaacctcgacaaaatcgttgacggtctgggaggagagcatcaggaaatgaccacattccatcctgagtcaccaaggattcttaccgcccgacgaggcgtggtagtttgcagtgtcgcccccaatctgccagccgtcagtccctgtcgatccgattgtgacagcatccgtaagaatggatgggatgccggaacagaaaacaagggcgtggacgaccctggcgaggtgacttgctttgcaggatcaaataagggctctaacagcgaggtccagagtctgtcctcattccaatcagactctggcgatgataacgcctaccattgggacacaagtgattggatgcccggggctagactgagcgatatcgaagaggtgcccaattacgaaaatcaggacggaggatcagcccatcaggggtcaacccgggaactcgagtcagattactacttgggagggtacgacatcgactctgagtacccacccccgcacgaggaggagtttctgtctcaggaccagttgcctccacctctgcctgaggatttcccagatcagtacgaagcactgccacctagccagcccgtatcattggctagtaccctatcgcccgactgcaggaggcgtcctcagttccacccgagtcagtacctcccccctcacccattcccgaacgagacagacctcgtaggaccacctgcctcttgtgagttcagtacctttgcggtctccatgaaccagggcacagagcctaccggcccagccgatagcgttagtctgtcattgcacaattctcggggaacatcctcctcagacgtttctgcgaattgcgggtttgatgacagcgaggttgccatgagtgattacgagtcggtgggagagctctcccttgcatccttgcacatccccttcgttgaaacacagcaccagacccaggtatag

SEQ ID NO: 116713 - DNA, 3765 bp, synthetic construct
  misc_feature 1..3765: note = Description of Artificial Sequence: Synthetic coding sequence
  source 1..3765: mol_type = other DNA
atggatattatcatggggcactgtgtgggcactcggccacctgcctgctgcttgattttgctgctgtttaagttgttagctaccgtgagccagggattaccagggaccggtcctctgggatttcactttacacacagtatatataacgccaccgtttatgagaattctgcagctagaacatacgtcaactctcagtctaggatggggattacattgattgacctaagctgggatatcaagtataggattgtgagcggagatgaagaaggattctttaaagccgaggaggtgattatcgccgacttctgcttcctgagaattcgcaccaaaggtggcaacagcgccattctgaacagagagattcaggacaattatctcctgatcgttaaaggttcagtgaggggggaggatctcgaggcttggactaaagtgaatatccaggtcctggacatgaacgatctaagacccctattctctccgaccacatacagcgtcaccattgcagagagcacgccacttcggaccagcgttgcacaggttactgcgaccgacgccgacatcgggagcaatggcgaattctactactacttcaaaaataaggttgatttgtttagtgttcatcctacgtctggagtaatatccttgagcgggcgtctgaattatgacgaaaaaaaccgctacgaccttgagatactggccgtagatcggggtatgaagctttatggtaataatggagtctctagtacagccaagttgtatgtgcacattgaacggataaatgagcatgccccaaccattcacgttgtgacacatgttccattctcgttggaaaaggagcccacctacgcggtggtcacagtcgatgacctggacgatggagccaatggagaaatagaaagcgtaagcatagtggccggggatcctctggatcagtttttcctcgcgaaagagggtaagtggttgaatgagtacaagatcaaagaaaggaaacagattgattgggagagcttcccctacgggtataacttaactctccaggctaaggacaaggggagcccacagaaatgctctgctctcaaggcagtatatattggcaatcccacaagggacacagttccgatccgtttcgagaaggaggtgtacgatgtaagtatctccgaattttccccccctggcgtggtggtggcaattgtcaaactgagcccggagcccattgatgtcgagtacaagctgtcaccaggtgaggacgcggtatactttaaaatcaaccctcgcagcggtctgatagtgacagctcgacccctcaacacagtaaagaaggaagtgtacaaactggaggtcactaataaagaaggcgacttaaaggcccaagtaaccatctccattgaagacgctaacgaccatacacccgaattccagcagcctctgtacgatgcatatgtgaacgaaagcgtccctgtgggcactagcgttctaactgtatctgctagtgacaaagacaaaggggaaaatgggtatattacttatagcatcgcttctcttaatctgcttccttttgtgatcaatcagtttaccggagtgatctcaacaaccgaggagctggattttgagagcagtcccgagatatatagattcattgtgcgcgcttccgattggggcagtccttataggcacgagtctgaggtgaatgtgacaatccggatcgggaacgtgaatgacaacagtccgctttttgagaaggtcgcctgccagggcgttattagttacgacttccctgttggaggacatatcactgccgtgtccgcaatcgacattgacgaattggagctcgtgaagtataagataatttcaggcaatgaactggggttcttttaccttaacccggatagtggcgtgctgcagctgaagaaaagtctgacaaattcgggcataaagaacgggaattttgctctccgaataaccgcaaccgacggggagaacttagccgatccaatgagcattaatatctcggtcttacatggtaaagtgtcatccaagtctttctcttgtagggagacaagagtcgcccagaagctcgctgaaaagctgttgatcaaggcaaaagcgaatggtaaattgaacctcgaggatggctttctggacttttattccattaaccgtcagggaccttattttgacaaatccttcccctccgacgtggcggtaaaagaagacctgccagtcggggccaacattcttaagattaaggcctacgatgcagacagtggctttaacggcaaagtactgtttactatttccgacgggaacactgactcgtgctttaatatagacatggagacaggccagttgaaggtccttatgcccatggatcgcgaacacaccgacctgtacctactgaacatcacaatctacgatcttggcaacccccagaaaagctcctggcgtctcctgacaataaacgtcgaggacgctaatgataactccccggtattcattcaggattcttatagcgtgaacatcctagagtctagcggcatcggaaccgaaatcatccaggtggaagcccgagataaagatcttgggtctaatggagaagttacgtactccgtcctgacagacacacagcagtttgctatcaattcctcaaccggaatcgtgtatgtggccgatcaactggaccgggaaagtaaggcgaactacagcctgaaaatcgaagcacgggataaggcagaatcaggccagcaactgttttccgtggtgaccctgaaggtcttcttagatgatgtgaacgactgctcccccgccttcatccccagtagttatagcgtgaaagttctggaagacctgcctgtgggcacggtcattgcgtggttagaaacgcacgaccctgacctcggccttggagggcaggtgcgctactctctcgtcaacgattacaacggccgctttgagattgacaaagctagcggagccattcgactgagtaaagagctggactacgagaagcagcagttctacaacctcacagtcagggcaaaagacaaagggagaccggtgagcctctcatccgtatcctttgtggaggtcgaggtcgttgatgttaacgagaatctgcatacaccctatttccctgactttgccgtggtaggttcagtgaaagagaactcccggattggtacgagtgtcctgcaagtgactgcccgcgatgaggacagtgggagggatggagagattcagtactccatccgcgacggctccggactgggtcgcttctcaatcgacgatgaatccggagtgattaccgccgctgacatcctggacagagagacaatgggtagctattggttaactgtctacgcaaccgataggggagtcgtgccgctttactccaccattgaggtttatatcgaggtggaagacgtcaacgacaacgctcctctgactagcgagccgatctattaccctgtggtgatggaaaactcacctaaggatgtgtcagtgattcaaattcaggccgaagacccagactccagcagtaatgaaaagctgacatataggatcacgtcgggcaaccctcagaactttttcgccattaacataaagacaggctcttgtagtgtggcccaggccgggatgcagtggcacgatcactcgagtttacagtcaaggacccctgggttcaagggctatccttgcctgtcacttctctctagctgggactaccgacatgccccaccttgccccgcaacattcctcaacagttag

SEQ ID NO: 116714 - DNA, 9669 bp, synthetic construct
  misc_feature 1..9669: note = Description of Artificial Sequence: Synthetic coding sequence
  source 1..9669: mol_type = other DNA
atggtcaccaccgtcgtggctgttggggacaccttagcacagcccttagcggcagcagaggtatttatcgtggagattaccctgcaggatatcaatgacaatcctccggtcttccctacagacatgctggatctgacagtggaggagaacatcggagacggcagcaagataatgcagctgacagcaatggatgccgacgagggcgccaatgcacttgtgacttatacgataatatctggagcggatgactctttcaggatcgaccctgagtctggagacctgatcgcaacacgcagactggaccgcgagaggcgtagtaagtactccctgctcgtgcgcgctgacgacggtcttcagagctctgacatgagaattaatatcacggtgtccgacgttaatgaccacacgcccaagtttagtcggcccgtgtactccttcgacattccagaggacacaatccccggtagcttggttgccgcaatcttggcaaccgacgacgactctggggtaaacggagagataacatatatcgtgaatgaggacgacgaggatggtatttttttcctgaacccaatcacaggagttttcaacctgacccgtctgctggattatgaggtgcagcaatactacattctgactgtgcgagccgaagatggcggtggacaattcacaactatccgcgtctattttaacatcctggatgtcaacgacaacccgccaatctttagtctgaatagttactctacatcgttaatggagaatctgcctgtcggctcaaccgttctggtgttcaatgtgacagacgcagacgacggcatcaattctcagctcacttactccatagcttctggtgacagcctgggccagtttactgtcgataagaacggagttctcaaagttctaaaagccctggacagagagtcccaatccttctacaatctcgtcgtacaggtgcacgatctcccccagatccctgcctctagattcactagtactgcccaagtgtctattatcctgctcgacgttaacgacaacccccccacattcctgagtccaaagctcacctacatcccagaaaacacccctatcgacactgtggtgtttaaggcccaggctactgaccccgattccgggcccaacagctacatcgaatacacccttctgaatcctctcggtaacaaattttctattggtactatcgatggtgaggtgagattgaccggagaactggaccgagaggaggtcagcaactacacactgactgtggttgctaccgataaggggcaaccaagtttgagcagctctacagaggtcgtggtcatggttttagatattaacgacaataaccccatttttgctcaggccctgtacaaggtggagattaatgagaacacgctgaccggtacggatattatccaggtgttcgcagccgatggtgacgaaggtactaatggccaggtgagatacggcattgtgaatggcaacacaaatcaggaattccggatcgattctgtgactggagcaattacagttgcaaagcctctggaccgagaaaagacacccacctatcacctgacagttcaagccaccgatagggggtcaaccccaaggacagacaccagcaccgtgtctatagtgctattagatatcaacgattttgtgcccgtctttgagctcagtccctacagcgtcaatgttccagaaaatctgggaactcttccccggacaattctgcaggtcgtggcacgagacgatgatcgtggctcgaatagcaaattatcatacgtgttgtttggtggcaatgaagacaacgccttcactctgtctgcctctggagaattaggcgtgacacaaagcctcgatagagagaccaaggagagattcgtcctcatgatcaccgccaccgactccggctctcccgctctcactggcactggaacaataaatgtcatagtcgacgacgtgaacgacaacgtgcctacgtttgctagcaaagcctactttaccacaattcccgaggacgcccccaccggaaccgacgttttactggtcaacgcgtctgacgctgacgcgagtaaaaatgcagttatcaggattatcggcggtaattctcagttcaccattaacccatccaccgggcagatcattacgagtgccttgctggaccgagaaactaaagataactacactctggtggtggtgtgcagtgatgcaggttctcccgaaccactcagcagtagcactagtgttctcgtaaccgtgacggatgtcaatgacaaccccccacggtttcagcaccacccctacgtgactcacataccctcccctaccttgcctggttcctttgtgttcgctgttactgtgaccgacgccgacatcgggcccaacagcgagctccattattctctcagcgggcgcaacagcgaaaagtttcacatagacccattaagaggtgccatcatggcagctggccccctgaacggggcatccgaagtgaccttttcggtacacgtcaaggacggaggatcatttccgaagacagattcaaccaccgtcacggtgcggtttgttaataaagccgacttccctaaagtgagggccaaggaacaaacatttatgttccccgaaaaccaacctgtttcatccctcgttaccaccataactgggagctcactgcggggagaacccatgagttattacatcgcgtccgggaacctcggtaatacattccagatcgaccagttgaccggccaggtgtcaatttctcaacctctcgattttgaaaagatccagaaatatgtggtttggattgaggccagagacggaggatttccccctttctcaagttatgagaaactggatatcactgtccttgacgtcaacgacaacgcccctatctttaaggaggacccctttatttccgagatactcgagaatctgagcccaagaaagattctgaccgtctcagctatggataaggattcaggtcccaatgggcagctggattatgagatcgtgaacggtaatatggaaaatagctttagcattaaccacgccaccggagagataagaagcgtgcgccccttggatcgcgaaaaagtgtcacactacgttctgaccattaagagctctgataaaggttctccctcccagagtaccagtgtgaaagtcatgatcaatattctagacgaaaacgacaatgcgcccagattcagccaaattttctccgctcacgttccagaaaattctccattgggttacacagtgactcgcgtcacaacttctgatgaggacatcggaatcaatgccattagccgctactctataatggatgccagtctgcccttcaccatcaatccctcaaccggtgatatcgttatatcacgcccactgaacagagaggacaccgatcgttataggatcagagtcagcgctcatgattccggctggaccgtgagcaccgatgtaacaattttcgtgactgatatcaacgataatgcccctcgcttcagcaggactagctactacctggactgtccagagctgaccgaaatagggtcaaaagtcacgcaggtcttcgccaccgatccagatgagggcagtaatggtcaagtgttctacttcatcaaaagccaatccgaatattttcgcataaatgccaccaccggagaaatcttcaacaagcagatcctgaagtatcagaacgtcaccggcttttcaaatgtgaacatcaatcgtcactcttttatcgttacaagctccgaccgggggaaacctagcctgatcagcgagacaaccgtaaccataaatattgtggattctaatgataacgcaccgcagttcctgaagtccaagtatttcaccccggtgaccaaaaacgtcaaagtgggcactaagctgatacgcgtgactgcaatagacgacaaagactttggcctaaattccgaggtcgaatatttcatcagtaacgacaatcatctcggcaaatttaaacttgataatgacacggggtggatcagcgttgcgtcctccctgatctccgacctcaaccagaacttttttattacggtgacagctaaggacaagggtaatccaccattgagttctcaggctacagtccacattactgttactgaggaaaattaccacaccccagagttttctcagtctcatatgtctgctacaatcccagaatcacacagcatcggctcaatcgtgaggaccgtgagcgcccgggacagagacgctgctatgaatggactgattaaatactctattagttcaggcaatgaggaaggcatcttcgcaattaactcctccactgggattttgacactggccaaggccctggactatgaactttgtcagaagcatgaaatgaccatttctgccatagacggtgggtgggtcgccaggactggttattgcagtgtaacagtaaatgttatagatgtcaacgataacagtcccgtattcttgtccgacgactacttccccaccgtgctcgagaatgccccttccggcacaactgtaatccatctgaatgccacagatgctgactctggcacgaatgcagtcatcgcctatacagtccagagcagcgacagcgacctgtttgtaatcgatccgaacactggggtgattacgacacagggcttcttggattttgagactaagcagagctaccacctcaccgtgaaagccttcaacgtaccagacgaagagcggtgctcattcgccaccgtcaatattcagctaaaaggtaccaatgaatatgtgccccggttcgttagtaaactttattacttcgagatcagcgaggctgctccaaagggtacgatcgttggtgaggtttttgcatcagacagggacctggggactgatggtgaagttcattaccttattttcggcaattctcgcaagaagggctttcaaataaacaaaaagactggccaaatctacgtgtctggtatactcgacagggagaaggaagagcgcgtgtcattgaaggtgcttgccaagaactttggtagcatccgtggcgccgacatcgatgaggtgaccgtaaatgtcaccgtcctcgatgccaatgacccccctatctttaccctgaacatatactcagtgcaaatcagtgagggcgtgcctataggaacacatgttactttcgtgagcgcttttgatagcgacagcataccctcttggtcacggttctcatatttcatcggatctgggaacgaaaacggcgctttttctataaacccccaaactgggcagattaccgtgaccgctgaactagatagagagactctcccaatttataacctgtccgtcttggcggttgactccgggaccccatctgccaccggctctgcttccctactagttacactggaagatattaacgacaatggacccatgctaacagtaagcgagggcgaagtcatggaaaataaaaggccgggcacactggtcatgactcttcagtcaaccgatcctgatctgcctcccaatcagggccctttcacttattatctgttgagtacaggcccagccacttcctactttagcctgagcaccgctggtgtgctgtctactacacgggaaatcgacagggagcagattgctgacttttacctgtctgtcgtgactaaagacagtggagtgccccagatgtcgtcaacaggcaccgtccatataaccgtaatcgatcagaatgataatcctagccagtctcgcactgtggaaatcttcgtgaattattacgggaacttatttccaggcggtatcctgggatctgtgaagccacaagatccagatgtgctggactcattccactgtagcctgacatctggagtcacctctctctttagtatcccaggcggcacatgcgacttaaactctcaacctcgctccacggatggcactttcgacctcaccgttctctctaatgacggtgtgcattcaaccgttacaagcaatatcagagtatttttcgctgggttcagcaatgccacagtcgacaacagcatcctgctcaggttgggcgtgcccacagtgaaagactttctcaccaaccactatctccacttcctgagaatagcctcttcccagctgacaggcctcggtacagctgttcagctttattctgcttatgaggaaaataatcggacattccttttggctgctgtgaaacggaatcataaccagtacgtgaacccaagcggcgtggctactttctttgagtccatcaaagagatccttctcagacaatctggagtgaaggtggagtctgtggatcatgactcctgcgtccatggcccttgtcagaacggcggctcttgtttgcgaaggctcgccgtcagttcagttctaaagagcagagaatcactcccagtgatcatcgtggctaacgaacccctgcagccgttcctttgtaaatgtctgccaggatacgccggatcttggtgcgagatcgatatcgatgaatgtctccctagcccttgccactctggaggcacctgtcacaacttggtcgggggcttttcatgcagctgtcccgatgggtttactgggcgggcttgcgagcgcgacatcaacgagtgtctgcagtccccttgcaagaatggcgccatctgtcagaactttcccggctccttcaactgcgtgtgcaagaccggttacactggcgtctttggtaaacattgtgagttgaacagctatgggtttgaggagctgtcatacatggagtttccctctttagatcctaacaataattacatttacgtgaaattcgccacaattaagtctcacgctctgcttctctataactacgataaccagacaggagaccgggcagagttcttggcattggaaatcgcggaggaacgcttacgatttagctacaacctgggcagtggaacctataaactcacgacgatgaagaaggttagtgacggtcactttcacaccgtgatcgcccggcgggctggaatggctgcctctctgaccgtcgacagctgtagcgaaaaccaggaacccggctactgcacagtttcaaacgtggcagtttccgatgactggacgctggacgtccaaccaaatcgcgtgaccgttggtggcatacgaagcctagaaccaatcctgcagcgccgaggtcatgtggagtcccacgactttgtcgggtgcatcatggagtttgctgtgaatggacggcccctggagccgtcacaggcccttgccgcccaggggatcttggatcaatatggagatttcatatcttattgctttaaagaaaagaaatgtaaaaaggtgtgctttaccgttacccctgataccgctctctccttggaaggtaaaggacggttggactatcacatgtcacagaacgaaaagagggagtatctgcttaggcagtctcttcggggagccatgttggagccgttcggggtcaactccttagaggtgaagtttcggaccagatccgagaacggcgtgctgatccatattcaggagtcatctaattatactacagtgaagatcaaaaatgggaaggtgtacttcacatctgatgccggtattgcaggcaaggtggagaggaacatccctgaggtctatgtagcagatggccattggcatacctttctcattggtaagaacggcacagctacggtgctctccgtggatcggatttataacagggacatcatccatcctacacaagatttcggggggctcgacgtactgaccatctcactgggtgggattcccccaaatcaggcccaccgagatgcccagacagccggcttcgatggatgtatagcttctatgtggtatgggggtgagtctttacctttcagcggaaaacatagtctggcctccatttctaagaccgacccaagtgtgaaaataggctgtcggggccccaatatctgtgcttcaaacccttgttggggtgatctcctctgtattaaccagtggtatgcataccgctgtgtcccgcctggagactgtgccagccacccttgtcaaaacggtgggtcttgcgagcctggactacacagcggtttcacttgctcctgcccagacagccataccggacgcacctgcgagatggtcgtggcctgcctcggggtgctgtgtcctcagggaaaagtgtgtaaagccggcagcccagccggccacgtgtgtgtgctctcccaaggacctgaagaaatttcactgccgctgtgggccgtacctgctattgtgggatcttgtgcgactgttcttgcgctgttggtgctttctctgatcctctgtaaccagtgtaggggcaaaaaggcaaaaaacccaaaggaagagaaaaagccaaaagagaagaagaagaaaggcagtgagaacgtggccttcgatgatcccgacaacatcccgccttatggcgatgacatgacggttagaaaacagcctgagggcaatcctaagccggacattattgaacgggagaatccctatctgatctacgacgagactgatattcctcataacagcgagacaatcccctcagccccactggcctcacccgagcaggagatcgaacactacgacattgataatgctagctcaatagccccatctgacgcggacattatccaacattataaacaattcagaagccacactccaaaattctccatccagcgccactctcccttgggcttcgctagacaaagccctatgcccttgggcgcttcgtctttgacctatcagcctagttacggacagggtctaagaacctcttctctgtcccactcggcttgtcccacgcctaacccgctctcccgacatagccctgctccatttagcaagagtagcactttctacaggaactcccccgcgcgtgagctacatctgccgatcagagatgggaatacgttagagatgcacggggatacgtgccagcccgggatcttcaactacgctacccggctgggaagaagatcaaaatcgccacaggcaatggcctctcatggatctcgcccaggttcacgcctcaaacagcctataggtcagattcctctggaatcctccccccctgtcgggctgtccatcgaggaggtggaacgcctgaatactccacgccccaggaacccatccatttgcagtgccgaccatggacggtccagcagcgaggaagactgccgcagacccctgtctcggaccagaaatcccgcagatggcataccggcccccgaatcctcctcggatagcgatagccatgagtcattcacatgctccgagatggaatacgatagggaaaagcccatggtctatacatctcgtatgcccaagctatcccaggttaacgagagtgacgcagatgatgaagacaattacggtgctagattaaaaccccgcaggtatcacggcaggagagccgagggggggccagtcggtacccaggcggcagccccaggaacagccgacaacactctgcctatgaagctaggacagcaggcggggacattcaattgggataacctcctgaactggggccccggttttggccactatgtagacgtttttaaagacctcgcctctttaccagaaaaagccgccgccaacgaagaggggaaggcgggcactacgaagccagttcctaaagacggtgaggctgaacagtacgtttag

SEQ ID NO: 116715 - DNA, 14946 bp, synthetic construct
  misc_feature 1..14946: note = Description of Artificial Sequence: Synthetic coding sequence
  source 1..14946: mol_type = other DNA
atggacttagctcccgatcgggccaccggaaggccatggctccctctccacacactgtcagtcagccagctactccgcgtgttttggttattatcactactgcccgggcaggcgtgggtgcatggagcagaaccccggcaagtgttccaggtgctggaagaacagcctcctggtactctggtcggaaccatacagacgcgaccaggtttcacctatcggctttctgaatctcacgctttgtttgctataaatagctcgactggcgctctgtatacaacatctactattgaccgcgagtccctcccatctgatgtgatcaatcttgttgtcttatctagtgcacccacataccccacagaggtgagggtactcgtcagagatctgaacgataatgccccagtgtttccggacccctcgatagttgtcacttttaaagaagattcaagttctggcaggcaggtgattctggacaccgcgaccgactccgatatcggcagcaacggggtcgatcacaggtcatatcgaatcattcgaggaaacgaagccggccggttcaggttggatattaccctgaatccctccggtgagggtgctttcctgcatctcgtgtcaaagggggggttggatcgggaagtcacacctcagtatcagctcctggtggaggtggaggataaaggcgaaccaaaaagacgcggatacctccaagtaaacgtaaccgtccaggatattaacgataatccaccagtgttcggctccagtcattaccaggctggagttccggaggacgccgtggtcggtagtagcgtcctacaagtcgcagcggccgatgcagatgaagggaccaacgcagatatcagatacaggctgcaagacgaaggaacacctttccagatggatcccgaaactggcttgattactgtcagggagcccctcgattttgaggctcggcgtcagtactctctcactgttcaggccatggacaggggcgtgcctagcctgactgggagagcagaagcattgattcaattgttggacgtaaacgacaacgacccagtggtgaaatttagatactttcctgcaacgtccaggtacgctagtgtggacgagaatgcgcaggtggggacggtggtggctttattgaccgtaactgacgccgactcccccgccgccaatggcaacatttcagtgcaaatactgggcgggaacgagcagcgtcactttgaagtacaaagctccaaagtccctaatctgtccctgatcaaggtagccagtgccctggatagagagcgcataccctcttacaatctcacggtgtctgtctctgataattacggagcgccgcccggtgcagcagtgcaggctaggtcatcggttgcttcgctggttatatttgtaaatgatataaacgaccaccctcctgtattctctcaacaggtgtaccgcgtaaacctgtccgaagaggcaccacctggttcctatgtgagcggaattagtgctacggatggagactccggtctgaatgccaatttacgctactcaatcgtttcgggaaacggtcttggttggttccacattagcgagcatagtggtctggttacaaccggtagtagcggcggtcttgatcgggaactggctagccaaatcgtgctcaacattagtgcccgagaccagggcgtgcatcctaaagtaagctatgcccagctggttgttaccctactggacgtcaacgatgagaaacccgtgttcagtcaaccagagggctatgatgtgtccgttgtagaaaacgctcccactgggactgagctcctgatgctgcgggccacagacggcgacctcggcgataatggaaccgtgaggttttccctgcaggaggccgagaccgacaggcgcagttttcgcctcgacccagtgagcggtcgcctttcaacaataagctctttggatagggaagagcaggcattctacagtctcctggtcctagcgactgacctcggaagtccaccccaatcatctatggctagaatcaacgtctctctgctggacatcaatgacaactcccctgtgttctaccccgtccagtattttgcacacataaaagagaacgaacctggaggtagctatatcaccaccgtgtccgcaacagatccagacctggggaccaacggaacggtaaagtattccatcagtgccggcgacaggagcaggtttcaggtgaacgcacaatctggagtgatttcgactcggatggccctggaccgtgaggagaagactgcctaccagctccaaatagtggcaactgatggcggaaacctgcaaagtccgaaccaagccatcgtcacaataactgtactggatacgcaggataatccaccggtgttttcgcaagtcgcctactcctttgtggtgtttgaaaacgtggccctggggtatcacgttggcagtgtgtcagccagcaccatggacctaaattcaaacatctcctacctcattacaacaggggatcagaaagggatgttcgcaataaaccaagtgaccggccagcttacaaccgccaatgttattgaccgggaagaacagtccttctatcaactgaaggtggtggcatccgggggcacagttaccggcgataccatggttaacattaccgtcaaggatctgaatgacaacagtccccattttctacaggccatcgagagcgttaatgtcgtcgaaaactggcaggctggccactctatctttcaggcaaaggccgtcgatcctgacgaaggggtgaacggtatggtgctgtactcactgaagcagaatcctaagaatctgttcgccatcaatgagaaaaatggcaccatcagcctgctaggccctcttgatgtgcatgccggaagctatcagatcgagattctggctagtgacatgggggtgccgcaactatcatcaagcgtcattctgacagtttacgtgcatgacgtgaatgacaacagccctgtattcgatcagctgtcatacgaggtgactctgtccgagagcgaaccagtgaactcgaggttcttcaaagtgcaggcctctgacaaggatagcggcgctaacggggaaattgcctatactatcgcggaagggaatactggcgacgctttcggaatttttccagacggacagctgtacattaagagcgaacttgacagagagctgcaggataggtacgtgcttatggtggttgcttccgatagagccgtggagccactcagcgctactgtaaacgtgaccgttattttagaagacgtgaatgataaccgccctctttttaacagcacaaactatactttctatttcgaagaggagcaacgggctggttccttcgtggggaaggtgtcagctgtcgataaagactttggacccaacggcgaggtacggtacagtttcgaaatggttcaacccgacttcgagttacacgcaatttccggcgagatcacaaatacacaccagtttgatagggagagtctgatgagacgcaggggcaccgctgtctttagcttcaccgtgatcgctactgatcagggaattcctcaacccctgaaagatcaggccacagttcacgtctatatgaaagacataaacgataacgcccctaaatttttaaaggacttttatcaggccaccatatctgaaagtgctgcaaatctgacccaggtactccgcgtgtccgctagcgacgtggacgagggcaacaatggcctgatccactactccataatcaaggggaacgaagagaggcaatttgccatcgattcaacctctggccaagtgaccctcatcggcaaactggactatgaggccactcccgcatatagcctggtcattcaggccgtggacagcggcacaatccctctaaatagtacatgcacgctgaatattgatattctggatgagaatgataatacaccctccttccctaaatccacactgttcgtcgacgtcttggaaaatatgcgtattggcgagctggtctcatctgtgaccgcaacggactctgattctggagacaacgccgacctttactatagtataacaggcaccaacaaccacggtaccttttctatcagtccaaacacaggtagtatcttcctcgcaaaaaaattagactttgagactcagtcactgtataagctgaacataacagcgaaggaccaggggcggcctccccggtctagcaccatgtcggtcgtaatacacgtgagagatttcaacgataacccacctagcttccccccaggcgacatattcaaatccattgtagagaatatcccgatcgggacttctgtcatcagtgtaacagcacatgaccctgacgccgatatcaatggacagctatcctatactatcattcagcagatgccacggggcaaccattttacaatcgatgaggtgaagggaaccatttataccaacgccgaaatagatagagagtttgccaacttgttcgagcttacagttaaagctaatgaccaagccgtgcccatagagacaaggcgttacgcgctgaagaacgtgacgatactggtaaccgacttgaatgataatgtccccatgtttattagtcagaatgcgctggccgctgatcctagcgcagtgattgggtccgtcctaaccaccatcatggccgctgaccctgatgaaggggccaacggcgagatcgaatacgagatcattaacggtgacacggacacattcatcgtcgatcggtatagtggcgatttacgcgtcgctagcgcactggtgccttcacagctgatttacaatctaattgtgtctgctactgaccttggaccagagaggcggaagtctactacagagcttaccatcattctccaagggctggacggacctgtgttcactcagcccaaatacatcactatcctgaaggagggtgagcctatcggcaccaatgtgatctctattgaggcggctagtccccgagggtcagaggcacccgtcgaatactacattgtcagcgtcagatgtgaagaaaagaccgtggggaggcttttcaccatcgggcggcataccgggattattcagaccgccgcaattctcgatagagagcagggtgcctgtctttatctggttgacgtatacgcgatagaaaagtccactgccttcccccggacccagagagctgaagtggagatcaccctgcaggatattaatgacaacccccccgttttccctacagatatgctcgacctaaccgtcgaagagaatattggagacggcagtaagatcatgcagcttacagcaatggacgctgacgaaggggctaacgcacttgtgacttatactattatctctggcgcagacgacagttttcggatcgatcctgagtcaggagatctgattgccacccgaagactcgaccgggagcgccggagtaaatactcactcctagtgagagctgacgacggacttcaatcttcggatatgcggatcaacatcacagtaagcgatgttaacgatcacactcccaagttctcccgtccagtctactctttcgatattcctgaagacactattcctgggagcttggtggctgctatccttgccacagatgatgatagcggagtgaacggggaaatcacctatatagtgaacgaagatgacgaggacggcatcttctttcttaacccaatcaccggcgtgttcaacctgaccaggctgctggattacgaggtgcagcagtactatatcctgacggtgcgcgccgaggacgggggcggacagttcacaacgatccgggtctacttcaacatcttagacgtgaacgataatccgccgatcttcagtcttaattcatacagcaccagtctcatggaaaaccttccagtgggcagtacggtactggtatttaatgtgaccgatgcagacgatgggataaatagtcaactcacttacagcatcgcttcaggggatagtctggggcagtttaccgtggataagaacggtgtactaaaggtgctcaaagctctggacagggagagccaatcattttacaacttggtggtgcaggtgcatgacctgccccaaatccctgcatcacgttttacgtcaaccgctcaggtgagtatcattctgcttgatgttaatgataacccccctacctttctatcgcccaaacttacttatatcccagagaatactcctatagacactgtggtgtttaaggctcaggccaccgatcctgatagtgggccaaacagctatatcgaatacacactcctcaacccgctgggcaacaaattttccattggaacgatcgatggagaggtgaggctgaccggggagctggatcgggaagaagtctctaattacactctaacagtggttgcaactgacaagggtcagccctctttgtcttcctctacagaagttgtggtgatggtgctagatattaacgataataaccctattttcgcccaggctttgtacaaggtcgagattaatgagaacacactgacagggaccgacatcatccaggtgtttgccgcagatggagacgagggaaccaatggccaggtgcgttacggaatcgtgaatggcaataccaaccaggaattccgcattgattcagtgaccggagccatcaccgtcgccaaaccactggatagggaaaaaacgcccacttatcacctcacagtgcaagcaactgatagaggctctactcctcgcactgataccagtaccgtctccattgtccttttggacattaatgattttgtgcctgtctttgaactgtcaccgtatagcgtgaacgttccagagaacctggggaccctcccccggacaatcctacaggtcgtggcaagggatgacgataggggctccaattccaagctgtcctatgtgctgttcggtggcaacgaggacaacgccttcacgctgagcgcctctggggaattgggcgtaacacagtccctcgatagggaaacaaaggagcggtttgtcttaatgatcaccgccacagattcaggcagtcctgctctgacaggtactgggactatcaatgtgatcgtagacgatgtgaacgataacgtgcctaccttcgcatcaaaggcttattttaccacgatcccggaggacgctcctacgggcacagatgtccttctggtcaacgcctctgatgcggacgcctcaaagaacgccgtgatccggattattgggggaaatagccagtttaccataaaccctagtaccggccagatcatcacctcggccctattggacagggagacaaaagacaattatactctggtcgtcgtgtgctctgatgcaggctctccagagcccttatcatcaagcacctcggtgctggtaactgtcactgacgtcaatgataaccccccccgattccaacatcacccctacgttacccatattcctagtcccacccttccaggatcttttgtatttgccgtgaccgttacagatgcggacatcggtccgaactccgaactgcactattcactgagcgggaggaatagtgagaagtttcacattgaccctctacggggtgccattatggccgccggtcccctgaatggagcaagcgaagttaccttctctgtgcacgtcaaggatggaggctcattcccaaagactgatagtaccacagttacggttcgctttgtcaataaagctgactttccaaaagtcagggctaaggaacaaacattcatgtttcccgagaaccaacctgtgagttcgctggtcaccaccatcacgggatcgagccttagaggcgaaccaatgtcttactacatcgccagtgggaacctggggaataccttccagattgatcagctcacaggccaggtttcaatcagtcagccactggacttcgaaaaaatccagaaatacgtggtctggatcgaagcacgagatgggggctttccacctttttcaagctacgaaaagctggatattaccgtgctggacgttaacgataacgcccccatctttaaagaggacccctttatttccgaaatcttggagaacctcagtcccagaaaaattctgactgtgtctgctatggacaaggattctggtccaaatggccagttggattacgagatagtgaacggtaatatggaaaacagcttctcaatcaatcatgcaaccggggagatccgttccgtcagaccattggaccgcgagaaggtgtcgcattacgtgttgacaatcaaaagctccgacaagggatcaccttcacagtcaaccagcgttaaagtcatgatcaacattctcgacgagaatgacaatgccccccgctttagccagattttctccgcccatgtccccgagaacagccctttggggtacactgtgaccagagtcaccacatctgatgaagacattggcatcaatgccatctcccggtactcgatcatggatgcctcgcttcccttcacgatcaatccttcaacgggcgatatagtgatctcaagacctctcaaccgtgaggacaccgaccggtatcggattagagtcagcgcgcacgactccggatggactgtgtcgaccgacgtaactatcttcgtgacggatatcaacgataacgctccacgcttttcacggacaagctactacctggattgccctgagttaaccgagattggctccaaggtgacacaagtattcgctactgaccctgacgagggcagtaacggccaagtgttttactttattaagtctcagtctgagtatttcaggatcaatgctactactggtgagatcttcaataagcagatactgaagtaccagaatgtgactggctttagcaatgtgaatatcaacaggcacagttttattgtaacatcttctgatcgcgggaaaccgtccctgataagtgagactaccgtgactataaatattgtcgattcgaacgacaacgctccacagtttctaaaaagcaagtatttcacaccagttactaaaaacgttaaggtagggactaagctcatcagggtgaccgccatcgacgacaaggatttcggcctcaattccgaggtggagtactttatttcaaatgataaccacctggggaaattcaagcttgataatgacaccggatggatcagcgttgcctcttcgttaatcagcgacctgaatcagaacttttttatcaccgttacagccaaagataagggcaatcccccgctgtcgtctcaggccactgtccacatcactgtcacagaggaaaattaccacaccccggagttctcgcaatcccacatgtctgccacgattccagagtcccatagtataggaagtatcgtgcgcaccgtttctgccagagaccgtgatgcggcaatgaatgggttaatcaaatactccatctcctccggcaatgaggaggggatttttgcgattaattccagcactgggattctcacacttgcaaaagcactggattatgagttgtgtcagaagcacgagatgacgattagtgccatagatggaggctgggtcgctagaaccggttattgtagcgtgactgtcaacgtgatcgacgttaacgacaactctcccgtgtttctgtccgacgattactttccaacggttctggagaatgctccatcagggacaactgtgatccacttgaacgccaccgatgccgattctggcacaaacgctgtgattgcctacacagttcaaagttctgacagcgacctgtttgtgattgatccaaatactggcgtgataacaacccagggattcctggattttgaaaccaaacaaagttaccatcttaccgtgaaggcattcaacgtcccagacgaagagcgctgtagcttcgctaccgtgaacatccagttgaaagggaccaatgagtatgttccaaggtttgtgtccaaactgtactacttcgagatctcagaagctgcccccaaaggcaccattgtcggtgaggtgtttgcatcggaccgcgatctgggcaccgacggagaggtacactatctgatcttcgggaactcaaggaagaagggattccagatcaataagaagacaggccagatatatgtgagcggaattttggatagggaaaaggaagagcgcgtgtcactgaaagttctcgccaagaattttggaagcatccgaggggccgacatcgacgaggtgacagtcaacgtcacggtgctggatgcgaacgaccctccaatttttaccctgaacatctattcagtccagatctccgaaggtgtgcctattggtacccatgtgacattcgtgtcagccttcgattccgactctattccctcttggtctcgtttcagttactttatagggtccggaaatgagaacggcgcctttagcataaacccccagaccgggcagattacagtcaccgccgagttggatcgtgagaccctgcccatatacaacctaagcgtgttggctgtagacagtggtactccatcagcaactgggagtgcttcccttttggtgacacttgaggacatcaacgacaatggtccaatgcttaccgtaagtgaaggagaggtgatggaaaataagaggcctgggacattggttatgacccttcagagcacagatccagaccttcctcctaatcaggggccatttacatattatcttttaagcaccgggcctgcaaccagctatttctccctgtcaactgcaggcgtactgtctaccacgcgtgaaatcgatcgggaacagatagccgatttctacctgtctgtggtaaccaaagattctggagtgccccagatgtcgagcactggcactgtgcatatcacagtgatcgaccagaacgacaaccccagtcagtctagaaccgtggaaattttcgtcaactactacggcaacctgtttcccggtggcatcctcggctctgttaaaccacaggaccctgacgtgcttgactctttccattgttctctgaccagcggggtgacctcacttttctctattcccggtggcacctgcgacctaaattctcagccccgaagcactgatggtacatttgacctgactgtcctttccaacgatggtgtccatagcacagtgacctccaacattcgcgtgttctttgccggcttctctaacgctacagtggacaacagcatcctgcttcgattgggggtgcccacagtgaaagacttcttaactaatcattacctgcacttcctgagaatcgcaagcagtcagctaacaggcctggggaccgcagtacagctgtacagtgcctatgaggaaaataaccgaacctttttgctggcggcagttaaacgaaaccataaccagtacgtgaaccccagtggcgtggccacttttttcgagagtattaaagaaatcctcctcaggcaatccggcgtcaaggtcgagagtgtcgatcatgattcctgtgtccacggtccgtgtcagaatgggggaagctgtcttcgaagactagccgtctctagcgtgctgaaatctagggagtctttacctgtgattattgtggctaatgagcccttgcagcccttcttatgcaagtgccttcccggttatgctgggtcctggtgtgaaatagatatcgatgaatgcctgccctccccttgtcactcagggggcacgtgtcacaatttagttggcggtttcagttgttcgtgtcctgacgggttcaccgggcgggcttgcgaaagggatattaatgaatgtcttcaatctccttgcaagaatggcgccatctgccagaacttccccgggtcattcaattgtgtttgcaaaaccggctatacaggcaagatgtgcgaatcgtctgtgaactactgcgagtgcaatccttgctttaacggcgggagttgccagtccggagttgatagttactattgccattgtccatttggcgtgtttgggaagcactgtgaactgaactcctatggcttcgaagaattgtcttacatggaattcccttctttggatcctaacaataattatatctacgttaaattcgctactatcaaatcacatgccctgctgctgtataattacgacaatcaaacaggcgaccgcgctgaatttctggccttggagattgcggaggaaagactccgttttagctacaacctgggcagcggcacatacaagctcaccactatgaagaaggtcagcgatggacattttcacaccgtgatcgcgagacgtgctggaatggctgcttccctgactgtggattcttgtagcgagaaccaggagcctggctactgcaccgtgagtaacgtcgcagttagcgacgattggacactcgacgtgcagccaaatcgcgtaacagtgggcggcatccgaagcctcgaacctattctacaaagaagaggccacgtagagagccatgactttgtaggatgtattatggaatttgccgttaatgggcggcccctggagccaagtcaggctctagcagcgcaggggatcctggaccagtgtcctcgccttgaaggggcctgtaccaggagcccttgccaacacggcggaacgtgtatggactactggtcatggcagcagtgtcactgcaaggagggtcttacagggaaatattgtgaaaaatccgtgactcccgatactgccctgtccctggagggcaagggccgcctggactatcacatgtcccagaatgagaagcgcgaatacctgcttcgacagtccctgcggggagcgatgctggaaccatttggagtcaactcactcgaagtgaaatttaggacaagaagtgagaacggtgttctcatacatatacaggagtcatcaaattatactaccgtcaagattaaaaatggtaaagtgtactttacatcggacgccggcatcgctggcaaagtggagcggaatattcctgaggtgtatgtggctgacggtcactggcatacctttctaattgggaagaatggcaccgccactgtcctgtccgtggaccgaatctacaatcgggatataatccacccaactcaggattttggaggtctcgacgtgctgactattagcttgggtggaatcccacccaaccaggcacaccgcgacgcccaaacagccggcttcgatggatgcatcgcaagcatgtggtatggtggcgaatccctgcccttctctggaaaacactctctcgcgtcaatatctaaaacggatccgtcagtgaagatcggttgccggggtccaaacatttgcgcatctaatccttgttggggggatttgctgtgcatcaatcagtggtacgcttaccggtgcgtccctccgggagactgcgccagccacccgtgccagaacggcgggtcttgcgagcctggactacacagcgggtttacctgctcatgtcctgacagccacaccgggagaacctgcgaaatggtcgtggcttgtctgggggtcctctgtccacaaggcaaggtgtgcaaggctgggagcccagctgggcacgtgtgcgtcttaagccagggtccagaggagatctcactcccactatgggccgttcccgctatagtgggttcatgcgccacagtgctggccctcctggtactgagtctgatactctgcaatcagtgccggggtaagaaggccaaaaatcctaaggaggagaaaaagccgaaggagaagaaaaaaaaggggtctgagaacgtcgcgttcgacgatcctgataatatccccccctacggtgacgatatgaccgttcggaagcagccagaagggaaccccaagccagatattattgaacgggagaatccttacttaatctatgacgaaacagacatccctcataacagcgaaacaatccccagcgcccctttagcgagcccagaacaagagatcgagcactacgacatcgacaatgcgtcgagtatcgcaccttccgacgccgatattatccagcactataaacaatttaggtctcatactccaaaattcagcattcaacggcattctcctctgggcttcgctaggcaatctccaatgcccctcggagccagtagcctgacataccaaccctcctatggacaaggactaaggacaagcagcctcagccattcagcgtgcccaacacctaatccactatctagacattctccagcacctttttccaagagcagcactttttaccgaaattcccctgctcgcgagctgcaccttcccattagagatggcaatactttggaaatgcacggtgacacatgccagcctgggatattcaattacgctacccgcctggggcgtcggagcaagagtccacaggctatggcatcccacgggagccggcctggaagtcgactcaagcagcctatcggacaaataccactcgaatcgtccccaccggtgggcttatccatcgaagaagtggaacggctgaatactcccagacctagaaatccctctatttgttccgcagatcatgggaggtctagctcagaagaagactgtcgaagacctctgtctagaacccggaatccagccgacggtattccagctccagaatctagcagcgatagcgactcgcacgagtctttcacctgctctgagatggaatacgaccgagagaagccaatggtatacacatcccggatgcccaagctgagccaggttaatgaatccgacgctgatgatgaagacaactacggggctagactaaagcctcggcgctaccatggcagaagagcggagggaggccccgtcggcactcaggcagctgcacctggcacagctgacaacacactgccaatgaaactcggccagcaggccggcacattcaactgggataatttgctgaactggggaccaggtttcggtcattacgtggacgtgtttaaggacctagccagtctgccagagaaagctgctgccaacgaagaaggcaaagccggcactacaaaaccggtccccaaggatggtgaagccgagcagtatgtgtag

SEQ ID NO: 116716 - DNA, 1239 bp, synthetic construct
  misc_feature 1..1239: note = Description of Artificial Sequence: Synthetic coding sequence
  source 1..1239: mol_type = other DNA
atgggcctgcacctgcgcccctacagagtgggcttgctgccagatggcttgctctttctactgctgctccttatgctcctggctgaccccgctctgccagctggccggcaccctccagtagtcctggttcctggagatctgggcaaccaactggaggccaaactggacaagcctacggtggtacattatttgtgcagcaagaagactgagagttacttcacaatctggctgaaccttgagctgctgcttcccgtaataattgattgttggatcgacaacatacggcttgtgtacaataaaacctccagggctacacagttccctgacggggttgatgtaagagtccccggttttgggaaaaccttctctctggagtttctggacccaagcaaaagcagcgtgggctcttactttcacacaatggtcgagtctctggtcggttggggttacacacggggcgaagacgtgagaggagcaccctacgactggaggcgggccccgaatgagaatggcccatacttcttagccctaagagaaatgatcgaagaaatgtatcaactgtacggggggcctgtggtcctcgtggctcacagtatgggaaacatgtatacactgtactttctgcagcgacagcctcaggcttggaaggacaagtatattcgggctttcgtgagcctcggagctccttggggcggagtggccaagactctgcgggttttggccagtggagataacaatcgcatacccgtaatcggacccttgaagattcgagagcagcagcggtctgctgttagcacaagctggctgttgccgtacaattacacatggtcaccggagaaggtattcgttcagacaccaaccattaactacactctgagagactataggaagttctttcaagacatcggtttcgaagatggatggttaatgcgacaagatactgaggggctggttgaggctaccatgcctcccggagtgcagctacattgcttgtatggtacaggcgtcccaaccccagattccttctattatgagtcattcccagacagggaccctaagatctgtttcggggacggtgatggaacagtgaatctaaaatccgcactgcaatgccaggcgtggcagtcacggcaggagcatcaggtgctattgcaagagttgcccggaagtgaacacattgaaatgctggctaatgcaactactttagcatatttaaagcgcgtgttgttagggccttag

SEQ ID NO: 116717 - DNA, 480 bp, synthetic construct
  misc_feature 1..480: note = Description of Artificial Sequence: Synthetic coding sequence
  source 1..480: mol_type = other DNA
atgtttcccggactgtttatgcttggcacttttctatggagcttaattgagtacctgatccaccgcttcctgtttcacatgaaacctccaagcgacagctattacctgatcatgctgcacttcgtcatgcatggacagcatcataaggcaccctttgacggttcaaggcttgtgtttcctccggtgcccgcatctctggtgattggcgtgttttacttgtgtatgcaattgattctgcccgaagccgtgggaggtacagtcttcgctggcggcctcctgggttatgttctatacgatatgacccactactatctccactttggatcccctcacaagggatcttacctttattcactgaaggctcatcatgtgaagcaccacttcgcccatcagaagagcggctttggcatatcaactaaattgtgggactactgcttccacaccttgacccccgagaagccacatctcaaaacacagtag

SEQ ID NO: 116718 - DNA, 1740 bp, synthetic construct
  misc_feature 1..1740: note = Description of Artificial Sequence: Synthetic coding sequence
  source 1..1740: mol_type = other DNA
atggtccagtatgagttatgggcagctctgcctggagcaagcggtgtggctcttgcttgctgctttgtcgccgcagctgtggcactgcggtggtccggacgccgcacagccaggggggcagtggtgcgcgcacggcaaagacagagagccggtctcgagaacatggatcgggcagcccaacgctttcggctccaaaatcccgatttggatagtgaggcccttcttgcgcttccactgccgcagctggtgcaaaagttgcattcacgcgagctggcaccggaagcagtcctgtttacctatgtcggcaaggcctgggaagtgaataaaggaactaattgtgttacctcatacttagccgattgtgaaacacagctctctcaggcaccaaggcagggcctgctatacggggtccctgttagcctgaaggagtgcttcacctacaaaggacaggattctactctcggtcttagcctgaatgagggggtgccagccgagtgtgattccgtagtggtacacgtactgaaactacaaggggcagtgccgtttgttcacactaacgtgcctcaaagtatgttcagctatgattgcagtaaccccctcttcgggcaaaccgtgaatccttggaaatcttctaaatcacctggcgggagcagtggcggagagggagcattgatcggatcaggtggcagccccctcgggctggggaccgacattggcgggagcatccgctttccctcatcattctgcggcatatgcgggctgaagcctactggaaaccggctgtctaagtccggccttaagggctgcgtgtatggccaggaggccgtcagactgtcagtcggccctatggctcgggatgtagaatctcttgccctttgcctcagagctctactgtgcgaggatatgtttcgcctggacccgacggtgcccccgctgcccttcagggaagaggtttacaccagctctcagccccttagggtgggttattacgaaactgataattacaccatgcccagccccgcaatgaggcgagctgtgctagaaacaaagcagagcctggaggcggctggacatacacttgtaccattcctcccctctaatataccacatgccctggagacactgagcactggaggcttgttcagtgatggcgggcacaccttcctgcagaactttaagggcgacttcgtagacccatgcctaggtgacctggtgtccattcttaaactccctcagtggctcaagggtctgcttgcattcctcgtgaaaccccttttacctagactgtccgcttttctgtctaacatgaagtccaggtctgctggcaaactttgggaattgcagcatgagattgaagtctatcgcaaaactgtgattgctcagtggagagcactcgacctcgacgtcgtgctgacccccatgttagcacccgctctcgatctcaatgcccctgggagggcaacaggagcagtcagttacactatgctttacaactgtctggatttccccgccggcgtggtgccagtcacaacagtgacagccgaggatgaagcacaaatggaacattatcgggggtacttcggcgatatatgggacaaaatgctccagaagggcatgaagaagtctgtgggtctgcccgtagctgtgcagtgtgtggccctcccttggcaggaagagctttgtctccgctttatgagggaggtggaaaggcttatgacgcctgagaagcagtcaagctag

SEQ ID NO: 116719 - DNA, 456 bp, synthetic construct
  misc_feature 1..456: note = Description of Artificial Sequence: Synthetic coding sequence
  source 1..456: mol_type = other DNA
agaaggcagcaccccctgccgctgctgctcctgaggcacttgagaccccaggcccaccgggagcccccccaggtctacacctctagccagccactgagggtaggctactacgagacggataattatacaatgccctcacctgccatgcggcgggccgtactggaaacgaagcaatctttggaggccgctggccatacattggtgccgtttcttcctagcaacatacctcacgccctggaaaccctcagcaccggggggttgttctccgacgggggacatactttcctgcagaacttcaagggggactttgttgacccatgtctaggtgacctagtgtcaatactgaaactgcctcagtggctgaaaggtctgctggcattcctggtgaaacctctactgcctaggctgagtgcattcctatccaacatgaagtctagatgcagaccactcccctag

SEQ ID NO: 116720 - DNA, 1599 bp, synthetic construct
  misc_feature 1..1599: note = Description of Artificial Sequence: Synthetic coding sequence
  source 1..1599: mol_type = other DNA
atggcccccagctttacggccagaatccagctgtttctgctgagagctctggggttcctgattgggcttgttggtcgggctgccctggtgctgggcggtcccaaatttgcaagcaagacccctcgtccagtaacggagcctttacttctattatctggaatgcagttggcaaaactcattaggcaacgtaaagtgaagtgcatcgacgttgtgcaggcatatatcaatcggatcaaagacgtgaacccgatgattaacggcattgtcaaatacagattcgaggaggctatgaaggaagcacacgccgtggaccagaagctggccgaaaagcaggaggacgaagcgacgttagagaacaaatggcccttcctgggtgttccactcacagttaaggaagctttccagttgcagggcatgccgaattcaagcgggcttatgaaccgacgggatgccattgcgaaaactgacgccacagtggtagcacttcttaaaggtgccggcgctatcccattgggtataactaattgctccgagctgtgtatgtggtatgagtctagtaataaaatatacggaaggagcaacaatccttatgatctccagcatatagtgggcgggtcatctgggggcgaggggtgcaccttggcggccgcttgctccgttataggcgtgggctccgacatcggagggtcaattcgcatgccagcctttttcaatggcatttttggccacaagccgtccccaggcgtcgtaccgaataaaggccagtttccccttgccgtgggcgctcaggagctcttcctatgcaccgggcctatgtgtcggtatgccgaagatctggccccaatgttgaaggtgatggccggacccggaatcaaaaggctaaaattggacactaaggttcacctgaaggatctgaaattttattggatggagcacgacggcggctcctttctgatgagcaaggttgaccaggatctcatcatgactcagaagaaagtggtggttcacttagagaccatcttgggggcaagtgtacagcacgtcaagcttaaaaagatgaagtacagttttcaactgtggatcgccatgatgtcagccaagggccatgacgggaaggagcctgtgaagtttgtggatttgctcggcgaccatggcaaacacgtctctcctttgtgggagctgatcaagtggtgtttaggcttaagcgtttacactattccttccatcggtctggcgctgctagaggaaaagctgaggtactcaaatgagaaataccagaagtttaaagctgtcgaagaatctttgaggaaggagttggttgatatgctgggcgacgatggggtcttcctgtaccctagtcatcccaccgtggcacccaaacaccacgtgcccttaactcggccgtttaacttcgcttataccggcgttttttccgccctgggcttgcccgtgacacaatgcccgctgggcctcaacgccaaggggctgccactgggcatccaggtcgtcgccgggcccttcaacgatcacctaacactcgctgtggctcagtacctggagaagacctttggcggctgggtgtgccccggtaagttctag

SEQ ID NO: 116721 - DNA, 384 bp, synthetic construct
  misc_feature 1..384: note = Description of Artificial Sequence: Synthetic coding sequence
  source 1..384: mol_type = other DNA
atgagcttttcaggtaaataccagttacagtctcaagagaactttgaggcctttatgaaggctatcggcctgccagaagaactcatacaaaagggaaaggatatcaaaggagtctccgaaatcgtccagaatggcaagcactttaagtttacaattacagccggatctaaggtcatacagaatgagtttacagtgggcgaagaatgcgagcttgagacgatgactggggagaaagtgaaaactgtggtccagctggaaggggataataagttggtgacaactttcaaaaatatcaaaagtgtgacagagctgaatggagatatcattaccaacaccatgactttaggtgacattgtgtttaagcggatatctaagcgcatttag

SEQ ID NO: 116722 - DNA, 399 bp, synthetic construct
  misc_feature 1..399: note = Description of Artificial Sequence: Synthetic coding sequence
  source 1..399: mol_type = other DNA
atggcctttgattccacctggaaggtggacaggagcgaaaattacgataaattcatggagaaaatgggcgttaacatagtgaagcggaagctggcagctcacgataatctgaaactgacaattacgcaagagggtaacaagtttactgttaaagagagtagcacttttaggaatattgaggtcgtgtttgaactgggagtgacattcaattacaacctggccgatgggactgagctccggggcacctggagtttggaaggcaacaaactcatcggcaagttcaagcggaccgataatggaaacgagttaaacactgtgcgggagatcataggtgacgagctggtgcagacttacgtctacgaaggagttgaggcgaagagaatatttaaaaaggattag

SEQ ID NO: 116723 - DNA, 402 bp, synthetic construct
  misc_feature 1..402: note = Description of Artificial Sequence: Synthetic coding sequence
  source 1..402: mol_type = other DNA
atggtcgatgcattcctggggacatggaagctggtcgacagcaaaaacttcgacgactacatgaaaagccttggggtcgggtttgcaactcgtcaggtagcctctatgactaagcctaccaccataatcgagaagaacggggacatcctcacccttaaaactcacagtactttcaagaatacggaaattagctttaaactgggagtggaatttgacgagacgactgccgatgatcgcaaagtcaaaagtatcgttactctagacggaggaaaactcgtgcacctccagaaatgggacggacaggagactacactggtgcgcgaactcatcgacgggaagcttattctgaccctcacacacggaactgcggtgtgtactaggacctatgagaaagaagcatag

SEQ ID NO: 116724 - DNA, 408 bp, synthetic construct
  misc_feature 1..408: note = Description of Artificial Sequence: Synthetic coding sequence
  source 1..408: mol_type = other DNA
atggcgaccgtccaacagctggaaggaaggtggcgtctggtggactctaagggcttcgatgaatacatgaaagagttgggagtgggaattgcccttagaaagatgggcgccatggccaaacccgattgcattattacttgtgacggtaaaaatctcacaataaaaactgaatctacgctgaagaccacccaattttcctgcacacttggcgagaagttcgaagagaccactgccgacggcagaaaaactcagaccgtgtgcaactttacggatggcgcccttgttcagcatcaggagtgggacgggaaggagagcacgatcactcgcaagctgaaagatgggaagctcgtggttgagtgtgtgatgaacaacgtgacctgtacccgaatatatgaaaaagttgagtag

SEQ ID NO: 116725 - DNA, 534 bp, synthetic construct
  misc_feature 1..534: note = Description of Artificial Sequence: Synthetic coding sequence
  source 1..534: mol_type = other DNA
atgaaaaccgttacaatgatgatggtggtggaaatgcaggccctgacgcaggtgttgcgcgcagttctgagtgcatgcacgtgggtctctcgaaaaggagacctgcaaaggatgaagcagactcacaaaggaaagcctccgagcagcatggccttcaccggtaagtttgaaatggagtcagaaaagaattatgacgagtttatgaaattactggggatatcctctgatgtcatcgaaaaagcccggaatttcaaaattgtgaccgaagtccaacaagacggccaggattttacatggagccagcactacagcggcgggcacacgatgacgaacaagttcacagtggggaaggagtccaacattcagactatgggcggaaaaacctttaaagcaacagtccagatggaggggggtaagctggtcgtgaattttcctaactaccaccaaacctcagagattgtcggcgataaactggtcgaggtcagcactataggtggcgttacgtatgagagggtcagcaagcggctggcttag

SEQ ID NO: 116726 - DNA, 534 bp, synthetic construct
  misc_feature 1..534: note = Description of Artificial Sequence: Synthetic coding sequence
  source 1..534: mol_type = other DNA
atgaagactgtaaccatgatgatggtggtcgaaatgcaggcacttacgcaggtgctgcgcgccgtcttgtctgcctgcacttgggtgagccgcaaaggcgacttgcaacggatgaagcagactcataagggcaagccaccctccagtatggctttcaccggcaagttcgaaatggagtctgagaagaattatgacgaattcatgaaactgcttggaatttcctcagatgtcatcgaaaaggcaaggaacttcaaaatagtcaccgaggtccagcaggatgggcaggactttacttggtcgcagcactattctggagggcacacaatgaccaataagttcaccgtcgggaaagagagcaacatccagaccatgggtggaaaaacttttaaggccactgtgcaaatggaagggggaaagctggtggttaactttccaaactatcatcagactagtgaaatcgtaggggacaaactggtggaggtgtctacaataggcggtgtgacctacgagagagtttccaagcgactggcatag

SEQ ID NO: 116727 - DNA, 387 bp, synthetic construct
  misc_feature 1..387: note = Description of Artificial Sequence: Synthetic coding sequence
  source 1..387: mol_type = other DNA
atggcctttactggaaaattcgaaatggaatcagaaaaaaattacgatgagtttatgaagcttttagggatctctagcgacgtgatcgagaaagctcggaacttcaaaattgtgactgaggtgcagcaagatggtcaggatttcacttggagtcaacattacagcggaggccatactatgacaaacaagtttactgtcggcaaggagtcaaacatccagactatgggaggcaaaaccttcaaggcaactgtgcaaatggagggaggcaagcttgtggttaatttcccaaattaccatcaaactagcgagattgtgggagacaaattggttgaagtcagcacaattggcggggttacgtatgaacgggtaagcaagagactcgcgtag

SEQ ID NO: 116728 - DNA, 501 bp, synthetic construct
  misc_feature 1..501: note = Description of Artificial Sequence: Synthetic coding sequence
  source 1..501: mol_type = other DNA
atggtagaggccttctgcgccacctggaagctaaccaattcccaaaacttcgacgagtacatgaaggcgttgggggtgggctttgcaactaggcaggtgggcaacgtaactaaaccgactgtaataatatctcaggaaggcgacaaggtggttattaggaccctgtcaaccttcaagaatactgagatctccttccaactgggcgaggagtttgatgagaccaccgccgacgacaggaattgtaagtccgtcgtctcccttgatggcgacaagctcgtccacatccagaagtgggatggaaaggaaaccaattttgtccgcgagattaaagacggaaaaatggtgatggtgtctaacgacaacagtcccttcttcttagtcttcttctcctcaccgcatactagccatctcctgccaagtagctcacttctgctgccctttttcttgctaccgtcatttttcaacaacaccagtctggccaggttttttaattacatgtag

SEQ ID NO: 116729 - DNA, 399 bp, synthetic construct
  misc_feature 1..399: note = Description of Artificial Sequence: Synthetic coding sequence
  source 1..399: mol_type = other DNA
atggtggaagcattttgcgccacctggaaactgaccaacagccagaacttcgacgagtatatgaaggcactaggagtcggctttgccactcgccaggtgggcaatgtgactaagccgaccgtgataatcagtcaggagggtgacaaagtggtcattagaacactgtccacctttaagaatactgagatttcctttcagctgggcgaagagttcgacgagacaactgcagacgaccgaaattgcaaaagtgtcgtgagcctggatggggacaaactggtgcatatccagaagtgggatggcaaggaaactaacttcgtccgagagatcaaggatggcaagatggtcatgacattaacttttggagatgtggtggcagtccgtcactatgaaaaggcctag

SEQ ID NO: 116730 - DNA, 1506 bp, synthetic construct
  misc_feature 1..1506: note = Description of Artificial Sequence: Synthetic coding sequence
  source 1..1506: mol_type = other DNA
atgggaacacgtgctgccagaccggcaggcctgccatgcggcgctgagaatcctgcacgccgtcggctggctcttggcgctcggcagcagattcattcctggtctccccggaccccatctactcgcctgactgctcccgccggtccagccagaggggttgctcgccctgccatggcccccgatcctgttgccgcagaaacggctgctcagggccccactccacgctacttcacctgggatgaagttgcgcagagaagtggatgcgaggaacggtggctcgttattgatcgaaaggtgtacaatatctctgagtttacccgccggcacccgggcgggtcacgggttattagccattacgccggacaagacgcaacagatccattcgtcgcatttcatatcaacaaagggctcgtcaagaaatacatgaactctctcctaatcggagagctgagccctgaacagcccagctttgaacccactaaaaataaggaactaaccgatgagttccgagaacttagggcaaccgtggaacgaatgggcctcatgaaagccaatcacgtcttctttctcctttacttgcttcacattctgttgctcgacggtgccgcgtggctcactctgtgggtctttggcacttcattcttgccttttctgctttgtgccgtactgctatctgcagtacaggcacaggccggctggttgcagcacgatttcggccacctctccgtgtttagtacaagtaagtggaaccatctgctgcaccacttcgtaatcggccatctgaaaggagcaccagctagctggtggaatcacatgcactttcagcaccatgcaaagcccaactgcttccgtaaagatcctgatatcaatatgcatcctttcttcttcgcactggggaaaattctttccgtagaattgggcaagcagaaaaagaagtacatgccttataatcaccagcataaatactttttcctaatcggccccccagccctccttcccctgtattttcagtggtacatcttctatttcgtcatccagcggaagaagtgggtggatttagcatggatgattacattttatgtccgcttctttctgacgtatgtcccactcttaggattgaaggcctttctgggcttatttttcatagtccgatttctcgagtcaaactggtttgtttgggtgacacagatgaaccacattccaatgcatatcgaccacgacagaaacatggattgggtgtcaacccagctgcaagccacctgtaacgttcataaatctgccttcaacgattggtttagcggccatcttaacttccaaatcgaacaccacctgtttcccaccatgccaagacacaactatcataaggttgccccgctggttcagagcctctgcgcaaaacacggcatcgaatatcagagcaagccattgctttcagcctttgccgacatcatccacagcttaaaagaatcgggtcagctctggctggacgcttatctgcatcagtag

SEQ ID NO: 116731 - DNA, 1083 bp, synthetic construct
  misc_feature 1..1083: note = Description of Artificial Sequence: Synthetic coding sequence
  source 1..1083: mol_type = other DNA
atgaatagtctcctgattggggaattgtccccggagcagccttcctttgaacccactaaaaacaaggagctaaccgatgaatttagagagctccgtgcgaccgtggagcggatgggcttaatgaaggccaaccacgtgttctttctgctatacttgctgcacatccttctcttagacggcgcggcttggttgaccctgtgggtgtttggcactagctttctgcccttccttctgtgtgccgtcctcttgagtgcagttcaggcacaagcaggctggctgcagcatgatttcggtcacttatccgttttttctacaagtaagtggaaccacctgctgcaccacttcgtgatcgggcatcttaagggggcacccgcgtcttggtggaatcacatgcacttccaacaccacgccaaacccaattgtttccgtaaggacccagacattaatatgcacccctttttcttcgccctgggtaagatcctatccgtggaactaggtaagcagaaaaaaaagtatatgccctacaaccatcagcacaaatactttttcctcatcggcccacccgccctgctaccgctgtacttccagtggtacatattctattttgtcatacaacgtaagaagtgggtagacttggcgtggatgatcactttttacgtgaggttcttcttgacttatgtacctttgctgggcctcaaggccttcttgggattgttcttcatcgtgcgcttcctcgaaagcaactggtttgtgtgggttacgcagatgaaccatatccctatgcacatcgatcatgatagaaacatggattgggtcagtacacagctgcaggctacatgtaacgtgcacaagagtgcatttaatgactggttctccggtcatttaaacttccaaattgagcaccatctattccccacgatgccccggcataactaccacaaggttgcgccactggtgcaaagcctgtgcgcaaagcacggcattgaatatcagtcaaagcccctcctctccgcctttgctgacatcattcattccctcaaggagagcggccaattatggttggatgcctacctgcatcagtag

SEQ ID NO: 116732 - DNA, 1083 bp, synthetic construct
  misc_feature 1..1083: note = Description of Artificial Sequence: Synthetic coding sequence
  source 1..1083: mol_type = other DNA
atgaattccctgcttattggtgaattatccccggagcagccgtccttcgagcctaccaagaataaggaactgacggacgagttcagagaactgagagccacagttgagcgtatgggattaatgaaggcgaaccacgtgttcttcctactctaccttctccatatcctactcctggacggtgccgcgtggctgactctgtgggtgtttggcacatcctttctgccttttcttctgtgtgcggtactgttatccgccgtgcaggctcaagccggctggcttcagcacgactttggacatctttccgtgtttagcacttccaaatggaatcaccttctacatcatttcgtcattggacatctgaagggcgcccctgcttcttggtggaaccacatgcacttccagcatcacgcgaagcctaactgcttcaggaaggatcctgacatcaacatgcacccatttttcttcgccctggggaagattctttctgtggagctgggaaagcagaagaaaaagtatatgccctacaatcatcaacacaagtacttctttcttatcgggccccccgcactgctgccactgtattttcagtggtatattttttattttgtgatccagcggaaaaaatgggtggacctggcttggatgattacattctatgtaaggttctttctgacatatgttccacttctggggctcaaagcctttctcgggctgttctttatagtgcgctttcttgagagtaattggtttgtgtgggtaacgcagatgaatcatatcccaatgcacatagatcacgatcgcaacatggattgggtgtcaacccagctgcaggcgacatgtaatgtacacaagagcgcgttcaacgactggtttagcggccacttaaacttccaaatcgagcaccacctctttccgacgatgccacgtcacaactatcacaaagttgcgccactagtgcagagtctctgcgcgaagcacggtattgaatatcagagcaagccattgctctctgctttcgcagacatcatccactctctgaaggaaagtgggcagctgtggctggacgcatatctgcaccagtag

SEQ ID NO: 116733 - DNA, 1083 bp, synthetic construct
  misc_feature 1..1083: note = Description of Artificial Sequence: Synthetic coding sequence
  source 1..1083: mol_type = other DNA
atgaacagcctactgattggtgagctgtcaccggagcagccaagcttcgaacctactaagaacaaggagttaacggatgagtttcgtgagcttcgggccacagtggagcgaatggggctgatgaaggcaaaccacgtgtttttcttgctgtatctgctgcatatcctgctccttgatggcgccgcatggctgacgctatgggttttcggcacctcctttctcccgtttttgctctgtgctgtgctcctgtcagccgtccaggcacaagctggctggctgcagcatgatttcggtcacctgtctgtgttcagcactagtaagtggaaccacttactgcatcacttcgtgatagggcacctgaaaggtgctcctgcttcttggtggaatcacatgcacttccagcaccacgccaagccgaattgcttccggaaagacccggacattaacatgcatcccttcttcttcgctttgggcaagattctaagcgtggaattaggaaagcaaaagaaaaagtatatgccctacaaccatcagcataagtacttttttctgattggtcctcccgcgttgctcccattatactttcagtggtatatcttctactttgtgatacagcggaagaaatgggtggacctggcttggatgattactttttacgtgaggtttttcctgacctacgtgcctctgctggggctcaaggcattcttaggtctattcttcatcgtccgcttcctagagtctaattggtttgtttgggtgactcaaatgaaccacatacccatgcatattgaccatgacagaaatatggactgggtttccacccagctgcaggcaacctgcaatgtccataaaagtgcattcaacgattggttctctggacacctcaacttccagatcgaacaccatttgtttcctactatgcccaggcacaactaccataaggtagcacctctggtgcaatccctgtgcgctaaacatggaatagagtatcaatctaaaccactgttgagcgcgtttgctgatatcattcatagcctaaaggagagtggtcagctatggctcgatgcgtacctccaccagtag

SEQ ID NO: 116734 - DNA, 1131 bp, synthetic construct
  misc_feature 1..1131: note = Description of Artificial Sequence: Synthetic coding sequence
  source 1..1131: mol_type = other DNA
caagacgccttcagggccttccaccaggaccttaactttgttaggaaatttttacagccgctgctcatcggtgaactggctccagaagagcccagccaggacgggcctttgaacgcccaactggtggaggattttcgcgccctccatcaggccgcagaggacatgaagttatttgatgcttcccctaccttttttgcttttctcctggggcacatcttggccatggaggtcctggcctggttactgatctacctgctgggacccggatgggtgccttcggcgctcgctgcctttatattggcaattagccaagcccaagcaggctggctccagcacgacttcggccacctgagtgtgttctccacatcaaagtggaaccacctccttcaccacttcgtaatcggacatttaaaaggggcaccagcaagctggtggaaccacatgcacttccagcaccacgccaagcctaattgctttcggaaagatcccgacattaatatgcatccattctttttcgccttgggaaaaatcttaagtgtggagctgggcaagcagaagaagaagtacatgccctataaccatcaacacaaatacttctttctgattgggccccccgcgttacttcccctgtacttccaatggtatatcttctatttcgtcatacagcgcaagaagtgggtcgatcttgcatggatgattaccttttacgtaagattcttcctgacctatgtgcccttgctgggattgaaagcattccttggtctgttttttattcgatttctggaaagtaattggttcgtgtgggtcacacagatgaatcatatccccatgcacatcgatcacgaccgaaatatggactgggtgtctacccagctccaagctacgtgcaatgtacacaaatctgcattcaatgactggttttcaggccatcttaacttccagatcgaacatcacctgttccctaccatgcccagacataactaccataaggtggccccactcgtgcagtcattgtgcgccaaacatggtatcgaataccagtcaaagccccttctgtccgcattcgctgatatcattcactccctgaaggagtctgggcagctttggctggatgcttatctgcaccagtag

SEQ ID NO: 116735 - DNA, 1269 bp, synthetic construct
  misc_feature 1..1269: note = Description of Artificial Sequence: Synthetic coding sequence
  source 1..1269: mol_type = other DNA
atgcatggaagggaggcgggcccattcgtgtgcgtgtgcgtccttcttgcctctatccccacaccccaaacccccctactacaggcctcgctcccaccatttcaccctgcaagcgccggccacccgattacgggtcagcaggacgccttcagagcctttcatcccgatctcgagttcgtcggaaaatttctcaagcccctgctcattggagagctggcccccgaagagccttctcaagatcatggtaaaaattccaaaattacggaagacttccgggctctgagaaagaccgccgaagatatgaatttgttcaagactaaccatgttttctttctgctgctgctcgcccacatcatagctctcgaatctatagcatggtttacagttttctatttcggcaacggctggatccctactctgattacggctttcgtccttgctaccagtcaggcgcaggccggctggttgcagcatgactacggtcatttatcagtatacaggaaacctaagtggaatcacttggtccacaagttcgtgatcggccacctcaagggtgcgagtgccaactggtggaaccacagacattttcagcaccacgcgaagccaaacatctttcacaaggatcccgatgtcaatatgctgcatgtctttgttttgggcgagtggcagcccatcgaatatggaaagaaaaagctgaagtatcttccctacaatcaccagcacgagtattttttcctcatcggacctcccctcctgatacccatgtatttccagtatcagatcatcatgacaatgatcgtgcacaagaattgggtagacctagcatgggccgtcagttactatataaggttctttataacatatatacccttctacggtatactgggcgccctgctgtttctgaacttcatacgatttcttgaatcccactggttcgtttgggtcacacagatgaatcacatcgttatggaaatcgaccaggaggcatatagggactggtttagctctcagctgacagccacatgcaatgtcgagcaaagcttttttaacgactggttttctggacacctcaactttcaaatagaacaccatctcttcccaactatgcctcgccacaatctgcacaagatagcccctcttgtgaagagcttgtgtgctaaacacgggatagagtaccaggagaagcccctgttgagagctcttctcgacatcataaggagtttaaagaagtcaggaaagctttggctggacgcatatcttcataaatag

SEQ ID NO: 116736 - DNA, 1335 bp, synthetic construct
  misc_feature 1..1335: note = Description of Artificial Sequence: Synthetic coding sequence
  source 1..1335: mol_type = other DNA
atgggcaaaggaggaaatcagggcgaaggcgccgccgagcgggaggtgagcgtgccaactttttcatgggaagagatccagaagcacaacctgagaaccgatcgctggctcgtcattgatcgaaaggtatataatatcaccaaatggagtattcaacatcccggcggacagagggtcatcggacactacgccggtgaggacgccaccgatgctttccgagcttttcatcccgatctggagtttgtggggaagttcctcaaacctctgcttattggcgagctagcccctgaggagccttcacaagaccatggaaaaaattcgaaaataactgaggacttccgggccttacgtaaaacggccgaagatatgaatctttttaagacaaatcacgtgtttttcttattgcttctcgcccacatcatagccctggagtcaatcgcgtggtttactgtgttctactttgggaacggatggatcccgacactcattactgcattcgtcttagccaccagccaggcacaggccgggtggcttcaacacgattatggacatctgtccgtctaccgcaaaccaaagtggaaccatctcgtccacaagttcgttatcggtcacctaaagggggcatcagctaattggtggaatcacaggcactttcagcaccatgccaagcccaatatcttccataaggacccagacgtgaacatgttacacgtctttgtgctgggcgagtggcagccaatcgagtacggtaagaaaaaattgaagtacctcccctataatcatcaacatgagtatttcttccttatcgggccacccctattgattcccatgtattttcagtaccagatcattatgactatgattgtccacaaaaattgggtcgatctcgcatgggctgtatcatactatatccggttcttcattacatacatccccttttacggtatacttggtgcgcttctgtttctcaacttcataagatttctggaatcgcactggtttgtgtgggtgactcagatgaatcatattgtgatggagatcgatcaggaagcgtaccgggattggttttcgtcccagctgacagcaacttgtaatgtggaacagagcttcttcaacgactggttcagcggacacctcaacttccagattgaacatcacctttttcctaccatgccccggcataacttgcacaagatcgcacctctggttaagagcctctgcgctaagcacggaatcgagtaccaggaaaagcccttgctccgcgcattgctagacattattcgtagtctcaaaaaaagtggcaagctgtggttggacgcttatcttcacaagtag

SEQ ID NO: 116737 - DNA, 1161 bp, synthetic construct
  misc_feature 1..1161: note = Description of Artificial Sequence: Synthetic coding sequence
  source 1..1161: mol_type = other DNA
atggggaaggggggaaatcagggtgaaggggcagccgaacgggaggtgtccgtgcccacattttcttgggaggaaatacagaaacacaatttaagaaccgatcgatggctggtcattgaccggaaggtctacaacatcaccaagtggtcaattcagcaccccggagggcaacgcgtgatcggacattatgcgggtgaagatgcaaccgatgcgttcagagctttccatcctgatctcgagttcgtcggcaaatttttgaagcctcttttgataggcgagctcgctcccgaggaaccatcccaagatcacggaaagaactcgaagatcacagaggatttccgggcacttcgcaagactgcagaagatatgaatctgttcaaaaccaatcatgtgttcttcctcctgctgctcgcacatataattgcgttagaaagcatcgcctggtttactgtcttctacttcggcaacgggtggataccaaccctaataaccgcttttgttttggccacatctcaggcacaagccggttggctccagcacgactacggacatctgtctgtgtaccggaaaccgaagtggaaccacctggtccacaaatttgtcattgggcatctgaagggagccagcgccaactggtggaaccaccgccattttcagcatcatgcgaaacctaacatcttccacaaagatccagacgtgaatatgcttcacgtattcgtgctgggagaatggcagccaatcgagtacggcaagaagaaactcaagtacttaccgtacaaccaccagcacgagtactttttcctgatcgggccccccctgctgatcccaatgtacttccaatatcagattattatgaccatgatagtacacaagaactgggtggatttggcctgggctgttagctactatatccggttttttattacatacatccccttttacggcatactgggggctctgctcttcctcaactttattcgatttttggagagtcactggtttgtctgggttactcagatgaatcatatcgtgatggagatcgaccaggaagcctacagggactggtttagttcacaactcaccgcaacctgtaatgtcgagcaatcttttttcaatgattggttcagtgggcatctgaactttcaaatcgaacaccagtag

SEQ ID NO: 116738 - DNA, 1338 bp, synthetic construct
  misc_feature 1..1338: note = Description of Artificial Sequence: Synthetic coding sequence
  source 1..1338: mol_type = other DNA
atgggcggcgtcggggagccaggtccgagagagggacccgcacaacccggcgcccctttgcccactttttgttgggaacagatcagggcccacgaccagcccggcgataaatggctggtgatcgagagacgcgtgtacgacatctctcgctgggcacagcgtcaccctggcggttcacgcctcattgggcaccacggggccgaagatgcaactgacgcattcagggcattccatcaggacttgaacttcgtgcgcaagttcctgcaaccgctcctcatcggcgaactggcccccgaagaaccctcccaggacggaccactgaacgcccaactggtggaagacttccgggctctgcatcaagccgctgaggacatgaagcttttcgacgccagcccaacatttttcgcatttctactcggacacatactcgcaatggaggtcttagcctggttgctaatctatctgctcgggccgggttgggtgccatctgcgctggccgcattcatcctggcaatttcccaagctcaaagctggtgtttacagcacgacttggggcacgcctcaatctttaagaaatcttggtggaaccacgtggctcaaaaattcgtaatgggccaacttaaaggattctccgctcactggtggaacttccgtcactttcaacatcacgccaaacccaatattttccacaaagatccggatgtgaccgttgcgcccgttttcctccttggcgaatcatcagttgagtacggtaaaaagaagcgaaggtacctgccttataaccaacaacatctatatttctttctgatcgggcccccattgctgacgctggtcaacttcgaggtagaaaacttggcctatatgcttgtgtgcatgcagtgggccgacctactttgggccgctagtttctatgcacggttcttcttgagttacttgcccttttatggcgttccaggagtcctcctgttctttgttgcggttagggtgctcgagtcccattggttcgtatggatcactcagatgaaccatataccaaaggaaatcggtcatgagaagcacagagattgggtctctagccaactggccgctacgtgcaacgtggagcccagtctctttacaaattggttctcagggcacctgaattttcaaatagaacatcacctatttcccaggatgcctaggcacaattattctagggtggcccctctcgtcaaaagcctatgtgccaaacatggcctgtcctacgaagttaagcccttcctgacagctctcgtggatattgtccgctccttaaagaagtcaggagacatctggctggatgcctacctccaccagtag

SEQ ID NO: 116739 - DNA, 1158 bp, synthetic construct
  misc_feature 1..1158: note = Description of Artificial Sequence: Synthetic coding sequence
  source 1..1158: mol_type = other DNA
atgggtggcgtcggtgaacccggaccacgggaaggccccgctcagcccggagcgccattgccaactttttgttgggagcagatccgcgcccatgatcagcctggagacaagtggctggtgatagaaaggagagtgtacgacatatccagatgggcccagcgtcaccctggcggatcaaggttgattgggcaccatggggcggaagacgccactgacgcttttcgggcctttcatcaagacctgaacttcgtccgtaagtttctgcaacctcttcttattggggaactcgcacccgaggaaccctcccaggatggtccactgaacgctcaattggtggaggacttcagagccctgcaccaggccgccgaagacatgaaacttttcgacgcatcgcctacatttttcgctttcctgctgggccacattctggccatggaagtgctggcatggctgctgatctatcttctggggccaggctgggtaccttctgctctggctgccttcattctggctatatcccaagcccagagctggtgtctgcagcacgatctcggccacgcttcaattttcaagaagagctggtggaaccacgtagcccagaaattcgtaatggggcaattaaagggcttcagcgcccactggtggaactttcgccactttcagcaccacgcaaagcctaacatattccacaaggaccccgacgtcacagttgccccagtgtttctacttggcgaatcttcagttgagtatggaaagaagaagcggcgctacttgccttacaatcagcagcatctctactttttcctcataggtcctcctctgctcacactggttaattttgaggtcgagaacctggcttacatgctcgtgtgcatgcagtgggccgatctgttgtgggcagcaagcttttatgcccgtttttttctgtcatatctgccattctacggcgtgcccggtgttctgctgtttttcgtagcagtcaggtacggacgcgaatggagaggtcatacccaggctaccggggatccccattgtagccccccacccgaattgccctttagtaggctccagaacggagcctccggcaccgcttctttggcatgctggtggaatcacattaacacatccgttgccggcgctcagggacgttgggtctag

SEQ ID NO: 116740 - DNA, 1017 bp, synthetic construct
  misc_feature 1..1017: note = Description of Artificial Sequence: Synthetic coding sequence
  source 1..1017: mol_type = other DNA
atgttccaggcttttccaggagactacgatagcgggtcccgatgtagttcttccccatcagcagaatcacagtacctatcttccgtcgacagctttgggtctccccctaccgccgccgcctcccaggaatgcgccggcctgggagagatgccaggttctttcgtgcccacagtaacagccattaccacctcccaggacctgcagtggctggtacagcccactctgataagctccatggctcagagccaggggcaaccacttgctagccaaccacccgtggtggacccctacgatatgccaggtacctcatatagcactccgggcatgagcgggtattctagtggcggcgctagtgggagtggaggcccatctacctccgggacaacgagtggacccgggccggcccgccctgctagagcacgccctcggcggccaagggaggagacactgacacccgaagaggaagagaaaaggcgcgtcaggagagaaaggaacaagctggccgcagccaagtgccggaatagaagaagagagcttaccgacagactccaggccgagactgatcagcttgaggaggagaaggctgaactggaaagcgagattgccgaattacaaaaggaaaaggagcgattagaatttgtactggtggcacacaaacccgggtgcaaaatcccttacgaggagggtcccggtcccgggccgctggctgaggtgcgcgacctgcccggcagcgcccccgccaaggaggacggattctcgtggctgttgccgcctcccccaccacctcctctgcccttccagacgtcacaggacgctccaccaaacctgaccgcaagcctttttacccactccgaggtccaggtacttggagaccccttcccagtggtcaatccgtcatacacgtcctccttcgtgctcacctgccccgaagtttctgctttcgccggggcccagcggacttccggctctgaccaaccaagtgatccactgaactccccgtcactgcttgccttgtag

SEQ ID NO: 116741 - DNA, 909 bp, synthetic construct
  misc_feature 1..909: note = Description of Artificial Sequence: Synthetic coding sequence
  source 1..909: mol_type = other DNA
atgttccaagcgttcccaggggactacgacagtgggtctagatgttctagcagtcctagcgccgagtcccagtatcttagcagtgttgactcttttgggagcccgcccaccgcggccgcatcacaggagtgcgccggcctcggagaaatgccgggttcctttgtgcctacagtgacagccattaccacatcacaggatctgcagtggcttgttcaaccaaccctaatctccagtatggcacaatcccaaggacaaccgctggcctcccagcctcccgttgtagatccttatgacatgcctggaaccagctactccactcctggtatgagtggctatagctcagggggcgcatctggatctggcggtcccagcacaagcggtaccacatctggaccgggtcccgcccgcccagctcgcgcaaggcccaggaggcctcgagaggaaacagaaactgaccagctggaggaggagaaagccgagctggaatctgaaattgccgagcttcaaaaagagaaggagcggttagaatttgtcctcgttgcacataaaccaggttgtaagattccctatgaagagggcccaggaccagggccccttgctgaggtacgtgaccttccagggagtgcaccagcaaaagaggacggattcagctggcttttgcctcccccgcccccaccccccctacccttccagactagtcaggacgctccacctaatctaaccgcatctctgtttacgcatagtgaagtacaggtgctcggggatccctttccagtcgtcaatccgtcttataccagctcctttgtattgacatgccccgaggtgtcggcctttgccggcgctcagcgcacttctgggtcggatcaaccatccgacccgctgaacagcccatctctccttgccttatag

SEQ ID NO: 116742 - DNA, 588 bp, synthetic construct
  misc_feature 1..588: note = Description of Artificial Sequence: Synthetic coding sequence
  source 1..588: mol_type = other DNA
atgtttcaggcatttcccggagactacgactccggctcacggtgctccagctctccatccgccgaatctcaatacctcagcagcgtggactcttttggctcccctcctaccgctgccgcgtcacaagaaacagaccagcttgaggaagaaaaagcagaactggaaagtgagatcgccgagctccaaaaagaaaaggagcggctggaattcgtcctggtggcccacaagcctggttgtaaaattccatatgaggagggacccgggccaggccccctggcagaggtgagagatctgcccggcagcgctcctgcaaaggaggacggatttagttggcttctgcccccacctccaccaccaccactgcccttccagaccagccaggacgcccctcctaacctaaccgcctctctttttacccattcagaagtgcaggtgttaggcgaccctttccctgtggtaaaccccagctatacttcttctttcgtgctaacatgtcccgaagtgtctgccttcgccggagcacagaggactagcggatcagaccagccgagcgatcccctgaattctccgtctttactggcactgtag

SEQ ID NO: 116743 - DNA, 876 bp, synthetic construct
  misc_feature 1..876: note = Description of Artificial Sequence: Synthetic coding sequence
  source 1..876: mol_type = other DNA
atgttccaggcctttcctggcgactacgatagtggttcaaggtgttctagctccccttcagcggagtcccagtacctgtccagcgttgattctttcgggtctccaccgacagcagctgcttcccaagaatgcgctggacttggcgagatgccagggtcatttgtgcctactgttaccgccataactacttcacaggatcttcagtggcttgttcagcctactcttatcagttctatggcgcagtctcagggtcaacccctcgcctcgcagccacccgtggtggatccctatgacatgccggggactagctattccacccccggaatgtccggttactcgtccggtggagcgtcaggctctgggggaccaagcacctcaggaactacttctggccccgggcctgcccgtccggctagagcccggcccaggagacccagggaggaaaccctgactcctgaagaggaagagaagaggcgcgtgcgacgagagcgaaacaaattggccgccgctaagtgcagaaacagacggagggagctaactgatcgccttcaggcagagacagaccagctggaagaagaaaaagcagagctggaatccgaaattgctgaactgcagaaagagaaggaacggctggaattcgtgctcgtagcacataaacctggttgtaaaattccctacgaggagggccctggccccggcccgctagctgaggaagtgcaggttctgggggatcccttccctgtggtgaacccaagctacaccagctcctttgtgcttacttgtcctgaagtgagcgcctttgctggcgctcagcgaactagcggttccgatcaaccctctgatcctctgaattcccccagcttgctcgccctatag

SEQ ID NO: 116744 - DNA, 912 bp, synthetic construct
  misc_feature 1..912: note = Description of Artificial Sequence: Synthetic coding sequence
  source 1..912: mol_type = other DNA
atgagtgacaatggcgtgtgtgttctggcatttaagtgtccaggtctgctgcgttatacagcatatcgatgtaagcagctgtcagatacgtcaataattgcggtagcctctcattgcccactgctgcagaaagtccacgtgggcaatcaggacaagctgaccgatgaaggcctgaagcagttaggctcaaaatgcagggagctgaaggatatacactttggacagtgctacaagatctccgatgaagggatgatcgtgatcgctaaaggttgcctgaagctccagcgcatctatatgcaggagaataagctcgtcaccgaccagagtgttaaggcttttgctgaacactgtcccgaactgcaatatgtaggttttatgggttgctctgttacttccaaaggcgtcattcatttgacaaaactgcgtaatttgtcctccctagacctgcgccacatcacagaactggataatgaaactgtcatggagatcgtgaaacggtgtaagaatctttcctcattaaatctctgcttgaactggattatcaatgacaggtgcgttgaggttattgccaaggagggacagaacttaaaggaactgtacctggtctcttgcaagatcaccgattatgcacttatcgccatcggccgatactccatgaccattgagaccgttgacgtcgggtggtgtaaagaaatcaccgaccagggtgccacactgatcgcccagagctccaagtcattgagatacctaggacttatgcgatgtgacaaagtgaatgaggtgacagtcgagcagctggtgcagcagtatccacacataacattcagtaccgtcctgcaggactgtaaaagaacgttggaacgagcttatcagatgggctggaccccgaatatgtctgccgccagttcatag

SEQ ID NO: 116745 - DNA, 945 bp, synthetic construct
  misc_feature 1..945: note = Description of Artificial Sequence: Synthetic coding sequence
  source 1..945: mol_type = other DNA
atgtcagacaatggggtgtgtgtgttggcctttaaatgtcctggtctgctgaggtatactgcatatcgatgcaaacagctgtctgacaccagtattatcgctgttgcatcccattgccctttactgcagaaggtacacgttgggaaccaggataagcttaccgatgaagggctcaaacaactcggctccaaatgtcgggaattaaaggacatccattttggccagtgctataagatctccgatgaggggatgatagtgattgctaaggggtgtctgaagctgcagcggatatatatgcaggagaacaaactggtgacggatcagtccgtgaaggctttcgcagagcactgccccgaactccagtacgtgggattcatgggttgtagcgttacgtcaaagggggttattcatctcacaaagctgcggaacttgtcgtcgctcgacctccggcacatcactgagctggataacgagacagtcatggaaatcgtgaagagatgtaagaacctcagtagcctcaacctgtgcttgaactggattattaatgaccgctgtgtcgaggttattgctaaagaaggccagaatctgaaggagctttaccttgtgagctgtaaaattacagattatgcccttatcgctattggcaggtattctatgacgatagagacagttgatgtgggttggtgcaaggaaatcactgaccagggcgccacactcattgcgcaatctagtaaatctctgagatatctggggctgatgcggtgcgacaaagttagggtcgattatcaggtggtctgctttctacacattagcattgttaattcactaatgagttaccctcttagcttctcaatttcaacccctgtgtactacattttatacatccacttcatctgcatatacgcgattatagccatgcattgccttcctgcttttgtgaactag

SEQ ID NO: 116746 - DNA, 2106 bp, synthetic construct
  misc_feature 1..2106: note = Description of Artificial Sequence: Synthetic coding sequence
  source 1..2106: mol_type = other DNA
atgggccatttgctgagcaaggagccgagaaatagaccctcccagaagcgtccgagatgctgttcctggtgcaggcggaggcgccctctgcttaggttgccccgcagaactccagccaaggttccacctcagcccgccgcccctagatctagggactgcttttttcgaggcccgtgtatgctctgcttcatagtgcactctcccggcgcgcctgctcctgcaggccctgaagaagagcccccattgagtccacccccccgagatggcgcttacgccgctgcctcttccagccagcacctcgccaggcggtacgccgccctagccgcagaagattgcgcggctgctgcgcggaggttcctccttagtagcgcagcagccgccgctgccgctgcagctagtgccagctcccctgctagctgctgcaaggaactggggctcgccgctgccgcagcatgggaacagcagggtcgcagcctctttctcgcaagtctagggcctgtgcgatttctaggacctcctgcagccgtccagttatttagaggccccacaccttctcctgcggaactaccaaccccccctgagatggtgtgtaaaaggaaaggggctggggttccagcctgtactccctgcaaacagccccggtgcggtggcggcggttgcgggggcggaggaggaggaggaggtggtggcggcccagcggggggaggagcatctcctccaaggccgcccgacgctggctgttgccaggcgcctgaacagccacctcagcccctttgcccacccccatcatcccctactagtgagggggcccctactgaggctggcggcgatgcagtgcgggcaggcgggacagcaccactgagcgcccagcaacagcacgagtgcggagacgcagattgtagggaaagcccagagaatccttgcgattgccatcgggagcctccacctgagacccccgacatcaatcagctcccccccagtatactgttaaagatcttttccaacctgagtctggatgagcgctgcttgagtgcgtccctggtgtgtaaatactggcgggatctgtgtcttgattttcagttttggaagcaactcgatttgtcgtcaaggcaacaggtgaccgatgagcttctcgaaaaaatcgccagtcgctctcagaacataattgaaataaatatcagcgactgccgcagtatgtctgacaatggggtctgtgttttagcctttaagtgcccaggtctgcttaggtacactgcctaccgctgtaaacaactcagcgacactagcatcattgctgtcgctagtcattgtcccttgcttcaaaaggtacacgttgggaaccaggacaaattaaccgacgaaggcctcaagcagctgggcagcaaatgccgggaattaaaagacatccatttcggacagtgctataaaatcagtgatgaaggaatgatagtaattgcaaaaggctgcctgaagctccagcgtatctacatgcaggagaacaagcttgttacagaccagtctgtaaaggcattcgccgagcactgcccagagctgcagtatgtggggttcatgggatgctctgtcacctctaagggcgtgatccacctgaccaaactccgaaatctgagtagcctcgatctgagacatatcaccgagctcgacaacgagacagtgatggagatcgtgaaaagatgcaaaaatctgtcgtccctaaacttatgtctgaattggattataaatgatcggtgcgtcgaagttatcgcgaaggagggtcagaatctgaaggagctttaccttgttagctgcaagatcacagactacgccctgattgcaataggccggtactccatgacaatcgaaaccgtggatgtaggttggtgcaaggaaatcaccgaccagggtgcaaccttgatagcccagtcttctaaatcattacgctacctgggcctgatgcgttgcgacaaggtgaatgaagtgacggttgagcagctggttcagcagtatcctcacatcacattttctaccgtactacaggattgtaagcggacactcgaacgagcataccagatgggttggacacccaatatgtctgccgctagctcatag

SEQ ID NO: 116747 - DNA, 2025 bp, synthetic construct
  misc_feature 1..2025: note = Description of Artificial Sequence: Synthetic coding sequence
  source 1..2025: mol_type = other DNA
atgtcgtcttcaagtcgaggccccggcgccggggcaaggcggcgcagaactcgttgcagacgctgtcgcgcatgcgtgaggactgagtgcggcgattgccacttttgcagggacatgaagaagtttggcggtccaggccgcatgaaacaaagttgcttgttgagacagtgcactgcgccagttcttcctcacaccgcagtttgtttactgtgtggcgaggcgggcaaggaggacactgttgaaggagaggaggaaaaattcggcctgtcactgatggagtgtactatctgcaacgagattgtgcatccaggctgcctcaagatggggaaagccgagggggtaattaatgctgagatacccaactgctgggaatgtccccggtgtacccaggagggaagaactagtaaggattccggagagggtccgggtagacgcagagcagataatggagaagagggtgcctctcttgggtcgggttggaaactcaccgaagaacctccacttcctccacctccgccaagacggaaaggccccctgccagctggacccccaccagaggacgtgcctggtccacccaagagaaaggaacgcgaagccggcaacgagcctcccacaccccgcaaaaaggtgaagggcgggcgtgaaaggcacctcaagaaggtggggggggatgcttgcctactcagggggtctgacccaggcggacccggattgctgccaccccgcgttctcaacccgtcacaggccttttcctcttgccaccccggactgcctccggagaactgggagaaacccaaaccaccactcgcatccgccgagggccccgcagtgcctagcccttccccccagcgcgagaaattggaacggtttaaaagaatgtgtcagctcctggaaagagttcccgacactagcagctcaagctcagactcagacagcgactccgattccagcggcacttccctgtctgaagatgaggccccgggggaagccaggaacgggcggaggcctgcccggggaagcagtggggagaaggagaaccgtggtggcagacgcgcggttaggcctgggagtggagggccccttttatcctggccactcggccccgcacctccaccacggccacctcagctggagcggcatgtggttcgccccccaccgcgtagccctgagccggacactctgcctctggctgctggctccgaccatcccctgcctagagctgcatggcttcgggtgttccagcatctgggacccagggaactgtgtatctgtatgcgcgtttgtaggacctggtctcggtggtgctacgacaagcgactctggcctagaatggacctctcgcggcgcaagtccctgacgccgcccatgctgagtggcgtcgtgcggcggcagccacgggctctggatctttcgtggactggagtttccaaaaagcagttgatgtggctcctcaatcggttgcaaggcttgcaggaattagtcctcagcggttgctcgtggcttagcgtcagcgccctgggatccgcacctctaccagcactccgcctcctggacctgcggtggattgaagatgttaaagactcacaacttcgagaactcctgcttcctcctcccgacaccaaacccggccaaacggaatcacggggcagactccaaggagtcgcagagcttcggctcgccgggctcgaacttactgatgccagcctgcggctactgttgcgccatgccccccaactttctgccctggacctatcccattgtgcacacgttggcgacccatctgtacatcttctgaccgctcctactagcccgctgagagaaacactcgtgcatttaaatttggcaggctgccatagattgaccgaccactgcttacccctgttccggcggtgtcctcgcctgcgtcgccttgacctgcgctcttgtcgccagttaagtcccgaggcatgcgcaaggctcgccgccgcaggcccacctggtccctttcgctgtcccgaggaaaagttgcttttgaaggacagttag

SEQ ID NO: 116748 - DNA, 2085 bp, synthetic construct
  misc_feature 1..2085: note = Description of Artificial Sequence: Synthetic coding sequence
  source 1..2085: mol_type = other DNA
atgggtatgaaagttccgggaaaaggggaatccgggccctcggctttactaacgccccctatgtcttccagctccaggggccccggggcaggagcacgcaggaggagaacccgctgcagaagatgccgggcctgtgttagaacagaatgtggggactgccacttttgcagagacatgaaaaagttcggcggacccggccgcatgaagcaatcctgtctcctgcggcagtgcaccgcccctgttctgcctcacacagcggtatgcctactgtgtggagaggccggaaaagaggataccgtggagggtgaagaagagaagtttggcttatctttaatggagtgcaccatctgcaatgagatcgttcatccaggatgtctcaagatgggaaaggcggagggggtgatcaacgccgagatcccaaattgttgggagtgcccccgctgtactcaggagggccggacaagcaaggacagtggggagggaccaggacgcagacgtgctgacaacggagaggaaggggccagtcttggttctggctggaagctaacggaagagccccctttgcccccacctccacctcgacggaaaggacccttgcccgcaggtcccccgcctgaggacgtgcctggaccgccaaaacggaaggagcgggaagctggcaatgaacccccaacccccagaaagaaggtgaaagggggtagagaacggcacctgaagaaggtgggtggtgacgcatgtctgctccgcggtagtgatcccggtggccccggcctgttgcctcctagagtgcttaatccctctcaggcattttcttcctgccatcccggcctgcctccagaaaattgggagaagccaaagcccccactggccagcgccgagggtcccgccgtgccttcaccatccccacagcgagaaaaactggagcgttttaagcgtatgtgccagttattggaacgggtgccggataccagtagctcatcatccgatagcgattcagatagcgacagttccggaacatccctctctgaggacgaagctcctggcgaggcaagaaacggcagacgtcctgccagaggatcttcaggagaaaaagaaaaccgcgggggcagacgggcagtgaggcccgggagtgggggaccgcttctcagctggccactgggccctgcccctcctccccggccccctcagctggagcgccacgtggttaggccccccccacgctcccccgagcctgacactctccctctggccgcaggatctgaccaccctctccctagagcagcatggctgcgggtattccaacacttaggccctcgagagctttgcatctgtatgcgagtttgtcggacctggtctaggtggtgttatgacaagcgcctctggcctagaatggacctgtctcgaaggaagagtctgacgcctcccatgttatcaggggtcgtccgtcgccaaccaagagcacttgacctgtcatggaccggggtatcaaagaagcagctgatgtggctcctgaaccgcctgcagggccttcaggaactggtgctgtctggttgttcttggctttccgtgtccgcgctcgggagcgctccgttgccggccttgcgcctgctggacctgcggtggatcgaagacgtgaaagacagccagttgcgcgagctgcttctgcctcccccagatacaaagccaggacagactgaatctagagggcggctgcaaggcgtcgctgaattgcgccttgccgggcttgagctgactgatgcctctctgcgcctgctgttacgccatgccccgcagctttccgccttggatctgtcgcactgtgcccacgtgggcgatccatccgtgcatctcctgaccgccccaaccagccccttgagggaaactctagtgcatctgaacttggccggatgtcaccgactcaccgatcactgtctccccctcttccgtaggtgcccacgcctgcgcagactggacctgaggtcttgtcgtcagctatcccccgaagcctgtgctcggctggcagctgcagggccgcccggtccattccggtgtccggaagagaaactcctgctcaaggactcctag

SEQ ID NO: 116749 - DNA, 1761 bp, synthetic construct
  misc_feature 1..1761: note = Description of Artificial Sequence: Synthetic coding sequence
  source 1..1761: mol_type = other DNA
taaagaatgaagcagtcctgtctgttgcgccaatgtacagctcccgtgctgcctcacacggctgtctgtctcctatgcggtgaagccgggaaggaagatacagtagagggcgaagaagagaaatttggcctttccctgatggaatgcaccatctgcaacgagatcgtgcatccagggtgcctcaagatgggtaaggctgaaggggtaataaacgccgagatccccaattgctgggagtgtcctagatgcacccaggaaggaaggaccagcaaagatagcggagagggaccaggaaggagacgggccgacaacggggaggaaggtgctagccttggcagcggctggaagcttacggaagagccaccgctccctcctccaccccctagacgcaagggcccgctcccggccgggcccccccctgaggacgtcccaggcccacctaaacggaaagaacgagaagctggcaacgagcctcctaccccacgcaagaaggtgaagggagggagagagaggcatctgaagaaaaagccaaaacctcctctggcaagcgccgagggccctgccgttccctcgcccagtccacagcgcgaaaagctggagcgattcaaaaggatgtgtcaactgctggagcgagttcctgacaccagctcaagctcttcggactccgactcggatagtgatagctcaggcacttccctctcggaggacgaagcccctggggaggcccgaaacgggcggcgcccagcacgtggtagcagcggagagaaggagaatagagggggtcgcagagcagtgcgccccggctctggaggtccactcctgtcttggccactggggcctgccccgccgcccagaccaccccaactggaacgtcacgtcgtccggcccccccctcgatcccctgaaccagacacccttccattggctgctggctcagatcatccactcccccgagctgcctggctacgggtttttcagcacctaggtccgcgcgaactgtgcatctgtatgcgcgtctgtcgcacttggtcccgatggtgctacgacaagcgcctatggccgaggatggacctctcacgtaggaagtcattaacaccacctatgctctccggagtggtaagaaggcagcctcgagctttggacttgagctggaccggagtttccaaaaaacagctgatgtggctcctgaaccgcctccaggggctacaggagttggtgctttctggatgttcctggctttccgttagcgccttagggtcagcacccttaccagccctacggctgctggacctcagatggattgaagacgtgaaagacagtcagttgcgcgagctgctgctcccaccgcccgacacaaaaccagggcagaccgaaagtagagggcgcctgcagggagttgcggagctccgcctagctggcttggaactgaccgacgcttccctgcgccttctgctgcggcacgcacctcagctttctgctctggacctgagccactgcgcacacgtcggcgaccccagtgttcacctgctgaccgcgcccacctcccccttgagagagactctggtccacctcaatctggccggctgccaccgcctcaccgaccactgtctgcccctgttccggagatgtcctaggttgcgaagattggatctaagatcatgtcgccagttatcccccgaagcatgcgcacgtttggctgctgcggggcctcctgggccatttcgctgcccggaggagaaactgctgctgaaagactcttag

SEQ ID NO: 116750 - DNA, 495 bp, synthetic construct
  misc_feature 1..495: note = Description of Artificial Sequence: Synthetic coding sequence
  source 1..495: mol_type = other DNA
atggatctggaggaatgcatcctgattaccgattccaccctaatccagctgtcgattcattgccctaaactccaggctctggtttccttaagcttcagcgacatcattcacttactgaaaatgaaggagccaagccatcacaacaagaagctctttggctttagtttttgcaagtcactgtcccactgcgagcttattactgacgatgggatccttcacttatctaactctacctgtgggcacgaaagacttagagtgctggaactggacaactgtcttctcattactgatgtggcgctggagcatcttgagaactgccgcgggttagagcgacttgaactctacgattgtcagcaggtgactagggcaggcatcaaaaggatgcgtgcacaactcccccatgtgaaagttcacgcatattttgcccctgtaacgcccccgaccgccgtggccggcagcggccagcgcctctgtaggtgttgcgtgatcttgtag

SEQ ID NO: 116751 - DNA, 1272 bp, synthetic construct
  misc_feature 1..1272: note = Description of Artificial Sequence: Synthetic coding sequence
  source 1..1272: mol_type = other DNA
atggtcttttccaacaacgacgagggtctaatcaacaagaaactccctaaggaactccttctgagaatcttctcatttctggatatcgtaaccctttgtaggtgcgcccagatatctaaggcatggaatattctggccttagacgggagcaactggcaacgcatcgacctgtttaattttcagacagacgtggaaggtcgtgtcgtggaaaacatcagcaaaaggtgcggaggtttcctgagaaagcttagcctgcgaggttgtatcggcgtgggagatagctctttaaaaacctttgcccagaattgtcgtaacattgaacatctgaacttgaatggatgtacgaaaatcaccgacagcacctgttatagcttgtcacgattttgtagcaagcttaagcacctcgacctgacctcttgtgtatccatcacaaactcctcgctgaagggtatatcagagggttgccggaatcttgaataccttaatctgagctggtgcgaccaaattactaaggatggcattgaggctctggtcagggggtgcagaggtctgaaggccctcctgcttcgaggatgtacccagctagaagatgaagccctaaagcacatccaaaattactgtcacgagctcgttagtctcaatctgcaatcgtgctcacggatcactgatgagggggtggtgcagatctgccgcggctgccatcgcctccaagcactgtgcctctccggttgttctaatctgacggatgcctcactgaccgcgctggggctgaattgccctcggctgcaaatcctggaagcagcccgatgctctcacttgactgatgctgggtttacactgttagccaggaactgtcacgaactcgaaaagatggacctggaggagtgtatcttaataaccgatagcacactgatacagttgtcaatccactgccccaaactgcaagcgcttagtcttagtcattgcgagctcattaccgacgatggtatcctgcatcttagcaactcaacttgtggccacgaacggctcagagtgctggaacttgataattgtctcctcatcaccgatgtagcgttggagcacctcgagaattgtaggggcctggaaaggttggagctctatgactgccaacaggtgacgagagccgggattaaaagaatgcgagctcagttaccccacgtcaaagtgcacgcatattttgctcctgtgaccccgcccacggctgtagccgggtccggacagcgactgtgtagatgttgcgtgatcttgtag

SEQ ID NO: 116752 - DNA, 1020 bp, synthetic construct
  misc_feature 1..1020: note = Description of Artificial Sequence: Synthetic coding sequence
  source 1..1020: mol_type = other DNA
atgtacattgccttggtgtggatcttgtttgtgatgtggacatttgcccagaattgtagaaatatcgagcatctgaatctaaacgggtgtaccaaaattacagactctacatgttacagtctgtcccgcttttgttccaaattgaagcatctggatctcactagttgcgtgtccataaccaactcttcactgaaaggcatttccgagggttgtaggaatctggagtacctcaacttgtcttggtgtgaccagattacaaaagacggaatcgaggccctggttcggggctgtagagggctgaaggcattgttacttcggggctgcactcagctggaggatgaggctctgaaacacatccaaaactattgtcacgaactcgtgtcattgaatctgcagtcatgttctcggatcacagatgagggggtggtccagatctgtcgggggtgccacaggctgcaggcactgtgcctaagcgggtgtagtaatctgacagacgcatcactgacggcactcggcctgaactgtccgcgcctccagattttagaggccgcgaggtgttcgcacttgactgatgcaggcttcacccttctggcgagaaactgtcatgaactggaaaagatggatctcgaggaatgcatcctaattaccgacagcactttgattcagctgtccattcactgtccaaagctgcaggctctgagcctatcccattgcgaacttattaccgacgatggcatcctacaccttagcaattcaacatgcggccacgaacgtctcagggtactggagctggacaactgtctcttgattaccgacgtggctctggagcatttggaaaactgcaggggcctggaacgcttagagctttatgactgccaacaagtgaccagggccggaatcaagcggatgagggcacagctgcctcacgttaaggtccatgcctactttgccccggtgacgcctcccaccgctgtggcgggctccggccagcggctctgccgctgttgcgtaatactctag

SEQ ID NO: 116753 - DNA, 1068 bp, synthetic construct
  misc_feature 1..1068: note = Description of Artificial Sequence: Synthetic coding sequence
  source 1..1068: mol_type = other DNA
atggtcttctccaacaatgacgagggcctgataaataagaagctgccaaaggagttgctgctgaggatattttcgttcctcgatattgtgacgctgtgtcgttgtgcacagatttccaaagcatggaacatattagcactggacgggagtaactggcagagaatcgacctgtttaatttccagacagatgtagaaggaagggttgtggagaatattagcaagagatgtgggggattcctaaggaagctgtcccttagaggatgcatcggtgttggcgactcttctctgaagaccttcgcgcaaaactgtaggaatattgagcacctaaatctgaatggctgtacgaagatcaccgactctacctgttatagtctttctcgcttttgttccaagttaaagcatatccagaattactgtcatgaattagtgagtctaaacctgcagagttgttcccggattacagatgaaggcgttgtgcagatctgccgggggtgtcaccgcctgcaggccctgtgtctgtccgggtgctctaatctgactgatgccagcctcacagcacttggcctgaattgcccacggctgcagatcctggaagccgccaggtgcagtcatctgactgacgctggattcacccttctggcacgcaattgccatgaactggaaaagatggatctggaggagtgcattcttatcacagattcaactctgatccaattgtcaatccattgccccaaactgcaagcactgtctttgtcacattgtgaacttatcacagacgatggaatactgcacctctcaaactcgacatgtggccacgagcgattaagggtgctagagctcgataactgcttgctgataacggatgtggccctggagcacctggaaaactgtcgagggcttgagcgcttggagctctatgattgtcagcaagtaaccagggcgggcataaagagaatgcgggctcagctacctcatgtgaaggtccatgcctattttgcacctgttacccctcccactgccgtggccggatcagggcagagattgtgtagatgctgcgtgatcctgtag

SEQ ID NO: 116754 - DNA, 402 bp, synthetic construct
  misc_feature 1..402: note = Description of Artificial Sequence: Synthetic coding sequence
  source 1..402: mol_type = other DNA
atggacttggaggaatgtatattaattacggactccaccctcatccagctgagcatccactgtcccaagctccaggctttatcactaagccactgcgagctgataacagacgacggaattctgcatctcagcaacagcacctgcggccacgaacggttaagggtccttgaattggataactgtctgctcataaccgatgttgcccttgagcacctggagaattgtcgggggcttgaacgattggaactgtacgattgtcagcaggtgacaagagctggcatcaaacggatgcgtgctcagctgccacacgtaaaagtccacgcatactttgcgccggtgacacctccgacagctgtggcaggcagtggtcaacggctgtgccgctgttgtgtcatcctgtag

SEQ ID NO: 116755 - DNA, 1068 bp, synthetic construct
  misc_feature 1..1068: note = Description of Artificial Sequence: Synthetic coding sequence
  source 1..1068: mol_type = other DNA
atggtcttcagcaataacgatgagggcctgattaataagaaactgcctaaagagctgctcctacgtatcttcagcttcctggacatcgttacgctgtgccggtgcgcgcaaatatcaaaagcttggaacatccttgctctggatggctccaactggcagcgcatagacctatttaatttccagacggacgtcgagggcagagtcgtagagaacatctcaaagcgctgcggaggatttctcaggaagttgtctctgagaggctgtattggggttggagacagcagcctgaaaacattcgcccagaactgtcggaacattgagcatctcaacctgaacggatgcacgaaaattacagatagtacatgctatagcctgagccggttctgttctaagctcaagcatatccagaactactgccacgagctcgtgagtctcaacctgcagagttgtagtcggatcactgatgagggcgtggtgcaaatctgtcgcgggtgccataggctgcaggcactatgcctgagcggctgctccaatttgacggacgcttccctgaccgccctggggttgaattgcccgcggctccagatactggaagctgcccgctgttcccacctgaccgatgcagggttcacgcttctggcccggaactgccacgaacttgaaaaaatggatctggaagagtgtatacttattactgatagtacgctgatccagctgtccatccattgcccaaagctccaggccttgtctctgagccactgcgagctgatcacagacgacggaatcctgcacttgtctaattctacttgcggtcacgagaggctgcgggtcctggagcttgacaattgtctgctcatcacagatgttgctctggagcatttggagaactgcagaggcctcgagaggctggaactttacgactgtcaacaggtgactcgagccggcattaagcggatgcgggctcagctaccacatgtcaaagtgcacgcgtactttgctcctgtcacaccccccaccgccgttgcagggtctggtcagcgcctttgtcggtgttgcgtgatcctctag

SEQ ID NO: 116756 - DNA, 1260 bp, synthetic construct
  misc_feature 1..1260: note = Description of Artificial Sequence: Synthetic coding sequence
  source 1..1260: mol_type = other DNA
atggtattctccgctgtactaacagcctttcacacgggcacttccaacacgaccttcgtggtctatgagaatacgtatatgaacattactctgccacctccttttcagcatcctgacctgtcacccctgctgcgatattcatttgagacaatggcccctacaggcctgagttccttgaccgttaactctacagccgtccccactacgccagctgccttcaagagcttaaatctgccactgcagataaccctgtccgcaattatgatatttattctgtttgtaagcttcttagggaatctggtcgtgtgcctgatggtgtaccagaaggctgctatgaggagtgcaatcaatatactgcttgcctctttggcgttcgccgacatgttgctagccgtattaaacatgccattcgcactcgtcaccatcctgactaccagatggattttcggtaaatttttttgcagagtaagcgccatgtttttttggctgttcgtcatcgagggtgtggccatccttttgatcatttctattgatagatttctgataattgtccagcgccaggataaactgaacccctaccgggctaaggtgctaatcgctgtgagctgggccacgagcttctgtgtagccttcccactagccgttgggaacccagatttgcagattcctagtcgagccccccagtgtgtattcgggtacaccacaaatccaggctatcaagcttacgtgatcctgatttcccttatctcattttttattccattcctcgtgatcctatatagctttatgggcatcctgaacactttacgccacaatgccctccggatccactcctatccagagggaatctgtctctctcaggcatcaaagctcgggctgatgagtctccagcgcccattccaaatgtctatcgatatgggcttcaaaactcgcgctttcactaccattctcattctctttgccgtgttcattgtgtgttgggccccctttaccacatacagtctcgtcgcaacgtttagcaagcacttttattatcagcacaattttttcgagatcagtacctggctactgtggttgtgctacttgaagtctgcattaaaccccctaatttactattggcggatcaaaaaattccacgatgcgtgcttagacatgatgcccaagtcctttaagtttcttccccagctgccaggccatactaaacggcgcatccgaccatccgccgtgtatgtttgcggggagcaccgaaccgtcgtctag

SEQ ID NO: 116757 - DNA, 1866 bp, synthetic construct
  misc_feature 1..1866: note = Description of Artificial Sequence: Synthetic coding sequence
  source 1..1866: mol_type = other DNA
atgtcacccgtgttcccaatgctcacggtgctgacaatgttctactacatctgtctcaggagaagggctcgaacagccacacggggagaaatgatgaatactcaccgagctattgagtccaacagccagacctcacctcttaatgctgaggtggtccaatatgccaaggaggtggtggacttcagtagccactacgggtctgaaaactctatgagttataccatgtggaatctggcaggcgtccccaacgtgttcccttcctctggagattttacacaaacagccgtgttcagaacctacggcacctggtgggaccagtgccccagtgccagcctgcctttcaagcggacgccgcccaacttccaaagccaggactacgtggagctcacgttcgagcagcaagtgtaccccactgccgtccatgtgttggaaacgtatcacccgggtgctgttatcagaatactggcgtgttctgctaatccctattctccaaatcccccggctgaggtgcgatgggaaatcctctggagcgaacgaccaacaaaggttaatgcctcccaggcacgccagtttaaaccatgtattaaacaaatcaatttcccgacaaatcttatccggcttgaagttaattctagcttgcttgagtactacacagagcttgacgcagtggtgttacacggcgtgaaagataagccggttctgtccctgaaaaccagcttgatagacatgaatgacatagaggatgacgcatacgccgagaaagatggttgcgggatggactctcttaataaaaagttcagctctgcagtgctcggcgaaggcccaaacaacgggtacttcgacaagctgccttacgaactgatccagctcatcctcaaccacctaacgctccctgacctgtgtcgcctcgctcagacctgcaagctgctcagtcagcattgctgtgatccattacagtacatccatctcaatctgcagccttactgggctaagctggacgacacttccctggagtttctccagagcaggtgtactttggtgcaatggctgaatttgagctggaccgggaaccgtggtttcatttccgtagcaggattttcgcggtttctgaaagtgtgcgggtctgaactggtacgattagagctttcatgctcccatttcctaaatgaaacctgtcttgaggtgatctcagaaatgtgtcccaatctccaagccctgaacctgtcatcttgtgataagcttcccccacaggcttttaatcacatcgccaagctgtgcagtctaaagaggctagtactgtatcggaccaaggtggagcaaacagcattactgtctatcctaaacttttgtagcgagctgcaacacctgagccttgggagctgcgtgatgatagaggactacgacgtgatcgcctctatgattggtgccaagtgtaagaagctccggaccctggacctctggcgctgcaagaatattacagaaaatggtatcgcggaactggcgtctgggtgccccctcctggaagagctcgacctggggtggtgcccaaccctacagtcctcgaccggctgttttaccaggctggctcatcagctccccaatctgcagaaactgttcctaacggccaaccgttccgtttgcgacactgatatcgacgaactcgcctgcaattgcacgaggttacagcagctggacatcttgggaaccaggatggtcagtccagcttccttacgcaaactgctggagagctgtaaggacctatcccttcttgacgtttccttctgctcccagattgataatcgggctgttttggagctcaatgcaagtttccctaaggtctttatcaaaaagagcttcacacagtag

SEQ ID NO: 116758 - DNA, 2076 bp, synthetic construct
  misc_feature 1..2076: note = Description of Artificial Sequence: Synthetic coding sequence
  source 1..2076: mol_type = other DNA
atggccccctttcccgaagaagttgatgtgttcaccgctcctcactggcggatgaaacagctggttggactatactgtgacaaactatccaaaactaatttttccaacaataacgacttcagggccctcctgcaatcattgtacgccacatttaaagagtttaagatgcacgagcagatcgaaaatgagtatatcattgggctgctgcagcaacggagtcagacgatttacaacgttcatagtgacaacaaactttcagagatgttgtctttattcgagaaaggtcttaaaaacgtgaaaaatgaatatgagcagctgaattacgccaagcaactcaaagaaaggctggaagcttttaccagagacttcctgccgcacatgaaagaggaggaggaagtgtttcaacccatgcttatggaatactttacttacgaagagctaaaagatatcaaaaagaaagtgatcgcacagcactgtagccaaaaggatacggctgagcttctgcgcggtctgagcttgtggaaccacgccgaggagcgccagaagtttttcaaatactcagtggatgaaaagtctgataaagaggccgaggttagcgagcacagcacggggattacgcatttgcctccagaagtgatgttatcaattttttcttatctgaacccccaggagttgtgtaggtgttcacaggtcagtatgaaatggtcacagctcactaaaactggctcactatggaagcatctataccctgttcattgggctaggggtgactggtactccgggcctgccaccgagctggacaccgagcccgatgatgaatgggtgaagaacaggaaggatgagtctcgtgcattccacgagtgggatgaggatgcagacatcgatgagtcagaggagagtgctgaggaaagcattgccattagtattgctcagatggaaaaacgcctactgcacgggctgatacacaatgtgctgccctacgtcggtacctcagtgaagacgttggtcttggcttacagcagcgcggtgtccagcaagatggtacgccagattcttgaactttgtcctaacctagaacatctggacctgacccagacggatatcagcgacagcgccttcgactcttggtcctggcttggctgctgccagagcttacggcatttagatttgtcgggctgcgagaaaattaccgatgtggctctggaaaagattagtagggcccttggcatcctcacgagtcatcagtcagggttcttaaagaccagcactagcaagatcacctccactgcttggaagaacaaagatatcacgatgcagagcaccaagcaatacgcctgccttcacgacctgaccaataagggcattggtgaggagattgataatgaacatccatggaccaagcccgtgagttccgagaatttcaccagtccctacgtctggatgttagacgccgaagacctggccgatatcgaggacacggtggagtggcgacaccgaaatgtcgagtcattgtgtgtgatggagactgcttctaatttctcatgttcaacttcaggctgttttagcaaagatattgtgggcctgcgcaccagtgtgtgttggcagcagcactgtgcaagcccagctttcgcgtactgcggacattccttctgctgtacaggaacggccctgcggacaatgagctccctgcctgagtccagtgcaatgtgcaggaaagccgccaggaccaggcttccacgaggaaaggacctgatttacttcgggagtgagaagtccgatcaggaaaccggcagggttctcttgttccttagcttgagtggctgctatcagattacggaccacggattacgagtgttaacccttggcggtggcctgccttacctcgagcacctgaacctgtcaggatgcctgactatcactggcgccggtctgcaggacctcgtatccgcttgcccatccctgaacgacgaatatttctattattgcgacaacatcaacggaccccatgctgataccgcatctggatgtcagaatctgcaatgcgggttcagggcctgttgccgcagtggcgaatag

SEQ ID NO: 116759 - DNA, 1698 bp, synthetic construct
  misc_feature 1..1698: note = Description of Artificial Sequence: Synthetic coding sequence
  source 1..1698: mol_type = other DNA
atgaaggaggaagaggaggtcttccagcccatgcttatggaatactttacttacgaggaattaaaggacatcaaaaaaaaggtgatagcccagcattgctcacagaaagacacagctgagctgctgcggggactgtcattgtggaatcacgctgaggaacgccaaaagttcttcaaatattccgtcgacgaaaagagcgataaagaggctgaggtatctgagcacagcactgggataacccaccttccacccgaggttatgttatcaatctttagctacctcaacccccaggagctgtgcagatgttctcaagtgtccatgaaatggagccagctgaccaagactgggagcctctggaaacatctctaccctgtgcattgggcccgtggggactggtactccgggccagccaccgagctcgatactgaaccagatgacgaatgggtcaaaaaccgcaaggatgagtctagagcatttcacgagtgggatgaagatgcggacatagatgaatccgaggagagtgctgaggagtcaatagccatctcgatagcccaaatggagaaacgtcttctgcatggactgatacacaatgtgttaccttacgtggggacgtctgtgaagaccctcgttctggcctactcctcggcagtatctagcaaaatggtaaggcagattctggaactttgccccaacttggagcacctggacctcacacagacagacataagcgactctgcattcgattcctggtcatggcttggatgctgtcagagcctcagacacttagacctgtcagggtgcgaaaagattacagatgtcgcgttggagaaaatttctagagccttgggtattctgacttcccatcagtctggctttttgaagactagcacctctaagattacaagcactgcttggaagaacaaggatattaccatgcaatcaacaaagcagtatgcttgccttcatgatttgacaaataaaggcataggcgaagagatagacaacgagcacccatggaccaaacccgtgagctccgaaaatttcacgtctccctatgtgtggatgctggatgcggaagacctggcggacatcgaagataccgttgagtggaggcatcggaatgttgagtccctttgtgtcatggagacagcttccaacttttcttgctccacctcgggatgtttttccaaggacatagttggactgcgtacaagtgtatgttggcaacaacactgcgcatctcccgcgtttgcatattgcggccactccttctgctgcactggtactgcccttcgcaccatgagctcacttcctgaatcctccgccatgtgcaggaaggccgcgcggacacgcctcccacgagggaaagacttaatttatttcggatctgagaaaagcgatcaggaaacgggcagagtgctcctttttctctccctgtcaggctgctaccagattaccgatcacggcctgcgagtcctgactctgggcgggggtctgccgtacctagaacacctcaatctcagcggttgcctaaccatcactggcgcagggcttcaggatctcgtgtctgcctgccctagtcttaacgatgagtacttttactactgcgacaatattaacggaccccacgccgatacggctagcggatgccagaaccttcaatgcggatttcgggcttgctgcaggtccggcgagtag

SEQ ID NO: 116760 - DNA, 2025 bp, synthetic construct
  misc_feature 1..2025: note = Description of Artificial Sequence: Synthetic coding sequence
  source 1..2025: mol_type = other DNA
atggctccgttccccgaagaggtggatgtcttcactgcgcctcattggcggatgaagcaattggttggattgtactgcgacaagtcgttgtatgcgaccttcaaagaatttaagatgcacgaacagattgagaacgagtatattatcggactgcttcagcagcgctcccagactatttataacgtgcacagcgataataaactgagcgaaatgctgagcctctttgaaaaaggactgaaaaacgtgaaaaatgagtacgagcaacttaattatgccaaacaactgaaagagcgactggaggcatttactcgtgatttcctgccacacatgaaggaagaggaggaagtattccagccaatgttgatggaatattttacatacgaggaactaaaagatattaaaaaaaaagtgatcgcccaacactgctcacagaaggacaccgcggagctactgagagggctatcactctggaatcatgctgaagagagacagaaattttttaagtacagcgtcgatgaaaaaagtgacaaagaggctgaggttagcgagcactccacaggtattacacacctgccaccagaggtcatgctaagcatcttcagttatctaaacccccaagagctgtgcagatgctcccaggtctctatgaaatggagccagcttaccaaaactgggtcactttggaaacacctctatccagtgcactgggcgcgcggagattggtactccggccccgccaccgagttagacacagagccagacgatgagtgggttaagaatagaaaggatgaatcccgggcctttcatgagtgggacgaagatgctgatattgatgagtccgaggagtccgccgaagagtccatcgcaatttccattgcccagatggaaaagcgactgttgcacgggttgatccataatgtcctgccctacgtgggcacgagcgttaagaccttagtgctggcttactcgtcagctgtgtctagtaaaatggtgagacagatactggagctgtgtccaaacctcgagcacttggatctgacccagactgacattagcgactctgcctttgattcctggtcttggctcggctgctgccagtcactgcggcacctcgacctctctggatgcgagaagatcactgacgtagctctcgaaaagataagccgagccctgggcatccttaccagtcaccagtcaggattcttgaaaacaagcacgtctaaaatcacttctaccgcctggaagaacaaggacataacgatgcagtccaccaaacagtacgcctgcctgcatgatctaacaaataaggggattggtgaagagatagataacgagcatccttggactaagcccgtgtcaagcgaaaatttcaccagcccctatgtgtggatgcttgatgcagaggaccttgccgacatcgaagacactgtagagtggaggcatagaaacgtggagtccctgtgtgtgatggagacggcctctaatttcagctgttccacgtctggatgtttcagcaaagacatcgtaggccttagaacttccgtgtgttggcagcagcactgcgcttcgcccgccttcgcttactgcggccactccttttgttgcaccgggacggccttacgcaccatgtcctctttgcccgaaagtagcgctatgtgtaggaaggcagccaggacccgcctgcccagaggcaaagacctgatctacttcggtagtgaaaaaagcgaccaagagaccggtagggttctactgttcctgtccctctcagggtgttaccagatcacagaccatggcctcagagtgctgaccctgggtggcggcctgccatacctggaacatctgaatctgagcggctgtcttaccatcacaggtgctggattgcaggatctggtttccgcctgtccgagcctgaatgacgagtacttctattactgtgacaatattaacggcccacacgctgataccgccagcggctgtcaaaaccttcagtgcggatttcgcgcttgttgcaggagtggtgaatag

SEQ ID NO: 116761 - DNA, 1440 bp, synthetic construct
  misc_feature 1..1440: note = Description of Artificial Sequence: Synthetic coding sequence
  source 1..1440: mol_type = other DNA
ggaaaggggtcctccagcatttcgagtgacgtcagctcttccaccgaccacacgccaactaaggcccaaaaaaacgtcgcaaccagcgaggacagcgacttatccatgcgtactctctctacaccctcgcccgcactcatttgcccaccgaatctgcccgggtttcagaacggcaggggctcctcaacttcaagctcatccatcaccggggagacagtggctatggtgcacagccctccacccactagattgacacacccactcattcggctcgcttcccgtcctcaaaaagaacaagctagcatcgaccgtctccctgaccactccatggtccagatattctccttcttaccaacaaatcagctgtgtcggtgcgctagggtctgtagaaggtggtacaatctggcttgggatcctagactctggaggacaatcagactcactggcgagaccatcaatgttgatcgcgcccttaaggtcctgacccggagactctgccaggatacacccaatgtctgcctcatgctggagactgtcaccgtcagcggatgtaggagattaactgaccgaggcctgtataccatagcacagtgctgccctgaactgaggaggctcgaagttagtggatgttataacatatcaaacgaggctgtattcgacgtggtttctctgtgccctaatctcgagcacctggatgtctcaggttgctctaaggtgacatgcatctctctgacacgcgaagcttccataaagcttagccccctgcatggaaagcagatatcaatccggtatctggatatgaccgattgtttcgtgttggaggacgaagggctgcatacgatcgccgctcattgtacccaactgacacatctgtatctacgtcgttgcgtccgcctgacagatgagggcctcagatacctggtgatttattgcgcaagtatcaaagagctgagtgtgtcagattgcagatttgtgtcggactttggcttgcgggagatcgccaaactggagtctcggttacggtacctgtctatcgcccattgcgggcgcgtcactgacgtgggcatccggtacgtggccaaatattgctcaaagcttcgctaccttaatgcccgcggttgtgaaggcattactgatcacggggttgagtaccttgcaaagaattgcacaaagctgaagagtcttgacattgggaagtgcccactggtgagtgacactggcctggagtgcctagccctcaattgcttcaacctcaagcggcttagtctgaaaagctgcgaatccattaccggacaaggattgcaaatcgtggctgcaaattgttttgatctccagaccttgaacgtgcaggactgtgaagtatcggtggaagccctaagattcgtgaagcgacattgcaaacgttgtgtcattgaacacacaaatccagcgttcttttag

SEQ ID NO: 116762 - DNA, 1476 bp, synthetic construct
  misc_feature 1..1476: note = Description of Artificial Sequence: Synthetic coding sequence
  source 1..1476: mol_type = other DNA
atgggcgctaacaatgggaagcagtatgggtctgaaggaaaaggatcatcaagcattagcagtgacgtctcctcgtctacagaccatacacccaccaaggctcagaagaacgtagcaacttccgaagactcggacctgtcgatgcgaacgctctccacacccagccccgccctgatctgtccgcccaacctgccgggttttcagaacggacgcggatcctccactagttcgtcttctattacaggcgaaaccgtagcgatggtgcactccccgcctcccaccaggttaacgcaccccctcatccggctggcaagccgacctcagaaggagcaggctagtattgaccgtttacccgaccactccatggttcaaatcttctccttcttacccacaaatcagctgtgcagatgtgccagagtgtgtaggagatggtacaatctcgcatgggacccacggctgtggcgcacaattagactcaccggggaaactattaatgttgacagagctctgaaggtgctgactagacggctctgccaggacactcctaacgtctgtctgatgctggagaccgttaccgtttccggatgccgcaggttgacagatagagggttgtacacaatagctcagtgttgtcccgagttgaggagactggaggtttcaggctgctataatattagtaacgaagctgtgtttgacgtcgtttctctctgccccaatctcgagcacttggatgtgagcgggtgttccaaagtcacatgcatctctctgacccgggaggcttccattaaacttagcccactgcatgggaaacaaatcagtattcgatatttagacatgaccgattgtttcgttctggaagacgagggcttacacactattgctgcacactgtacccagctgacgcacctatatttaaggagatgcgttcgcctgactgacgaggggctgaggtatctcgtgatctattgcgcctctataaaagaactaagtgtgtccgattgtagattcgtatccgatttcggtctgcgggaaattgctaagctggagagtcgccttcgctatctgtcaatagcccactgtggtagggtgacagatgtgggaattcggtacgtcgcgaaatactgcagcaagctcaggtatctgaacgcccgagggtgtgagggaatcaccgatcacggcgtggagtacctggccaaaaattgcactaaactcaaaagcctggatattggcaagtgccctctcgtaagcgacacaggtttagaatgtctggccttgaactgtttcaacttgaagcggttgagcttgaagtcttgtgaatctattaccggccagggattacaaatagtcgctgctaactgtttcgacctgcagactctcaatgtacaggattgtgaagttagcgtggaggcgttgaggtttgtcaagcgccactgcaagcgctgcgtgattgagcataccaatcccgcctttttttag

SEQ ID NO: 116763 - DNA, 3000 bp, synthetic construct
  misc_feature 1..3000: note = Description of Artificial Sequence: Synthetic coding sequence
  source 1..3000: mol_type = other DNA
atggaaaacctggaatctaggttgaagaatgctccctatttccgctgtgagaagggaactgacagcattcctctgtgccgcaaatgtgagacatgcgtccttgcttggaaaatattcagcaccaaggaatggttttgtcgcattaatgatatctcccaaaggcggtttcttgtcggaatcttaaagcagctcaattcattgtatcttctgcactatttccaaaacatcctgcagacaacacagggaaaggactttatttacaatcgttctcgaataaatctgtctaaaaaagagggcaaggttgtgaagagctctctgaatcaaatgctggacaagaccgtcgaacagaagatgaaggagattttatactggttcgcaaacagcacccaatggaccaaagccaactataccttactgcttcttcaaatgtgcaatcccaaactgctccttacggcagcgaacgtgattagagtgctcttcctgcgcgaggaaaataacatcagcgggctgaatcaagacattaccgacgtatgtttcagcccagaaaaagatcatagtagtaagagcgcaacttctcaagtctattggactgctaagacccagcacacctcactgccattatccaaggcccctgagaatgagcacttgctcggagcagcgtccaatcccgaggagccttggagaaacagtctgcgatgtatatcggaaatgaatcgcctgttctctggcaaaggcgacattaccaagcctgggtacgatccctgcaatctgctcgttgatctggacgatatccgcgatctcagttccggctttagcaaatatcgggactttattagatacttgcctatccacttgtctaagtatatcctgcgcatgctggaccgccacaccctcaataaatgtgcatcagtcagtcagcattgggcagctatggcccaacaggtaaaaatggatctatctgcgcacgggttcatacagaaccaaatcacattcctccagggcagttacacgcgtggcatagaccctaattatgcaaacaaagtgtctattccagtgcccaaaatggtggatgatgggaagtctatgagagtgaagcatcccaagtggaaactgcggaccaagaatgaatacaacctgtggaccgcctatcagaatgaggagacccagcaggtgctcatcgaagagcggaatgtgttttgcggtacgtataatgtccgtattttatctgatacctgggatcagaaccgggtaattcactactctggcggggacctgatcgctgtctcaagcaaccgcaagatccatttgctggatattatccaagtaaaagctatccctgtagaatttcggggccacgccgggagtgtgagggcactgttcctctgtgaggaggagaatttcctcctgagcgggtcctacgatctgtcaattcggtattgggatctgaaatctggcgtatgtactaggatttttgggggtcaccagggaacaatcacatgcatggatctctgtaagaacaggctcgtatccggggggcgagattgtcaggtgaaagtatgggatgttgacaccggcaaatgcctgaaaacgtttaggcacaaggacccgatactcgctacacgtatcaacgacacatatatcgtgagttcttgcgagcgagggctggtcaaagtttggcatatcgccatggcccagctggtcaaaacactcagtggccatgagggtgctgtcaagtgtctgttctttgaccaatggcatcttctctccgggtcaaccgatggacttgttatggcgtggtcgatggtgggtaagtacgagcgttgcctgatggcattcaaacatcccaaaatggtggtaaacacggagagcaacgtgttaatgtttcagtttgagcacatcaagtggcaatacgccgtggaaaagactaaacagaagaagaacaaggagaaggaggaagagaaggaagaaaactctcttatggagatcttgtccaaatgtaacattcaagttcacagccctagggaatcagtttctagcaaacaaacagtgatacaagagctcctgccagggaaacccccgaagtctagggtgctcttgaaaccagctaagttctcttcagccgtgttgattgaagagcttcaaagccagggtaagtctaaaagcccaagaagagatgcggatgatgtagaaaaggcacagaaacaggggcaactcgagacaccaggaaaactcccaagtcacccaaagaaaaagtcctggaagatacctatgagcccagatcagtttctgcttacagtctctgccctccagcatgcccacaactccggggagtttgcctacccctgtcggccacagactgaaatcaccgacgtgtggggcccttccatttcttacccccgtaaggtgctcaactttaaggggaaatccattcagcgggcagtggataggctaagactgtctaacccccctatcgacgtgaagcggacttccatccctctggagattcagaaattgcagccaaatctcaagatctcccttcactccccaagggtgcaaagtaccataccgcaaccaatgattatccggagtcggttttccggttcgctgaagggaggcgaccaggtgacgtcctcaatcgagagggccgtgtgttctactggaccactcacatcaatgcaggttatcaagccgaatcgtatgttggcaccacaggtgggcactgctactctttcccttaagaaggagaggccccgaatctataccgctctcgacccatttagagtcaacactgagttcgttctgctgaccgttaaggaagagaaagagcaccaggaggcgaaaatgaaggagtatcaggcccgggagtctaccggcgtggtggatcccgggaaggtctctaaggccgcatggattcgaaaaatcaagggcctacccattgacaactttactaagcaggggaaaactgctgcccctgaattaggtcagaacgtgttcatatag

SEQ ID NO: 116764 - DNA, 3186 bp, synthetic construct
  misc_feature 1..3186: note = Description of Artificial Sequence: Synthetic coding sequence
  source 1..3186: mol_type = other DNA
atggaaaatctcgaatcccggttgaaaaatgcaccgtattttagatgcgaaaaaggcacagatagcattccgctgtgcagaaagtgtgaaacctgcgttctggcctggaagatattttccaccaaagaatggttctgtaggattaacgacatcagtcagcgccggtttctcgttggtatcctcaagcagctgaactctctgtacttgctgcactatttccagaacattctgcagaccacgcaggggaaggacttcatatacaatcggtcccgaattaatctgagtaaaaaggagggtaaggtcgtcaaatcttctctgaaccagatgctggacaagaccgttgaacagaagatgaaagaaattttgtactggttcgcgaattcaacccagtggacaaaagctaattacacgctactcctgctgcagatgtgtaaccctaagctcctgctgacagccgcaaacgttattagggtgctgttcctcagagaagagaataatatctctggcctgaaccaggatataaccgatgtgtgtttctctccggaaaaggatcactcctccaagtctgcaaccagccaggtatactggacggccaagacccagcacacttccctcccgttatccaaggcgcccgaaaatgagcacctgctcggggctgcttccaaccccgaggagccatggagaaacagcttgagatgtatttctgaaatgaacaggcttttctctgggaaaggggatataactaaacccggctacgatccctgcaacctccttgtcgatctggacgacatcagagacctgagttccgggtttagtaagtacagggactttatacgttatcttcctatccacttgtctaaatacatcctgtctatgctgggctgtatgaggggcttccctcgccatctgcctagttggccctcttctggggtttcagggtctatcttcttcttccctggcatgctcgaccgtcacacacttaacaaatgcgcatcagtctcacagcattgggccgcaatggctcagcaggtcaagatggacctgtccgcacacggcttcatccagaatcaaatcacatttctgcaaggctcttatacccgggggatagaccctaactacgctaataaggtgagcatccccgtgcccaagatggtagatgacggcaagtcaatgagagttaaacaccccaaatggaagctccggactaaaaatgaatacaatttatggactgcctatcagaatgaggagactcaacaggttcttattgaagaacggaatgtcttctgcggtacttacaacgtgagaatcctttccgacacctgggaccaaaaccgtgttattcactatagtggcggggatcttatcgccgtgagctccaatcgcaaaatccatctgctggacatcattcaagtgaaagccataccagtggaatttcgtggccacgccggatctgtcagagccctttttctctgcgaagaagagaacttccttctgagtggcagctacgacctgtccattcggtattgggatctcaagtcaggggtttgtacacgtatcttcggcggacaccagggcacgatcacttgcatggacttatgcaaaaatagactcgtgagcggcgggcgagattgccaggtgaaggtgtgggacgtcgacactggcaagtgcctgaaaaccttccgacataaggacccaatcctcgcaacccgcatcaatgacacttacattgtgagctcgtgtgaaagggggttagtcaaagtctggcatatcgccatggcacagcttgtcaagaccctttctgggcatgagggcgctgtgaaatgcttattcttcgaccagtggcacctcctcagcggctctactgatggcttagtgatggcctggagtatggtgggtaagtatgaaagatgtctgatggcttttaaacacccaaaagaggtcctggacgtaagcttgttgtttctgagagtgatcagcgcctgtgccgacggcaaaatcaggatatataacttcctcaacggcaattgcatgaaggtgttgaaagcaaatggcagaggcgatccggtcctttcgttttttattcagggaaataggatggttgtgaacactgaatccaacgtgttaatgttccagttcgagcacatcaaatggcagtatgccgttgaaaaaactaagcagaaaaagaacaaagagaaggaagaagaaaaggaagagaatagtctcatggaaattctgagtaaatgtaatatccaggttcattccccacgcgaatctgtctcgagcaagcagacagttatacaagaactactccccggaaaacctcctaaatcacgcgttctcctgaaaccagccaaatttagctccgacgacgttgaaaaagctcaaaagcagggacaactggaaacaccaggtaagctccccagtcatcctaagaaaaagtcctggaaaatccccatgtcccccgaccagtttttattaaccgtgtcagccctgcaacatgcccacaattccggcgagttcgcatatccctgccggccacaaacagaaattacagacgtctgggggccaagcatcagctaccctagaaaggttttgaacttcaaagggaagtccatccaaagagccgtggatcgactgagactgagcaaccctcccatcgacgtgaaaagaacctcaatccccctagaaatccagaagttgcaacctaatttgaagatctcccttcattctccaagggtccaatccactatccctcagcctatgatcattcggagcaggttttctggatcgttaaaagggggcgaccaagtcacaagcagcattgaacgagctgtgtgtagcactggtcctcttacttccatgcaggtgattaaaccaaaccgaatgttagcaccacaggtggggacggcaacattgagtctgaaaaaagagcgccctaggatctatactgccctggacccgtttcgagttaacaccgaattcgtcctcttgacagtcaaagaggagaaagaacatcaggaggctaagatgaaagaataccaggcaagggagagcactggtgttgtcgacccaggtaaagtctctaaagctgcttggatccgcaaaatcaagggactccctattgacaattttacaaagcagggaaagaccgccgccccagaactcggtcaaaatgtgttcatctag

SEQ ID NO: 116765 - DNA, 3159 bp, synthetic construct
  misc_feature 1..3159: note = Description of Artificial Sequence: Synthetic coding sequence
  source 1..3159: mol_type = other DNA
atggagaacttggaatctaggctgaagaacgctccttatttcaggtgcgaaaaaggaaccgattctatcccattgtgcaggaaatgcgaaacatgtgttctcgcctggaaaatattcagcactaaggagtggttttgtcgaatcaatgatatcagccaacggcggttcttggtaggcatcctcaaacagttaaacagtctttacctgctgcactacttccaaaatatactgcagaccacacagggcaaggatttcatttacaaccgatcccgcattaacctgtctaagaaggaagggaaagtagtcaagagctcacttaaccaaatgctggataaaaccgtagaacagaagatgaaagagattctgtactggtttgctaacagcacccagtggaccaaagcgaattatacactactgctgctgcagatgtgcaaccctaaactgctgcttacagcagcaaatgtcattcgggtcctctttctgagagaggagaataacatttccggtctaaatcaggacataacggatgtgtgcttctcacctgagaaggatcacagtagcaaaagcgcgacctctcaggtgtattggacggctaaaacgcagcacacaagcctgccgctatctaaagcacctgagaacgagcatctcctcggcgccgcctcaaacccagaggagccttggagaaactccctgcggtgcatctctgaaatgaacagattattctccggcaagggggacattaccaagcctgggtacgatccctgcaatctgctggtggatctggacgatatccgagacctcagctctggattttcaaaataccgggattttatacggtatctccccatccatctgtcgaagtacatcttgcgtatgctcgatcgtcatacacttaataagtgcgctagcgtctcccagcattgggcagccatggctcagcaggtgaaaatggacctctccgctcatggattcatccagaaccagatcacctttcttcagggatcctatacaagaggcattgaccccaattacgcaaataaggtctcgattccagtcccgaagatggtggacgacggcaagtccatgagggtgaaacatcccaagtggaagcttaggaccaaaaacgagtacaacttgtggacggcataccaaaacgaagagacccagcaggtactcatcgaagaaagaaacgtcttttgcggaacatacaacgtacggattttgtctgacacatgggaccagaatagagtcatccattacagtggaggagatctgattgccgtctcctctaatcggaaaatacatctactggatattatccaggtcaaggctatccccgtggagttccgaggccacgccggcagcgtcagggcgttgttcctctgcgaggaggagaattttctcctgagtggcagctatgatcttagcattagatattgggatctgaagtcgggagtctgcactaggatcttcggcggtcatcaggggacgatcacgtgcatggacttatgcaaaaaccgcttagtcagcggagggagggattgtcaagtcaaggtctgggacgtggatactgggaagtgccttaagacctttagacataaagatcccattctcgccacacgcatcaatgacacatacatagtttcatcctgtgaaaggggcctggtaaaagtgtggcatatagctatggcacagctagtgaagaccttaagcggtcacgagggcgctgtgaagtgtctcttttttgaccagtggcatttgctaagcgggagcactgacggactcgttatggcatggtctatggtgggcaagtatgagaggtgcttgatggcattcaaacaccctaaggaggttctggacgtaagtcttttatttttgagggtcatttcagcttgtgccgacggaaagatcaggatctacaatttcctgaatggaaattgcatgaaggttttgaaagctaatggaagaggcgatcccgtactgtcgttcttcatccagggtaataggatggtggttaatacagaatccaatgtgctgatgtttcagtttgagcacattaagtggcaatatgctgtggagaagaccaagcagaagaagaacaaagagaaagaggaggaaaaagaagaaaactcactgatggagattctgtcaaagtgtaacattcaggtgcatagccccagagaatccgtgagctccaaacagactgttattcaggagctcctgcccggaaaacctccaaagtctcgagtgctgctcaaacctgccaaattttcttctgccgtgcttatcgaagaattgcagtcacagggcaaaagcaaatccccccgaagggacgccgatgatgtggagaaggcacagaagcaggggcagctggaaacccccggtaagctaccctctcaccctaaaaagaagtcctggaaaataccaatgtcgccagatcaatttctcctgacggtaagcgcactgcagcacgcacataactccggcgagttcgcatatccttgtagacctcagacagagattacagacgtctggggacctagcatcagctacccaaggaaggtgcttaactttaaaggaaagagtatacaaagagcggtcgaccggctaaggctctcgaacccaccgatagacgtgaaacgcacttctatacctctcgagatccaaaaactgcaacccaacctcaaaatctctctgcactccccccgcgtccagtccaccattccccagcctatgatcattagatctcggttcagcggttccttgaaagggggcgaccaggttacttcctccatcgagagggctgtatgttcaacaggtcccctgacttctatgcaggttatcaagcccaaccgtatgttagctccacaagtgggaaccgcaaccttgagtctgaaaaaggagagaccgcgcatatataccgcacttgatcctttccgagtgaacactgaatttgtgctcttgacagttaaggaagaaaaagagcaccaggaagctaaaatgaaggaataccaggcccgcgagagcaccggggtagtggacccaggcaaggttagcaaggctgcgtggatcagaaaaattaagggtctgcccatcgataatttcacaaagcagggaaagaccgcggcccctgagcttgggcagaatgttttcatttag

SEQ ID NO: 116766 - DNA, 3156 bp, synthetic construct
  misc_feature 1..3156: note = Description of Artificial Sequence: Synthetic coding sequence
  source 1..3156: mol_type = other DNA
atggagaatctggaatcacgactgaagaacgccccatattttcgctgcgagaaaggcaccgattcaatccctctctgccggaaatgtgagacttgcgtgctggcttggaagattttcagcacaaaagagtggttttgccgcattaatgacatttctcagcggcgattcctggtgggcatccttaaacagctgaatagtctctacctccttcactacttccaaaatattttgcagaccactcagggaaaagatttcatttataaccgcagcaggatcaatctctctaaaaaggaaggcaaggtcgttaaatcctcgcttaatcagatgcttgacaagaccgtagagcagaagatgaaagaaatcttatactggtttgcgaatagtactcaatggacgaaagccaactacacgttgcttctactgcaaatgtgcaaccctaaactgctgctgaccgctgccaacgtgatcagagtgctgtttctgagagaggaaaacaatatcagcggactgaaccaggatatcacagacgtttgtttttcacctgagaaagatcactcatcaaagtcggcaacaagtcaggtctattggaccgctaaaacacaacatactagcctgccattgtcaaaagcgccggaaaacgagcatttactgggggctgctagcaatccggaggagccgtggcgtaattctctcagatgcatctcagaaatgaacagactattttccggcaagggcgacatcacaaaaccgggctacgatccctgtaatctcttggtggacttagatgatattagggacttgtcgagcgggtttagcaaataccgggactttataaggtacttgcctatccatctaagcaaatatattcttagaatgttggacaggcacactctcaacaagtgtgcaagcgtatcgcaacactgggcagctatggcccagcaggtcaaaatggacctgtcggctcatggcttcatccagaaccagattaccttcctccaaggttcttacacacgcggtatcgaccctaactatgcaaataaggtgtccatccccgtgcccaaaatggttgacgacgggaaaagcatgcgtgttaagcatccgaaatggaaacttaggacgaagaacgagtacaacctgtggaccgcttaccaaaatgaggagacacaacaggtcttgatagaggagagaaacgttttttgtggcacttacaatgtgcggattttgagcgatacctgggaccagaatagggtgatacactactctggcggagatctgatcgctgtgagcagcaataggaaaattcacctgcttgacattatccaagttaaagccatcccagtggaatttcggggccatgcagggtctgtgcgagctttatttttgtgtgaggaggaaaactttcttctttcaggctcctacgacctgtcaataaggtactgggatctgaagagcggggtttgcacccggatattcggcgggcatcagggcacgatcacatgcatggacctgtgtaaaaatcgtcttgtctcaggtggccgcgattgtcaggtcaaagtttgggacgtcgacacaggcaaatgcctgaagaccttcaggcataaggaccctatcctggccacgcgtattaacgatacttacatagtgagctcctgcgaaagaggactggtgaaagtctggcacatagcaatggcgcagctcgtgaaaaccttgtccggccacgagggggccgtcaagtgtctattctttgatcagtggcaccttctctccgggtctacagatggtctggtgatggcttggtctatggtgggcaaatacgagagatgcctgatggcgtttaagcacccaaaagaggtcctggacgtgagtctcctgttcctgagagtcatatctgcctgtgccgacggcaaaatcaggatctacaacttccttaatggcaattgtatgaaggtgctgaaggcaaacggtaggggggaccccgtgttgtctttcttcatccaaggtaatcgaatggtggtgaacactgagtccaacgttctgatgttccaattcgagcacataaagtggcagtacgctgtggagaaaacaaagcagaagaagaacaaggagaaggaggaagagaaagaggagaacagtctgatggagatactgtccaaatgcaatatacaggtgcatagccccagagagtctgtgtcaagcaagcaaaccgtaattcaggagctgctgcccggtaagccccccaaaagtcgtgtgctactaaagccagcaaaattttcaagtgcagtgttaatagaagaactgcagtcacagggaaaatccaaatcacccagacgtgacgacgacgtggagaaggcgcagaagcaagggcagttggaaacgcctggcaagctgccgtctcatcctaagaaaaaaagctggaagatccccatgtcacccgaccagttcctgctgaccgtgtcggccttacaacacgcgcacaatagtggggagttcgcctacccttgccgcccacaaaccgagatcacagacgtatggggaccatccatttcctacccgagaaaggtgctaaatttcaagggcaagagcattcaacgtgcagttgatagattaagactctctaacccaccaattgacgtgaaacgtacatcaatccccctagagattcagaagctccagcccaatctcaagatctccctgcattctcccagggtgcaatctactatcccacagcccatgattattcgatctcgattctccggaagcctcaagggtggggaccaggtgacgtcttctatcgaaagggctgtgtgctccacaggacccctgacctctatgcaggtgatcaaacctaatcgcatgcttgctccgcaggtgggaaccgcgactttatctctgaaaaaagagaggccacggatatacactgctcttgatcccttccgagttaataccgagtttgtgctgcttactgtgaaggaagagaaggaacaccaggaagccaagatgaaagagtatcaagcccgggaatctactggagttgtcgaccctggaaaagtcagtaaagcagcctggatcagaaaaataaaaggcctccccattgataattttacgaagcaggggaaaacggctgcccctgagctgggccagaacgtttttatctag

SEQ ID NO: 116767 - DNA, 1629 bp, synthetic construct
  misc_feature 1..1629: note = Description of Artificial Sequence: Synthetic coding sequence
  source 1..1629: mol_type = other DNA
atggaacctgatagcgttatcgaagacaagacaatagagctgatgtgttccgtgccgaggtcactgtggctgggctgcgctaacctcgttgagagcatgtgcgctctgtcctgtctccagagtatgccgagcgtgcggtgcctacagatctcaaatggcacatccagtgtcatcgtttctagaaaaagaccctcagaaggcaattatcagaaagagaaagatctgtgcatcaagtactttgatcagtggtccgaatcagatcaggtggagtttgtggagcatcttattagtcgcatgtgccactatcaacatggtcatattaacagctatctaaagcctatgctgcagagggactttattaccgcccttccagaacagggactggatcacatagcagagaacatcttgtcgtatctggacgctcgctcactgtgtgcagccgagctggtgtgtaaagagtggcagagggtgatctccgagggtatgctgtggaagaagctgattgagcggatggtgcgaacagacccactgtggaaaggacttagcgagcgccgtggatgggatcagtacttgtttaaaaatagaccaaccgatggcccccctaatagcttctaccgtagtttgtatcccaaaattattcaagacattgagacgattgagtcgaattggcggtgtggccggcacaacttgcagcgcatccagtgtaggtctgagaattcgaagggcgtctactgtctgcagtacgacgatgagaagataattagtggactgagagataactccataaagatttgggacaaaacttctttagaatgtctcaaagtgcttaccgggcatacaggaagcgtcctgtgtcttcaatacgacgagagggtcatcgtgacagggagctcggacagcactgtccgggtctgggatgtgaataccggggaggtgctgaacactcttattcatcacaacgaggcagtgctgcacctgcgtttcagtaacggactcatggtgacgtgctctaaagatcgcagcatcgcggtctgggatatggcaagcgcaacagatatcacactgaggcgcgttctagtgggtcatcgagcagcagtcaatgtcgtagatttcgacgataaatatatcgtctctgcgtcaggagatcggaccatcaaagtgtggtccacctctacctgcgagttcgtgcgcaccctcaacggccacaagcgcgggatcgcctgtctgcaatatagggaccggctggttgtctctggctctagcgataacactattaggctgtgggacattgaatgtggtgcctgcctgagagtcctcgagggacacgaagaactggtgaggtgtatccggttcgacaacaagcgcatcgtatcaggcgcctatgatggcaagatcaaggtatgggacctgcaggcggcgctggatccgagggccccagcctctacactgtgcctgagaaccctggtcgaacactcggggagagttttcagattgcaattcgatgagtttcagatcatctcttccagtcacgatgacactatcttgatatgggacttcctgaatgtgcccccttcggcacaaaatgagactaggagtccgagccggacttacacatatatctctagatag

SEQ ID NO: 116768 - DNA, 1590 bp, synthetic construct
  misc_feature 1..1590: note = Description of Artificial Sequence: Synthetic coding sequence
  source 1..1590: mol_type = other DNA
atggagcccgacagtgtgatcgaagacaaaactattgagctgatgaatactagcgtgatggaagatcagaacgaggatgagtcacccaagaagaacaccctttggcaaatctctaacgggacatcctccgtaatcgtgtccagaaaacgcccctcggaaggcaattaccagaaagagaaggatctctgtatcaaatattttgaccagtggagcgagagcgatcaagttgaattcgtggagcatttgatatcgcgtatgtgtcactaccagcacgggcacataaactcctacttgaaacctatgctgcaaagagattttattaccgcgctacccgaacaaggccttgatcatattgccgaaaatatactgtcgtatctggatgcccgatctctgtgtgctgcggagctggtctgtaaagagtggcagagagtgatcagcgagggcatgctgtggaaaaagttaatcgaaagaatggttagaacagatcctttatggaaggggctgagtgagcgcaggggctgggaccagtacctcttcaagaatcggcctactgacggcccacctaattcgttctatcgctcgttgtatcctaaaatcatccaggacattgagacaattgagagcaactggagatgcggcaggcataacctgcagagaattcagtgcagaagtgaaaactccaaaggggtttactgcctgcagtatgacgatgagaagatcatcagcggcctgcgcgataacagcatcaagatttgggataaaacaagcttagaatgtctgaaagtcctgacgggccatactgggtctgtgctgtgtctgcaatacgatgaacgcgtgatcgtcacaggatcaagtgattccaccgtgcgagtgtgggatgtgaatacaggagaggtgctaaataccctgatccaccataacgaggctgttctgcacttacggttttcgaatgggttaatggtaacctgctccaaggataggagtatcgccgtgtgggatatggcctccgctacagacatcacactgagaagggttctggtcggacacagagcagccgttaatgtagttgatttcgatgataagtacatcgtgtcagccagcggggacaggactatcaaggtgtggagcacttccacgtgcgagtttgtgaggacgcttaatggccataagagaggtatcgcatgcctccagtacagggaccgtctcgtggtcagcggtagctcagacaacaccataagactctgggatatcgagtgcggagcctgcctcagagtgttggagggccacgaggagctggttcgctgcattcgcttcgataacaagcggatcgtgagcggcgcctacgacggtaagatcaaggtctgggacctgcaggccgccctcgaccctcgcgctcctgcatcgacattgtgtttaagaaccctggtggaacactccggacgcgtttttcggctccaattcgatgaatttcagatcatatccagcagtcacgacgatactattctcatctgggacttcctcaacgttccaccaagcgctcagaatgagacccggtccccgagccgaacgtatacgtacatcagtcggtag

SEQ ID NO: 116769 - DNA, 1527 bp, synthetic construct
  misc_feature 1..1527: note = Description of Artificial Sequence: Synthetic coding sequence
  source 1..1527: mol_type = other DNA
atggaacccgacagcgtgatagaggacaaaacgatagagttgatgattagcaacggaacatcctctgtgatcgtgtcacgcaaaagaccatcagaggggaactatcagaaagaaaaggacctttgtattaagtatttcgatcagtggagcgaaagcgaccaggttgagttcgtggagcaccttatctctaggatgtgtcattaccaacatggccacattaacagctatttgaagccaatgttgcagcgggactttatcacagccctgccagagcagggacttgaccatatagccgagaatatattgtcttacctggacgcccggtctctttgtgcagctgaactggtctgcaaagaatggcagcgggtgattagcgagggtatgctgtggaaaaagctgatcgagaggatggtgcggacagatcccttgtggaaggggcttagcgagaggcgaggctgggaccagtacctgtttaagaatcgaccgactgatggcccccccaattctttttaccgctctttgtaccctaagataattcaggatatcgaaacaatagaaagcaattggcgctgcggtaggcacaatctgcagaggatccaatgtaggtcagaaaatagtaagggggtgtattgtctccagtatgatgacgagaaaattataagcggcctgcgagataacagcattaagatctgggacaagaccagtctggaatgcctgaaggttttaaccggtcacacaggctctgtactatgtttacagtacgacgagcgtgtcatcgttaccggatcttcagatagcacggttagggtatgggatgtgaacaccggagaagttttgaacacactgatccatcataatgaagcggtacttcatcttaggttttcgaacggcctgatggtcacttgtagtaaggacagatcaattgccgtgtgggatatggcctccgctaccgacatcaccctccgaagggtgctcgtgggacatcgcgctgctgttaacgttgtggacttcgatgacaagtacattgtgtccgccagcggagaccgcacaattaaagtgtggtcgacatctacgtgtgaatttgtacggacgctaaacgggcataaaagaggcattgcatgtttacagtatcgggacagactggtggtttctggcagttccgataacactatacggctgtgggatattgagtgtggggcatgcctccgggttttggaggggcatgaagagctagtccggtgcatcagatttgacaacaagcgcatcgtctcaggcgcttacgatggaaaaatcaaggtgtgggaccttcaggcagctctggacccccgcgcccctgcttctacattgtgtctccggaccctcgtggaacattcaggcagagtatttagactgcagtttgacgagttccagatcatttcaagctcccatgacgataccattctgatttgggacttcctgaatgtgccaccctctgctcagaatgaaacgcggtccccttcacgcacctacacgtacatcagcaggtag

SEQ ID NO: 116770 - DNA, 1533 bp, synthetic construct
  misc_feature 1..1533: note = Description of Artificial Sequence: Synthetic coding sequence
  source 1..1533: mol_type = other DNA
atggaggatcagaacgaggacgagagcccgaagaagaacaccttatggcaaatatctaacgggacaagctctgtgatagtgtcaagaaaacggccaagtgaaggaaactaccagaaggagaaggatctgtgcataaaatacttcgaccagtggtcagaatccgaccaggttgagttcgttgaacatctgattagtaggatgtgtcactaccagcatgggcacataaacagctacttgaaacccatgctgcaacgtgacttcatcacggccctccccgaacagggcctagatcatatagcagagaacattctgagttatctggacgctagatctctgtgcgccgcagagctggtttgtaaggagtggcagcgcgtgatctctgaaggtatgttatggaagaaactcatcgaacgcatggtgcgaaccgaccctctgtggaagggcttgtctgagcgcagaggctgggatcagtacctcttcaaaaatcgcccaacagatgggcctcctaattcgttttataggtccctgtacccaaaaatcatccaggatattgagacgatcgagtcaaattggcgctgcgggaggcacaatcttcaaaggattcaatgcaggtccgaaaactcgaagggtgtttactgcctccagtatgacgacgaaaaaattattagtgggttgagggataattcgatcaagatttgggataaaacgtctctggaatgcctgaaagttctaacaggacatactggcagcgtcctctgcctgcaatatgacgagagagtgattgtcactggatcatccgacagcacagtgagggtttgggatgtcaacacaggcgaggtgctgaataccttgatccaccataacgaggctgtcttgcacctgagattttcgaacggcttaatggtcacatgttccaaagatcgctctatcgctgtgtgggacatggcaagcgctacagacatcacgctgaggcgggtgctggtgggtcatagggcggcagtaaatgtggtggatttcgacgataaatatatcgtttctgccagcggggatcggaccataaaagtttggagcaccagtacttgtgagtttgtgaggactctcaatgggcacaagagaggcatagcctgccttcaatatagggaccgcctggtggtgtccggcagcagcgacaatacaattcgcttgtgggatatcgagtgtggtgcttgtctccgcgtcctggaggggcatgaggagctggtgcggtgcattcgatttgataacaaacggatagtctctggggcatatgacgggaaaattaaggtctgggatcttcaagcggccctagatccgcgagcaccagcctcaaccctgtgtctcagaactctggtcgagcactccggccgggtgtttaggttgcagttcgacgagtttcagatcatttccagctcccatgatgatactatactgatttgggattttctgaacgtaccaccatctgcacagaacgagacccgctctccatcaaggacttacacatacattagccgctag

SEQ ID NO: 116771 - DNA, 1395 bp, synthetic construct
  misc_feature 1..1395: note = Description of Artificial Sequence: Synthetic coding sequence
  source 1..1395: mol_type = other DNA
atggagatccgcctgcctgacctggcattaaaaaggatatttagcttcctggatctgtttggacttctacaggtgagtcaggtgaacaaacactggaaccggatcgccgacagcgactatttatggcgctctctgagcctgcaacgctgggactgctctaactttactaaccagcacctgggcacacacacctggaagcaattttttctccatcagaggcggaaggagctcaggttagcccttgcacagccccacaactttatctataaggttaccaagaacatcgcattcgagacagagctggcctatctttccgggaataggttgactgtggatgagcaggagaaatccatcatctgtagcgtgtcgcctaaacaggagctgtgtgcctgggacgttcaggagggtacaatgatttggtcttcacctgttcaggaatttcatttttctaaccttgtgaccctgcctcagatgcacttagccatcacgatggacaggaagaagacaataaaagtgtggaattgccaggatcgggatgccttggccgttttgcccatgcctcagccctgctactgtatggaggcctatctgaccaaagacggccctttcctgatggtgggcgatgccgccggagacatctacacattcaccctgcctggcctacgggacgtctcaaaagtgaccgcctttcagtacggtattgtgctcctgcactgttcaccagacaagaagtgggtgtttgcctgcggcacttactccagaacactgccacaggtgttcttgaccgagtctctccttaggccctcagaagggtcggtccccctttccaccttcctccctcacaagctttgtgctagtgcttgctggaccccgaaagtgaagaatcgaatcaccctgatgtcacaaagttcaaccggcaagaaaaccgagttcataaccttcgacctgactaccaaaaaaactggtggtcagacagttattcaggcctacgagatcgcgtcatttcaagtggcagctcatctgaaatgtcctatttggatgggggcctcggatggctacatgatcgtgttcaccagtggcccgtacctgcttctcttcagtattacgggctttctgctccagcggtttgaggatcaccaggctgccatcaacaatttttgggtggacccatgttatgtactgaccaccagtgaaaattcggtgcacgtgtacatgtgggaagagggggggaggcatccttacctgagatcttgctgtcatctcgagaacacttggcatgatcacacaacagactcatgcatctcttcagtcatgtgcgacaacgctagcattgtactcagggtgagaaaggtgtccgacagcagtatactggtcatgtattctctgaacacctag

SEQ ID NO: 116772 - DNA, 1092 bp, synthetic construct
  misc_feature 1..1092: note = Description of Artificial Sequence: Synthetic coding sequence
  source 1..1092: mol_type = other DNA
atgctcgcgctaagagacgagcctcactcccctgatagcagaagccaggctttcgaaacagagttagcttacctctccggaaaccgactgaccgtagacgagcaggaaaagtctataatctgcagtgtgtctcccaagcaggagctatgcgcatgggacgtacaggaaatgcatctcgcgatcacaatggaccgaaagaagaccattaaagtttggaattgtcaggaccgggatgcgttggctgtgctcccgatgccacaaccttgctattgtatggaggcctacctgactaaagatggtccattccttatggtcggagatgctgctggagatatctacacgttcacattacctggcttacgggatgtctctaaggtaactgcttttcagtatggaatcgtacttcttcactgctcgccagataaaaagtgggtgtttgcatgtgggacatattcacggaccctgccccaggtattcctcacagagagcctgcttcggcccagtgagggtagcgttcctctgtctacattccttcctcacaaactgtgtgcgtctgcctgttggactccgaaggtcaagaaccggataacccttatgtcccaatcttcgacagggaagaaaacggaatttattacattcgatctcactactaaaaaaactggagggcaaactgtgatccaggcctacgaaattgcttccttccaggtggctgcccacttaaaatgcccaatctggatgggcgcctccgacggctatatgattgtgtttacttcaggaccatatctgctcctttttagcatcaccggattcctccttcagagattcgaagaccaccaggccgccataaacaatttttgggtagacccatgctacgtgcttacaaccagtgagaactctgtgcacgtgtacatgtgggaggaaggtggaaggcacccgtatctgagaagctgttgccacctggaaaacacatggcatgatcatactacagatagctgcatctcatccgtaatgtgcgacaacgcctcaattgttctgcgagtgagaaaggtgagcgattccagtatcctcgtcatgtactcattgaatacctag

SEQ ID NO: 116773 - DNA, 1185 bp, synthetic construct
  misc_feature 1..1185: note = Description of Artificial Sequence: Synthetic coding sequence
  source 1..1185: mol_type = other DNA
atggaaatcaggctgccagatttggctttgaagaggatcttctcttttttggacctgttcggtttgcttcaagtttcacaggtgaacaaacattggaatcgaatcgctgacagcgattacctgtggaggtcgctgtctctacagcgatgggactgttcaaattttactaaccagcatctggggacccacacatggaagcagttttttttgcaccagcggcggaaggagttgcggctcgctcttgctcagccacacaatttcatttacaaagtgacgaagaatattgctttcgagacggagcttgcctacctcagcgggaataggttgacagtcgacgagcaggaaaaatcaattatttgttccgtttctcctaaacaggagctctgtgcgtgggatgtgcaggaggtgggggatgccgccggtgatatctacacattcaccctccccggcctgagagacgtgagcaaggtgaccgcttttcagtacgggatagtcctgctgcattgctccccagataaaaaatgggtgtttgcttgcggtacctacagccgcaccttgcctcaggtattcctgaccgaaagtttgctgcgccctagcgagggttcggtacctctctcaacatttttgccccacaaactctgtgccagtgcttgttggacaccgaaggtaaagaataggattaccctaatgtctcagagctcaaccggaaagaagaccgaatttatcacttttgatcttaccaccaaaaaaacaggaggccagactgtgatccaggcctacgagattgcttcttttcaggtggccgcccatcttaaatgtccaatttggatgggcgctagtgacggctatatgatagttttcacgtccgggccataccttctgttgttctctataaccggattcctcctgcaaagatttgaggaccaccaggccgcgatcaataacttctgggtggacccatgctacgtgctgaccacatctgaaaactctgtccatgtctacatgtgggaggaaggtggcagacacccatatctgcgctcatgctgtcatcttgaaaatacgtggcacgaccataccacagattcatgtattagctctgtaatgtgtgataacgcttccatcgtccttagggtgaggaaagtgtcggattcatccattctggtgatgtattcactgaatacgtag

SEQ ID NO: 116774 - DNA, 1338 bp, synthetic construct
  misc_feature 1..1338: note = Description of Artificial Sequence: Synthetic coding sequence
  source 1..1338: mol_type = other DNA
atgagcccaacccaccaaatccaagaccccaagcattggaatcgaatagcagatagcgactatttgtggcgatcactgtcactgcagcggtgggactgtagtaactttactaatcaacatctcggcactcatacctggaaacaattctttctccaccagagaagaaaagagctgagacttgcgctggcccagccacacaactttatatataaagtgactaagaatatagcctttgaaacagaactggcctatctttctgggaaccggctgacagtggatgaacaggagaaatctataatctgtagcgtgagtccaaagcaggaactatgtgcctgggatgtgcaggaagggaccatgatttggtcctctccggtgcaagagttccatttctctaatctggtcacgctgccccaaatgcacctggccatcactatggaccgcaagaaaaccataaaggtatggaactgtcaggacagagatgccctagccgtcctccctatgccacagccctgttactgtatggaggcatacctgaccaaagatggacctttcctcatggttggagatgcagcaggagatatctatactttcaccttgccaggcctgcgggacgtgtcaaaagtgaccgccttccagtacggtatagtcctgttacattgcagccccgacaagaaatgggtttttgcttgcggcacttactccagaacattacctcaggtttttctcacagagagtcttctacgcccatcagaaggttccgtaccgttatcaaccttcctccctcacaagctgtgcgctagtgcgtgttggacccctaaagttaaaaacaggataacactaatgagtcagagctcgaccggcaaaaagactgagttcatcacatttgacttgactaccaagaagaccgggggtcagacggtgatccaggcttacgagattgcttcctttcaggtggccgcgcacctgaaatgccccatctggatgggggcatcggacgggtatatgatcgtgttcacgtctggtccatatctgctgctgttcagcattacggggtttcttctccaacgctttgaggatcaccaggcagctatcaataacttctgggtggatccctgctacgttcttaccactagcgagaattccgtccatgtttacatgtgggaggagggcggcagacatccatacctacgtagttgctgccatctcgagaacacttggcatgaccatactactgattcttgcattagttctgttatgtgcgacaacgcttccatcgtcctgcgcgtcaggaaggtgtcagatagtagtattttagtgatgtactccctgaacacctag

SEQ ID NO: 116775 - DNA, 1239 bp, synthetic construct
  misc_feature 1..1239: note = Description of Artificial Sequence: Synthetic coding sequence
  source 1..1239: mol_type = other DNA
atggccgcagctgctggtgaagaagaggaggaggaagaggctgctcgcgagagcgcagccagacccgccgcaggccctgctctatggagactcccagaggagttactcctactgatttgctcatatttagatatgagagccctgggtaggcttgcacaggtgtgtaggtggttgaggagatttacaagctgtgatctgctgtggaggcgcattgctagggccagcctgaatagcgggtttacgcggttgggcactgatctgatgacaagcgtgccggtgaaagaacgcgtgaaggtcagccaaaactggcgactgggacgatgccgagagggcatcctgctgaagtggaggtgcagacagatgccctggatgcagctcgaggatgattcattgtatattagccaggccaacttcattttggcttaccaattcagacccgacggcgcaagcctgaataggcgccccctgggggtctttgccggccatgatgaggacgtttgccattttgtgctcgccaatagtcatatcgtctctgcaggaggagatggtaaaattggcatccataagattcacagtaccttcaccgtcaagtatagtgctcatgagcaggaggtgaattgtgtggattgcaaggggggcatcattgtcagtggcagccgcgatagaaccgccaaggtatggcctctagcgtctggtaggctcggtcagtgcctgcatactatccagactgaggacagagtttggtcaattgccatttcccctcttctgtcatcttttgtcaccggcactgcctgctgcgggcacttttccccactgagaatctgggatcttaattccggccagctcatgacccaccttggctcagacttcccacccggtgctggggtgctcgatgttatgtatgagtctccatttactttgctgtcttgtggttacgacacctacgtccgatattgggaccttcgcactagcgtgaggaagtgcgtcatggagtgggaggagccgcatgattccaccctttactgcctccagaccgacgggaaccaccttctagccaccgggagctcttactatggggtcgtccgactatgggatcgccggcaaagggcctgcttgcacgcgtttccactgacctcgacccctctgagcagtcccgtgtattgcctgcgtctgacaactaagcatctgtatgccgcgttatcatataacttgcatgtgctggacttccagaacccatag

SEQ ID NO: 116776 - DNA, 1239 bp, synthetic construct
  misc_feature 1..1239: note = Description of Artificial Sequence: Synthetic coding sequence
  source 1..1239: mol_type = other DNA
atggcagccgccgccggcgaagaggaagaggaggaagaagcggcgcgggaatccgccgcaagaccggctgccggccccgcgttgtggcgcctgcccgaagagctgctactgctaatctgctcatatcttgacatgagggctctggggagactagcacaagtgtgcagatggctgcggcggttcacaagctgcgacctgctctggagacgaatcgcccgagcttccttgaatagcggattcacccgactcggcaccgacctcatgacctcagtaccggttaaagagcgcgtcaaagtttcacagaactggcggctcgggagatgccgtgaagggatattactgaaatggcggtgcagccagatgccatggatgcagctggaggatgattctctgtatatcagccaggcgaactttattctggcatatcagttccggcctgatggagcctcgctaaacagacggcccctgggagtgttcgctggacacgatgaggatgtgtgtcattttgtgttagcgaattcacacatcgtatccgccggcggtgacggcaagatcggtatccataagattcactcaacctttacggtgaaatatagcgcgcacgagcaggaggtcaactgtgttgactgtaaaggagggatcatagtgtctggaagccgagataggaccgccaaagtctggcctctggcctccggtaggcttggccagtgcctgcacacaattcagacagaggaccgcgtgtggtccatcgcaatttcccccttgttgtcatcctttgtaacaggaaccgcctgctgtggccactttagcccactgaggatttgggatttaaattcaggccaactgatgacccacctgggaagtgatttcccgccgggagctggggtgctggatgtcatgtacgagtctccttttactctcttgagttgtggatacgatacgtatgtgaggtactgggatctgaggaccagtgtgcgcaaatgcgtgatggagtgggaagagccccatgactccaccctgtattgtctgcagacggatggcaaccatcttcttgccacggggagctcttattatggggtcgttcggctctgggatagacggcaaagagcatgccttcatgcgtttccgctgacttccacccccctttcgtcccccgtatattgtctgaggctcacaactaaacacctgtatgccgcactgtcttataatctccacgtgcttgatttccagaatccttag

SEQ ID NO: 116777 - DNA, 639 bp, synthetic construct
  misc_feature 1..639: note = Description of Artificial Sequence: Synthetic coding sequence
  source 1..639: mol_type = other DNA
atgagggccctaggtcgtctagcccaagtttgccgctggctgcgacgctttacatcatgtgacctgttgtggaggaggatcgcacgcgcttcccttaattctggcttcaccaggctcggcactgacctgatgaccagtgtccctgtgaaggagagagtgaaagtctcgcagaattggagactgggaaggtgcagagagggaattctcctgaagtggcgctgtcgccagatgccatggatgcagttagaagacgacagcctatatattagccaggctaatttcatcctcgcataccagtttagaccagatggcgcctccctcaatcgcagacctctgggagtgttcgcaggccatgacgaagacgtttgtcacttcgtgcttgcaaactcccacatagtatctgccggcggagacgggaagatcgggattcacaagatccactctactttcacagtaaaatattctgcccatgagcaagaagtcaattgcgtggattgtaaaggcggcataatcgtgtcaggatcgcgcgaccgaactgccaaagtttggccactcgcatctggtcgtttgggtcagtgccttcacaccattcagactgaagatcgggtgtggtcgatagccatttcacccctgctttag

SEQ ID NO: 116778 - DNA, 576 bp, synthetic construct
  misc_feature 1..576: note = Description of Artificial Sequence: Synthetic coding sequence
  source 1..576: mol_type = other DNA
atgacttccgtgcccgttaaggaacgcgtgaaagtgtcccaaaactggcggttggggaggtgccgcgaagggatcttgctcaagtggcgctgccgccagatgccatggatgcaactcgaggatgactcgctgtatatctcccaggccaatttcatcctggcatatcagtttagaccagatggcgcatcactgaatcgaagacccctcggtgtgttcgcaggtcatgatgaggatgtctgccacttcgtgctagcgaattcccatatcgtgtccgccggaggcgatggaaagatcggcatccacaagatccatagtaccttcactgtcaagtactctgctcacgagcaggaagtgaattgtgttgattgtaagggggggattatcgtgagcggctcccgcgacaggaccgcaaaagtatggccgcttgcaagcggccgcttaggccagtgtctccatactatccagacggaggatagagtttggagtatcgccatatcccccctgctgtcatccttcgtcacagggaccgcctgttgcggccatttcagtcccctgaggatctgggaccttaattag

SEQ ID NO: 116779 - DNA, 1884 bp, synthetic construct
  misc_feature 1..1884: note = Description of Artificial Sequence: Synthetic coding sequence
  source 1..1884: mol_type = other DNA
atgtgcgtgccccggagcggcttgattctgtcttgcatttgcctgtattgcggggtgcttcttcctgtactactgcctaatctgcccttcctgacgtgcctttctatgtctacactcgagtccgtaacctatctgccagaaaaaggactgtattgccaacggctaccctcttcccggacccacggcggaactgagagtctcaaagggaaaaacactgagaatatgggcttctatgggacactgaagatgatattctataagatgaaaaggaaactggaccacggatccgaagtgaggtcttttagtctgggaaagaaaccatgcaaagtgtctgagtacacaagtactaccgggctcgtaccttgttctgccactcccaccacatttggcgacctgcgagctgcgaatggccaaggccagcagcggcgccggataacaagtgttcagccgcccactgggctacaggagtggctcaaaatgttccaatcttggagcggacctgagaagctgctggccctcgacgagctcatcgatagttgtgaacccacacaggtcaagcacatgatgcaagtgatcgagccacagtttcagcgggacttcataagcctgttacccaaggaactagccctatatgtgttgtcgtttctagaacctaaagatttgctacaggccgcacagacttgcaggtattggaggattctggctgaagacaatctgctgtggcgcgagaaatgcaaggaggaaggaattgacgaacctctccacatcaagcggagaaaggtaataaagccagggtttattcatagtccctggaagagcgcctacatccgtcagcaccgcatagataccaactggcggaggggtgaactgaagagccctaaagtgttgaaaggacatgatgatcacgtgattacttgtctgcagttctgcggaaaccggatcgtttcggggagcgacgataacacccttaaggtctggtctgccgtcacagggaagtgtctgagaactctggtcggccacacaggtggggtctggtccagccagatgagggataatattattatcagtgggtcaaccgatcggacactgaaagtctggaatgcggaaaccggcgagtgcatccatacactgtacggccatacgtctaccgtacgatgtatgcacctgcacgagaagcgggttgtctccggatctcgcgacgctacactgcgggtttgggatattgagactgggcaatgcctacacgtgctgatgggccatgtcgctgccgtcaggtgcgttcaatatgatggacgaagggttgtcagcggcgcttacgactttatggtgaaggtgtgggaccctgagacagaaacctgtttacacactctccagggacacaccaacagagtttacagcttgcagttcgacggtatacacgtcgtgtcaggcagtctggatacatccattcgagtgtgggatgtagagactgggaattgcatacacacactgactgggcaccagagcctgacctccggcatggaacttaaagacaatattctggtgagtgggaatgccgacagtacggtgaagatttgggatattaagacaggccaatgcctgcagaccctgcagggacctaataagcaccagagcgctgtaacatgtctccagttcaataaaaatttcgtgatcaccagttcagacgacggaacagtgaaattgtgggatttgaaaaccggtgagttcatcagaaatctggtgacgttagagtcgggcgggagtggtggggtcgtatggaggataagggcttctaacactaaactggtgtgtgctgtaggctctcgcaatggcaccgaagagactaaactgctggtgcttgatttcgacgtggacatgaaatag

SEQ ID NO: 116780 - DNA, 2124 bp, synthetic construct
  misc_feature 1..2124: note = Description of Artificial Sequence: Synthetic coding sequence
  source 1..2124: mol_type = other DNA
atgaatcaagagttattgagcgtgggaagcaaaaggcggcgaacgggaggatctctgagggggaatcctagctcgagtcaggtagatgaagagcaaatgaacagggtcgtggaagaggagcagcagcaacagcttaggcaacaagaagaagagcacacagccaggaatggtgaagtggtaggtgtggagcctaggcccggagggcaaaatgactctcagcaggggcagctcgaagaaaacaacaaccgcttcatctccgtagatgaggatagcagtggaaaccaggaagagcaagaagaggacgaggaacatgccggggagcaggacgaggaagacgaggaggaagaggaaatggaccaggaaagcgatgacttcgaccagagtgatgactccagccgagaggatgagcacactcacacaaattcagtgacaaatagtagtagcatcgttgatctgccagtccaccagttgtctagtccattttacactaaaactactaagatgaagaggaaattggaccacggatcagaggtccgaagtttttctcttggcaagaagccatgtaaagtcagcgaatacacaagcaccaccggactggtgccatgctccgccacccccactacttttggggatttaagggccgctaacgggcagggacagcagaggaggcggatcacctctgtgcagccgccaacaggactacaggaatggcttaaaatgtttcagtcctggagcgggcccgaaaagttgctcgccttagacgaactgattgattcttgcgaacccacccaggtgaagcatatgatgcaggtgatagagccccaattccaaagagacttcatctctcttctcccaaaagagttggcactctatgtcctcagttttctagaacccaaggatctgctccaggcagcacaaacatgcaggtactggcgcattctagccgaggacaacctattgtggagggagaaatgcaaagaagagggcatcgatgagccgctccacatcaaaaggcgaaaagtgattaagcccggattcattcattctccctggaagagtgcttacatccgccagcacagaatcgacaccaactggcggagaggagagttgaagtctccgaaagtcctcaagggtcacgatgaccacgttattacttgcctccagttttgtggcaaccggatcgtttctggaagtgacgacaacaccctcaaagtatggagcgctgtgacggggaaatgcttgcgcactcttgtggggcacactggtggggtgtggtccagtcagatgagagacaatatcattatttccggcagcaccgaccggaccctgaaagtttggaatgctgagaccggagaatgtatccacaccctttatggtcacacatcaactgttagatgtatgcacctgcacgagaaaagggtggtcagcggaagtcgagacgctacactgagagtctgggatatcgagactggccagtgcctgcatgtgctaatggggcacgtggccgccgttcggtgcgtccaatatgacggacgcagggtagttagcggagcctacgactttatggtgaaggtctgggacccagagactgagacatgtctgcacaccttgcagggccacacaaatagagtgtattcactgcaattcgatggaatccatgtggtgtctgggtctcttgatactagcatccgcgtctgggacgtggagaccggaaattgcattcatacccttacgggtcatcagagtctcacgagtggaatggagctgaaagacaatatcctcgtgtctggaaatgccgatagcacagtcaaaatctgggatattaagaccggccagtgtctgcaaactctgcaagggcccaacaaacaccagtctgccgtgacatgtctgcagttcaacaaaaattttgtgatcacctcaagtgacgacggcacagtaaaactgtgggacctgaagaccggagaattcattcgcaaccttgtcaccctggagagtggaggaagcggcggtgtcgtctggcggatccgggcctctaacacaaagctagtgtgcgccgtcggcagcagaaacggcacggaggaaactaagctgctggttcttgatttcgacgtggatatgaagtag

SEQ ID NO: 116781 - DNA, 1770 bp, synthetic construct
  misc_feature 1..1770: note = Description of Artificial Sequence: Synthetic coding sequence
  source 1..1770: mol_type = other DNA
atgtcaaagccaggtaaaccaaccttgaatcacggcctcgttccggtcgacttaaagtccgcaaaggaacccctcccccaccagaccgtgatgaagattttttctatatctatcatcgctcagggattacccttctgccgcaggcgcatgaagcgcaaactggaccacggatcggaagtcagatctttctcgttaggtaaaaaaccttgcaaagtctcagaatacacctctacaactgggttggtgccctgtagtgccacaccgaccactttcggggacctacgggccgctaacggccaaggccagcagcggagacggatcacctcggttcaacctcctacgggtctgcaggagtggttgaagatgttccaatcttggagcggtcctgaaaagctgctcgctctggacgaattgatcgactcttgcgagcccacccaagtcaaacatatgatgcaagtcattgaaccacaattccagcgagatttcatttcactgctgcccaaggaattagcactgtatgtgttatcctttctggaacctaaagatttgctgcaggcagctcagacctgccgatattggaggatcctggcagaggataacttactttggagagagaaatgcaaagaagagggcatcgatgaacccctgcacatcaaacgtcgcaaggtaattaaacccggttttattcactccccatggaaatctgcatacattcggcagcaccggatagacaccaattggcgtcggggcgaacttaaaagccctaaggtactcaaaggccacgatgatcacgtgattacatgtctacagttctgcggaaatcgaatcgtctctgggtccgacgacaacaccctgaaggtgtggagcgctgttacgggcaagtgccttcgtacacttgtgggacataccggcggggtgtggtctagccaaatgcgcgacaacatcatcattagtggctccactgaccggaccctgaaagtatggaacgctgaaaccggggagtgtattcacacattgtatggacacacatctaccgtcaggtgcatgcatttacatgagaaaagggtggtcagtgggtcacgtgacgccacactgagggtgtgggacatagagacagggcagtgtctccacgtactcatgggccacgtggcagcggtgcggtgcgtgcaatatgacggccggagggtggtcagtggcgcctatgatttcatggtcaaggtctgggacccagagacagaaacctgtctgcacacccttcagggccacacaaaccgggtgtactcactgcaatttgacggtatccatgtcgtttccggtagccttgatacctccattcgggtctgggacgtagagaccggcaactgtattcatacccttacgggacaccaatcattgacaagcgggatggaactgaaagataacatcctcgtttccggcaacgcggactccacagtgaagatatgggacattaagactgggcagtgcttgcagacgctgcagggtccaaataaacaccagagtgcagtcacgtgtcttcagtttaacaagaacttcgtcatcacctcctccgacgacggaaccgttaagttatgggacctgaagacaggcgaatttataaggaatctggtgactttggaatcaggcggcagcggcggtgtcgtgtggcgtattcgtgcctcgaatacaaagttagtgtgtgccgtggggagtcggaacggcactgaggagactaaacttctggtgctcgactttgacgtggatatgaagtag

SEQ ID NO: 116782 - DNA, 1596 bp, synthetic construct
  misc_feature 1..1596: note = Description of Artificial Sequence: Synthetic coding sequence
  source 1..1596: mol_type = other DNA
atgcttttctttaagtgtatttctctgctgcttatttggctgattcccggacagtctactacagggctggtgccttgtagcgccactccaactacattcggagatctaagggctgccaacgggcagggtcagcaaagaaggcggatcacatctgtccaaccaccaactggtctgcaggagtggctgaaaatgttccagtcatggagcgggcccgagaaactgctggccctggacgaattgattgactcctgcgagccaacgcaggtgaaacacatgatgcaagtcatcgagccccagtttcagagagacttcatctcccttttaccaaaggagctggccctctatgtgctgtcttttctcgagcctaaagatcttctccaggccgctcagacctgccgatactggcgcatcttggccgaagacaatttgctgtggagagagaagtgcaaggaggagggaatcgatgagcccttgcacatcaaacggcggaaagtcatcaagcctggctttatccacagcccatggaaatccgcttacatacgccagcaccgcatcgacacgaactggcgacgtggagagttaaaatcaccgaaagtgctcaaaggccatgacgaccatgtaatcacgtgccttcagttctgtgggaaccgtatcgtctccggctcagacgacaatactctgaaggtgtggagcgccgtcaccggaaagtgcttgagaaccctggtgggccacactggcggcgtttggtcctcccagatgagagacaacatcatcatcagtggcagcactgacaggacattgaaggtgtggaacgccgagactggcgagtgcattcacacgctatacgggcacaccagcacagtgaggtgcatgcacctccacgaaaaaagagtggtgtccgggtcccgggacgccacgttgcgagtatgggatattgagacgggccagtgcctgcacgtcttgatgggccatgtagcagctgtgaggtgtgtgcagtatgacgggaggcgggtcgtgagcggagcctatgatttcatggtcaaggtttgggatcctgagactgaaacttgcctccatacactgcagggccacactaatagggtctattcactgcagttcgacgggatacatgtggtttcagggagtctggatacgtccattagagtttgggatgtcgaaaccggtaactgtatacatactctgaccggccaccagtcgctcacctccggcatggagctgaaggataatatcttagtgtccggcaacgcagacagcaccgtgaagatatgggatattaagacaggccagtgtctccaaactctccaagggccaaacaaacaccagtctgctgttacctgtttacagttcaataagaattttgtcattacgagcagcgacgatggaaccgtcaagctgtgggacctgaagaccggggagtttattcgtaacctggtcactttggaatcaggaggctctggaggagttgtctggaggatcagggcttctaacacaaagcttgtctgcgctgtggggagtcgtaacggaaccgaagaaaccaagctcctggtgcttgacttcgacgtcgatatgaagtag

SEQ ID NO: 116783 - DNA, 1797 bp, synthetic construct
  misc_feature 1..1797: note = Description of Artificial Sequence: Synthetic coding sequence
  source 1..1797: mol_type = other DNA
atggatgattatagcctggatgagttcaggcgccggtggcaggaggagttggcacaggcccaggccccaaaaaagcggagacgacccgaagccgcagagagacgggcacggcgccctgaagtgggtagtggccgcggtgaacaggccagtggggatcctgctctcgctcagaggctcctcgaaggcgccggccggcctccagcggctcgggcaactcgggctgaggggcaagacgtcgctagcaggtcgcgctcgcctctggctagggagggagccggcgggggggaacagctggtcgatcaacttatcagagatctcaatgagatgaatgacgtgccattctttgacatccagctgccctacgagcttgcgatcaatattttccagtatctggaccgcaaggaactgggccggtgtgcacaggtaagcaaaacttggaaggtgatagcggaggatgaagtgctgtggtaccgactctgccagcaggaggggcacctacctgacagtagcatttcggattactcatgttggaagctgatcttccaagagtgtcgggctaaagagcacatgctgcgtacgaattggaagaatagaaaaggcgctgtgtcagagctcgaacacgtgcctgacaccgtgctctgtgacgtgcactcacacgacggggttgtcattgcaggttatacctcaggcgatgtgagagtttgggatacccggacctgggactatgtggctccgtttcttgagtcagaggatgaggaggacgaaccgggtatgcagcctaatgtttcttttgtgagaattaattcgagtctggccgtcgcggcctacgaagatgggttccttaacatatgggatctccgtacaggcaaatatcccgtgcaccggttcgaacacgacgccagaatccaggccctcgccctgtctcaggatgacgcaaccgttgctactgcaagtgccttcgacgtggtgatgctatcacccaacgaagaaggctactggcaaatcgccgccgaatttgaggtgcccaagctagttcagtacctggagattgttcctgagaccagacgctatcccgtcgctgtggcagccgccggagacctgatgtatctgctgaaggccgaagactcagcccgaactctcttgtatgcccatgggccacccgtcacctgtttggatgtctccgccaatcaggtggcctttggagttcagggcttaggctgggtttatgagggaagcaagattttggtttattctcttgaagccgggcggcggttgcttaagcttggaaacgtgctgagggatttcacttgcgtaaacttaagtgatagtccacccaacttgatggtaagcggcaacatggatggaagggttcgcatccatgatctgcgcagcggtaatattgccttgagcctgagtgctcatcaactgcgggtctctgccgtgcagatggacgattggaagatcgtatcgggaggcgaggaaggactcgtatcagtgtgggactaccgcatgaatcagaagctgtgggaggtgtactctggacaccccgtccaacacatctcgtttagtagccattctctgatcactgctaacgtcccctaccagactgtcatgagaaacgccgatctagattcgtttacaacgcatcgtaggcaccgagggctaattcgagcctatgaatttgccgtcgatcagctggccttccaaagtccgctacctgtgtgtcgaagcagttgtgacgccatggccactcattattacgatctcgccctcgcgtttccatacaaccatgtatag

SEQ ID NO: 116784 - DNA, 1599 bp, synthetic construct
  misc_feature 1..1599: note = Description of Artificial Sequence: Synthetic coding sequence
  source 1..1599: mol_type = other DNA
atggatgactacagtttggacgaattcagacggagatggcaggaggagctggcccaggcacaggcccctaaaaagaggcggagacctgaagctgccgagcgccgggcacggcgtcccgaaaacgaaatgaacgatgtgcctttctttgatatccagctgccgtacgagctcgcaatcaatatcttccagtacctcgataggaaggaactaggcagatgcgcccaggtgagtaagacatggaaagtcattgccgaagacgaggtcctctggtacagactgtgtcagcaggagggccacttaccagactccagcatcagcgactattcctgctggaaattaatcttccaggaatgccgagctaaggaacacatgctgagaaccaattggaaaaaccggaagggcgccgtgagcgaacttgaacacgtccccgataccgtgttatgtgacgttcatagtcacgacggcgtagtgattgctggatacaccagcggtgacgttcgggtgtgggacacccggacctgggattatgttgctcctttcctggagtctgaggatgaagaggacgaaccaggcatgcaacctaatgtgtcgtttgttaggattaatagtagcctggcagttgccgcttatgaggacggttttctcaatatctgggatctgaggactgggaagtacccggtccatcggttcgaacacgatgctcggatacaggccctggcacttagccaggatgacgctactgtggccactgctagcgcattcgacgtggtgatgctctcccctaatgaagaaggttattggcagattgccgcagaatttgaagtacccaaactcgtccagtacctggagatcgtgccagagacacgccgctatcccgtggccgtagcagcggccggcgacttaatgtacctcctcaaagccgaggactccgcccgcactctcctgtacgctcacggcccccccgtgacatgcctcgacgtatccgctaaccaggtggccttcggcgtgcagggcctcggttgggtgtatgagggttctaagattcttgtatacagcctggaagcagggcgaaggctgctgaagctaggaaatgtgttgagagatttcacctgtgttaacttgtctgacagcccgcccaacttgatggtctcggggaacatggacggtcgggtgcggatccacgatctgaggtcagggaatattgccttaagtctgtcagcgcatcagcttcgtgtgtcagccgttcagatggatgactggaaaatcgtgtcaggcggggaggaggggctggtgtctgtctgggactacagaatgaaccagaagctgtgggaggtgtattctggacatccagtgcagcacatctcatttagcagccattccctcataaccgcgaatgtaccctaccaaaccgtgatgcgaaacgccgacttggactcttttacaactcatcgccgacaccgaggcctgattcgggcctatgagtttgctgtggaccagttagcatttcagtcccctttgcccgtttgtcggtcctcttgcgacgctatggctactcactactatgatcttgcgctggcatttccatataaccacgtgtag

SEQ ID NO: 116785 - DNA, 1599 bp, synthetic construct
  misc_feature 1..1599: note = Description of Artificial Sequence: Synthetic coding sequence
  source 1..1599: mol_type = other DNA
atggacgactatagtttagacgagttcagaaggcgctggcaggaagagttggctcaggctcaagcccctaagaagcgacgccgaccagaagcggcggaacggcgcgcacggcgacctgagaatgagatgaacgacgtgcctttctttgacatccaattaccttacgagctcgccattaacatttttcagtacttggaccggaaggagctgggacgttgcgcccaagttagcaaaacttggaaggttatcgccgaggacgaggttctttggtatcggttatgtcagcaagaggggcacttaccagactcctccatatctgattattcttgctggaagctgatcttccaggagtgccgggctaaagagcacatgcttcgcaccaactggaagaatcggaagggggcggtttctgagcttgagcacgtgcctgacacagtgttgtgcgacgtccatagtcatgatggagttgtgatcgctgggtacacaagtggcgacgtgagagtgtgggacacacggacgtgggattacgttgccccattcctggagtctgaggatgaagaggacgagcctggcatgcagccaaacgttagctttgtgcgtattaattcttccctcgctgtcgctgcgtatgaggacggttttctaaacatttgggatctccgcactggtaagtatcctgttcacaggtttgagcatgacgcgagaatccaagctctagcacttagccaagatgacgccaccgtcgccactgcctccgcatttgacgtcgtgatgctttcaccaaatgaagagggctattggcagatcgcagcagagtttgaggtgcccaaactggtgcagtacctggagatcgtccctgagacacgaaggtatcccgtcgccgtggccgctgcaggggatctgatgtatttacttaaggccgaagatagtgctagaacactcctctatgcacatgggccccccgtgacctgcctggacgtatcagccaatcaggtggcgttcggagttcagggtctgggatgggtgtacgagggctctaagattctggtgtacagcttagaagccggtcggcggttacttaagctgggtaacgtgctgcgggatttcacctgcgtcaatctgtccgatagccccccgaatttgatggtgtcaggcaatatggacggcagggtgaggatacacgacctgcgctctggaaacattgccctgtctctgtccgctcatcagctgcgcgtatccgctgtacaaatggacgactggaagattgtgtcagggggcgaagagggcctggtctccgtttgggactaccggatgaatcagaagctatgggaggtgtatagcggccaccctgtccaacacatttccttttcgtcccactctcttatcacagccaatgtcccttatcagaccgtaatgagaaacgccgatcttgacagctttacaacccaccgcagacaccgaggattaataagagcatacgagtttgcagtggaccagctcgccttccagtcacctctgccggtatgtcggtcgtcttgcgatgctatggccacccattactatgacctcgcactagcattcccttataaccatgtctag

SEQ ID NO: 116786 - DNA, 2871 bp, synthetic construct
  misc_feature 1..2871: note = Description of Artificial Sequence: Synthetic coding sequence
  source 1..2871: mol_type = other DNA
atggaggctggcgggctgcctctggagctctggaggatgattctggcatatctgcatctgccagacctggggcgatgttcactcgtgtgccgggcctggtacgaactgattctgagtttagactctaccagatggaggcagttgtgtctgggatgcactgaatgccgacacccaaattggccaaaccagcctgatgtagagcctgagtcttggcgggaagcctttaagcagcactacctggcatcaaagacttggaccaaaaacgcactggaccttgagagctcaatatgtttcagcctctttagaagacggagagagagacggacgctctccgttggtcccggtcgtgagtttgactcactgggtagtgcactggcaatggccagtctctatgaccgtattgtactattccctggcgtttatgaagagcagggggagataatccttaaggtaccagttgagattgtgggtcaaggcaaactcggcgaggtggcattgctggcaagtattgatcagcattgctccaccacacgcctgtgtaacttggtattcactccagcatggttctctccaatcatgtacaaaaccacaagcggccatgtgcagtttgacaactgcaactttgagaatggccacattcaagtgcacggccccggcacttgtcaggtgaagttttgcaccttcaagaatacccacatcttcctgcacaacgtcccactgtgtgtactcgaaaattgcgaattcgttggcagcgagaacaactccgtgactgttgagggccatccatctgcagacaaaaattgggcctacaaatatttgctcgggctcatcaaaagttcgccaactttcctgcccactgaggactctgacttcctgatgagcctggacctcgagagtcgcgatcaagcatggtctcctaagacttgtgatatcgtcattgaaggctcccagtccccaacaagccccgccagcagctcacccaagccaggcagcaaagctggatcccaggaggccgaagtgggctccgatggggagcgcgtggcacaaacacccgacagtagcgatggaggtctgtcaccaagtggggaggacgaggacgaggaccaactaatgtaccgtttgtcctatcaggttcaggggccccgacctgttctcggcggttcgttcctgggccccccactcccaggcgccagcatccagttaccatcttgcctagtcctgaattccctgcagcaagagctccagaaggataaggaggcaatggcgcttgccaacagtgtgcagggctgcttgatccgcaagtgcctgtttagagatgggaagggaggggtgtttgtctgttctcacggcagagcaaagatggagggaaacatatttcgcaatctgacctacgccgtgcggtgcatccacaacagcaaaattatcatgcttcgcaacgatatctacagatgccgagccagcgggatatttttgcgcctggagggcggcggtttgattgcagggaacaacatctatcataacgcggaagccggagtagacatccggaaaaaatcaaaccccttaattctttgtaatcagatccaccacgggttgcgaagtggcattgtggttctgggtaacggaaaaggcatcattcggaataaccagatttttagcaacaaagaggcagggatctacatcttataccacggcaaccctgttgtgtctgggaaccacatattcaagggccgcgctgccggcatagccgttaatgagaacgggaagggccttatcaccgaaaatgtgatcagggagaatcagtgggggggggtggatattcgccgaggaggtatacctgtgctgaggtctaatctgatctgcttcggatattctgacggcgtggtcgtcggggatgaggggaaagggctcatagagggaaataccatctacgcaaataaaggatgcggcgtgtggatgatgtcatccagtcttccacacgttactagcaaccacgtttcatataacggcctttatggggtcgcggtcttttcccagaaggacggcagcagcgaactgcccaggggacacagggctcaggagaatttctccgaagacggggacgccatattgtgggagacggaactcgagaaggaagacgacccactaagaaggccaataactattgccctcgtcgagagcaattccataaatcataatggggcctccgggctgtatgtgcagtcctctgaggccttgcatgtgatcactaacgtcatccatgctaacggcgacagaggcattaccgtggcccagtctagtcagcccaccagggtggctaacaacagcatcagttgtaacaggcagtccggggtaaaggtggaggcccaatgtaaggtggaactccggggcaatggaatctatgacaatagggggcacggaattataacaaaaggggattcaactattgtgatcgagaacgatatcattggtaacagagggtccggactccaattgctgccgagatctgacaccaaggtgataaagaaccgaattcattcattcagggcttatggcatcgccgttcggggcagggcaaaagccctcgttcaagagaacattatttttcaagggaaaacgagcaaaactatatttcagcagatctctaacaatcgggaatgcattatgcagaataacaagtttctagttttcaagaagaaatcagatacatggcgactcgtaaatccccccgctcgaccgcacctggagaatagtttacggcggcccagcgctgcacacaacggtcaaaaggtgacagcgatggctaccagaatcacggcgcgggtagaaggggggtaccacagcaatcggtcagtcttttgcactatactttag

SEQ ID NO: 116787 - DNA, 216 bp, synthetic construct
  misc_feature 1..216: note = Description of Artificial Sequence: Synthetic coding sequence
  source 1..216: mol_type = other DNA
atggaggctggtggtctgcctctcgagctctggcggatgatcttggcctaccttcacttgccggatcttgggcgttgtagcctcgtgtgtcgggcttggtacgaactcattctgagcctagacagcactagatggagacagctatgtttaggttgcaccgagtgtcggcacccaaactggcctaaccaacctgatgtggaacccgagtcctggtag

SEQ ID NO: 116788 - DNA, 1446 bp, synthetic construct
  misc_feature 1..1446: note = Description of Artificial Sequence: Synthetic coding sequence
  source 1..1446: mol_type = other DNA
atgctgagaaacgacatatatcgctgtagggcctccggaatatttctgcgattggaaggaggagggcttatcgcgggaaacaatatctaccacaatgcagaagccggtgtggacattcgcaaaaaaagtaatcccctgattctctgcaaccaaattcatcatgggctgaggtcggggattgtcgtgctgggcaatggtaaaggcatcatcaggaataaccaaatcttcagcaacaaagaggccggaatttatattttgtaccacggcaacccagtggttagtggaaatcacatctttaagggccgtgcagccggaatcgctgtgaacgagaatgggaaggggctgatcacagaaaatgtgattcgagagaatcaatggggcggggttgacatcagaagaggcggaatacctgtgttaagatcgaatttgatctgttttggctactctgatggggtggtggtgggcgatgagggcaagggcttgatcgaaggcaacacgatctatgccaataaggggtgtggcgtctggatgatgtccagctccctgccccacgtgacgtccaatcacgtgtcctacaacggtctgtatggcgtggctgttttctcacagaaggatgggagcagcgaactgcccagaggacacagggctcaggagaattttagcgaggatggagacgccatactctgggagaccgaactggaaaaagaggatgatccactgaggagacccattaccatagcacttgtggagtccaatagtattaatcacaacggggctagtggcctttatgttcaatccagtgaagcgttgcacgtaataaccaatgtgatccacgccaatggtgaccgcggaatcactgttgcccagagctcacaaccaactcgcgtcgccaataactctatcagctgtaatcggcagtcaggggtgaaagtggaagctcagtgcaaagtggagctccgcggcaatggcatttatgacaatcggggtcatggaattatcacgaagggagactccacaattgtaattgagaacgacattattggcaatcgcggctccggcctgcagctgttgccccgtagtgatacaaaagtgattaagaataggattcactcttttagagcttacggaattgccgtgcgcggacgagctaaggccctcgttcaagaaaacatcattttccaggggaaaactagcaagacgatattccagcagatctctaataatcgagagtgtatcatgcagaataataagtttttggtgtttaagaagaagagcgatacctggcgactcgtaaatccgcctgcccggccccacttagagaatagtctccggcgacctagcgccgcccataatggccaaaaggttactgctatggccacccgtatcacagcgcgcgtggaaggggggtatcacagtaaccggagcgttttctgtacgattctctag

SEQ ID NO: 116789 - DNA, 2532 bp, synthetic construct
  misc_feature 1..2532: note = Description of Artificial Sequence: Synthetic coding sequence
  source 1..2532: mol_type = other DNA
atggtagctgaggagtccggacccggggcacagaacagcccttaccagctcagacggaagaccctcttacctaagcggactgcctgtccaaccaaaaatagcatggaaggagcgtcaacaagcacgacagagaattttggtcacagagcaaaacgcgcacgcgtgtctggaaagtcccaggacctgtccgcagcccccgccgaacagtatctccaggagaagctgcctgatgaggttgtgttaaaaatcttctcctacctcctggagcaggatctctgcagagccgcctgtgtgtgcaaacgtttttctgagcttgccaatgaccccattctctggaagcgcctgtatatggaagttttcgagtatacccgcccaatgatgcaccctgagccaggcaaattctatcagatcaatccagaggaatacgagcaccctaacccctggaaggaatccttccagcagctgtacaaaggagctcatgttaaacctggcttcgcagagcacttttatagtaaccctgcccgctataagggccgagaaaatatgctgtactatgatactattgaggatgcactcgggggagtccaggaggcccacttcgatggtctcatttttgtacattccggaatctacacggacgaatggatttatatagagtcccctatcacgatgatcggggccgcacccgggaaagtagctgacaaggtgatcatcgagaatacccgagattcaacctttgtattcatggaaggttccgaagatgcctacgttgggtatatgaccattcggttcaaccccgacgataagtcagcccagcatcacaatgcccatcattgcctggagatcaccgtgaattgctcccctatcatcgaccactgtattatccgctccacatgtacggtgggctctgcagtgtgcgtgtctggtcagggcgcttgccccaccattaagcactgcaacatttctgattgcgagaatgtcggattatatatcactgatcatgcccaggggatctatgaagacaacgaaatctccaacaatgctctcgcggggatttgggtaaaaaaccatggtaatccaattatccgtcggaaccatatccaccacggcagggatgtaggcgtgtttacctttgaccatggcatgggttatttcgagagttgcaacattcacagaaacagaatcgcaggttttgaggtgaaggcttatgccaatccaactgttgtccgctgtgagatacatcatggccaaaccgggggcatatatgtacacgaaaaaggacgtggacagttcattgagaataagatctacgccaacaactttgccggcgtgtggatcacatcaaattccgacccaactattcgtggtaactccatcttcaatggtaaccaggggggcgtgtacattttcggcgatggacggggactcatcgaagggaacgatatatacgggaacgcactggcaggcatacagattagaaccaacagttgtcctattgtgaggcataataagatccatgatggacaacacggcggtatctatgtccacgagaagggtcagggtgtgattgaggagaacgaagtgtattccaatactttggcgggggtctgggtaaccaccgggagcaccccggtactgcgcagaaacagaatccactccggcaaacaggtgggagtttatttctacgacaatgggcacggtgtgctcgaggataatgacatttacaatcatatgtatagcggcgtccagattagaaccggctcaaatcccaaaatcagacggaataaaatctggggagggcagaacggcgggattttagtgtacaactccgggctgggatgcattgaggataatgagatattcgataacgccatggctggagtgtggattaagactgattccaatcctacactgagaaggaataagatccatgatgggagagacggggggatttgcatttttaatggcggtcgcggtttgctcgaggaaaacgatatctttaggaacgcacaggccggtgttttgatctctaccaatagccatccaatcttgcgaaaaaacagaatcttcgacggtttcgccgctggaatcgagataacaaaccacgccactgctacgctggaaggcaaccagatatttaacaacaggtttggtggcttattcctggcgagtggagtgaatgtgacaatgaaagacaataaaattatgaacaaccaggatgccattgaaaaggccgtatcaagaggccagtgtctttataaaatcagtagttacacttcatatcctatgcacgatttttataggtgtcatacctgtaacaccactgacaggaatgctatatgtgtaaactgcattaagaagtgccaccagggccacgacgtggaattcatccgccatgaccgctttttttgcgattgcggggctggtacactgtcgaatccttgtaccctggcaggtgaacccacccacgataccgacaccctctacgacagtgcacctcccattgagtctaacacactacaacataactag

SEQ ID NO: 116790 - DNA, 282 bp, synthetic construct
  misc_feature 1..282: note = Description of Artificial Sequence: Synthetic coding sequence
  source 1..282: mol_type = other DNA
atggagggcgcctccacttctaccacagaaaactttggacaccgggctaaacgggcacgcgtcagtggaaaatcacaagatctgtcggctgcccctgcggaacagtacctgcaggagaagttaccggacgaggtggtgctcaagatatttagctatctcctggaacaagatctgtgtcgagctgcctgcgtatgtaagaggttttctgagctcgccaacgaccctatcctatggcttggcgaagttgcccacgcctacaacccttcaacactgggaggctag

SEQ ID NO: 116791 - DNA, 2532 bp, synthetic construct
  misc_feature 1..2532: note = Description of Artificial Sequence: Synthetic coding sequence
  source 1..2532: mol_type = other DNA
atggttgcggaggaatcaggccccggggcgcagaactcaccatatcaactgaggcgaaagacattgcttcctaaacggactgcgtgtcctaccaaaaactctatggaaggcgcctccacttcaactacagaaaacttcgggcacagggccaaacgagcacgggtgtctgggaagtctcaggatctgtcagctgcgcccgcagaacagtatttgcaggagaaactgcctgatgaagtggtgctgaagattttctcctatctcctggagcaggatctgtgccgggccgcttgcgtctgcaaaaggttctccgagctggccaacgatcctattctctggaagaggctgtacatggaagtttttgagtacacaaggcccatgatgcaccctgaacctggaaaattttaccaaatcaatcctgaagaatacgagcatcccaatccgtggaaagaatccttccagcaactctacaagggagcccacgtgaaaccgggcttcgctgagcacttttattccaaccctgctcgttataagggccgtgaaaacatgctttactacgatactattgaggacgctctggggggggtgcaggaggctcacttcgatgggctgatcttcgtgcactctggaatctataccgatgaatggatatatattgagtcccctatcacgatgataggtgcagcccccggaaaggtggcggacaaggttatcattgagaacaccagagactctacatttgtgttcatggagggatctgaagatgcgtatgtgggctacatgactatcaggttcaatccagacgataagagcgcccaacatcacaacgcgcatcactgcctcgagatcacagtgaattgttctccaatcatcgatcattgtattattagatccacctgtaccgttggctctgccgtgtgtgtgtccgggcagggggcatgcccaacaattaagcattgcaacatttcagattgtgaaaatgtggggctgtatataaccgatcacgcccaaggcatttacgaggataatgagatttcgaacaacgcattagcaggcatttgggtcaaaaaccacggtaacccaatcatacgcagaaaccatatccaccacggaagagacgtaggggtgttcaccttcgaccacggcatggggtatttcgagtcttgtaatattcataggaacaggattgcgggttttgaagtaaaggcttacgctaacccaactgtggtgaggtgcgagatccatcatggccagaccggcgggatatacgtacacgaaaaaggcaggggacagttcatagagaacaagatttacgctaacaactttgctggcgtgtggattacaagtaacagcgacccgactatccgggggaacagcattttcaacggcaaccagggcggcgtctatattttcggcgatggtaggggactgatcgaaggtaatgacatttacggcaacgctcttgcaggaatccagattagaaccaactcttgccctatcgtgaggcacaacaaaatccacgacggtcagcacggcggcatttatgtccacgagaagggccaaggggtcatcgaggagaacgaagtgtacagcaataccctcgccggagtgtgggtgaccacaggctctactcccgttctccgtcggaatcgcatccattccggaaagcaggtaggagtgtacttttatgataatggacatggagtgctcgaagataatgacatttacaaccatatgtactccggagtacagatacggactggaagtaatcccaagatcagaaggaacaagatttggggcgggcagaatggtgggatcctggtttataactccggactcggatgcattgaggacaatgaaatctttgacaacgccatggctggcgtctggattaaaacggactccaatccgacccttcgcagaaataagattcatgacggcagggacgggggtatatgcattttcaacggcggccggggattactggaggaaaacgatattttcaggaatgcacaggctggagttctcatctccacgaattctcaccctatccttcgcaaaaaccggatcttcgatggctttgccgcgggcattgagattactaatcatgctacagccactcttgaaggcaatcaaatcttcaacaatcgattcgggggactttttctggcgtcaggcgtgaatgtaacaatgaaggataataaaattatgaataaccaggatgccattgaaaaggctgtcagcaggggacaatgcctttataagatcagctcttacacgtcttaccctatgcacgacttctatagatgtcatacttgcaatactactgatcgtaatgctatttgcgtcaattgtatcaagaagtgccaccagggacatgacgttgaattcattcgccatgaccgctttttttgcgactgtggtgcggggaccctgagcaatccatgtacccttgccggtgagcccacccatgataccgacacactgtatgacagtgccccaccgatcgaatcaaacactcttcagcacaattag

SEQ ID NO: 116792 - DNA, 2784 bp, synthetic construct
  misc_feature 1..2784: note = Description of Artificial Sequence: Synthetic coding sequence
  source 1..2784: mol_type = other DNA
atgaattccgttagggctgcaaatcgccgccctcgaagggtgtctaggcctcgaccagtgcagcagcagcagcaacagccgccacagcagccgccacctcagccacctcagcaacagcctcctcaacagcaacctccacctcctcctcagcaacaacaacaacagcagccgccaccaccccctccaccaccgccacccttaccacaggaacggaataacgtaggcgagcgagacgacgacgttccagcagacatggttgccgaagaaagcggccctggagcacagaactccccttaccagctgcggaggaagactctgttgcccaagcggaccgcatgccccaccaagaatagtatggagggagccagcacaagcacaaccgaaaactttggccaccgcgctaagagagccagagtgtctggaaaaagtcaggacctctctgcggcaccagcggaacagtacctgcaggagaagcttccagacgaagtggtcttaaaaattttttcctacttgctggagcaggatctatgccgggctgcctgcgtttgcaaacgcttcagtgagttggccaacgatcctatactgtggaagcggttgtatatggaggtcttcgaatatacccggcctatgatgcacccggagcctggaaaattttaccagataaacccggaagagtacgagcatccgaatccttggaaagagtccttccagcagctctacaaaggagcccacgtgaagcccggcttcgcagaacacttctactccaaccctgcccgttataaggggcgcgagaatatgctgtactatgacaccattgaggacgctttgggcggcgttcaagaagcacattttgacggtttgatatttgtgcacagtgggatctataccgacgaatggatctacatcgaatctcctattactatgataggagccgctcctggtaaggtggcagataaggtcataatcgagaacacccgcgacagcactttcgtctttatggaggggtcggaggatgcgtacgtaggttacatgaccatccgttttaatccggatgataaaagcgcgcagcatcacaacgcccaccattgcttggaaattacagtcaactgtagtcccatcatcgaccactgcattatccggagcacttgcaccgtgggtagcgccgtctgcgttagtgggcagggcgcctgccccacaataaaacactgcaatatctccgattgtgagaacgtggggctgtacattacagaccatgcacaggggatttacgaagacaatgagatctccaacaacgccctcgcaggcatctgggtcaaaaaccacgggaaccccatcattcgccgaaatcacatccaccatggacgggacgttggcgtgttcaccttcgaccacggtatgggatactttgaatcttgtaatattcatcgaaacaggatcgcgggcttcgaagtaaaagcctatgctaaccccactgtcgtcagatgcgaaattcaccacggacagactggcgggatctacgttcatgaaaagggacgcgggcaattcatcgagaacaagatttacgcgaataatttcgcgggtgtgtggatcacctctaacagcgaccccacaatccgtggcaattcgatctttaatggcaatcagggaggcgtctacatcttcggggatggtcgggggttgatcgaaggtaacgatatttacgggaatgcactcgccggtattcaaatccgcaccaatagctgtcctatcgtgcgacataacaagatccacgatgggcagcatggtggcatttatgtgcatgaaaaaggccagggggtgatcgaggagaacgaggtctactccaacacactcgctggggtgtgggttaccaccggatctactccggttctccggcggaacaggatccattccgggaaacaagtgggcgtctatttttacgataatggccatggcgtcctggaggataatgacatttataaccacatgtactcaggggtgcagatcagaactggctccaaccccaagattcggcgcaacaaaatttgggggggccagaatggtggcattttggtatacaattctgggctgggttgcattgaagataacgaaatctttgataatgcaatggcgggtgtgtggatcaaaaccgactcaaatcctacactccgcagaaataaaatccacgacggtcgggatggcggaatttgtatctttaatggcggcaggggcctgctcgaagaaaacgacatctttcgcaacgcacaggctggcgtcctaatttctacgaactcacaccctatcctgcggaagaatcggattttcgatgggttcgctgcaggtattgaaattaccaatcatgcgactgcgaccttggagggcaaccagatttttaacaatcgatttggcggcctgttccttgcatctggagttaacgttacaatgaaagataacaagatcatgaataaccaggacgctatcgagaaggccgttagccgtggccagtgcctgtacaagataagtagctatacgagctaccccatgcacgacttctaccggtgccacacatgcaataccaccgaccggaatgctatatgtgtcaattgtataaagaaatgccatcagggacatgacgtcgaattcatcaggcatgatcgctttttctgcgattgcggcgctggtactctgtccaacccatgcacgctggcaggcgagcccacacatgacaccgataccttatatgacagtgcgcctccaatcgaaagcaataccctgcagcacaattag

SEQ ID NO: 116793 - DNA, 1056 bp, synthetic construct
  misc_feature 1..1056: note = Description of Artificial Sequence: Synthetic coding sequence
  source 1..1056: mol_type = other DNA
atggagatcaaggaggagtttacctctctggtcatggatgaagctctactgaaagagatgacctttatgcacgaaaagggccagggggtgatcgaggaaaatgaggtatacagcaacacccttgccggcgtgtgggtgactaccggaagcactcccgtacttcgacggaacaggattcactctggcaagcaagtaggggtctacttttacgataacggacacggtgtgctggaggacaatgatatctataatcatatgtactccggagttcaaatccgtaccggctccaaccccaagattcggcggaacaagatttggggcggacagaacggtggcattctggtttacaactccgggttggggtgcatagaggataacgagatctttgataatgccatggcgggtgtctggatcaaaacagactccaacccgacactccggcggaacaagattcacgacggcagggacgggggcatctgtattttcaacggtggccgagggttactggaagagaatgatattttcagaaacgcccaggctggagtgctgatatcaaccaactctcatcccattctcagaaagaaccgcatcttcgatggtttcgcggccggaatcgagattacaaatcacgccactgcaacactggagggcaatcagatctttaataaccggtttgggggcctatttcttgcgtccggcgtgaacgttaccatgaaagacaacaaaatcatgaacaaccaggacgccatagagaaggccgtgtcacggggccagtgcttgtacaagatctccagctacacatcgtaccctatgcacgacttctaccggtgccacacctgcaacactaccgacagaaacgctatttgtgtgaattgcatcaaaaagtgtcaccagggccatgacgttgaattcataaggcacgatcgttttttctgcgactgcggggccggaacgttgagcaatccatgcacccttgcaggcgaacctacccacgatacagacaccctgtacgatagtgccccacccattgagtctaatactctgcagcacaattag

SEQ ID NO: 116794 - DNA, 1305 bp, synthetic construct
  misc_feature 1..1305: note = Description of Artificial Sequence: Synthetic coding sequence
  source 1..1305: mol_type = other DNA
atgccatctgagattctactgaaaatattcagctacctcgatgctgtgagtctactctgtactggatgcgtctctaggcgattttaccatctcgctaacgacaacttcatttggatcggtatctacagcactgctttctcacccgccagaagtaattggaagttcaattcagttgagaagatcgcaatgagtatgagtttcctttctgtgcaagataaagaagccgggtattggaaaaaggagtatatcacaaaacaaatcgcctctgtgaaggcggcccttgctgatatcctaaaacccgtgaatccatacactggactccccgtaaaaactaaagaggctcttcgaatcttcgggttgggatgggccatcatcctgaaagagaagggtggaaaagagtatatcatggaacacgttgaccttagtatcaacgatacatctgtcacggtcatatggtatggtaaaaaatggccctgcctggccagtctgagcactctcgatttgtgtgggatgactccagttttcaccgactggtataagaccccaaccaaacacagactgcgatggcacagcctcatcgccaaatataatctgagccacctgacaattagtaccatgatcggctgtgataggctgattagaatcttctgtttacaccccggactactagtcggtgtgtggaaaaaagaagaggagcttgccttcgtaatggctaatctccatttccatcaccttgtggagcgaagcaccctcggctccgcgactatcccctacgagttacccccccacagcccatttctcgacgatagccccgagtatgggttgcacggttaccagctacacgtcgacctgcattcaggtggagtcttctatctgtgtggtacgttcaggaacctttttactaagcggggcaatatagagaacggacacgtgaaattgatagtcatacacctgaagaataacagagagcatctgcctttaataggcaaggtcgggttatcttggaaaactgatatcttcgatggctgcatcaagagctgcagcatgatggatgttacgttgctggacgagcatggtaaaccattctggtgcttcagcagcccagtgtgcctgcgaagtcccgccacacccagcgattcttctagttttttgggacagacttacaacgtggactacgtggacgccgaagggagagtccacgtggaactggtgtggatccgagaaaccgaggagtatctgatagtcaaccttgtgttgtatttgtctattgccaaaatcaaccattggttcggaacggagtattag

SEQ ID NO: 116795 - DNA, 1533 bp, synthetic construct
  misc_feature 1..1533: note = Description of Artificial Sequence: Synthetic coding sequence
  source 1..1533: mol_type = other DNA
atggctaccggtagagggcggatcttacagcagcactggctaggactgcagacactgagggggccctctcggggcggcggagctgcccgaggaagagctcgggcgttcggctgccgcaagggtccgggggtgaaactatccgctggatccgcggccttgcggtgccacgcaggcggaggacagcattgggagtcttccttcagctgttgctctggatttttagacgggatgcccagtgagatcctgctgaaaattttctcatatctggatgctgttagcttgttatgtacgggttgcgtgagccgccgcttctaccacctggctaacgacaactttatctggattggaatatatagtacagcttttagccccgcacggtccaattggaagtttaatagcgtggagaaaatagctatgagcatgtcatttctgtcagtgcaagacaaagaggccggatactggaaaaaagaatatattaccaaacagatagcctcagtgaaagctgctctggctgacattctcaagcctgtcaacccatacaccgggctgccagttaaaacaaaggaagccttgagaatatttgggctggggtgggcaataatcttaaaggagaaggggggcaaagagtatatcatggagcacgtcgatctgagcatcaatgacacttcggtcaccgtgatctggtacggtaaaaagtggccgtgtttggcatcactttccaccttagacctatgcgggatgacacctgtgtttacggattggtacaagaccccaactaagcacagactgcggtggcattctctgatcgctaaatacaacctgtctcacctgacgatctctactatgatcggttgcgaccggctgatcaggatcttttgcttacatcccggactgctggtgggggtctggaaaaaggaagaggagctcgcattcgtgatggccaacctccactttcatcacctggtcgaacggtctacattgggctccgcgactatcccttatgaactgccaccacactcaccgttcctggatgactcaccagagtacgggctgcacggttatcagcttcacgttgatctgcacagcgggggcgtcttttacctttgcggtacattcaggaatctgtttaccaagagagggaatattgagaacggacacgtgaagctgatagttatccacctcaagaacaaccgagagcacctgccattgatcgggaaagtggggctgtcgtggaaaaccgacatattcgacggctgtatcaagtcatgttctatgatggatgtgacattactggacgaacacggtaagcccttttggtgtttctcctcccccgtctgtctgcgctcccccgctactccctccgatagcagtagttttctgggtcagacctataacgtagattatgtcgacgctgagggccgcgtgcatgttgaactggtctggataagggagactgaggagtacttgatcgtgaacttggtgctgtacctgtccatcgcaaagataaaccactggttcggcactgagtactag

SEQ ID NO: 116796 - DNA, 879 bp, synthetic construct
  misc_feature 1..879: note = Description of Artificial Sequence: Synthetic coding sequence
  source 1..879: mol_type = other DNA
atgatggcatttgcccctcccaagaatacagacggtcccaaaatgcaaactaagatgtcaacatggacacctctgaatcatcagctgcttaacgacagggtgtttgaggagagacgcgccctacttggaaagtggttcgacaaatggacagacagccaacgacggcgcattctaacagggctgctcgagagatgctcgcttagccagcagaagttttgttgcagaaaactccaggagaagattccagctgaggccttggattttactacgaagcttccaagagtcctgagcctgtacatcttttccttcttagacccccgtagcctgtgcagatgtgcgcaagtctgttggcactggaagaacctggctgagctggatcagctgtggatgcttaaatgtctcagatttaattggtacatcaacttctccccaactccctttgaacagggcatctggaaaaagcactacatccagatggtgaaggaattacacattacaaaaccaaaaacgcctcccaaagacgggttcgtcatcgccgacgtccagttagtcacgtccaacagtcccgaggagaagcaatctcccctctcagcgtttagatccagctcttcactgaggaaaaaaaacaattccggcgagaaggcattacccccctggagatcatctgacaaacaccccaccgacattatcagatttaattacttggacaatagggacccaatggagaccgttcagcaagggagacgaaagaggaaccagatgaccccggacttttcacggcagagccacgacaaaaaaaacaaattacaggacagaacccggcttaggaaggcacaatcaatgatgagtcggcggaacccctttcctctgtgtccctag

SEQ ID NO: 116797 - DNA, 891 bp, synthetic construct
  misc_feature 1..891: note = Description of Artificial Sequence: Synthetic coding sequence
  source 1..891: mol_type = other DNA
atggacggagatggcgacccagagtccgtgggtcagccagaggaagcctccccagaggaacaacctgaggaagcaagcgccgaggaggagaggcccgaggaccaacaagaagaggaggccgctgccgccgccgcatacctggatgaactgcctgaaccgttactcctgagagtgttggctgccctgcctgccgcagagttggttcaggcctgccgcctggtgtgtctaagatggaaggaactggtcgacggcgcgcccctgtggctgcttaagtgtcaacaggaagggctcgtacccgagggcggtgtggaggaggagcgggaccattggcagcagttttactttcttagcaaaaggcggagaaatctgcttcggaatccatgtggggaggaagatctcgaggggtggtgtgacgtcgaacacggtggcgacgggtggagagtggaggaactcccaggcgactcaggagtcgagttcacccatgatgaaagcgtgaaaaagtacttcgccagctcctttgagtggtgcaggaaggcccaggtgattgacctccaggccgagggctattgggaggagctgctggacaccacccagcccgctatcgtggttaaagactggtacagcggacgctccgacgccgggtgtctgtacgaattaacggtgaagcttcttagtgaacacgagaatgtccttgcagaattttcctcagggcaggtggcagtgccccaggattctgacggaggcgggtggatggaaatttctcatacttttaccgattacggtcctggcgtgcggttcgtgagattcgagcacggcgggcaggactccgtctattggaagggctggtttggggctcgcgttactaatagctcagtgtgggttgagccctag

SEQ ID NO: 116798 - DNA, 594 bp, synthetic construct
  misc_feature 1..594: note = Description of Artificial Sequence: Synthetic coding sequence
  source 1..594: mol_type = other DNA
atggacggcgatggggaccctgaatccgtgggtcaacccgaagaggctagccctgaggaacagccggaagaagcttccgctgaagaagaaagacccgaggatcaacaagaagaagaagcggcagctgctgccgcgtacctcgatgagctgcccgagccgctccttctgagggtacttgcagcactacccgcagccgaactggtgcaggcctgccggttggtgtgcctcaggtggaaagagctcgtagacggagcacctctgtggctccttaagtgccagcaggagggcttggtgcccgagggcggtgtagaggaagagcgcgatcattggcagcagttctattttttatcgaagagacggcgcaatcttctaaggaatccatgcggcgaggaagatctcgaggggtggtgcgatgtcgagcatgggggagatgggtggcgggtggaggaattaccaggggacagcggggtggagtttacacatgatgagtctgcccccgtgctgccaggcggagtggctaaacacagaggcctccttggcggggccgcaggccacgattcggccggccaccgcggcgagggcctcgtgaggtag

SEQ ID NO: 116799 - DNA, 1614 bp, synthetic construct
  misc_feature 1..1614: note = Description of Artificial Sequence: Synthetic coding sequence
  source 1..1614: mol_type = other DNA
atgaaacactactcaccgacggattatgtgaactggctggaggagtataaggtcaggcagaaagccggcctggaggcaagaaagatcgtcgcgtcttttagcaaacgattcttctcggaacacgtgccatgcaatggctttagtgacatagaaaacttagaggggcctgagatcttttttgaggatgagcttgtgtgcatcctgaacatggagggaagaaaggcgctcacctggaaatattacgctaaaaagatcttatattatctccgacagcaaaaaatcctgaacaatctgaaagcctttttgcaacagccagacgattacgagagttatctcgagggggccgtgtatatagaccagtactgtaatccactgagcgacatttctttaaaggacatccaagcacagattgactcgatagtggagctagtctgtaagaccttacgagggatcaactccaggcacccttccttggcatttaaagctggagaatcgagcatgattatggagatcgagcttcagagtcaggtgctcgacgcgatgaattacgtcctgtacgaccaactgaagttcaaggggaataggatggactattataacgcactgaatctgtatatgcaccaggtccttatccgcagaacaggcataccaatctccatgtcattgctctatcttacgatagcaagacaactgggggttcccctggagccggtgaatttcccaagtcatttcctcctccggtggtgccaaggcgctgaaggagccactctggatatcttcgattatatctacatcgacgcatttgggaagggtaaacagctcacagtgaaagagtgcgagtatctaatcggacaacacgtgaccgccgctctgtatggggttgtgaacgtcaaaaaagtgttgcaacgcatggttgggaaccttctttcccttggtaaacgtgagggaatcgaccagagctaccagctgctcagggactctctcgatctctacctcgccatgtaccctgaccaagtgcagcttctgctgctgcaggctcgattgtatttccacctgggcatctggccagagaaagtactcgacattttgcagcacatccagaccttggatcctggccaacatggcgccgtaggctacctggttcagcacacactcgagcacattgagaggaaaaaagaagaagtgggcgtggaggtgaaactgcgatccgacgaaaagcacagagacgtgtgttatagcattggactgatcatgaaacacaagcggtatggttacaattgtgtgatttacggctgggatcctacttgtatgatggggcacgaatggatccgcaatatgaatgtgcacagtcttcctcacggccatcaccagcccttttataatgtcctggtggaggacggctcatgccggtacgcagcccaggagaatcttgaatataatgtggaaccacaggagattagccatcccgacgtgggcagatacttctctgagttcaccggcacacactacatccctaatgcagagctggaaatccgataccccgaggacctggaatttgtgtacgagactgtccagaatatctattccgccaagaaagaaaatatcgacgagtag

SEQ ID NO: 116800 - DNA, 1887 bp, synthetic construct
  misc_feature 1..1887: note = Description of Artificial Sequence: Synthetic coding sequence
  source 1..1887: mol_type = other DNA
atggccgccgctgccgtcgacagcgcaatggaagtcgtgcccgccttagcagaggaggccgcgccagaggtagcgggcctatcttgtctcgttaaccttcccggcgaggttttggaatacatcctgtgttgtggcagtctgacggcggcagatatcggtcgcgtgagctcgacctgccggaggctccgggagctctgtcagtctagcggtaaggtgtggaaagagcagtttcgtgtcaggtggccctccctgatgaaacattacagccccaccgattatgtgaactggctggaagagtacaaagtgaggcaaaaggctgggctggaggctaggaaaattgtggcctctttctccaaacgtttcttcagcgagcacgtgccctgcaacggattttccgacatcgaaaaccttgaggggcccgagatttttttcgaggacgagctggtctgtatattaaacatggaggggagaaaggccctgacctggaagtactacgccaagaagatactgtattatctgcggcagcagaagatcttgaataacctgaaggcttttttgcaacaacctgatgattatgaatcatatctcgaaggcgctgtttatatcgaccagtactgtaatccactaagtgatatcagcctcaaggatatccaggcccaaatcgactcgatcgtggaactcgtatgtaagacccttagaggtataaactccagacacccatcccttgcctttaaagctggtgagagttcaatgatcatggaaattgagctgcagtcccaagtgttggacgcaatgaactacgttctctatgaccagctgaagttcaagggcaacaggatggactactataacgcactcaatctatacatgcaccaggtcctcattaggaggaccgggatcccgatatccatgtccctactgtatctcacaatcgcccgacagctgggagtcccacttgagcctgtcaatttcccctcccatttcttgctccggtggtgtcagggcgcggagggagcaaccctggacatctttgattatatttacatagatgcatttgggaagggaaaacagctcacagtcaaagaatgtgagtatctgattggtcagcacgtgacagccgccttatacggggtggtgaacgtgaagaaagtcctgcagcggatggtaggaaacctgctctctcttggcaaacgagaagggatcgatcagagttaccagctgctgcgcgattctttagatctgtatcttgcaatgtatccagatcaggtccagctgctgctccttcaggcaagactgtatttccatctcggcatatggccagaaaagagcttctgcctggtgttaaaggtactggacatactacagcatatccagaccctggaccccggccagcatggagcagtaggctacttagtgcaacacaccttggaacatatcgaacgcaaaaaggaggaagtgggagtggaggtgaagttgaggtcagacgaaaagcacagggacgtgtgctatagcatcggattgattatgaaacataagagatacggttataactgcgttatctacggctgggatcccacctgtatgatgggacacgagtggatccggaatatgaatgtacatagcttaccacacggacaccatcagcctttctacaatgtacttgtggaggacggttcctgtcggtacgcagctcaggaaaacctggagtataacgtcgaaccccaggaaatctcccatcctgatgtggggcggtactttagtgaatttacaggcacccactacatacctaacgctgaattagagatcagatatccagaagacctcgagtttgtctacgaaaccgtccagaacatatatagcgccaaaaaagaaaatatagatgaatag

SEQ ID NO: 116801 - DNA, 1866 bp, synthetic construct
  misc_feature 1..1866: note = Description of Artificial Sequence: Synthetic coding sequence
  source 1..1866: mol_type = other DNA
atggcagcagctgcggttgacagcgccatggaagtggttcctgccctggccgaggaggcagcacccgaagtggcagggctatcctgcctggtaaacctacctggagaggtcctggaatatatactttgttgcggtagcttgactgctgctgacataggacgcgtgtcgtctacatgtcgccgcctccgggaactttgccagtcttcggggaaagtgtggaaagagcaattccgtgtacggtggccaagcctcatgaagcattatagcccaaccgactacgtgaactggctggaggaatataaggttaggcaaaaggcaggactcgaggcacgaaaaatcgtggccagcttttctaaaagattcttcagtgagcatgtgccctgtaacggattctcggacatagaaaacttggagggtcctgaaatatttttcgaagacgaacttgtgtgcatccttaatatggagggaaggaaagctctcacctggaaatactatgctaaaaaaattctgtactatctgcggcagcagaaaattctgaataacttgaaagcattccttcagcagccggacgactatgagagttaccttgagggggctgtctacattgatcagtattgtaatcccctcagtgatatctctctaaaagatatccaggcacagatagactctattgtggagttagtatgtaaaactttaagaggtattaatagcagacacccatccctggccttcaaggcaggcgaatccagcatgataatggaaattgagctccaatcccaggtcctcgatgcaatgaactacgtcctgtatgaccagctcaagtttaaaggaaataggatggactactacaacgccctcaacctttatatgcaccaggtccttatcaggcgcacaggtattccgataagcatgtcccttctatacctaaccatcgcccgccagctcggcgtgcccctggagccggttaatttcccgagccattttcttttaaggtggtgtcagggcgctgagggagcgactctcgacatatttgactatatttacattgacgccttcggcaagggcaagcagctgaccgtcaaagaatgtgagtacctgataggccagcacgtgaccgccgcactgtacggcgttgtcaacgtcaaaaaagtgctgcagcggatggtcgggaatttgctcagcttagggaaacgtgagggtatcgaccagtcctatcagctgctacgcgactctctggatctctacctcgcaatgtatcccgaccaagtgcagctgttgctgctgcaggccagactgtatttccacctgggtatttggcctgaaaaggttctggacatcttgcaacacattcagaccctggatcctgggcagcacggagcggtgggctatctggtgcagcacacgttggagcatattgagaggaaaaaagaggaggtgggagtagaggtcaaactgcggtctgatgaaaaacatagagacgtttgctattcaattggacttatcatgaaacataagcggtacggctacaattgtgttatctacggctgggatcccacgtgtatgatgggccacgagtggatacggaatatgaacgtccacagcctccctcatggccatcatcagcccttttacaatgttttagtggaagatggatcttgccgttacgccgcccaggaaaatctcgaatataatgtggagccccaggagatctcccaccccgatgtcgggcggtattttagcgaatttactggcacccactatatcccaaacgccgaactggaaattagataccccgaagacttagagttcgtatatgagaccgtgcaaaacatctattccgccaagaaagaaaacatcgacgaatag

SEQ ID NO: 116802 - DNA, 1434 bp, synthetic construct
  misc_feature 1..1434: note = Description of Artificial Sequence: Synthetic coding sequence
  source 1..1434: mol_type = other DNA
atgaaacactattctccaacagattacgtcaattggctcgaggagtacaaggtgcgccaaaaggccggccttgaagcaagaaagatagtcgcatcattctcgaaacgtttctttagcgaacatgtgccctgtaacggattctcagatattgagaacctcgaagggccagaaatattcttcgaggatgagctagtgtgcatattgaacatggaggggcggaaggccttaacctggaaatattatgccaagaagatcttgtactacctcaggcagcagaaaattctaaataacctaaaagcctttctccaacagccggacgactatgagtcttatctggagggtgccgtgtatattgaccagtattgtaatccgctctcggatattagcctgaaagacatccaggcccagatcgactctatagtggagctggtttgtaaaaccctgcggggaattaacagcagacacccatctcttgcgttcaaggccggcgagagttctatgatcatggagatagaactgcagtcccaggtcctcgatgccatgaattatgtgctgtacgatcagctcaagtttaaaggtaatcggatggactattataatgctctgaacctttacatgcaccaggtcctgatccgccggaccggtattcctatatctatgagtctcctgtaccttacaatcgcgaggcagctgggcgtccctttggagccagtcaactttcccagccattttctacttaggtggtgccagggggccgagggcgagggcattgaccagtcttatcaactgttgcgggattcattagacctgtacctggctatgtatccagaccaggtgcagctgctgctgctgcaggcccgcttatacttccatctgggaatatggcccgagaaggtgctagatatcctgcagcacattcagacactggatcccggccaacacggtgctgtcggctacctggttcaacacacgttggagcacatcgagcgcaagaaagaagaggtcggcgttgaggtcaagctgaggtcggatgagaagcatagggacgtgtgttattcaatcggattgatcatgaaacacaagcggtatggctataactgcgtaatctacgggtgggaccccacctgcatgatgggtcatgaatggatcaggaacatgaacgtgcattccttgccccacgggcatcaccaacctttctacaacgttctggttgaagacggcagttgccgttatgccgcccaagaaaacttggaatacaatgtagagcctcaggagattagtcaccccgatgtgggaaggtacttttccgagttcactgggacccactatataccaaatgctgaactggaaatccgctatcccgaggacttggaattcgtttacgaaactgtccagaacatttacagcgctaaaaaggagaacatcgacgagtag

SEQ ID NO: 116803 - DNA, 1212 bp, synthetic construct
  misc_feature 1..1212: note = Description of Artificial Sequence: Synthetic coding sequence
  source 1..1212: mol_type = other DNA
atggagccagttggctgttgcggggagtgccgcggaagcagtgtggatcccaggagcacgttcgttctcagcaacttggctgaggtggtggagcgggtcctaacattcttaccagctaaagcactccttagagttgcttgcgtgtgcaggctgtggagggagtgtgtacggagggtcttgcgaactcaccgctcggtgacctggattagcgctggtttagcagaggcaggtcacctggaagggcattgcttggtgcgggtggttgcagaggaactcgagaacgttcgcatactgcctcacacagttttatacatggctgatagtgagacatttattagcttggaagaatgccggggacataagagagccaggaaaagaacatctatggaaaccgccttggcgttagagaagctgttccctaagcaatgtcaggtgctaggcattgtgacacctgggattgtagtcacacccatgggaagcggctctaacagaccccaagaaatcgagattggtgagtcaggctttgccctcctcttccctcagatagagggtattaaaatccagcccttccatttcatcaaagatcctaagaatctcaccctagagcgtcaccagttgaccgaagttgggctgctcgacaaccctgagttgagagttgtcttggtgttcggctacaattgttgtaaggtgggagcatctaactacctgcagcaggtggtgtctacgttctctgacatgaacatcatccttgctggggggcaggtggacaatctgtcctccctcactagcgagaagaaccccttggatatcgatgcgtcaggcgtagtgggcctatccttctcaggccacagaatccaaagcgccacggtgcttctgaatgaagacgtaagtgatgagaaaaccgccgaagcggctatgcagcgcctgaaggccgctaatatccccgaacacaacacaatcggtttcatgtttgcctgtgtgggcaggggcttccaatactaccgggctaaaggcaacgtagaagccgacgccttccggaagttcttccctagcgtgcctctgtttggtttctttgggaacggggagatcggttgtgatcgaatcgtgaccggaaattttatccttcggaagtgcaatgaagttaaggatgacgacttattccactcctacacaacgataatggccctgattcatctggggtcgagtaaatag

SEQ ID NO: 116804 - DNA, 831 bp, synthetic construct
  misc_feature 1..831: note = Description of Artificial Sequence: Synthetic coding sequence
  source 1..831: mol_type = other DNA
atggagcccgtaggatgttgcggcgagtgccgcggttccagcgtagacccaaggtcaacctttgtcttgagcaatcttgccgaggtggtggagcgtgtattaacgttcctacccgcaaaggcactgctccgggtggcatgcgtgtgcaggttgtggcgcgagtgcgtgcggagagttctcaggacacacaggagcgtcacctggatcagtgctggactggctgaggcaggtcaccttgaagggcattgtttagtccgcgttgtggctgaggagctggagaatgtgcggattctgcctcacacggtgttgtatatggcagattccgagaccttcatttctctggaggaatgtcgtggacataagcgagctcgcaaaagaacttcaatggaaaccgccctggctttggagaagctgttccccaaacagtgtcaggtcctcgggattgttacccccggcattgtggtgacacccatgggtagcggatctaatcggccgcaggagattgaaatcggagaatccggcttcgctttgctgtttcctcagattgagggcattaagatccaaccattccacttcattaaagatcctaaaaatttaacattagaaagacaccagctaacagaggtgggcttactggataatcccgaactccgggtggtccttgtcttcggctataattgctgtaaggtcggggcctcgaactatctgcaacaagtcgtgagcacattctctgacatgaacatcatcctggctggcggacaggtggataacttgagcagtctcacctctgagaagtacgtgctctgcgccagcgatttcgtttgcgaatag

SEQ ID NO: 116805 - DNA, 900 bp, synthetic construct
  misc_feature 1..900: note = Description of Artificial Sequence: Synthetic coding sequence
  source 1..900: mol_type = other DNA
atggcagacagcgagacattcataagcctcgaagagtgccggggacataaacgcgcaaggaagcgaacatccatggagacagctttagcgctcgaaaaactattccccaagcagtgccaggtcctcggcatcgtcactcctggtatcgtggtgacacctatgggatcagggtccaatcgaccgcaagagatagagatcggagagtctggctttgccctgctcttcccacagatagaaggaatcaagatacagcccttccactttattaaggatccaaaaaacctcacactggagagacatcaacttaccgaggtggggcttctggacaatccggaactccgcgtcgtgttggtgttcggatataattgctgtaaagtaggagcatctaattatctgcaacaggtggtgagcacattcagtgacatgaatattatcctggccggaggacaagtggataacctgtccagcctcacctcagagaagaaccctctggacattgacgcgagtggcgtggtaggcttgtccttcagtgggcatagaatccagtcagccacagtacttttaaatgaggacgtctctgatgagaagacggcagaggctgctatgcaacgcctgaaggctgctaacataccagaacacaatacaatcggattcatgttcgcctgcgtggggcggggcttccagtattatcgcgcaaagggcaatgtagaagccgacgcctttcgcaagtttttcccaagcgtccctttgttcgggtttttcggcaacggagagatcgggtgcgaccgcatcgtgactgggaactttatccttaggaaatgtaatgaggtgaaagacgatgacctttttcattcttataccaccatcatggccctaattcacttaggctccagcaaatag

SEQ ID NO: 116806 - DNA, 1743 bp, synthetic construct
  misc_feature 1..1743: note = Description of Artificial Sequence: Synthetic coding sequence
  source 1..1743: mol_type = other DNA
atgggagagaaggccgtgcccctcttaaggagacgtcgtgttaagcgcagctgcccaagttgcggatcagaactgggggtggaggaaaagcgcggcaagggaaaccccattagcattcagctgtttccaccagagctggtggagcatattattagcttcctccctgtccgagaccttgttgcactcggacagacttgtcggtactttcacgaggtgtgcgatggcgaaggagtgtggaggcgtatatgcagacgcctgtcgcctcgcctacaagaccagggttccggcgtgcgaccctggaagagggctgctatcctgaactacaccaaaggcctttacttccaggccttcggggggcgccgaaggtgccttagcaagtccgtggccccacttttggcccatggataccgcagattcctcccgacgaaggaccacgtattcatcttggattacgtaggaactttatttttcctaaagaacgcgctagttagcacactgggtcagatgcagtggaagagagcctgcaggtatgtcgttctttgcagaggcgctaaggatttcgcctcagatccacggtgtgatactgtgtaccggaagtatctgtacgtgctggccacccgggagccgcaggaagtggttggcaccaccagttcacgggcctgcgactgcgtggaagtttacctacaaagctccggacagcgcgtgttcaaaatgacattccaccatagcatgacctttaagcaaatcgtactcgttggccaggaaactcaacgggccctactcttgctaacggaagaggggaaaatttatagtctggttgtaaacgaaacacaactagaccagccacgatcatacaccgtgcagctggccctgcgaaaagtcagtcactatctaccacatctgcgggtcgcctgcatgacctcaaaccagtctagcacattatacgttaccgaccaggggggcgtatacttcgaggtgcacacaccgggcgtttaccgagatctgttcggtacgctgcaggcatttgatccactggaccagcagatgccccttgccctgagcctgcccgctaagattctcttttgtgcactgggctacaatcatttgggcctggtggacgaattcggccgcatctttatgcaaggcaacaatcgttacgggcaactcggaactggcgataagatggaccgaggcgagcccacgcaggtgtgttacctgcagcgacccattaccttatggtgcggtctgaaccatagcctcgtactctcacagtcctccgaatttagtaaagaactcctgggttgtgggtgtggcgccggcgggcgcctccccggctggccgaagggcagtgcctcttttgtgaaactgcaggtgaaggtaccactgtgcgcgtgtgctctctgtgctacccgtgaatgtctgtatatccttagttctcacgatattgagcagcacgctccctatcggcaccttcctgcctcgcgagtcgtgggaacgccggagcccagtcttggcgcacgagccccacaggaccccggagggatggcccaagcctgtgaagagtacctaagccaaatccactcctgtcagaccctgcaggataggacagagaagatgaaggagatcgtgggatggatgcctctgatggcagcacagaaggacttcttttgggaggcccttgatatgttacaacgcgcagagggtggcggcggtggagtgggaccacccgctcccgagacctag

SEQ ID NO: 116807 - DNA, 957 bp, synthetic construct
  misc_feature 1..957: note = Description of Artificial Sequence: Synthetic coding sequence
  source 1..957: mol_type = other DNA
atgggcgagaaagcagtgcctcttctcaggagaagacgagtgaagcggtcttgccccagttgcggtagcgagctgggcgttgaagagaaacgaggtaaaggcaatcccatttcgatccagctcttcccgcccgagctggtggaacacatcatttcattcttacctgttcgtgaccttgtcgccctcggacagacctgccggtactttcatgaagtatgtgacggggaaggcgtttggcggcgcatctgtcgcagactatcaccgcggcttcaggaccaggatacaaagggcctctacttccaggccttcgggggccggaggaggtgtctttcaaagtcggtggccccactcctggcccacgggtaccggcggttcctgccgactaaagatcacgtgtttattcttgattacgtggggactttattcttccttaagaatgccttagtgagtacgctcggacagatgcaatggaaacgcgcgtgtaggtacgtggttctgtgccgcggtgctaaggattttgcctctgatcctcgctgtgacacagtctatcggaagtacctttatgtgttggcgacgcgagaaccccaagaggttgtaggtaccacaagcagccgcgcttgcgattgtgtagaagtctatctgcaaagcagcggacagcgcgttttcaaaatgacttttcaccatagcatgacgtttaaacagatagtgctggtaggccaagaaacacagagggcactcttactcctgactgaggagggtaagatatacagtcttgtggtgaacgaaacccagctcgaccagccccgctcttacacagtccaactagccctgcggaaggtgtcccactacttaccgcacctaagagtagcttgtatgacctctaaccaaagttcaacgctttacgtgaccgatccaatattgtgttcgtggctccaacccccctggccgggtggatag

SEQ ID NO: 116808 - DNA, 1857 bp, synthetic construct
  misc_feature 1..1857: note = Description of Artificial Sequence: Synthetic coding sequence
  source 1..1857: mol_type = other DNA
atggtgtgggaatcacagcaggagaggggaggccagggccctcgccggcaagagggtcgaagcagggagggagccatccgcatggtgaggggatctcagcgccggaagcttcaaaaatttacacgtctgtgtggtagggaggagggcttgcgtgtgaagcgcagctgcccgtcatgcggaagtgaacttggtgtggaggaaaaaagaggaaagggcaaccccatcagcatccagctcttccccccggagctggtggagcacattatttcttttttgcccgttcgggacttggttgcgctagggcagacctgccgctacttccatgaagtgtgtgatggcgaaggcgtttggagaaggatctgtcgtcgactgagccctagacttcaggaccagggcagtggcgtccgaccctggaagagggctgctattctgaactatacaaagggcttatatttccaggcattcggcgggcgaaggcgctgtctgagcaagtccgtcgcaccgctactagcacacgggtatcgcaggtttctgccaaccaaagatcatgtgttcattctggactacgtaggcactctgttctttctgaagaatgccctcgtatccaccttgggccagatgcagtggaaaagggcttgtcggtatgtggtgctgtgccggggtgccaaggattttgccagcgatccgcggtgtgatacagtgtacaggaaatacttgtatgttctggcaacacgggagcctcaagaggtggtgggtaccacatcctctagagcttgcgattgtgtggaggtgtatctgcagtcatccggacagagggtgttcaaaatgacctttcaccatagtatgacgttcaagcagatcgttctggtcggccaagaaactcagcgtgccctgcttcttttgacagaagaaggaaagatctatagcttagtggttaatgagacccaacttgatcaaccccgaagctataccgtccagctcgcactccgcaaggtgagtcattacctcccccaccttcgagtcgcctgtatgacaagcaatcaatctagtaccctctatgtgacggaccaggggggcgtgtactttgaggtccatactccaggggtctatcgcgacctttttgggacccttcaagcctttgatccgcttgatcagcaaatgcctctggcactgtccctgcctgcgaagatcctgttctgtgccctgggttataatcatctggggcttgttgacgagtttgggcgtattttcatgcagggcaataatagatacgggcagctgggtactggtgacaagatggacagaggtgagccaacacaggtttgctatctgcaacgtccaattactctatggtgtggattgaatcatagtctcgttctgtcacaaagctctgaattcagtaaggaactcttggggtgtgggtgcggcgccggaggacgcctcccagggtggcccaaaggatccgcctcatttgtcaaacttcaggttaaggtacccctctgcgcctgtgccctgtgtgccactagggaatgcctctatatattgtcctcacacgatatcgaacaacatgcgccctatcgccacctcccagcctctagggtggtgggaactccggaaccaagccttggcgcccgggccccccaagatcctggtggcatggcccaagcatgcgaagaatacctgtcacagatacacagttgccaaactctccaggatcgtaccgaaaagatgaaggagatcgtgggctggatgcccctcatggcagcacagaaagactttttctgggaagctctggatatgctccagcgtgcagaaggcgggggagggggggtaggcccaccagctccggagacttag

SEQ ID NO: 116809 - DNA, 957 bp, synthetic construct
  misc_feature 1..957: note = Description of Artificial Sequence: Synthetic coding sequence
  source 1..957: mol_type = other DNA
atgggggagaaggcggtacccctcttaagacgccgccgggttaagcgatcatgtccctcttgtggctctgaactgggcgtcgaggagaagaggggtaagggcaaccctatttcaatccagcttttccctcccgagcttgtagaacacatcatttcttttctgccagtgcgtgatttggtggcgctcggacagacttgcagatatttccatgaggtgtgtgacggtgagggtgtgtggcgcaggatctgtcggaggttgagtccaagattgcaagaccaggatacgaaagggctgtacttccaagcctttggcggaaggcgccgttgcctgtcgaagagtgtggctccactgttggcccacggttataggagattcctgccaacaaaggatcatgtctttattctggattacgtgggaactttgttttttctcaagaatgcccttgtgtcaacactgggacagatgcaatggaaacgcgcatgtcgttacgtcgttctctgccgaggggcaaaagacttcgcatctgatcctagatgtgatactgtatacagaaagtatttgtacgttctggccactagagagcctcaggaggtcgttggaaccacatcttcccgcgcatgcgactgcgtggaggtatatctgcagtcctcgggtcaaagagtttttaaaatgacattccaccacagtatgacatttaagcagatcgtcttagtggggcaggaaacccagagagccctgctgctgttgaccgaggagggcaaaatttactcactcgtggtgaatgaaacccagttggatcaaccacgcagttatactgtgcaactggccctgagaaaggtctcgcactatctgccacatttgcgcgtggcttgcatgactagcaaccaaagttccaccctgtacgttaccgatccaatcttgtgctcctggcttcagccaccttggcctggaggatag

SEQ ID NO: 116810 - DNA, 1707 bp, synthetic construct
  misc_feature 1..1707: note = Description of Artificial Sequence: Synthetic coding sequence
  source 1..1707: mol_type = other DNA
atggttaagaggtcttgcccgagttgcggttctgaactcggtgtggaagaaaaacgaggtaagggaaaccccatcagtattcagttgttcccccctgagctggtggagcatatcatctcgtttctgcctgtgcgggacctagtggcactagggcagacttgtagatacttccacgaagtgtgcgacggggagggcgtgtggcggcggatttgtaggcgcctctcacctcgactgcaggatcagggctctggcgttcggccttggaaacgagccgctatcctcaactacacgaaaggcttatacttccaagcctttggcgggcgacgacgctgcctgagtaaatccgtggctcctctgcttgcacatggctacaggagatttttgcctaccaaggatcacgtcttcatccttgactacgtgggtacactgtttttcttaaagaatgctctcgtctcaaccctgggtcagatgcagtggaagagggcttgtcgctatgtggttttgtgccgcggagctaaagacttcgcctccgatccgcggtgcgacacggtctacagaaagtatctgtacgtcttggccacccgggaaccacaagaggtggtgggcacaacctcttcacgcgcatgtgactgcgtcgaggtttacctgcagtccagcgggcagagggtgttcaaaatgacatttcaccactcaatgactttcaagcaaattgtgttagtgggccaagagacccagcgagctctgcttttactcactgaagaaggaaagatctatagcctggtcgtgaatgaaacgcagctcgatcagccccgctcctatactgtgcaattggcactgcgcaaggttagccattacctgccccatttacgcgtagcctgtatgacgtctaatcaatcctccacattatacgttacggaccaaggcggcgtgtattttgaggtgcacacccccggtgtttatcgtgatttattcggcaccctgcaggccttcgacccactagaccagcagatgcctctggcgctgtccctacccgccaagatactgttctgcgcactagggtacaaccatctgggcctggttgatgagttcggcaggatttttatgcaaggcaataaccggtatggccagctcggaacaggagacaagatggaccgaggggagcctacacaggtgtgttacctccagcggcccattactttgtggtgtggactcaatcacagcttagtgttgtctcaatcaagtgagttctcgaaggagttgcttggctgcggttgcggagctggggggagacttcctgggtggcccaaggggagtgccagcttcgtgaagctgcaggtcaaggttcctctttgtgcctgcgcgctctgtgctacacgagagtgcctctacatcctttcgagtcacgatattgaacagcatgctccctaccgccacctgcccgcctctcgggtggtgggtacgcccgagcctagcttgggagccagagcgccgcaagatcccggaggcatggcccaggcttgcgaggagtatctctcacagattcactcttgccagactcttcaggaccggaccgaaaagatgaaggagattgtgggttggatgccactaatggccgcacaaaaggatttcttttgggaagcgttggacatgctccaacgagccgaggggggagggggcggagtgggcccgcctgctcctgagacctag

SEQ ID NO: 116811 - DNA, 1104 bp, synthetic construct
  misc_feature 1..1104: note = Description of Artificial Sequence: Synthetic coding sequence
  source 1..1104: mol_type = other DNA
atgccgttcttaggccaggattggagatcacccggctggagctggatcaagaccgaagacggttggaaaagatgtgaatcctgcagccagaagctcgagcgtgaaaacaaccgctgcaacatttcccattcaatcatcctgaacagcgaagatggggaaatatttaacaatgaggaacatgaatacgcttctaagaagcgcaagaaagaccatttcaggaacgataccaacactcagtctttttatagagaaaaatggatctatgtgcataaagaaagtacgaaagagagacacggctactgcactctgggtgaagcctttaaccggcttgattttagcagtgccattcaggacattcggcggtttaactacgtggtcaagctgcttcagctcattgccaagtctcagctgaccagtttgtccggagtcgcccagaagaactacttcaatatcctggacaagatcgttcagaaggtacttgatgaccaccataaccccaggcttattaaggacctcttgcaagacctgtcatccacattgtgtatacttatcagaggggtggggaagtccgtcctggtagggaacattaatatctggatttgccgactggagacaatcctggcttggcaacagcagctgcaagacctccagatgacaaaacaagtcaacaatggcctgacactctccgacctgccactccacatgctgaacaacattctctaccgtttttccgacgggtgggacatcattacactggggcaggtgacccccactctgtacatgctgtcggaggatcggcagttgtggaagaaactgtgccagtatcactttgctgaaaagcaattctgtagacacctgatccttagtgagaaaggccacattgaatggaagcttatgtacttcgccttgcagaagcactaccctgccaaggagcagtatggcgatacgctgcacttttgcagacactgctcaatactgttttggaaagattaccatctggcacttctgttcaaagattcagggcatccatgcaccgcggccgatcccgactcttgcttcacccctgtatccccccagcacttcattgacttgtttaagttctag

SEQ ID NO: 116812 - DNA, 1077 bp, synthetic construct
  misc_feature 1..1077: note = Description of Artificial Sequence: Synthetic coding sequence
  source 1..1077: mol_type = other DNA
atgcccttcctcgggcaggactggcgaagtccaggatggtcctggatcaagacggaggacggatggaagaggtgcgagagttgcagccagaaactcgagagagaaaataacagatgcaacatcagccacagcataatactgaacagtgaggatggtgagatattcaacaacgaggagcacgaatacgctagtaaaaaacggaaaaaagaccatttccggaacgatacaaacacccagagcttctatcgggaaaaatggatctacgtgcataaagaatccaccaaggaacgccacggttattgcactctcggtgaagcctttaatcgtttagacttttcctcagcaatccaagacatcagacgattcaattatgttgttaagttgctgcagctgattgcaaaatcacagctaacaagcctttccggcgtggcccagaagaactactttaacatcctggacaaaattgtgcaaaaggtactcgatgatcatcataaccctagactgatcaaagacctgttacaggacctctcctccaccctctgcattctaattcgaggggttggaaagtctgtgctggtcggcaatattaatatttggatctgtcgcctggagacaatcctggcctggcagcagcagctgcaggacttacagatgaccaagcaggttaacaatggcctcaccttatcagacttgccactgcatatgttaaacaatattctgtataggtttagcgacggctgggacataattacgctggggcaagtcactcccacgctttatatgttgagcgaggatagacagctctggaaaaaattgtgccagtaccactttgccgaaaagcaattttgcaggcacctgattctgagtgagaaaggccatattgagtggaagctcatgtattttgccttacaaaaacattaccctgctaaagaacagtacggagatacactacacttttgtcgccactgttctatactcttctggaaggattccggacatccctgcaccgctgcagatcccgattcttgctttacacccgtctccccacaacactttatagacctattcaagttttag

SEQ ID NO: 116813 - DNA, 876 bp, synthetic construct
  misc_feature 1..876: note = Description of Artificial Sequence: Synthetic coding sequence
  source 1..876: mol_type = other DNA
atggagaagtactcaattatgaaaagtatgaatatgcaccgtaagaaaggcaagaggactatcctggaaatgactcagatcctgaagaggcacggctattgcaccttgggggaggcgttcaaccggctagacttctcttcggctatccaggatattcggcggtttaattatgtggtgaagttactacagctgatagcgaaaagccagctgacctcactgtctggtgtcgcccagaaaaattactttaatatcctggataagatcgtacagaaagtgttggatgaccatcataatcctcgtcttataaaggatctacttcaggatctctccagcaccctttgcatattaattagaggggtggggaaaagtgtcctggttgggaatattaatatctggatctgtaggctcgaaacaattctcgcgtggcagcaacagctgcaggaccttcagatgaccaaacaggttaacaatggactgacactctcagatctaccgctccacatgcttaacaacatactataccgtttttccgacggctgggacatcattaccctgggacaggtgacgcctactctctatatgctgtcagaggataggcagttatggaagaagctgtgccagtaccacttcgccgaaaagcaattctgccgccacctgatactttctgagaaaggtcacatcgagtggaagctgatgtatttcgcactccagaagcattaccccgctaaggaacagtacggcgacacattacatttttgtcgccattgcagtatccttttctggaaggactcaggacatccttgcactgcagcggaccccgactcttgctttacccccgtgtctccacaacattttattgacctgtttaagttctag

SEQ ID NO: 116814 - DNA, 876 bp, synthetic construct
  misc_feature 1..876: note = Description of Artificial Sequence: Synthetic coding sequence
  source 1..876: mol_type = other DNA
atggagaagtacagcattatgaagagcatgaacatgcatcgaaaaaaagggaagcgcacgatcctggagatgacccagatcttaaagaggcatggatattgcactctcggcgaggccttcaacagattggacttctcttctgcgatacaagacatcagacgttttaactacgtcgtgaagttactgcaactgatagccaagagccagctcacctcactatcaggcgtggctcaaaagaattactttaatatcttggataaaattgttcagaaagtccttgacgaccaccacaaccctcggttaatcaaagaccttttacaggatctatcatccacactctgtatcctaatccggggcgtagggaagagtgtcttggtgggaaatataaacatttggatctgcagacttgagacaatactcgcctggcagcagcagctgcaggacctgcagatgacgaagcaggtgaacaatggtctgaccttgtccgatctgccactgcacatgttgaacaatattttgtaccggttttccgatgggtgggacatcattacactcggtcaggtgactcctacactctacatgctgagtgaggaccgccaactttggaagaagctgtgccagtaccacttcgccgagaaacagttttgcagacacttgatcctgtccgagaaaggacacattgagtggaagctcatgtacttcgctttgcagaaacattacccagccaaagagcagtatggagataccttacacttttgtcggcactgctctattctattttggaaggattcaggccacccatgtactgccgcagaccccgattcctgctttactccggtaagcccacagcatttcattgatctattcaaattttag

SEQ ID NO: 116815 - DNA, 993 bp, synthetic construct
  misc_feature 1..993: note = Description of Artificial Sequence: Synthetic coding sequence
  source 1..993: mol_type = other DNA
atgcccttcctgggccaggattggcgatcccctggttggagttggatcaagacagaggacggatggaagaggtgtgagtcatgctcacagaaactcgagagagaaaacaacaggtgtaacatatctcactccatcattctaaacagcgaagacggcgagatttttaataacgaagagcacgaatacgccagcaagaaacgtaagaaggaccatttccgcaacgacacaaatacacaatccttctatcgggagaagtggatctatgtgcacaaggagtcgacaaaggagcggcacgggtactgcacattaggggaggctttcaaccgcctggactttagtagtgccatccaggatatccgccggttcaactacgttgtaaagttgcttcaactaattgcaaagagccagctgacatctctctcaggagtggctcagaaaaactattttaatatccttgacaaaatcgtccaaaaagtgctggacgatcatcacaatccacgtctcattaaggacctcttgcaggacctttcttccacattgtgtatattaatacgaggagtgggcaaatccgtgctcgtggggaatataaacatctggatttgtaggctcgagaccatcttggcttggcagcagcagctccaggatttgcaaatgacaaaacaggtcaataacggcttgactctgtctgaccttcctctccttagcgaggataggcaactgtggaaaaagctctgtcaataccacttcgccgagaagcaattctgccgccacctcattttgtctgagaaaggacacatcgagtggaagttgatgtactttgccttgcagaaacactacccagccaaagaacagtatggcgatactctgcatttttgtagacactgcagcatactgttctggaaagacagtggacacccctgtaccgcggcagatcccgactcttgttttaccccggtttcccctcagcatttcatcgatctgttcaagttttag

SEQ ID NO: 116816 - DNA, 378 bp, synthetic construct
  misc_feature 1..378: note = Description of Artificial Sequence: Synthetic coding sequence
  source 1..378: mol_type = other DNA
atgccattcctcggccaagactggaggagccctgggtggtcctggatcaagaccgaagatgggtggaagcgatgtgaatcctgcagccagaaattagagagggagaacaatcgctgtaacatttcccacagcataatcctgaacagcgaagacggcgaaattttcaacaacgaggagcacgagtatgcctccaaaaaaagaaaaaaggatcatttcagaaacgacaccaatacccagtccttttaccgggagaagtggatctacgtccacaaggaaagtacaaaggaaagacatggctactgtactcttggagaggcctttaatcgcctcgatttctcctcagccattcaggacattcggcggtttaactacgtttag

SEQ ID NO: 116817 - DNA, 852 bp, synthetic construct
  misc_feature 1..852: note = Description of Artificial Sequence: Synthetic coding sequence
  source 1..852: mol_type = other DNA
atgggagcctctgtcagtcgggggagggccgcacgggtcccagctccagagccggaaccagaagaggctcttgacttgtcgcagctgccaccagagctattgctcgttgtgctgtcccacgttccaccaagaacactgctgggaaggtgcagacaagtgtgcagagggtggagagccttagttgatgggcaggccctgtggctcctcatcttggctagggatcatggcgcaactgggagagcattactgcatctcgcccggagctgtcagtctccggctcgaaatgccaggccttgcccattagggagattttgcgcaagacggcctataggtcgcaacctgattaggaatccgtgtggacaggagggtttaagaaagtggatggttcagcacggaggggatggttgggtcgtggaggaaaatagaactaccgtacctggggcgccatcccagacatgtttcgtgacctccttttcctggtgctgtaagaagcaggtacttgatctggaagaggaaggactgtggcctgagttgttggattctggacggattgagatttgcgtctctgactggtggggcgcgcgccatgacagtggctgcatgtaccgactgcttgtgcagcttcttgatgccaatcaaactgtgctcgataagtttagtgcagtacccgaccccatcccccagtggaataataacgcttgcttacatgtgacccatgtgttttccaatatcaagatgggcgttcggtttgtgtcatttgaacacaggggccaggacacccagttctgggcaggacactatggggctagagtgactaactcctcagtaatcgtgagggtgcgactttcctag

SEQ ID NO: 116818 - DNA, 852 bp, synthetic construct
  misc_feature 1..852: note = Description of Artificial Sequence: Synthetic coding sequence
  source 1..852: mol_type = other DNA
atgggagcgtccgtctctaggggccgggcagctcgggtaccagcacctgagcccgagcccgaagaagccctggacttatctcagctccctccagaattgcttctggtcgttttatctcacgtgccccccagaacactgctgggtcggtgtcgccaggtttgcagaggttggagggcacttgtggacggacaggccttatggctcctgattcttgccagggaccatggcgctacaggccgcgcactgctgcatttagcaaggtcatgtcagtcgcccgccagaaatgccagaccttgtccccttgggcgcttctgcgctcggcgacccataggtaggaatcttatccgcaatccctgtggtcaggagggcttgcggaaatggatggtccagcacggcggcgatgggtgggtcgtagaggagaatcgtacgactgtcccaggtgccccaagccagacttgttttgtgacttctttttcttggtgctgcaagaagcaggtactggatttagaagaggagggcttgtggcctgagttgctggattctggccgcatcgaaatttgcgtgtccgattggtggggcgcccgacacgacagcggatgtatgtaccggctcctcgttcagcttctggacgccaaccagactgttctggataagttttctgccgtgcccgacccaattccgcaatggaataacaacgcctgcttacacgtaacccacgtattctccaacattaaaatgggggtcagatttgttagtttcgaacaccgaggccaagatactcagttctgggccggccactatggagcccgggtcaccaatagctccgtaattgtgcgcgtccgactgtcttag

SEQ ID NO: 116819 - DNA, 1107 bp, synthetic construct
  misc_feature 1..1107: note = Description of Artificial Sequence: Synthetic coding sequence
  source 1..1107: mol_type = other DNA
atggctgccgccgcggaagaaagaatggccgaagagggcggcggcggtcagggagatggcgggtcatctctggccagcggcagcacacaacgccaaccaccacccccagcccctcagcacccacagccagggtcacaggccctacctgctccagctcttgcgcctgaccaactgccacagaataatactcttgtcgccctacctatagtagcaatcgagaacattctctcttttatgtcttacgacgagataagtcagttacgactggtgtgtaagcggatggatttggtgtgtcagcgtatgctaaatcagggctttttgaaggttgagcggtaccataatctctgtcagaaacaggtgaaagcccagctcccacggagggagtccgagaggcgcaaccactccctggcccgccacgctgatattcttgcagcagtcgagaccagactctctctcctgaatatgacttttatgaaatacgtggatagcaacctgtgttgcttcataccagggaaagtgattgacgaaatttatcgcgtgctgaggtacgttaacagtacccgggcaccacagcgtgcccatgaggtgttgcaggagcttcgcgacattagttctatggcaatggaatacttcgatgagaagattgtgcctatattgaagaggaaactgcccggctcagatgtctcaggaagactgatgggttcaccgccagtgcctggacctagtgcagctctcacaacaatgcaactgttcagcaagcagaaccctagcagacaggaagttaccaagttacaacagcaggtcaaaacaaacggagctggggtgacagttctaagacgtgagataagcgaactgcgcactaaagtacaggagcagcagaaacagctgcaggaccaagatcagaagctgctggaacaaactcaaataatcggagaacagaatgctagattggcagagctagagaggaagctgcgtgaagtcatggagtcagctgtcggcaattcctccggctcagggcagaacgaggaaagtcctaggaaaagaaagaaggccaccgaagcaatcgactctctgcgaaagtcaaagcgattgaggaacagaaagtag

SEQ ID NO: 116820 - DNA, 540 bp, synthetic construct
  misc_feature 1..540: note = Description of Artificial Sequence: Synthetic coding sequence
  source 1..540: mol_type = other DNA
atggccgctgccgcagaagagcggatggctgaggagggcggtggtggacagggcgatggaggatcatccctggcaagtgggtctactcagaggcaaccgcctcctcccgctccgcaacatccccagccaggctcacaggctctgccagcacctgccctggcacctgaccaacttccgcagaacaataccctggtagcactccctattgttgccattgagaacattttatcttttatgtcctatgatgaaattagtcagttacgcctcgtctgcaaaaggatggatttggtatgccagcgcatgctcaaccagggattcctgaaggtagagcgctatcacaatctgtgccaaaaacaggtgaaggcccagctgccaaggcgggaatcggagagaagaaaccacagccttgcacgacacgctgacattctggcagcggtggagacaaggctgtctctgctgaatatgaccttcatgaaatatgtcgactcgaatctttgctgtttcatcccaggtaaattccaggatagacttcagccatag

SEQ ID NO: 116821 - DNA, 1416 bp, synthetic construct
  misc_feature 1..1416: note = Description of Artificial Sequence: Synthetic coding sequence
  source 1..1416: mol_type = other DNA
atggcggccatggaaacagagactgcgcccctcaccttggagtcactgcccaccgatccgttgctgctgatcttatccttcctggactaccgcgaccttatcaattgctgctacgtgtcaaggcggcttagccagctgagttcacatgaccccttgtggcggagacactgtaagaaatactggctcattagcgaggaggaaaagacgcagaaaaaccaatgttggaaaagtctctttatcgatacctatagtgacgtgggtcgttacatcgatcattacgcagccatcaagaaggcctgggacgatctgaaaaaatacctcgagcccagatgtccacgcatggtgctgagtctgaaggagggagctagagaggaagacctcgacgccgtcgaggcacagatcgggtgcaaactgcccgacgattacagatgcagctacagaattcacaatggtcaaaaactggtggtcccaggtctgctgggatcaatggccctgagcaatcattaccggagcgaagacttactcgacgtggacaccgccgcaggaggattccagcaaaggcagggactcaaatactgtttaccattgactttttgtatccacactgggctttcccagtatatagctgtcgaagccgcagaaggcaggaacaagaatgaggtcttctatcagtgtcccgatcaaatggcccggaacccagcggcaattgatatgtttatcatcggcgccacatttaccgactggttcacatcttatgtgaagaacgtggtgtccggcggctttcccatcattagagaccagatctttcgatacgtgcacgacccagagtgcgtggccactaccggagacatcaccgtcagcgtatctacaagctttctgcccgagctcagcagcgttcaccctccccattacttttttacatatcggattaggattgaaatgtcgaaggatgcgctccccgagaaagcttgccaactggacagcaggtactggcgcattactaacgctaagggagacgtagaggaggtgcagggaccaggcgtggtgggcgaattccccattatttcgccgggaagggtttacgaatacacctcctgtactaccttcagtactacttctgggtatatggaaggctactacacctttcatttcctgtactttaaggataaaatcttcaacgtagcaattcccagatttcacatggcctgccctacatttagggtgtccatagccaggttggaaatgggcccggatgaatatgaagaaatggaggaggaggaggaggaggaagaggaagaggacgaagacgacgatagtgcagacatggatgaatcagatgaggatgatgaagaagaaagacgaagacgcgtttttgatgtacctattcgaaggcggcgttgcagtaggctcttttag

SEQ ID NO: 116822 - DNA, 519 bp, synthetic construct
  misc_feature 1..519: note = Description of Artificial Sequence: Synthetic coding sequence
  source 1..519: mol_type = other DNA
atggagaccgagaccgcccccctcaccctggagagccttccgaccgatcctttgttgttaatcttaagttttctggattacagagacctgattaattgctgttacgtcagtagacgcttgtcccagctttcatcccatgacccactgtggcgacgtcattgcaaaaagtattggctaatctcggaggaggaaaaaacgcagaagaatcagtgttggaagagcctcttcatcgatacgtactcggatgtggggcggtacattgatcactatgccgcaatcaaaaaagcagggatgattagcagaaacatatggtcaccaggagtcctcggctggttcgtgtccattaatagaggctgtagcagaggtagacctaggtgttgtggctctgcggactggtgtaagttgcccgacgattatagatgtagctatcgaattcacaacgggcaaaaactggtggtgcccggctcctactgggaagcatggcactgtttaattacaatcgtcctgaagatctgttag

SEQ ID NO: 116823 - DNA, 1248 bp, synthetic construct
  misc_feature 1..1248: note = Description of Artificial Sequence: Synthetic coding sequence
  source 1..1248: mol_type = other DNA
atggccgcaatggagacagagaccgctcctctgacgctggaaagtctacccacggacccgctgcttctgattctgtcgttcctggactatagagacctgattaattgttgttacgtgtccagaaggctttcacagcttagctcccatgacccactttggagacgccactgcaaaaagtactggttgatctctgaggaggagaagacccagaaaaaccaatgttggaagtccttatttattgatacttacagcgacgttggccgatacattgatcactacgccgccattaaaaaagcatgggatgacctgaagaaatacctggaacctagatgcccccgtatggtgttgagtctcaaagagggggcccgggaagaagatctagacgcggtcgaggcccagataggctgcaagctccccgacgattataggtgtagctatcgcattcataatggacaaaagctggttgtgcccggcttgctgggctccatggctctcagcaaccactacaggagtgaggacctgctggacgttgatactgccgcaggtggcttccagcaaaggcagggactgaagtattgcctgccacttaccttctgtatccatacagggctgagtcagtatattgctgtggaagccgctgagggacgcaataagaacgaagtgttttaccagtgtcctgatcaaatggctcgaaaccctgccgctatcgatatgtttatcataggggcaacgttcacagattggtttacgtcatatgtcaagaatgtggtttccgggggattccctatcatccgcgaccagatattcaggtatgtgcacgacccggagtgcgttgctaccaccggagacatcaccgtgagcgtctcgacctcgtttctccccgagctgtcatcagtccaccctccacactatttttttacatatcggatccggatcgagatgtccaaggacgcgttgccagaaaaagcctgccagctggactcacggtactggagaatcacaaacgccaaaggcgatgtggaggaggtgcagggccctggcgtcgtaggcgaattccccatcatcagccccggaagggtgtatgaatatacgtcctgcacaacctttagcaccaccagcggctatatggaaggttactacacgttccacttcctgtactttaaagacaaaatatttaacgtggctataccacgattccatatggcctgtcccacattccgcgtttcgattgcacgcctggtgtcctag

SEQ ID NO: 116824 - DNA, 2238 bp, synthetic construct
  misc_feature 1..2238: note = Description of Artificial Sequence: Synthetic coding sequence
  source 1..2238: mol_type = other DNA
atggaggaggagctgcagcattctcactgtgtgaattgcgtcagccgacggtgcatgacccgccctgaacccgggattagctgcgatctaatcggatgtcctctggtctgcggtgctgtgtttcacagttgcaaggccgatgaacaccgtttgttatgcccattcgagagagtaccgtgcctgaatagcgactttgggtgccctttcactatggccagaaacaaagtggcggagcatttggagatgtgtccagcaagcgtggtgtgctgtacaatggagtggaaccgatggcctgtgtcatatgccgataggaaatcctacgaaaatctaagtcgcgacgtcgacgaggttgcccagctagacatggccctggccttacaagaccagagaatgctgttagagtccttaaaggtggcaacgatgatgtctaaagcaactgataaagtgagtaagccaagagaacagatttcagtcaaatcatcggtacccgagattccgcacgcgaatggcctcgtctctgtggatgaagagtcctacggagccctttaccaagccacagtggagactactcgttccctggccgccgccctggacattcttaacactgccactagagacatcggaatgctgaacacatcagtccccaatgatatggatgagcaacagaatgcgcgtgaatcgctcgaagatcagaatctcaaggatcaagaccacttgtatgaggaggagatcggcgccgtgggaggtattgactataacgacacaaatcaaaatgctcagagcgaacagaatggtagcagcgatcttctatgtgacttaaatacttctagctacgataccagcgctctctgcaacgggtttcctctagagaatatttgcacccaggtgatcgaccagaatcaaaacttgcatggagactctaaacagagtaacctgacaaatggcgactgtgtcgcgagctctgacggcacatctaaaccttcatctagcctcgctgtggccgctcagctcagagaaatcataccctcaagcgcgcttccaaacggaacggttcagcatatcctgatgcccgacgacgaaggcgagggagagctgtgctggaaaaaagtcgacctcggcgatgttaaaaatgttgatgtgttgagctttagccacgcaccaagctttaacttcctgtctaattcctgttggtcgaaaccaaaggaagacaaggcggtggatacatctgacctcgaagtagccgaagatcctatgggattgcaggggatagatctcataaccgctgctttgctgttttgcctgggtgatagcccaggggggagggggatttccgatagcagaatggcagacatataccatattgacgtgggaacgcagacttttagcctgccttctgccattctcgccacctcgacaatggtcggagagattgcctccgcgtctgcgtgtgaccatgcgaatcctcagctaagcaaccctagccccttccagacactgggcctggatctcgttctcgagtgtgtggctaggtaccagccaaagcagagaagtatgttcacgtttgtgtgcgggcaactttttcgcagaaaagaattctcaagccattttaagaacgtgcacggtgacattcacgcaggcctgaacgggtggatggagcagaggtgcccactcgcatactatggatgtacttactctcagcggcggttttgcccttccatccagggagccaagatcatacacgacaggcatttacggtccttcggggtgcaaccttgcgtttcaaccgtgttagtggagccggctcgcaattgcgttctggggctgcataatgatcatctctccagcctgccctttgaagtgttgcaacacattgccgggttcctcgatggattcagtctgtgtcagttgtcttgcgtatccaaactgatgagagatgtgtgtggatcccttctccagagcagagggatggtcattctccagtggggtaagaggaagtaccctgaaggcaactcctcttggcaaattaaggagaaagtctggcggttttctaccgcattttgttcagtaaacgagtggaagtttgcagatatcctctccatggcggaccatctgaagaagtgctcctataacgtggtggagaaacgagaggaagcgatccctttgccctgtatgtgcgtgactcgggaactgaccaaggaaggtcggtccctgcgcagtgtcctgaaacccgttctctag

SEQ ID NO: 116825 - DNA, 1620 bp, synthetic construct
  misc_feature 1..1620: note = Description of Artificial Sequence: Synthetic coding sequence
  source 1..1620: mol_type = other DNA
atggccgtatgcgcacgcctgtgtggcgtggggccttctcggggatgccgccgtcgccagcagcgtcgtggtcccgcagagacggcagcagccgactcagagccagacaccgaccccgaagaggaaaggatcgaagctagcgcaggggtgggtggcgggctgtgtgccggtccctcccctccaccaccgcggtgttctctgttagaactcccccctgagttactggtagaaatttttgcatccttacctggcacggacttgcccagcctcgcacaggtctgcacgaaattccgcaggatattgcataccgacactatttggcggcggaggtgtagggaggagtacggagtctgcgaaaacctgcggaaactagagattactggagtttcatgtcgggatgtatacgccaagttgctgcataggtaccggcatattctgggcctctggcagccggatatcggcccctacgggggcctgcttaacgtggtcgtagatggcttgtttatcatcggctggatgtacctcccccctcatgatcctcacgttgatgaccctatgcggtttaagccactgttccggattcatctcatggagcgcaaggccgcaacagtggagtgtatgtatggacacaaaggtccccatcacggtcatatccagattgtgaagaaggatgagttcagcacgaagtgcaaccaaacggatcatcacagaatgagcggcgggcggcaagaggagtttcggacctggctccgtgaggagtgggggagaaccctggaggatattttccatgagcatatgcaggaactgatactaatgaagttcatctacacatctcagtacgataattgtctcacatatagacgcatctacctgcccccatcccgccccgatgacttgataaagcctggactgtttaagggcacgtatggttctcatgggctagaaatcgtaatgctgtcttttcacggcagaagagctcgcggtactaagattaccggagatccaaatatccctgccggccagcagacagtagagattgacctcaggcacaggatccagctacctgaccttgagaaccaaaggaattttaacgagctaagcagaatcgtgctggaggttcgagaacgtgttagacaggagcaacaggagggggggcatgaagctggcgaggggagaggaaggcaaggccctagagaaagccagccgtctccggcccagccacgagctgaggcaccctcaaagggccctgacgggacgcctggagaggatggcggggagcctggtgacgcggtcgctgccgcggaacagccagcacagtgtggccaagggcagccatttgtgcttcctgtgggggtgtccagcagaaacgaggactatccaaggacatgtaggatgtgtttctatgggactgggctcattgcaggacatggctttacatctccagaacggaccccaggagtgtttatcctttttgatgaggaccggttcgggttcgtctggctggaactgaagtccttctctctgtactcaagggtgcaagccacattcagaaatgctgatgcccctagcccacaggccttcgatgaaatgttgaagaacatccaatcattgaccagttag

SEQ ID NO: 116826 - DNA, 1068 bp, synthetic construct
  misc_feature 1..1068: note = Description of Artificial Sequence: Synthetic coding sequence
  source 1..1068: mol_type = other DNA
atgccattcctgggccaggactggaggtcaccgggccaaaactgggtgaaaactgcagacggttggaaacgttttctcgacgaaaagagcggctccttcgtctcagatctgagcagctactgtaataaggaagtctataacaaagaaaatttgttcaactctctgaattacgatgtagctgcaaaaaagcggaaaaaggacatgctgaattcaaagactaagactcagtatttccatcaggagaaatggatttacgtgcacaagggttccacaaaagagagacacggatactgtactttgggcgaggctttcaatagactggacttttccacagcaattttggacagtaggagattcaactatgtggtaaggctgctcgaactcatcgccaagagtcagcttacatcgcttagcgggatcgcgcaaaaaaatttcatgaacatcctggaaaaggtcgtgcttaaggttcttgaggaccagcagaacatccgcctaatcagggaactgctccagacactgtacacttctctgtgtaccctagtgcagagagtaggaaagagtgtgttggtcggcaacataaacatgtgggtgtaccgcatggagactattctccactggcaacaacagttgaacaacatacagatcacccggcccgcgttcaaaggacttacttttaccgatctccccctgtgcttgcagttaaatattatgcagcgcctaagtgacggaagggatctcgtctctctgggtcaagctgcccccgacttgcatgtcctatccgaggatcgactcttatggaagaagttgtgtcaataccacttctccgaaagacagatccgcaaacgtctaattttgtccgataaggggcagttagattggaaaaagatgtactttaaactggtgagatgttatccccggaaggagcagtacggagacacactgcaactctgtaagcattgtcacatcctgagctggaaaggtaccgaccatccctgcaccgctaataacccagagtcatgttccgtctcgttaagtccacaggattttatcaatctgtttaagttttag

SEQ ID NO: 116827 - DNA, 789 bp, synthetic construct
  misc_feature 1..789: note = Description of Artificial Sequence: Synthetic coding sequence
  source 1..789: mol_type = other DNA
atgccattcttgggccaggattggcgcagccctggccagaactgggttaagactgccgacggatggaagcgttttctggacgaaaaatctggaagtttcgtgtctgatctgtcaagctactgcaacaaagaggtgtacaataaagaaaacctctttaacagtttaaactacgacgtggcagctaagaagagaaagaaggacatgctcaactctaaaactaaaacgcagtatttccaccaggagaaatggatatacgtgcacaaggggtctaccaaggagcggcatggatattgtacactcggggaagcatttaaccggttagatttttctactgctattctggacagtcgccgctttaattacgtggtgcggcccgcctttaaaggcctcacattcactgatctccctctttgccttcaactgaacatcatgcagcgactgagcgacggacgagacctggtgtcactgggacaggccgcgccagatcttcacgtgctgtccgaggatagactactctggaaaaagctgtgtcagtatcattttagcgagagacagattaggaagcgtctgatactctcagataaggggcagctggactggaaaaagatgtacttcaagcttgtcagatgctaccctaggaaggagcagtacggggacacactgcagctctgtaagcactgccacatcttgtcctggaaaggcactgatcatccctgcactgctaacaatcccgaaagctgttccgtgtccctgagcccacaggattttattaatctgtttaagttttag

SEQ ID NO: 116828 - DNA, 1668 bp, synthetic construct
  misc_feature 1..1668: note = Description of Artificial Sequence: Synthetic coding sequence
  source 1..1668: mol_type = other DNA
atgctgctctttctctcagtgccacagcctcggcctccaggcgctcgcaccagagcaggagcagctagagtggctaggtggagaaggttgaggcttcagcagctgagaagactaagaggactgcttcgtgtgttacgagggcggccaggcgctggtagccgccgcagaggccgcatggccctgtgcgggcaggctgctggggctgctagccttccatcggagcttatcgtgcatatcttctcctttcttccagcccccgacagactacgtgcctccgccagctgctcacattggcgcgagtgtcttttttacccagccctttggccacagctccggatctgcctgcgtgtaagtcccgccgagcagccaagactcgaatttttgatgcgaaaatgcggctggttcgtcagagagttgcgagtggagtttgccgcagagaattatctgtccggcggcgggccaggggacggcggaggcgctgacactggtacggggggagaagaggtggaggcccttcagttatctgcccggtggctcgaagtcctacggacatatctggagctggtgctgtgtgtactggtttcgatacgtaataatcgcaatttgcagaaattcagtttgtttggcgatatcagtgtgttgcagcagcagggttccctcagtaacacctacctgagcaaagttgatcctgacggcaagaagataaagcagatccaacagttattcgaagagatactcagcaacagcagacagctcaagtggctgagttgcggctttatgctggaaatcgttaccccaaccagtcttagcagcttatcaaatgctgtcgcaaacactatggaacacctgagtctgcttgacaacaacatccccggcaacagcactctgattactgcagtagagctggagcgtttcgtaaacctccatagcctggcactggacttctgtgacttcaccgctgagatggccagagtcctcactgactccaaccacgtgccccttcaacgccttagtcttttagtgcataacgtgtcagtgatgcacaaatccttggataacatgccaaatgatgaacattggaaggctttgagtagaaagagtacaagctttcgggtttatataatggcctttgacattaaaagcgaggacatgctgaagatcctgaaacctagtatccccctggaaaggatacactttgattcttacatcacctgcgtgagtggggcgatcgtagatctgatctctcgtcaatacgacaaattcctgacacattttattctcatgaatgatgtcattgataccagcggctttccagacctgtcagacaaccgaaatgaagaccccctggtactcctcgcctggaggtgtacgaaactttccctgttagctatccacggctacacggtgtgggctcataacctgatcgccatcgcgcgactccgcggtagcgatctgaaggttctagaagtgacagaggagagcatagatttcgatcagggggagctggctgaccaagacgtggaccctgtgcataatctcattgagcaagtgagtttgggcttgggtcagccatggcatgccgtgatggacattgaatcactgagcgtgtttactgagccaaatcgccatttctaccgagagatgcagtcattctcagaagacatctag

SEQ ID NO: 116829 - skipped

SEQ ID NO: 116830 - DNA, 2136 bp, synthetic construct
  misc_feature 1..2136: note = Description of Artificial Sequence: Synthetic coding sequence
  source 1..2136: mol_type = other DNA
atgcacctgaaaccctactggaagctgcagaaaaaagaacatccaccagaagtttctcgcgaaacccagagaaccccgatgaatcatcagaaggccgtgaatgatgagacctgcaaggcttcccatatcacttccagtgttttccctagcgcgtcccttggaaaagcgagtagccggaaacctttcggaatcctctctccgaatgttttatgctcgatgagtgggaagagccccgttgagtcctccctgaacgtcaagactaagaagaatgccccgtctgccaccattcatcagggggaggaggagggccccctggatatctgggccgttgtaaagccaggtaatacaaaggagaagattgccttctttgcctcccaccagtgtagcaatcgcattggctctatgaaaattaagtcctcttgggacatcgatggacgagcaacaaaaagaaggaaaaagtccggcgacctcaaaaaagcaaaagtgcaggtcgaacgtatgagggaggtcaactcccgatgctaccagccggaacccttcgcctgtggcatagagcattgttccgttcattacgtgtctgacagtggagatggggtgtatgctggaaggcccttatctgtcatccagatggtggcattccttgaacagagagccagcgcccttctcgctagctgctccaagaactgtacaaactctcctgcaatagtccgctttagcggccagagccggggcgttcccgccgtgtccgaaagctattctgccccgggggcgtgcgaagagccgactgaaagagggaacttggaggtgggagagccccagtccgaaccagtgcgcgtgctggatatggtggccaagctggagtcggagtgtttgaaacgccaaggccagagggaaccagggtcactcagcaggaacaatagtttccgacggaatgtgggcagggtactcctggccaactctactcaggctgatgaggggaaaactaaaaaaggggttctggaggcacctgacactcaagtgaaccccgtgggatcagtgtcagtggactgcggcccatctagagccgatcgctgtagcccgaaagaggatcaagcctgggacggagcctcccaggattgcccgccgctccccgctggtgtctcctttcacatcgacagtgcagaactcgagccggggagccagacagcggtaaagaatagcaatcgatatgacgtggaaatgaccgatgagcttgtcgggttgccattcagctcacacacatattctcaggcaagcgagctaccaacggatgccgtcgactgcatgagccgggaactcgtcagtctcacttctcgcaaccccgaccagcggaaggagagtttgtgtattagcattacagtaagtaaggtcgacaaagaccaaccatcaatactcaacagttgcgaagaccccgtgcccggcatgttatttttcctccctcccggacagcacttgtcagattacagtcagcttaatgagagcactacaaaggagtcatctgaggccagccagctggaggatgctgccggtggcgacagtgcttctgaggagaagagtggctccgccgagcccttcgttttaccagctagctctgttgaaagtacactccctgttttagaggccagttcttggaagaaacaggttagccatgacttccttgagacccgatttaagattcaacagctgctggaaccacagcagtacatggcgtttctcccacaccacattatggtgaaaatttttcgactactgccaacaaagagcttggtggctctgaaatgtacgtgttgctactttaagttcataatagagtactataatattcgacccgctgattcccgatgggtacgagatccgcgctatcgagaggacccctgcaaacagtgcaaaaaaaaatatgtgaagggcgatgtcagtttgtgtaggtggcatcccaaaccatattgccaggcactgccctacggcccggggtattggatgtgttgtcacagaagtcagaagggttttcccggatgcaagctcgggctgcacgataaccactgggtgccagcttgtcattcattcaacagagcaattcataagaaagcaaaaggcaccgaagctgaggaggagtattag

SEQ ID NO: 116831 - DNA, 2136 bp, synthetic construct
  misc_feature 1..2136: note = Description of Artificial Sequence: Synthetic coding sequence
  source 1..2136: mol_type = other DNA
atgcatttgaagccgtactggaaactccagaagaaggagcatccccccgaagtgagccgcgaaacgcaacgtacccccatgaaccatcagaaggccgtgaacgacgagacctgcaaggctagtcatattacctctagtgtttttccgtctgcttccctggggaaggcgtcgtcaagaaaacccttcggtatcttgagtcccaatgttttgtgcagtatgtctggcaaaagccccgtagagagctcattaaacgttaaaacaaaaaagaacgccccgagcgccacaattcaccaaggcgaggaggagggcccccttgacatatgggccgtcgtcaaacctggcaacacaaaggaaaaaatagcatttttcgcaagccatcaatgttctaatcgaataggttctatgaagattaagtcctcttgggatatcgatggcagggccacaaagagaagaaaaaaaagcggagacttgaaaaaagcgaaggttcaggtggaaaggatgagagaagttaattcacggtgctatcagcccgagccgttcgcttgtggcatagaacattgctcagtgcactacgtgtccgatagcggagacggcgtttatgcggggaggccactctcggtgatacagatggtggccttcttggaacagagagcctctgcactgctggcctcttgcagtaaaaactgcacgaactcacccgctatcgtaaggttttccggacagtctcgaggcgtcccggccgtgtcagagtcatacagtgcccccggcgcctgtgaggagccgaccgaacgtggtaatttggaggtgggggagcctcagtcagaacctgttcgcgtgctggatatggtggctaaactcgagtcagaatgcctgaagcgacagggacaaagggaacccggctctctttcaaggaataattcattccgccggaacgttgggcgagtcctgctagctaacagtacgcaggcggatgaaggcaagacgaaaaagggcgttttggaggctcccgacacgcaggtgaatcccgtgggatccgtgagtgtggattgcggaccatcccgggctgataggtgttcacccaaagaagatcaggcttgggatggagcgtcccaggactgtcctcctctcccagcaggagtttcctttcacattgactcagccgagttggagcccggatcacagacagcggtgaagaattccaaccgctacgatgtagaaatgacggatgaactggtaggtctgccattttccagccatacatactcccaggcttcggagctgcccactgatgcggtggactgcatgtctagagagttggtctctctgaccagtaggaatccagatcagaggaaggaatccctgtgcatatctatcaccgtgagcaaggttgacaaggaccagccctccattctcaactcttgcgaagacccggtgcccggcatgctcttttttctgccccccggccaacacctgagcgactactctcagttaaacgagtcaacgaccaaggagtcgtcagaagcatctcagctggaagacgctgccggtggtgattcggcaagcgaggagaagtccgggtcagccgagcccttcgttctgcctgccagctccgtagagagcacactcccagtcctggaagctagttcctggaaaaaacaggtgtcgcatgattttctagagactcgctttaaaatccaacaattgctggagcctcaacagtatatggccttcctgccacaccacatcatggtaaagatttttagactgcttccaactaagagcctcgttgcccttaaatgtacgtgttgttatttcaaatttatcatcgaatactacaacatccgccctgcggactcccgctgggtgcgggatcccaggtatcgggaggacccttgcaagcagtgcaagaaaaaatacgtaaagggagatgtttcactatgtcgctggcatccaaaaccatactgccaggccttgccgtatggtccaggctattggatgtgctgccaccgtagccaaaaaggcttccccggttgcaagctaggactgcacgataatcactgggtcccggcctgtcactcttttaatcgcgccattcacaagaaggccaaggggacagaagccgaggaagaatactag

SEQ ID NO: 116832 - DNA, 567 bp, synthetic construct
  misc_feature 1..567: note = Description of Artificial Sequence: Synthetic coding sequence
  source 1..567: mol_type = other DNA
atggctagttggttacccgagaccctcttcgagaccgttgggcaaggtcctcccccgtctaaggactactatcagctattggtgacccgctctcaggtcattttccgctggtggaagattagtttgaggagtgaataccgttccactaagcctggggaggctaaggaaacccatgaggacttcctggagaactcccacctacagggacaaacggccctgatatttggcgctaggattctcgactacgtgatcaacctgtgcaaagggaaattcgatttcctggaaaggctatcagacgatctgctgctcaccatcatttcctatctcgatctcgaagatattgcccgcctctgccagacaagccatcgcttcgctaagttatgcatgtctgacaaactttgggaacaaatcgttcagtccacatgcgacactatcacccctgatgttcgggctttagccgaggatactggctggagacagttattcttcacaaataagctacaacttcaaaggcaacttagaaaaaggaaacaaaagtacggcaatctgagagagaaacagccatag

SEQ ID NO: 116833 - DNA, 2832 bp, synthetic construct
  misc_feature 1..2832: note = Description of Artificial Sequence: Synthetic coding sequence
  source 1..2832: mol_type = other DNA
atgggaccccgaaagaaatcagtgaagacctgcatcatgaataacgagatcccagaggaaatgactgcggatgaaactaaggactacatgaatcagctaagtcatgaggtgctgtgccacatttttcggtatcttcctttgcaagacatcatgtgcatggagtgtctctcacggaagctgaaggaggccgtgactctgtatctgcgggtcgtcagggtcgtggatctgtgcgctggccggtggtgggaatacatgccgagcggatttactgatgcgtctttcctcactcttttgaaaaagatgccagacgtagagcagttgtatgggctccacccccggtacctggagcgcagacgggtccgcggccatgaggccttctcaatcccgggtgtcctggaggcactccaggcttgccctaacctggtgggagtggagacatcacacctggagctggtggagtctatttggacttacatgccccacgtgcacatcctcggcaagttccgaaataggaatggcgcgtttccgattccaccagagaacaagctcaaaattccaattggagcgaagattcagaccctgcacctagtcggggtgaacgtgccagagatcccctgtatacccatgctccgacatctctacatgaaatgggtaaggctcacaaagcctcagccttttaaagacttcctctgtatctccctgcggactttcgtgatgagaaattgcgcgggcccgacaaatagcctgaaatacgtccctttggtaaccggactggccagcgctcgcaatctggagcacttggagatggtgcgggtcccctttctgggaggtctcatacagcacgttgttgaagatagctggcgatcgggcgggttccggaatctgcacacaatagtcctgggggcctgcaaaaacgcgttggaggtggatctgggatatctgattattaccgctgcgcgacgtttgcacgaggtgcgcatccaaccttctctgaccaaagacggggtcttcagtgccctaaagatggcagaattggaatttccgcagttcgaaactctgcatctggggtacgtcgacgaattcctactgcagtctagaatggccaacgccgacttggtgaagtatgggttggctgatgtggtagaaaatcccgggatcatcactgacatcggcatgaaagccgtcaatgaggtctttagctgtattaagtatctggcaatctataattgtcctcacctacacaacccttataattggatctccgaccattccaggtggacacgcctggtcgatatcaatttggtccgctgccatgccctgaagttggacagcttcggccagttcatcgagctgcttccctcacttgagtttataagcttagaccagatgttcagggaaccgccgaagggatgcgcacgcgtgggtctgtccgcaggcactggaatcggtgtgagcagtgccttagtttcgaaccagaactctaataacgacgataataatgcccagaataacaatgccaatattcatgacaataatcaccatcatccggacgacagcgatgaagaaaacgactttaggcaggatttacaacctggtgagcagcagttcgctgccgacgccctaaacgaaatggaagacattgtccaggaagacggagaagtggttgctgaaagtggaaataataccccagctcacagccaggcgatcatccctgttgacgtggatgaggagcaggcaggtccatcaggactgcagcgggtagttaagccaactagtataacagtgcacgactccgaaagtgacgatgaagaggatagccttgagttgcaggaggtgtggattccgaagaatggtacccggcgatactctgaaagggaggagaaaaccggtgagagcgtccagagccgcgaactatcagaagtagcaaagacaaagccaagacacgctatgaagaggaagagaactgccgataagtctacctctaccagtgatccagtaatcgaggatgaccacgtgcaggttctggtgctgaagagcaaaaatctcgtgggagtgacaatgaccaactgcgggattactgacctcgtcctcaaggactgcccaaaaatgatgttcatccacgcaacccggtgtagagtgctcaaacacctgaaagtggaaaatgcccccatcgttaatcggtttgactatgctcagtgtaagaaactaaacatggatcaggtcttagaccagatcctgcggatgccaccggagagaaatcggatcatctatttaaggccaatgcaacaggtggatacactaacccttgagcagaaacttttttctggaccgtacccctatcacatctgcatcatacacgaattcagtaatccgccgaatgtccgaaataaggtgcgaatcaggtcgtggatggatacaatcgcaaacattaaccaggaactcattaagtacgaatttttcccagaagcaacccgaagcgaagaggacttgaagaaatacccaaagtacccctggggcagagagatttataccttggaaggtgtggttgacggtgccccatactctatgatatccgactttccatggctccgttcactcagagctgccgagccaaattcttttgccagatatgacttcgaggacgatgaggaaagtacaatatacgccccacggcgtaaggggcaactttctgccgacatatgcatggagacaataggcgaggagatctccgaaatgaggcaaatgaagaaaggagtgtttcagcgagtggtggccatcttcattcactattgcgacgtgaacggcgagcccgtggaggatgattacatatag

SEQ ID NO: 116834 - DNA, 3567 bp, synthetic construct
  misc_feature 1..3567: note = Description of Artificial Sequence: Synthetic coding sequence
  source 1..3567: mol_type = other DNA
atgggcccaagaaaaaagtctgtgaagacttgcattatgaacaacgagatacctgaggagatgacagctgacgagacgaaagattatatgaatcaattgtcccacgaggtcctgtgtcatatctttcgatatctgcccctgcaggacatcatgtgcatggagtgcttgtctcgcaagcttaaggaggcggtgacactctacctcagggttgtgcgggttgtagatctctgcgctggccggtggtgggaatacatgccctccggctttacagacgccagcttcttgacactgctcaagaagatgcccgacgtcgaacagctgtatggattgcacccacgctatttagagaggcgaagagtgagaggccatgaagcattcagtataccaggcgtactagaagctctacaggcctgtccaaacctcgtgggtgtcgagacaagccatcttgagcttgttgagtccatatggacttacatgccacacgtgcatatcctgggcaagtttcgcaatcggaacggtgcctttccaatacccccagagaacaagctgaaaatccctattggcgcaaagatccagactctgcatctcgtgggtgttaatgtgccagagataccatgcatcccgatgttgcgacatctgtacatgaaatgggtgagactaactaaacctcaacccttcaaggacttcctctgtatttctctgcgcacgttcgtaatgcgaaactgtgcaggaccaaccaactcacttaagtatgtgccacttgtgactggtttggcttctgcaaggaatctagagcatctcgagatggtacgggtgccattccttggcggactgattcagcacgtggtggaggatagctggcgcagtggcggcttcagaaacctgcataccatcgtgctgggagcttgtaaaaacgccttagaagttgacctcgggtacctcattatcaccgcagctcgaagactccatgaggtgagaattcagccgagcttgaccaaagacggtgtgttctccgcccttaagatggccgagttggaattccctcagttcgaaaccctacacctaggatacgtcgacgagttcctcttacagagcaggatggcaaatgccgatttagtgaagtatgggctcgccgacgttgtggagaatcccggcattatcaccgatattggtatgaaggctgtgaacgaagttttctcatgtattaaatatctggccatttacaattgcccacatctacacaatccctacaattggatcagtgatcacagccgatggactagactggttgacattaatttggtgcgatgtcacgcgctgaagttagactcttttggtcagttcattgagcttctcccgtctctggagtttattagccttgaccaaatgtttcgagagccccctaaggggtgtgccagagtcggccttagtgccggcaccggcatcggcgtgtcatccgccttggtctcaaatcagaactcaaacaacgatgacaataacgcacagaataacaatgctaatatacatgataacaatcaccatcaccctgacgattcagacgaggagaatgactttaggcaggatctgcagccaggagagcagcaatttgctgccgatgccctaaatgagatggaagatattgtccaggaggacggagaggtggtggccgagtctggcaataacacccccgcacattcacaagccataattcctgtggacgtggacgaagagcaggctggcccctctgggctccagcgggtcgtgaagcccacgtccattactgttcacgatagcgagagcgacgatgaggaggattctctagaactccaggaggtgtggattccaaaaaacggaacacggaggtactctgagagggaagaaaagaccggagaaagcgttcagagccgggagttgagcgtgtctggaaaaggtaaaacccccctgaggaaaaggtacaactctcaccagatgggccagagcaaacagtttccactggaggaaagctcgtgcgagaaaggctgtcaggtcacatccgaacagatcaaggcagatatgaaagctgcgcgggatattcctgaaaaaaagaaaaacaaggatgtttacccaagctgcagctcaactactgcatctaccgttggcaattcctctagccacaatactgctagtcagagcccagacttcgtgcgtactgtgaatagcggtggaagctccgagccatccccgacagaggtggacgtgtcccggcagtgcgcttgttccccgggaggaagcgaggactccgaagctatggaggaaggcgacgccgaatcctccgtgtgccctagatgctgttgccatagaccccaggagagccagaggagaacctctagatgtagtgacgaggaacggccgagcacttcccgcgcatgcgttgtgaacgggcctgatggcacaagaagcgccttctcttttcgaaccctgccacagggcggatcgagtggacctgcccatgacgaacgcacaaacggatccggttctggcgcaacaggtgaagaccgacgaggaagtagccagcccgaatcatgcgatgtgcagtccaatgaagattaccctcggagacctctgacccgcgccagatccaggctctcccatgttttacttgtttccgagtctgaagttgccaagactaaacctaggcacgcaatgaaacggaagcgtacagccgataaatccacgagtacgtccgatccagtgattgaggacgatcacgtgcaagtgcttgtcctgaagtccaaaaatctagtcggagtcaccatgactaactgtggcataaccgatctcgtgttaaaagattgtcctaaaatgatgttcatacacgccactaggtgccgtgtcctcaaacacttaaaagtggaaaacgcacctatagtgaatcggtttgactatgctcagtgtaaaaagttgaacatggatcaagtgctggaccagattctgcgtatgcctcctgagagaaatcgaatcatatacctgcggccgatgcagcaggttgacacactgacactggaacaaaagctcttctctgggccttatccctaccatatctgcatcatccatgaattctccaatcctcctaacgtgagaaataaggtcaggatccgctcatggatggatacaattgctaatattaatcaggagctgattaaatatgagttttttcccgaagccacgcggtccgaagaggatttaaaaaaataccctaaatacccctggggacgtgagatctacactctggaaggagtggttgacggcgccccgtactctatgatctcagatttcccgtggctgagaagcttgcgggccgctgagccgaatagctttgcgaggtacgacttcgaggacgatgaggagagcaccatttatgctcctaggcgcaaaggccagttgtctgccgatatctgtatggagactatcggggaagaaattagtgaaatgagacagatgaagaaaggggtgtttcaaagggtggtggctattttcatacactattgcgatgtgaatggggaacctgtggaggatgattacatctag

SEQ ID NO: 116835 - DNA, 3342 bp, synthetic construct
  misc_feature 1..3342: note = Description of Artificial Sequence: Synthetic coding sequence
  source 1..3342: mol_type = other DNA
atggggccaagaaaaaagtccgttaagacatgcatcatgaataacgaaatccccgaggagatgactgccgacgaaacaaaagactacatgaaccagttgtctcatgaagtattgtgtcacatctttcgttaccttcccctacaggatatcatgtgcatggaatgtctttcacggaaactcaaagaagccgtgacattgtatctccgggtcgtgagggtagtcgatctatgtgctggaaggtggtgggaatatatgccctccggtttcacagacgccagctttctgacactgttgaaaaagatgcccgacgtggaacaactatatggtctgcatcccagatacctggagcgtaggcgagtacggggacacgaggctttttcaattccaggcgtgttggaggccctccaggcgtgtccgaatctcgttggtgtggaaacgagccacctagagctagttgagagcatttggacgtacatgccacacgtgcacatcttaggcaaattccgtaatagaaacggtgccttccccattcctccagaaaacaagctcaagatccctataggcgcaaagattcagactctccacctggtgggagtgaatgtcccagaaatcccctgcatccccatgctgcgtcacctgtacatgaagtgggttagacttacaaagccccaaccgttcaaggacttcttgtgtatcagcttacgcacattcgtgatgcggaattgcgctgggccaacaaacagtttgaaatatgtacccttagtgacaggcctcgccagtgccagaaacttggaacatctggaaatggttagagtgccttttcttggaggccttatccaacacgttgtggaggactcttggagatctggcggcttccgaaacctgcacacaatcgtgcttggggcctgcaaaaacgctctggaggttgacttggggtacctgatcatcacggccgcgcgccgtctccacgaagtgagaattcagccgagtctgacaaaagacggtgtgttcagcgcactcaaaatggctgaactggagttcccccagttcgaaacccttcacttaggttatgtagacgaattcctcttacagtctcggatggccaacgcagacctcgtcaaatacggactagccgacgtggtggagaatccagggattatcaccgatattgggatgaaggccgtgaacgaggtgttctcttgcataaagtacctggcaatttacaattgcccacacctccataacccatataattggatctctgaccactcgagatggacgaggctggtggatatcaacctagtgcgttgccacgccctcaagctcgatagcttcggtcagttcatcgagctcctgcctagtcttgagtttataagtctcgatcagatgtttcgggagccccccaaagggtgcgcaagggtgggtttgtcggcaggtactgggattggagtcagctctgctctggtttctaatcaaaattctaataacgacgacaataacgcgcaaaataacaacgccaacattcatgataacaaccaccatcaccccgacgacagcgacgaagagaatgacttccggcaggatttgcagccaggcgagcagcagtttgccgctgacgcactgaatgaaatggaggatattgttcaggaggacggcgaggtggttgctgaaagtgggaacaatactcctgcccattcccaggccatcatccccgttgacgtggatgaagagcaggcagggcctagtggactgcagcgcgtcgtgaaacctacttccattactgtccatgattctgaatctgatgatgaggaggactcactggagctgcaggaagtctggattcctaagaatggaactcgccggtattccgagagggaggaaaagacaggggagtccgttcaaagtcgggagctgtctgtaagcggcaaggggaagacacccctcagaaagcggtataactctcaccagatggggcaaagtaagcagtttcctctggaggaaagcagctgtgagaaagggtgccaggtaacaagcgagcagattaaagccgacatgaaagcagccagagacatcccagaaaaaaaaaaaaacaaagatgtgtacccaagctgttcatcaacaactgctagtactgtagggaactcctcttcccacaacacagctagccaatctcctgactttgtgcggacggtgaatagtggagggtcatctgaacccagccccaccgaagtggacgtttcgcgccaatgcgcgtgcagcccgggcggtagcgaggattcagaagccatggaagagggagacgctgagtcctcagtctgtccacggtgctgctgtcacaggccgcaggagagccagaggagaacatctagatgcagtgacgaggaacgcccatcgacatccagggcctgcgtcgtaaatgggcctgatgaggtggcaaagacaaagcccagacacgctatgaaacgcaagagaaccgcagacaaatctacctcaacctccgaccctgtgatagaggacgaccacgtgcaggttctcgtgctcaagtcaaaaaacctggtgggcgtgactatgacaaattgtgggatcacagatttggtgctcaaagactgtcctaaaatgatgttcattcatgccactcggtgtcgcgttctgaagcacctgaaggtggagaacgcccctatcgtgaaccgatttgactatgcccaatgcaaaaagcttaacatggatcaggtcttagatcaaattttgcgcatgcctcctgaaagaaaccgtataatctacctccggccaatgcaacaggttgatacactgacccttgagcaaaagctgttttccggcccctacccatatcacatttgtatcatacacgagttttctaaccctcctaatgtccgcaataaagtaagaatccggagttggatggacactattgcaaacatcaaccaggagctgatcaagtatgagttcttcccggaggctacacgttccgaggaggacctcaagaagtaccccaaatacccatggggacgggagatctacaccctggagggcgtggtggatggagccccctatagcatgatcagtgatttcccatggctccgcagccttagggccgccgagccaaactcctttgcacgatatgactttgaagatgatgaggagtccaccatctatgccccgagaagaaagggtcagttgtccgctgacatctgtatggaaactataggtgaggagattagcgaaatgcgacagatgaaaaagggcgttttccagcgagtggtggctattttcatccattattgtgatgttaacggagagccagtagaggatgactatatttag

SEQ ID NO: 116836 - DNA, 2832 bp, synthetic construct
  misc_feature 1..2832: note = Description of Artificial Sequence: Synthetic coding sequence
  source 1..2832: mol_type = other DNA
atggggccacgaaaaaaaagcgtaaaaacgtgcatcatgaacaatgagatcccggaggagatgaccgcagacgagacaaaagactacatgaatcagctctcacacgaagtgctgtgtcatatctttcggtatctccccctccaagacatcatgtgtatggaatgcctctctcgcaaactgaaagaagcggtgactctttacctgagagtggtgcgggtggtcgacctgtgcgcaggtagatggtgggaatacatgccctctggatttactgatgctagttttttgactctcttgaagaagatgccagatgtggagcagctatatgggctgcatccacggtaccttgaaagaagacgcgtaaggggccatgaggctttcagcattccaggcgtactggaggctctgcaagcttgtcctaatctggttggagttgagacatcgcacctcgaactggtagagtcaatttggacttacatgcctcacgttcatatcctcggcaaatttagaaatagaaatggggcttttcctatcccacctgaaaacaaattaaagatacctattggcgcaaagatccagactcttcacctcgtaggcgtgaatgtgcctgaaattccttgtatcccaatgctccggcacctatatatgaaatgggttaggctgacgaaaccccaaccctttaaggattttctgtgcattagcctacggacattcgtgatgaggaactgcgctgggcctaccaattctctcaagtatgtccctctggtgaccggcctggcaagcgctaggaaccttgagcacctggaaatggtaagggtcccattcctaggcggcctcattcagcatgtggtggaggacagctggagatccggcggatttcggaatttacataccattgttcttggggcatgtaaaaatgcccttgaggttgatcttggctatctgataatcacagcggcccggcgactgcacgaggtaagaattcaaccatcactgaccaaagacggagtattttctgcacttaagatggccgagttggagtttccgcagtttgaaaccctgcacctcggctatgtcgatgagtttttattacagtctagaatggccaatgccgacctggtgaaatatggtctcgccgatgttgtggagaatcctgggattattactgacataggtatgaaggccgttaacgaagtttttagctgtatcaagtatctagctatatataattgtccccacctgcacaatccttacaattggatcagtgaccacagcaggtggactcgactcgtcgacatcaacctcgttagatgccacgcccttaaattggatagcttcgggcaatttattgaacttctgcccagtctggagttcatctcgctggatcagatgtttcgcgaacccccaaagggttgtgcgcgtgttggcctcagcgctggaacaggcattggtgtctcatcagcgctggtgtccaaccaaaactccaacaatgacgacaacaacgcccagaataataacgccaacattcacgacaataaccatcatcatccagacgatagcgatgaggaaaatgatttcagacaggatctgcagcctggcgaacagcaatttgccgccgacgcccttaatgaaatggaggatatcgtgcaggaagacggtgaagtcgtcgccgagagcggcaacaacactcctgcccattcccaagccatcattcctgtggacgtggatgaggagcaggctggcccttctgggctccagcgagtggttaagccaacttcaatcaccgtgcatgactccgaatctgatgatgaagaagattcccttgagctccaagaggtgtggattcccaaaaatggcaccaggcgatacagtgaacgcgaggagaagaccggtgagagtgtgcaaagtcgcgaacttagcgaggtagccaagacgaagcctaggcacgctatgaagcgcaaacgaactgcagacaaatccacctcaacctccgatcctgtgatagaagacgatcacgtgcaagtgcttgtgttgaagagtaagaatctcgtgggtgtgactatgacgaattgtggcattaccgacctggtgctgaaagactgtccaaagatgatgtttattcatgcaacaagatgccgagttctaaagcacctgaaagtagagaatgcccccatagtgaacagattcgattacgcgcaatgtaaaaaattgaacatggaccaggtactggatcagatattgcgcatgccccctgaaaggaataggattatatatctgagacccatgcaacaagtcgacactttgacgctcgagcagaagctgttttcgggaccctatccctaccatatctgtatcatccacgagtttagtaatcccccaaacgtgagaaacaaagttcggatacgatcgtggatggataccattgccaacatcaaccaggaactaatcaagtacgaatttttcccagaggcgaccaggagtgaggaggacctgaagaaatacccaaaatatccatgggggcgagaaatctataccctggaaggcgtggtagacggcgccccatactcaatgatctctgattttccatggctcagatcccttcgggccgcggagcccaatagttttgccagatacgatttcgaggacgacgaggaatctaccatttacgccccaaggcgcaaaggacaactctcagcagatatctgcatggagaccattggcgaggagattagcgaaatgcggcaaatgaagaagggggtcttccagcgggtggttgccatcttcatacactactgcgacgttaatggtgaacctgtcgaggacgattatatatag

SEQ ID NO: 116837 - DNA, 1329 bp, synthetic construct
  misc_feature 1..1329: note = Description of Artificial Sequence: Synthetic coding sequence
  source 1..1329: mol_type = other DNA
atggatgaggagagcgaactcattcagccacaagaccaatcgtgctgggccttcttgccggacttgtgtctgtgtcgtgtgttctggtggttgggcgatcgagatagatctcgcgccgcactggtgtgccgcaaatggaatcagatgatgtacagcgccgagctgtggcggtacaggaccatcactttttccgggaggcccagcagggtgcatgcatccgaggtggaaagtgccgtctggtatgttaagaaattcggcagatatcttgaacatctcgaggtgaagttcatgaatccctataatgccgttctgactaagaagttccaggtgacgatgcgtggcctgctgagttgcttgtctaaatccaataaccgcctgaaaagcttatccatccagtacctcgagctagatcgcctcgtctggagaaacagtataaggtcatccttcatttcttcactgtctttttttctgaaaaaaatgggcaaacggctggactatctgaaccttaaaggtgctagactcaccgtggagcagggctgtcagattttggattctctgagctacatgcgcaacgagaatgtcattagcgagttgaatatcgaagactacttctctcaccaccttgccgtgtataattccccccagtttaaaaaaaccatgtctacgttccacaacctagtctccttgaatctgaactataattgtataagcgacgaactcctggaaaatctttgcgagaacgccagtacccttcggacaatcaacatcaagtgtcacgttcacgatccccacggccaggtgatttggggtatgagttgggcaaagcttgcccgccaagccaccaacttgaaggttaacttttttttcgagaggattatgaaatatgagaggctcgccaggattctcctgcaagagatccctatcaggagtatctcactgagaagctgctatttctccgatccagactgcagcatgcgcccgaccctcatcgacctgcttcccacctttagacatacactgcagaaactgacctgcgagtttaacaacaatcacgaaagcctggatgaggagttgcaccttctcattatctcctgcagaaaactattttatttcaaaatctgggcctttctggatgtgtccttcgtggaaaggatcctgaagtcccagaaagagcgtcagtgtgccttgcgcgttttcaaagcccggatctacaccaaccgatacgagacgaatgaggaggataagactctccaggaaatttatcgaaaatacaggaagttgattgaatccgagttgtcttattttgttatcgtctactctgtgatgtag

SEQ ID NO: 116838 - DNA, 1164 bp, synthetic construct
  misc_feature 1..1164: note = Description of Artificial Sequence: Synthetic coding sequence
  source 1..1164: mol_type = other DNA
atggcagggagtgaaccacggagcggaacaaatagtccacccccccccttctctgattgggggcgcctggaagctgccattcttagtggatggaaaacattctggcaaagcgtgagcaaggagagagttgcacggacaacctctagggaggaggtcgacgaggccgcatcaaccttgacccggctgccgattgacgttcagctctatatactgtcgtttctctcaccgcacgacctgtgccagctagggagcactaaccattattggaatgaaacggtaagggacccaattctctggcgttacttcctactgcgggacctgccatcttggtcatccgttgattggaagagtctccctgatctcgagatcctgaaaaaacccatcagtgaggtgactgacggtgctttcttcgactacatggccgtgtacagaatgtgctgcccatacacacgtcgggccagcaaaagttcgagacctatgtatggcgccgtcacgtcattcctgcattcactgattatccagaacgagcccaggttcgcaatgttcggccccggcttggaagagctcaacaccagtctcgtgctcagcttgatgtcttcggaggagttgtgccctacagctggacttccccagcgacagattgacggcataggttcaggcgtcaacttccagctgaacaaccagcataaatttaacatcctgattttgtactctacgacaaggaaggaacgggacagggccagagaggagcatacatctgcggtgaataagatgttcagccgccacaatgagggtgacgaccaacaagggagcagatattctgtgatcccccagatccaaaaggtgtgtgaagtggtggacggcttcatttacgtggccaatgcggaagcccataaacgccacgaatggcaagatgaatttagtcatataatggctatgacggatccagccttcggttctagtggacgcccattgttggtgctgtcatgcatctcccagggggatgtgaaaagaatgccatgcttctatcttgcacacgagctgcatttgaacctgttaaaccatccttggctcgtgcaagacaccgaggctgagacactcactggctttcttaacggaattgagtggatcctcgaggaagtggagtcaaaacgtgcccggtag

SEQ ID NO: 116839 - DNA, 924 bp, synthetic construct
  misc_feature 1..924: note = Description of Artificial Sequence: Synthetic coding sequence
  source 1..924: mol_type = other DNA
atggctggaagtgagcccaggtccggaacgaattccccaccgcctcctttttccgactggggccggctcgaggctgccattctgagcgggtggaagacgttctggcagagtgttagcaaggaaagagtcgcacgcacgacctccagagaagaagtcgatgaagctgccagcacattaacccggctccctattgatgttcagctctacatactttccttcttgtcacctcacgacctttgtcagttggggtctaccaaccactactggaacgagacggtgagggatccgatcctatggcggtactttctcctgagagacctgccttcttggagtagtgtggattggaaatccctgcccgatctggagatccttaagaagcctatctccgaagtgacagacggcgccttttttgactacatggccgtgtatcgaatgtgttgcccctacactcgtcgggcgtcgaaatcatctaggcccatgtacggcgctgtaacttcgtttctgcacagcctgatcatccagaatgaacctaggtttgcaatgttcggacccggcctggaagagttaaatacttccctggtgctgtcactcatgtcgtccgaggagctgtgccccacagccggtctgcctcaaagacaaattgacggaatcggctccggggtgaatttccagctcaataatcagcacaaattcaacatcctaattttgtattcaacgacacgtaaagaacgggacagagcccgggaagaacacacttctgccgtgaacaaaatgttttcaagacacaacgaaggagatgaccagcaaggttcacgatactcagttatcccacagatccagaaagtgtgcgaagtggtggacgggttcatttacgttgcaaacgccgaggcccataagtccaagtactcttacgtacacttctag

SEQ ID NO: 116840 - DNA, 2130 bp, synthetic construct
  misc_feature 1..2130: note = Description of Artificial Sequence: Synthetic coding sequence
  source 1..2130: mol_type = other DNA
atgggcaaagcacgtaggtcacctcccggccatcataggcactgcgaggggtgcttcaaccggcactgccacattcccgtggaacccaacaccagttgtctcgtcatctcttgccatctcctttgcggtgcaacatttcatatgtgcaaagaagccgagcatcaactgttgtgccccctggagcaggttccatgtctgaattcggagtacggctgccccttgagcatgtctcgccacaagctggccaagcatctccaggtgtgccccgcatctgtagtatgctgctctatggagtggaataggtggcctaacgtggactcagagacaacactgcacgagaatattatgaaagagacccccagcgaggaatgcctggataccgctctcgccctgcaggatcaaaaggtgttatttcgctctctcaaaatggtggaactcttccccgagaccagggaggcaacggaggaagaacccactatgaacggcgaaacatctgttgaggaaatggggggtgctgtggggggagtagacatcggactcgtccctcacgggctgagtgcgaccaacggtgagatggctgaattgtctcaggaggagcgggaggtgctcgccaaaacgaaggagggaatggatctggtcaaatttggacagtgggaaaacatattctctaaggagcatgccgcatctgccctaactaatagctcagccagctgcgaatctaagaacaaaaacgatagtgagaaagagcaaatcagctcggggcacaatatggtggagggcgaaggggcgcccaaaaagaaggaaccacaggagaaccagaagcagcaggacgtgaggactgctatggagactacaggtttggccccttggcaggacggcgtccttgagcggctgaagaccgctgtagatgctaaggattataatatgtaccttgtgcacaacggccgtatgctcatccacttcggacagatgcccgcttgtacacctaaggagcgagacttcgtctacggcaagctggaggcacaggaggtgaagactgtctacaccttcaaggtgccagtctcttactgcggaaagcgcgcacgcctgggcgacgccatgctcagttgcaagcccagcgagcataaggccgtagacacaagtgatctgggcatcaccgttgaggatctccctaagtctgacctaatcaagaccacactccaatgtgcccttgagagagagctaaaaggtcacgtgatttccgagtccaggtcaattgatgggctgttcatggatttcgccacacagacctacaattttgaaccagagcagttctccagcggaacagtactggccgatctgaccgctgctactccaggtggcctacatgtggaacttcactctgaatgcgtgactcgcagacacaacaagtcttccagtgccttcactttcacctgcaacaaattctttcggagagacgagtttccgctccattttaagaatgtgcacacagacatacaatcctgcctcaacggatggtttcagcatcggtgtcccttagcttacctgggatgcacctttgtccaaaaccactttaggccacccggccagaaggcgaaggtcatctacagccaagagctaaagacctttgccattaagcctgaagtggcaccagaactgtctgagggccgcaagaacaatcacctccttggacacggcggaaagagtcaaaattctcttacctctcttccactggaaatcttgaaatatatcgccggctttttggattctgtgagcctagcacagttgagccaggtgagcgtgttgatgcggaatatctgcgcgaccctcctgcaagagcggggcatggtgctgctccagtggaagaagaagaggtattcgcatggcgggaccagctggcgggtgcaccgtgaaatttggcaatttagctctctgtttagcaaaatcaagagttgggaatttaatgaggtcacatctatgagtgagcacctaaaatcatgccccttcaacatagttgaacacaaaaccgaccccattctcctgaccagcatgtgtcaacctcgggaacaggcaagagaaagcttagttagtacgttcaggatcagaccacgcggtcggtacgtctcctag

SEQ ID NO: 116841 - DNA, 2811 bp, synthetic construct
  misc_feature 1..2811: note = Description of Artificial Sequence: Synthetic coding sequence
  source 1..2811: mol_type = other DNA
atgaccacagggctaagcgatcaacaggtggtgtgtgatttggatcaccgcgccgtggaagccctgcttcaggcagtcaggaagcggatggccggcgctagtcccgctgtgccacatgaacgcgcaagattgactggaggtgcggcagccgtagaaccagcctgcagaggcggcggaggtgctatggcatctctggacctcccttatagatgtccccggtgcggtgagcacaagcgtttccgctccttatcctcacttagagcccatctagaatacagtcacacctacgagacactttacatactctctaaaacaaactctatttgtgatggagccgcggctgcagcggccgccgccgccgctgcaagcggcttccccctggctccggagcccgccgctttattggccgtgcctggcgcaagaagagaggtgtttgagtccacctcttttcaggggaaagagcaggccgctggaccctcccccgctgcaccccacctgctccaccaccaccatcatcacgctcccttggcccacttcccaggcgatctcgtacccgcatcactgccttgcgaggagttggcagaacccggtcttgtgccagcagccgcagcgcgctacgctcttcgcgaaattgaaatccccctcggtgagctgtttgccagaaaatctgtggcaagctctgcatgcagcacaccccctccaggaccgggccctggcccctgtccgggacccgccagcgcatcccccgcatcgccaagtcctgcggatgtcgcttacgaggagggactggctcgactcaagatccgggctctcgagaagctggaggtcgatcgccgacttgaacgccttagcgaggaggtggaacagaagatcgcggggcaggtgggccgactgcaagcagaactcgaacgcaaggcggctgaactcgaaacggcgagacaagagagcgcccggttgggaagagagaaggaggaattggaggagcgcgcctccgaactcagtcgacaggtggatgtaagcgtggaactcttggcctctcttaagcaagacctagtgcataaggagcaagaattaagtagaaagcaacaagaggtcgtacagatcgaccagtttctgaaggaaacagcagccagagaagcatctgctaaattgcgcctccagcagtttatcgaggagctgctggaacgagcagatagggcagaacggcaactccaggtgatatccagctcatgcgggtccacaccttccgcctctctggggagggggggcggcgggggaggtgctggccccaacgcgcgaggccccggccgtatgagggagcatcacgtgggtcccgcagtgccgaatacatacgcagtgtcccgacacggcagttctccatcaacaggcgcgtccagccgcgttcccgcggcgtcccagagctccggctgttacgactcagacagtctggaactcccgcgaccagaagaaggcgcccccgaggactccgggccgggcggattaggaacaagagcacaagcggctaacggtggatccgagagatctcagcctcctcgcagttccgggctcaggaggcaggcaatacagaattggcagagacgacctcgccggcattccacggagggagaagagggcgatgtctccgatgtcgggtctcgcaccaccgaaagtgaagccgaggggccactggacgcccccaggcctggccccgccatggccgggcccctcagttcctgtcgccttagcgccaggcctgagggaggaagcggccgcggcaggcgggccgaacgagtttccccttcaaggtccaacgaggtcataagcccagaaatcctcaaaatgcgagccgccctattttgcatttttacttacctcgacacgcggaccttgttgcatgctgcagaggtgtgtcgagattggcgttttgtagcccggcatcccgcagtgtggaccagagtgttgttagaaaatgcgcgcgtgtgttctaaatttctcgccatgctagcacagtggtgcactcaggcacacagcctaacactacaaaaccttaaacctcgccaaagaggtaaaaaagaatccaaggaggagtacgctaggagtacacggggctgtcttgaggccggacttgaatccctgctgaaagccgcggggggaaacctcttgattctcaggattagtcactgcccaaacattttaaccgatcggtccctgtggctggccagctgttactgtcgggcccttcaggccgtaacctatcgaagcgctaccgacccagtggggcacgaggtcatctgggcccttggagctgggtgccgggaaattgtgtcactgcaggtcgccccgctacatccttgccaacagccaactcgattctctaaccggtgcctccaaatgatcggccggtgttggccacatttgcgagcactgggcgtcgggggagctgggtgcggtgtgcaagggctggcctctctcgcgagaaactgtatgcggctgcaggtgctggaactcgaccacgtctcagaaatcactcaggaagtggctgcagaagtctgtcgggagggcttgaaaggcttggagatgttggtcctcaccgccactcctgtcacacccaaagcacttctgcacttcaatagcatctgtaggaacctgaaatccatcgtcgtccagattggcattgccgactacttcaaggagccgagtagtcctgaggcccaaaagcttttcgaggatatggtgaccaagctgcaggcactgagacgcaggccaggtttttctaagattctgcatataaaagtagaaggaggatgctag

SEQ ID NO: 116842 - DNA, 2628 bp, synthetic construct
  misc_feature 1..2628: note = Description of Artificial Sequence: Synthetic coding sequence
  source 1..2628: mol_type = other DNA
atggcttcccttgatctgccctaccggtgccctaggtgcggagaacataagaggtttcggtctctgtcctccctccgggcacatttagagtactcccatacctacgaaactctttatattctaagtaaaacaaatagcatctgcgacggcgcagcagccgctgcagccgccgcggccgccgcgagcggttttccccttgctcctgagccggctgcgctcctggcggttcccggtgccaggcgggaagtttttgaatctaccagctttcagggtaaggaacaggcagccggcccatcgcccgccgccccccatttattacaccaccaccaccatcatgccccactggcccacttcccaggcgacctggtgccagctagtctgccctgcgaggaactggccgagcctgggttagtaccagccgctgctgccaggtacgcgctgcgagaaatagaaatccctctgggcgagctgttcgcgcggaaaagcgtggcgtccagtgcttgctctaccccacccccaggtcccgggcctggaccctgccctggaccggcatccgcttcacccgccagcccaagtcccgctgatgtggcttacgaggagggcctagcgagactcaaaatccgcgcgctggaaaagttagaggtggatagacgcctagagcgtctcagtgaggaagtcgaacagaagatagcgggccaggtggggagactacaagctgaactcgagagaaaggccgcagagctggaaacagcccggcaggagtctgcccgactaggtagggagaaggaagagctggaggaacgtgcctccgagctgagcaggcaggtggatgtaagcgtggagctgcttgccagcctcaagcaggacctggtccataaggagcaggagctgagccggaagcaacaggaagtggtgcaaatcgatcagttcttgaaggagacggccgcccgcgaggcttccgcaaagctgaggctgcagcagttcatagaagagctgctggagcgagctgacagagccgagcgccagctgcaagtgatcagcagtagctgcggatctacacccagcgcctccctgggccgcggcggagggggcggtggggcaggcccgaacgcgcggggcccagggagaatgcgcgagcaccatgtcggaccagctgtacctaatacctacgcagtgtccaggcatgggtctagcccaagtaccggagcatcaagccgtgttcccgcagccagtcagagtagcggctgctatgattccgattcacttgagctgccgcgccctgaggagggggctcccgaggactccggccccggggggttggggacgcgtgcccaggccgctaatgggggttcagaacgatcgcaaccaccccggtccagcggcttgcgtcgccaggcaatacagaattggcaaagacgcccaagacggcattccacagaaggcgaggagggcgatgtttccgacgttggcagccgaacaacggagtctgaggcagagggccctcttgatgctccacgaccaggaccggccatggctggtcccctatccagctgtcggttgtcggcacggccagagggagggtccggaaggggacggcgagcggagcgcgttagcccttcccgcagcaacgaagtcatcagccctgaaattttgaaaatgcgggctgctctgttctgtatcttcacttatctagatacgcgcacgctcctccacgcggccgaggtctgccgtgactggcgatttgttgctaggcatcctgctgtctggacaagggtactgctggagaatgcaagagtgtgctctaaatttttagctatgctggcgcagtggtgtactcaagcccacagccttacgctacagaacttgaagccgaggcaaaggggcaaaaaagagtcaaaagaggagtatgccaggtctacacgaggatgcttggaagcgggcctcgagtctctactcaaggccgccggaggtaatctcctgatactgagaatcagtcactgtcctaatattctaaccgaccggagtctctggctcgcttcttgctattgtcgggctctgcaggctgtgacttaccggagcgccacagaccctgtgggccacgaggtgatttgggcattaggagccggttgtcgggagattgtgtcgctacaggttgcacctcttcatccctgtcagcaacccactagattttcaaatcgctgtctgcagatgataggtcgctgctggccacatttgcgggctctcggagtgggaggagcgggatgtggagtccaaggtcttgcatcgctggcccggaattgcatgaggctgcaggtgctggagctggaccacgtaagcgagatcacacaggaggtggctgctgaggtgtgtcgggagggattgaagggcctggaaatgcttgtcttgaccgctaccccagtgacaccaaaagcccttttacatttcaacagcatctgtcggaacttaaagtctatagtggtgcaaatcggtatagccgattacttcaaggagcccagctcacccgaggctcagaagctgtttgaggacatggtcactaagctccaggctcttcgaagacgacctggcttttccaagattctgcacattaaggtagaaggtggctgttag

SEQ ID NO: 116843 - DNA, 2154 bp, synthetic construct
  misc_feature 1..2154: note = Description of Artificial Sequence: Synthetic coding sequence
  source 1..2154: mol_type = other DNA
atggcctcctcatcggattcagaagatgatagtttcatggccgtggatcaggaagagacagtacttgagggaactatggaccaggacgaagagccgcaccccgtcctggaagcagaggagactcgtcataatagatctatgtcagagctgcccgaggaggtcctcgagtatattctgtctttcttgtcgccttaccaggaacataaaactgcagccttagtgtgtaagcaatggtaccgcttaatcaaaggagtcgctcatcaatgctatcacggattcatgaaagctgtccaagagggaaatatacagtgggaatcccgtacgtacccatatcccggtaccccaatcacccaacgattttctcattcagcatgctattatgatgccaatcagtcaatgtacgtgtttggtggatgcacgcagtcctcctgtaacgctgcatttaacgacctgtggagactggacctgaatagtaaggaatggattcggcccctggcttcaggttcgtacccatctccgaaggccggagccactctggttgtctataaagatctcctggtgttattcggtggatggacacgcccctcaccctaccccctccaccagccagaaagatttttcgacgagatccatacatatagtccgtctaagaactggtggaattgtattgtgaccacccacggccccccaccaatggccggacactcttcatgcgtgatcgatgacaaaatgattgtgttcggggggtccctcggttcccgacaaatgtctaatgacgtctgggtgctggacttggagcaatgggcgtggtcaaagcccaacattagcggcccctcaccacaccccaggggaggccagagccagatcgtgatcgacgatgccacaattttgatccttgggggctgtgggggtcccaatgcgttgttcaaagatgcgtggctgctccatatgcacagtggtccatgggcatggcaacccctcaaagtggaaaacgaagaacacggagctcctgaactgtggtgccatcctgcatgtagagtcggacagtgtgtcgtggtgttttcacaggctccttcaggtcgtgcccccctcagtccaagcctcaacagcagaccctctccgatatcagccaccccaccggcactggtccctgagacccgcgaatatcgttcgcagtcacctgtgagatctatggacgaagcaccttgcgtaaacggcagatggggcacacttcggcctagagctcaaagacagacccctagtggcagccgagagggaagcctgtcaccagcacggggcgatggaagcccgattctgaacggtggttccctgtctcctggcactgctgccgtcgggggcagctccctggacagccctgtccaggccatatctccctcaacacctagcgctcccgaagggtatgacctgaagatcgggctatctctggcacctaggaggggctcactcccggaccaaaaggatctcaggctcggctctatcgacctcaattgggacctcaaaccagcatcaagctctaatcccatggacggaatggataatcggacggtgggcggttcaatgagacaccctccagaacagaccaatggtgttcatacccccccccatgtagcctccgctctggccggtgctgtgagtcctggggccttgcgccggtctctggaggccataaaggccatgtcttctaaggggccctctgcatcagctgctctgtcccctccactgggctctagccccggctcccccgggagccagagtttgtcgagcggggagacggtgcccataccccgccctggtccagcccagggggatggacactctttacccccaatagccaggagacttggccatcaccctcctcagagcctcaatgtgggcaagcccctgtaccagtctatgaattgcaagcccatgcagatgtacgtgcttgacattaaagacaccaaggagaagggccgggtgaaatggaaggtgtttaattcttccagtgtagttggccccccggagacctcccttcatactgtggtccagggcaggggggaactcattatcttcggcgggctgatggataagaagcagaacgtgaagtattatccaaaaacgaatgcattgtacttcgttcgtgccaaacggtag

SEQ ID NO: 116844 - DNA, 900 bp, synthetic construct
  misc_feature 1..900: note = Description of Artificial Sequence: Synthetic coding sequence
  source 1..900: mol_type = other DNA
atgagtagccctccacaaattgtgatcgacgatgcaactattcttatcctgggcggatgcggcgggcctaacgcccttttcaaagatgcctggctgctccacatgcatagcggaccatgggcttggcagcctctgaaggtggagaacgaagagcatggtgctcccgagctgtggtgccatccagcctgccgagtcgggcagtgcgtggtagtattctcccaggcaccgtctgggcgtgccccactgagcccttctcttaatagcaggccatcccctatttcagcaactccccccgcccttgtccccgagactcgtgagtatcgcagccagtcaccagtcaggtctatggatgaggccccttgtgtgaatggcaggtggggtactctgaggccaagggcccagcgccagacaccctcggggtccagagagggatctttgtctcctgcgagaggcgacggatcccctatcctgaacggcggatctctttctcctggaaccgctgccgttggcggctctagccttgatagtcctgtgcaggctatttccccatccaccccctcggcccctgagggatatgacctgaagatcgggctctctctggctccgaggcggggatcacttccagaccagaaggacctgcgcctcggctctatcgatctgaattgggatcttaaacccgccagtagcagcaatccgatggatggaatggacaacaggactgtgggaggttccatgcggcaccccccagagcagaccaacggcgtccatacacccccgcacgtcgcctctgcactggcaggagccgtttctcctggagcgctacgcagatcactggaggccatcaaagccatgagcagcaaaggtccatctgcatcagccgccctaagcccaccgctgtag

SEQ ID NO: 116845 - DNA, 900 bp, synthetic construct
  misc_feature 1..900: note = Description of Artificial Sequence: Synthetic coding sequence
  source 1..900: mol_type = other DNA
atgtcctctcccccacaaattgtcatagatgatgcaactatcctgattttggggggatgtggcggaccaaatgccctgttcaaggacgcctggctactccacatgcacagcggtccatgggcctggcagcctctgaaagttgaaaatgaggagcacggcgcccccgagctctggtgccaccccgcctgccgagttggccagtgtgtcgtggttttcagtcaagccccttccgggagggctcctttgagtccctctctaaattcccggccgtcccccatcagcgctacccccccagccttggtcccggagactagggaatacagatctcagtcaccagtaagaagcatggacgaagccccctgcgtgaacggacgctgggggaccctccgaccccgggcacagcgtcaaaccccatccggaagcagggagggatccctctcacctgcccgtggcgatggttctccaatactcaacggaggatccctctcacccgggacagcagctgttgggggctcaagcctggacagccccgtgcaggccatcagtccctctacaccgtctgctcccgagggctacgacctgaaaatcgggctaagcctggctccgcggaggggcagcctgccggatcaaaaggatctcagactgggaagcatcgatctgaactgggacttgaagccagcatcatcgtcgaatccgatggatggaatggacaaccgtaccgtcggtggttcaatgaggcatccgccagagcaaacgaacggcgtccataccccgccccacgtggctagcgccctggccggcgcagttagccctggcgcactgcggcggtcactcgaggctataaaagctatgagctcaaaaggaccttcggcgtctgcggccctgtcaccaccactttag

SEQ ID NO: 116846 - DNA, 2127 bp, synthetic construct
  misc_feature 1..2127: note = Description of Artificial Sequence: Synthetic coding sequence
  source 1..2127: mol_type = other DNA
atgagcttcaaggataaagacgaacgtatttcctgtctggaagcttatgtcacactcacctccaaatcctctaggttcacagacgagacagagatcttgaaaatgagccagcgccactctggccaggccggtactgaagccgggaatggcgcggacagcccaccaattgtaaacagcaaatacagtacatttagagatttttgctcaacttcttcattccaggactcgggctacaacgaattgaagagctgctcttttgataacattgacaaagagtacctggggaaaaaggagaaagggcccacactgctctacgaacatccagaaacttccggacttgggttgactcatcctctcgagtcccctactcagaagaaaaagtgtattctgcccagaaaagagaaagataagacacctgaactgtgtgagacccccaagatttcagggaaaaaatgtctgccaagaagacgcctgaatgtgtctttcgcattgttgaaaggcgacttcgagtctcagaatagcagcctcgagagcagcatttcccaggtgattaacctggagaagaacataccaagctccgccagcggcttctctagggcgaacaacttctctcccctggtgactagcaccctgaaaacggaggaagtcacctcatgcagtcagaaattgcgcttgaattttagccagcagaagacgtccaccatcgacgactctaaagatgattgttctttattcgaagttgagtgtatctcgcctattcaggggaacaattttaaagactcgataacccacgatttctccgatagctccctatgtattaatgacgagaacgcttgccctgaactcctggggtcaagcgtcagcggtaccacctgtgggacagatgaggatatcttcgtgacccctataagcaacctggtggccaacatccgttttaacgcatcacagatccttagtccttcaccagaggtccggggctcgattagtactcctgaggactctgggttcaattcgctatcccttgaaaaatctgaagactcactgagtgatcaagagggttcattccaagagctgcttcaaaaacacaaggggacacccaaggtgggagacactataagaaagactagacaccttggccggtccagaaggttgtcaaccctccgggagcaaagttctcaatctgagaccgaggaggagaaacagattgtccacccagatagcgaaaagcgggcagcagccgcctccgcgattagcgagggtcagctctcatcggacgaatctggggatctcacttttagcctcaagaacctgtcaaaaaccccagctctacagttggttcacgaactgttcatgaaaagtaaacgcaaaaggttacaagagaattcagggcacgaattcctggagcagggggatggggagaagatagctgtgctgcagtgtattctagctgggctgattggaaagaaaatgggcatcgagaagttagatatcctaacggagctgaaatatcgcaacctgaaacacatactggcgatggtgttagagtcgttgacggccgagagcctttgcagcgtttggaaggtcagccgtaactggcgcgaaatcgtcgtccaagacaagaatgcaaaccgccgccggaaattctacatcacacagctgaagactgattccgaaggggctgtgctgaacgtagaagacgcagccactcggcttcagctgctcaaccgctccgcactgagatccgttcaggctcaggccaggattcccgggtcccagcgcgagcaggggtctacactgagcccatggggcgaggtgcttacccctctcgccagctccagtgtgacccatctctctagcaagcaagaagagtacgtgaaagtggccaaaactctctttactgatgaggccctgaaaccctgtcctcgatgccagtcacccgcaaagtatcagccatataagaagcgtgggctctgttcacggacagcctgcggctttgacttctgcgtcctgtgcctttgcgcatatcatggatcagaggagtgtagcagaggcgccgccaaacccaggaaccgtaaggacgctctgcctggaagtgcccaatctaaacgaaatcttaaaaggttgtag

SEQ ID NO: 116847 - DNA, 675 bp, synthetic construct
  misc_feature 1..675: note = Description of Artificial Sequence: Synthetic coding sequence
  source 1..675: mol_type = other DNA
atggcagtgggaaacatcaacgaactacctgagaacattttgctggaattatttacacacgtccctgcgcgccagctgctcctcaactgtagactcgtgtgcagcctttggcgtgatctgatcgatctggtaaccctctggaaacgaaagtgcctgcgagaagggttcatcacagaagactgggaccagccggtagccgactggaaaatcttttattttctccgcagccttcatagaaacctcctgcataacccatgcgccgaagagggctttgagttttggtctctggacgtgaatggcggagatgagtggaaggtagaggacctctctcgggaccagcggaaagagttccctaacgatcaggtccgttcccaggctcggctcagggtacaggtgccagctgttaggagcgctccggtggtccgggccagggcctccggtgacttaccggcgagacccggcgatcatcccgccgaagaaaggtgccaagttgagggtggtctgccacacatcctccaactgcccgcacggaggcccctgcacctcgtatccgctcgcaggagaggccatagtctgctcggacggctggttcgtccagagggccatcagcagcaacaccaccaccgtgcccctgccgctctgacccctcctgaaccccctagtgccgagccctag

SEQ ID NO: 116848 - DNA, 768 bp, synthetic construct
  misc_feature 1..768: note = Description of Artificial Sequence: Synthetic coding sequence
  source 1..768: mol_type = other DNA
atggctgttggcaatattaatgagcttcctgagaacatactgctcgaactgttcacccacgtgcctgcccgtcagctgctgctcaactgccgcctggtttgtagtctgtggcgtgatctgatcgatcttgtaaccctctggaaacgcaagtgcctgcgggagggattcatcaccgaggactgggaccagcccgtcgccgattggaaaatcttttatttcctgcggtctctgcaccggaatctgcttcataatccttgtgccgaagaaggatttgaattttggagcctcgacgtgaatggaggagacgagtggaaggtggaggacctgtcacgcgaccagcgcaaggaatttcccaatgatcaggtgaaaaagtacttcgtcacttcatactacacttgtcttaaatcacaagttgtggaccttaaagccgaagggtattgggaagagctgatggatactacgcgccctgatattgaggtaaaagattggtttgcagccaggccagactgcggtagcaaataccagctttgtgtccagttactttcatcagctcatgccccgctcgggacttttcagcctgatcccgctacaatccagcagaagtctgacgccaaatggagggaggtcagccataccttttcgaactaccctcctggagtgaggtatatttggtttcagcatggaggggtcgacactcattactgggccgggtggtacggacccagagtgacaaattcctcaataacaatcggaccaccccttccttag

SEQ ID NO: 116849 - DNA, 675 bp, synthetic construct
  misc_feature 1..675: note = Description of Artificial Sequence: Synthetic coding sequence
  source 1..675: mol_type = other DNA
atggctgtgggcaatattaacgagctaccagagaatattctgttggaactgtttacccacgtgccggccagacagttgctgttgaattgtcgcctggtgtgctcgctttggagagacctcattgatctcgtgacactctggaagcggaagtgcctgagagaggggttcattaccgaggactgggaccagcctgtggcagattggaaaattttttatttccttagatcactgcataggaatctgcttcataatccctgtgcagaggaggggttcgaattctggtccttagatgtgaacgggggggatgagtggaaggtggaggatctttcgagagaccaaagaaaggagttccccaatgaccaggtcaggtcccaggcaaggctgcgggtgcaggtccccgcagtcagatccgctcctgtcgtgagggctagggcatctggagaccttccagcccgccccggtgaccaccccgccgaggaacgatgccaggtcgaaggagggttaccgcatatacttcagcttcccgcaagacgacccctccaccttgtgagtgcgcggcgccgcgggcactcattgttgggccgtctggtgcgcccggagggacatcagcagcaacaccatcacagagccccggctgcccttacaccgccagagccccctagcgccgagccttag

SEQ ID NO: 116850 - DNA, 675 bp, synthetic construct
  misc_feature 1..675: note = Description of Artificial Sequence: Synthetic coding sequence
  source 1..675: mol_type = other DNA
atggccgtgggcaacatcaacgagcttccagagaatattctattagaactttttacgcacgtgcctgcacggcagctcctcctcaattgtagactcgtatgttccctgtggagagatcttattgacctcgtgacactttggaaacgcaaatgtctgagagaggggttcatcaccgaggattgggatcagcccgtcgcagactggaagatattttattttctccggtcattgcaccgaaacttgctgcataacccctgcgccgaggaggggttcgagttttggtctctggacgtcaatggaggcgacgaatggaaagtcgaagatctctccagagaccagcgtaaggaattccccaatgatcaagtgcgctcccaggcacggttaagggtgcaggtacccgctgtgcgttcagcccccgtggtgcgcgcaagggcttcaggggacctgcccgctcgcccaggtgatcatcctgccgaggagaggtgccaagtggagggagggttacctcacattctccagctacctgcacgccgcccactgcatctcgtatctgcccggaggcggggccatagcctgctcgggcgcctggtccgtccagaaggacaccagcaacagcaccaccacagagcgcccgcagctcttaccccacctgagccaccttccgccgagccatag

SEQ ID NO: 116851 - DNA, 771 bp, synthetic construct
  misc_feature 1..771: note = Description of Artificial Sequence: Synthetic coding sequence
  source 1..771: mol_type = other DNA
atggctgttggtaatatcaatgagctgcccgaaaacatcctcctcgagttgtttacacatgttcctgcaaggcagctgttactcaactgccgactagtgtgcagtctctggagagacttaatcgatctggttaccctttggaagcgcaagtgcctccgcgaagggtttatcactgaagattgggaccaacctgtggccgattggaaaattttctatttcctgcggtcacttcacagaaacctcctgcataatccgtgtgctgaggaggggtttgaattctggtccctagatgtgaacgggggagacgagtggaaggttgaggacctttctcgcgatcagcgaaaggaattcccaaacgatcaacatctgccccaggtgcctggcggaggcccgcagggccgccgggtgcttggcggcgctgatggctatcacacagccgggcatcgcggtcagggcctcgtgcgatctcaagccagactccgcgtgcaggtgccagccgtgcgcagcgctcccgtggtaagagctagggctagtggagatctgccagcccggcccggcgatcatcccgccgaggagaggtgccaggttgaaggcggattgccacacatcttacagctccctgcgcggagaccactccaccttgtctcagcacggcgccgtggtcatagcctgctgggccggctggtgaggccagagggccaccagcagcaacaccaccacagagccccagctgcactcaccccccccgaacctccaagcgctgagccctag

SEQ ID NO: 116852 - DNA, 768 bp, synthetic construct
  misc_feature 1..768: note = Description of Artificial Sequence: Synthetic coding sequence
  source 1..768: mol_type = other DNA
atggcagtcggtaatattaacgagttacccgagaatattctgctagagttatttactcacgtgcctgccagacagctgctacttaattgcaggttagtgtgcagcttgtggcgtgacctgattgacctggttaccctatggaagaggaagtgcttgcgcgaaggcttcatcactgaggattgggatcaacccgttgcagactggaagatcttttacttcctcaggagcctccacagaaatttgctccacaatccatgcgccgaggagggctttgagttctggtctttagacgttaatggaggcgacgagtggaaagttgaggacctgtccagggaccagagaaaggagttccccaatgaccaggtgaaaaagtacttcgtaacttcgtactacacgtgtcttaaatcccaagtggtcgatttgaaagccgagggctattgggaggagctaatggacaccactagaccggacatagaagtaaaagattggttcgccgcgagaccagattgtggttcgaagtatcaactgtgcgtgcagcttttgagcagcgcccatgcccctttgggcacttttcagcccgatccagctaccatacagcaaaagtccgacgcaaagtggcgggaggtttcacatacattttctaactacccaccaggcgtcagatacatttggttccagcatggaggagttgacacccactattgggcaggatggtacggcccgagggtgacaaactcatctataacaattggccccccactgccttag

SEQ ID NO: 116853 - DNA, 498 bp, synthetic construct
  misc_feature 1..498: note = Description of Artificial Sequence: Synthetic coding sequence
  source 1..498: mol_type = other DNA
atggccgtcgggaacattaacgagctgcccgaaaatatcctcctggagcttttcacacatgtaccagcccgccagcttctcctgaattgtagactcgtctgctccctttggcgggatcttatcgatttggtcacactatggaagcgcaaatgtttacgggaagggttcatcaccgaagactgggaccagcctgtcgccgactggaaaatcttctacttcctgagatccttacaccggaacttactacacaatccctgcgctgaggagggattcgagttctggagcctggacgttaatggtggggacgaatggaaagtggaagatctctcaagggaccaacgaaaagaatttccaaacgaccaggttaggtctcaggcgcggttgagagttcaggtaccggccgtgcgtagcgcgcctgtcgttagggctcgggccagtggtgacttacctgccaggcctggagaccatcctgcagaggagcgctgccaggtggaatag

SEQ ID NO: 116854 - DNA, 861 bp, synthetic construct
  misc_feature 1..861: note = Description of Artificial Sequence: Synthetic coding sequence
  source 1..861: mol_type = other DNA
atggccgcacctgctcccggcgctggagccgcaagtggcggggctggctgctctggcggaggggccggggcaggagccggcagcggcagcggcgccgctggcgccggcggacgcctccctagccgagtcttagaactggtgttcagttatttggagctgagcgagctgcgctcatgtgctctggtttgcaagcactggtacaggtgtctccacggtgatgaaaacagcgaggtgtggaggtccctgtgtgcccgcagtctagctgaggaagcccttaggaccgacatattatgtaatttgcccagctataaggccaaaattagagcctttcagcatgccttcagcacaaatgactgtagccgcaacgtttatattaagaagaatggatttactctgcatcgaaaccccattgctcagagcacagacggagccaggacaaaaatcggattttccgagggtaggcatgcttgggaggtgtggtgggaagggcctctcggcacagtggccgtgattggaatcgccaccaaacgcgcacccatgcagtgccaaggatacgttgccttgcttggctcagacgatcaaagctggggatggaatcttgttgacaacaatctactccataatggagaagtcaatgggagtttcccgcagtgtaataatgcccctaagtatcagatcggagaacggattcgcgtgattctggacatggaagataaaacactcgcttttgaacgaggctatgagtttctcggtgtggcatttaggggcctgccgaaagtttgtctatatcccgctgtcagtgccgtgtacggcaatactgaggtgaccctggtgtacctggggaagcctctggatggttag

SEQ ID NO: 116855 - DNA, 1812 bp, synthetic construct
  misc_feature 1..1812: note = Description of Artificial Sequence: Synthetic coding sequence
  source 1..1812: mol_type = other DNA
atggatagaggatctctgctcccgtttcagctgtggtgccccaggcctttcggtacatactcccagaatcagcctcggcccccctctgcggctctgaagccctcagcctgtcccgagccaggcggcggcgccgagcccgaccacggccccgcccactcagagaatacgcctcccgccttagccaccgaggttcctgctagccagccagccccactgctgtccgccgccgcagcaggcgacgaaggccgggtgctgttggacacctggtatgtaatcaagcccgggaacacaaaagaaaaggtggcctttttcgttgcccatcagtgtggcgggggaagccgggcaagttccatgaaagtgaaaggccactggggttccgatagtagcaaggccaagcgtaggaggcgatgtctcgacccgaccaaggccccacctgatcccggcggccgcgaaggaccccctgcagctgaagagggtccggcatcagctggagaggatgtcgacctcttgtcggtcgccgaaatggtggctctggtcgagcagagggcagctttagctctccagtcctaccccagaccaaccactccggccccggtggtgtttgtcagtgctgagcaggggggacccgcgaaaggcgtgggctcagaacgccgaagcggagggggcgactgcagcagagttgcagaggcggttgcccacttcgaggcccaacgggactcgccccccaccaaaggattacggaaagaggagcggcccgggccgggccctggtgaagtccgcattgcatttcggatcagcaacgggcgcgagcctagggcccctgactcaggtctgccctctggtgggggaggtagaccaggctgcgcttatccaggcagcccaggcccgggggcccgggccaaagataaaattacctgtgacctatatcaactgatatccccctctagagatgccctgccaagcaacgtggaattcctcctggcaagggctgatgaggcttctgaaggggattctcccgccccagcgcgcccagaagacactccgccagcgccaccaccccctcccgccagggactgcggcgcctccggattccacgtagatgtcgtcgttacgggggtcgtggacgaatgtatcttttttggcaaggacggcaccaagaacgtcaaggaggagactgtatgtctgaccgtgtcccccgaagaacctccaccaccaggccaattgttcttcctccaaaaccgtgggccagacggaccccctgagccgcctcctgctgactcacccgctacagcccctggacccgatgacgccgaaggaactgccgacacctcattgtgtaggctctataggcatgtatcacacgacttcttggagatccgattcaagatacagagactgctggaaccacggcagtacatgctgctactccccgaacatgtgttagtgaagattttctctttcctgccaacccgcgcactggctgccctaaagtgtacctgtcatcacttcaagggcatcatcgaagcctttggcgttagggcaaccgactcccggtggagtcgggatcccttgtaccgagatgacccttgcaagcagtgtcggaaacggtatgagaaaggagacgtgagcctgtgtcgatggcatccaaaaccttaccatcatgatctaccatatgggcgttcctactggatgtgctgcaggcgcgcagaccgtgagacgcccggatgccgcctcggactgcatgataacaactgggttttgccttgcaatgggcctgggggaggaagagcaggaagggaagagggtcgttag

SEQ ID NO: 116856 - DNA, 609 bp, synthetic construct
  misc_feature 1..609: note = Description of Artificial Sequence: Synthetic coding sequence
  source 1..609: mol_type = other DNA
atgacgtgtctgactgatgtgcctacaggatgtgctgccgtggaacctaccgcacgcctgccagcagctgcttgggcctctaccataactaccgggtgttgcccagccatgggacaagccggagccggcccagcggggcgcagagggggggaagcaggagggggagagggaagagcccatcatgcccatccatcgcccttacctcgcgaaccccgtgtgcgcaccgggcccccggcccactccccgacccctggatccatagatccaagtcccgaactgtcatggggcagcgcaggggtgacgcaggagagccccctcttagatcccgtggattttcttttgttcagaacgagagccgtcgacccgctccgacgggtgttttttttcttttatcagcacctgacgttcttctccatacaaccacagcctcccccgtgccacgcctttcaccccaaggaccctcccgctggctcccggagacagctcatcttagttcctttaaaaggccctcctatcctcgcgcccattctctccctcacccctatcttatcgcgctggagctgttatttcccacgaagccgaatagctcagggctggcacctcagctag

SEQ ID NO: 116857 - DNA, 1359 bp, synthetic construct
  misc_feature 1..1359: note = Description of Artificial Sequence: Synthetic coding sequence
  source 1..1359: mol_type = other DNA
atggctagtcgcatcaatacaaacttcactctgattcctaatcagaagttacgacgcagcaacaggcaaacttcctgttacagtaaaactctgggttctggatttcaacctatttctactttcgggaactttaaggctctcccactggagatatttcagattatcctgaaatatttgagcgtcaaggatatctctatgctgtcaatggtctcaaaaacagtgagccagcatattattaattatatctccacaagcagtggtagcaaaagactcttgctccaggatttccataacttggaattgccggacagacggcaggactccgccatcctcgaacactacaggtcactcgggctgctctttaagaggtgtacgttgctgctgcccacgaaggagcgcctgaaatacattcataagatattgaccgaagtctcttgcttcaaattcaacggctgcgccgctccgatgcagtgccttggattgacatgctatggtatgtttctccagacgcttacggcgggatgggacgagttggaatgccaccgcgtctataatttcctttgcgagctgactaacctgtgtaggaaaattcaaatggccgtgtgttccaaacccgggtctgcgcaaaagctggaactgaggatcagactgttttgcagaaacgtcctcctggaccactggactcatcgctccgactccgccttttggctcactcggatcctgaaaccctggcctatggttaaccaggccagattactgtatataattttcggaccgatttctccacaagatggtcaggtggtctggcaggaaatgatcgaagaacccactgacgaattcagcctgaagggcctcgctgatgcaatcaaactgctgtacgacgcatccacaaaagagtggaccgcggacgatgtgatttcactggttgacgagctctctgttgtgcccagagagtggctgcttgaaaataacgcgagactgttgatgctcagcgggaacaatatctgtttctcttttatggcatccaaggcggtaaatggccggacaatcgagctcgcccgcttagtggtgttcctggcccttgtgtgcgagaaggaactgtactgcatggattggacggtgaagatgatgcaaaaggtgtgcaaggtgttttctaccccggtggaacggaaaaacttcctgcagaatgtggcaaatgcctttgcttgcgtaatcatggagatgctccagagcattatgtcgggcgaccgcgacgaggacgaccgctcctttttaaatctgtttcatctcgtgcacgcgcaagcaaacttccacaaggaggtcctgtacctgacaatgaatactcctcttagcacttag

SEQ ID NO: 116858 - DNA, 2133 bp, synthetic construct
  misc_feature 1..2133: note = Description of Artificial Sequence: Synthetic coding sequence
  source 1..2133: mol_type = other DNA
atgggagggaagcagcgagatgaggatgatgaggcatatggcaagccagtaaagtacgacccctccttcagagggcctatcaagaaccgaagctgcactgatgttatttgctgcgtgctctttctgctttttattcttgggtacatagtcgttggtattgtagcatggctctacggagacccccgtcaggtgctgtatccgcggaactcaacaggagcctattgcggaatgggggagaataaagataagccttatctcctgtacttcaacatcttctcctgcattctctcgtccaacatcatctctgttgctgaaaatgggttgcagtgtccaacccctcaggtttgcgtgtcatcatgtccagaagacccctggaccgtgggaaagaacgagttctctcagaccgtaggggaagttttttacaccaagaataggaatttctgtcttcccggtgttccatggaatatgaccgtgattacttccttacagcaggagctctgccccagcttcctgctgcctagtgctcccgcccttggaagatgtttcccgtggaccaatgttaccccaccagccctaccaggaatcacaaacgacactacgattcagcaggggatctccggcctgattgatagtttgaatgccagggatatctcagtgaaaatctttgaggatttcgcacagtcttggtactggattctggtggctctaggagtggcattggtgttaagtctgttatttatcctgctcctgcgtctggtcgccggccctctggtccttgtactgattctgggcgtcctgggagtgctcgcatatgggatttactattgctgggaggaatatcgcgtgctacgtgataagggggcaagcatatcccagcttgggttcacaaccaatctgtctgcatatcagtcagtgcaggaaacctggcttgctgcgctgatcgtactggcagttctggaagcgattctccttctcatgctgatatttctgagacaacgcattcggattgcaatcgcactcctgaaagaggcttccaaagctgtggggcagatgatgagtaccatgttctaccctctggtaactttcgtcttgctcctgatttgtatcgcgtactgggccatgacggctctctatctcgccactagtggccaacctcaatacgtactttgggctagcaacatttcatctccaggctgtgagaaggtccccataaatacctcgtgtaatccaacagcacacctcgtcaattcttcatgtccgggattgatgtgtgtgtttcagggatatagtagcaaaggcctgattcaacgatcagtctttaatttgcaaatctacggtgtgctgggcctattctggaccctcaattgggtgcttgcgctgggacagtgcgtcctagccggtgcctttgcctcattttactgggcatttcacaaaccacaagatatacccacctttcctcttatctctgccttcattcgaacgttgcggtaccacactggctctctcgcattcggggcgctcattctgactctggtgcagatcgctcgcgtcatccttgaatacattgaccacaagctccggggggtacagaatcccgtggctcggtgtatcatgtgctgtttcaagtgctgcttgtggtgcttagagaagttcatcaaatttttaaaccggaatgcgtacatcatgatcgcaatatacgggaagaacttttgtgtgtcagcaaagaacgccttcatgctgttgatgagaaacattgtgagggtcgtggtgctcgataaggtgaccgacttgctgctattcttcggtaaactgctagtggtgggaggcgtgggggtcctatcattcttcttcttttctggtcgcatccctggactgggcaaagactttaaatcacctcatctgaactattactggctgcccatcatgaccagtatcctgggtgcctatgtcattgcttctggatttttctctgtcttcggtatgtgtgtagatactttatttctgtgttttctggaggacttggaacggaataacggctccctcgatagaccctactatatgagcaaatctctgcttaaaatcctcggaaagaaaaatgaggctccgccggacaacaaaaaacgtaaaaaatag

SEQ ID NO: 116859 - DNA, 1206 bp, synthetic construct
  misc_feature 1..1206: note = Description of Artificial Sequence: Synthetic coding sequence
  source 1..1206: mol_type = other DNA
atgaaatgtgactttaattgcaaccacgtgcactccgggttgaagctcgtgaagcctgacgatatcggccgactcgtgagctacacacctgcctatctggagggcagttgtaaagactgcattaaggactatgagagattgagctgtattgggtcaccaatcgtttcccctcgaattgtgcagttggagactgaaagcaaacggctacacaacaaggagaatcagcacgtgcagcaaacactaaatagcaccaatgagattgaggcactagagacatctagactgtatgaggattccggttattcttcctttagtctgcagtctggactgtcagaacatgaagagggcagtctcctagaggaaaacttcggagactcacttcagagttgcctgctacagatccagagtcccgatcagtacccaaacaaaaacctgcttcccgtcctgcatttcgaaaaggtggtttgcagcacactaaagaagaatgccaagagaaacccgaaagttgatcgcgagatgctgaaagagataatcgcccggggcaactttaggttacagaacatcatcggtaggaaaatggggctggagtgtgtcgacattctctccgaacttttcaggcgagggctgcgccatgttcttgccaccatactcgcccagctctcagatatggatctaatcaatgtgtcaaaagttagcacgacctggaagaaaattttggaggacgacaaaggggcctttcagctgtactccaaggccatccagcgggtgactgagaacaacaataagttttccccccacgccagcactcgcgaatacgtgatgttccgtacgccactggccagcgtccagaagtctgctgctcagacgagcttgaaaaaggatgcccaaacaaagctgagtaaccaaggggaccagaagggttctacttactcgagacacaacgagttctcagaggtcgctaagactctgaagaagaatgaatccctcaaggcgtgcattaggtgcaacagtcccgccaaatatgactgttacctgcaaagagcgacctgtaagcgagagggttgcggctttgactactgtactaaatgtttgtgtaattaccacacaaccaaggattgctctgacggaaaactcctaaaggcctcatgcaaaatagggcctcttcccgggaccaagaaaagcaaaaaaaatttgagaagactgtag

SEQ ID NO: 116860 - DNA, 882 bp, synthetic construct
  misc_feature 1..882: note = Description of Artificial Sequence: Synthetic coding sequence
  source 1..882: mol_type = other DNA
atggacgccccacattctaaggctgctctggacagcattaatgagctgccagaaaatatcctgttagagctctttactcacgttcctgctagacagcttctcctgaattgccgcctcgtgtgctctctgtggcgggatctaatcgatctgatgactctttggaaacgcaaatgccttcgggagggatttatcacaaaggattgggaccagcctgtcgcagattggaaaatcttttattttctcaggtcattgcatagaaacttgcttaggaatccatgtgctgaagaggacatgtttgcatggcagatcgatttcaatgggggcgatcgctggaaggtggagagtctgcccggggcacacggcaccgacttccccgaccctaaggtcaaaaaatattttgtgacctcttacgagatgtgcctcaagtctcagctggtggacctggtggcagaggggtactgggaagagctgctggacacttttaggcctgacatagtcgtcaaagattggtttgccgctcgcgcggactgtggctgcacataccaactgaaggtccaacttgcctccgccgattattttgtgctagcttcattcgagccgcccccagtaacaattcaacagtggaataacgccacatggacagaagttagttacaccttctcagattatcctagaggcgttcgatacattttgttccagcacggagggcgcgacactcagtattgggccggttggtacggcccaagagtcactaatagcagcatcgtggtctcaccaaaaatgactaggaaccaagcatcgtccgaggcgcagcctggccagaaacacggacaggaggaagccgctcaatctccctatagggcggtggtgcagatattttag

SEQ ID NO: 116861 - DNA, 750 bp, synthetic construct
  misc_feature 1..750: note = Description of Artificial Sequence: Synthetic coding sequence
  source 1..750: mol_type = other DNA
tagaatgagctccccgagaatatccttttggaactgttcactcatgtcccggcacggcaactgctgctgaactgccgcctggtgtgttccctatggagggatctgattgatctaatgaccctctggaagcgcaaatgccttcgcgagggtttcattaccaaggattgggatcagccagtggcagattggaaaatcttttactttttacggtcactgcaccgcaacttgctgcgcaacccatgtgcggaagaagatatgttcgcctggcagatcgattttaatggcggggacagatggaaggtcgaatctttgcctggcgctcacggcaccgatttccctgatcccaaggtgaaaaaatatttcgttactagctatgaattcgccgccagggccgactgcgggtgcacataccagctcaaggtgcagttggctagtgccgattacttcgtgctagcctccttcgaacctcccccagtgacaatacagcagtggaataacgccacctggacagaagtgagctacacattttcagactacccacggggagtaaggtacatactgtttcaacatggcggaagagatacacagtattgggcgggctggtacggaccgcgggtgaccaactcatccattgtcgtgtctcccaaaatgacacgaaaccaagccagcagcgaggcgcagcctgggcagaagcacggacaggaggaggcggctcagtctccttatagggccgtggtgcagatattttag

SEQ ID NO: 116862 - DNA, 1569 bp, synthetic construct
  misc_feature 1..1569: note = Description of Artificial Sequence: Synthetic coding sequence
  source 1..1569: mol_type = other DNA
atgcgcttgagggtgagacttctcaagaggacctggcccttggaagttccagagacagagcccacactggggcatctaagatcccaccttcgccagtctctgctgtgtacatggggctactcatctaacaccagatttacaatcacgctaaattacaaagatcccctcaccggagacgaggagactctggccagctatggcatcgtgtccggagatctcatctgtcttattctgcaagatgacatacccgccccaaatatccccagctccacagactctgagcattcgagtcttcagaacaacgaacagccaagccttgctacttcgtctaaccaaacctccatgcaagacgagcagccctcagacagctttcaaggccaggccgcgcaaagcggagtctggaatgatgatagtatgctcggcccttcccagaacttcgaggccgagtcaatccaggacaacgcccacatggccgaggggacgggcttctacccaagcgagccgatgttgtgctccgagagcgttgagggccaggttccccacagtcttgagacactataccaatctgcagactgtagcgatgcgaatgatgctcttatcgtgctgatacacttgctgatgctcgaatcagggtatattccccagggtaccgaggccaaagctctaagtatgcctgaaaaatggaaactgtctggcgtttataaactccagtatatgcatcctttatgtgagggttcttctgcgactcttacctgcgtcccattaggtaatctaattgtggtgaatgccaccttgaagatcaataacgagatccgttcggtcaagcgactacagctgctgcccgagagcttcatctgtaaggaaaaactgggggagaatgttgccaatatctacaaggacttgcagaaactgtccagattattcaaagaccaactggtgtacccccttctcgcttttactcgccaagcccttaacctgccagatgtgtttgggcttgttgtactgcccctggaacttaaactgcggatattccgactcctagatgtgcgatccgtgttgtcactgtcggcggtctgcagagacttattcaccgcctccaacgaccccctattgtggaggtttctttacttacgcgacttccgggacaatacagtgagggttcaggacactgactggaaggagctgtaccgcaaacgacacatccagcgcaaggagtctcctaagggaaggttcgtgatgctgcttccaagtagcacgcacaccatcccgttctacccaaaccccttgcatccccgcccatttcctagttcccgcctgcccccaggaataatagggggagaatacgatcagagaccaacactcccatacgtcggtgacccaatttctagtctcatccccgggcccggggaaaccccttcccagtttcccccactgagaccaagattcgatccggttgggcctctccctggccctaacccgatattgcctggccgaggcggccccaacgataggttcccattccggccctcaagaggcaggcctactgacggaaggctcagctttatgtag

SEQ ID NO: 116863 - DNA, 1332 bp, synthetic construct
  misc_feature 1..1332: note = Description of Artificial Sequence: Synthetic coding sequence
  source 1..1332: mol_type = other DNA
atggctcggcccccaggcggcagcggccctctactcgacagcgagcactccagcctccagaataatgagcaacctagcctcgccacgtcctctaatcagactagcatgcaggacgaacagcctagtgatagttttcaagggcaggcagctcagtccggcgtttggaatgacgacagtatgctcggaccctcgcagaatttcgaggctgaatctatccaggataacgcacacatggccgagggaaccggattctacccctcagagcctatgttatgcagcgagtccgtcgaagggcaggtgcctcactctctggaaaccttgtatcagtcagcagactgctctgatgcaaacgacgcccttatagttctcattcacctgctgatgcttgagtccggctacatcccccaagggaccgaggctaaggcactcagtatgccggagaaatggaaactgagcggggtttataaacttcagtatatgcaccctctgtgtgaaggttccagcgcaactctgacatgcgtgcctcttggaaatttgattgttgtgaacgctaccctcaagattaacaatgagattagaagtgttaaacgcctgcagctgttgccagagagttttatctgcaaggagaagttgggagaaaatgtcgcgaacatttataaagacttgcagaagctttcacggctttttaaagatcagctcgtgtacccactgttggcttttacaaggcaggctttgaatcttccagacgtgtttgggttggtcgtgctccccctcgagctgaagttacgaatctttcgcctgctcgacgttcgatcagtgttgagcttaagcgctgtgtgcagggatctgttcaccgcctctaatgacccactgctgtggcgattcctttacctgcgcgattttcgcgataacacagtgagagtacaggatacagattggaaagagttatatcgcaagcgccacattcagcggaaagagtctcctaaaggtcgctttgtaatgctcctgccaagctcaacgcacaccatcccattttaccctaatcccttgcacccgaggccattccccagtagtcgcctgccacccgggattataggcggggaatacgaccagagaccgacgctcccatacgttggtgaccccatctcatcccttatacctgggccaggagagacgcctagtcagttcccaccactgcgacctcgattcgatccagtgggcccactccctggtccgaaccctatcctgccgggtcgggggggccccaatgatcgatttccctttcgcccatcacgaggccgacctacggacggaagactctcattcatgtag

SEQ ID NO: 116864 - DNA, 1227 bp, synthetic construct
  misc_feature 1..1227: note = Description of Artificial Sequence: Synthetic coding sequence
  source 1..1227: mol_type = other DNA
atgcaagacgaacaaccatccgactcatttcagggacaagcagcacaaagcggcgtttggaatgacgacagtatgctgggtcccagtcaaaacttcgaggctgaaagcatacaagataatgcacatatggcagaaggtaccggattctatccgagcgagccaatgctatgcagtgagagcgtagaggggcaggtgccgcattcgctggagactttgtaccaatccgctgattgttctgatgccaacgacgccctgattgttctaatacatttactgatgctcgagtcgggatacattccccaaggcacggaagccaaggccctttctatgccggaaaagtggaagctctctggcgtgtacaagcttcaatacatgcacccattgtgtgaaggaagctcagccacactaacctgcgtccccctgggcaatctaatagtcgtgaacgctacactcaaaatcaacaacgagattaggtcagtgaagcggttgcagttgttaccagagtcatttatctgcaaggaaaagctgggcgagaacgtcgctaatatttacaaggatctgcagaaactaagtcgactattcaaagaccaactggtttatccgctcctggcttttactagacaggctctgaatctccccgacgtgtttggactggttgttctaccactcgaactcaaactgagaatatttcggctcttggatgttcgatcagtgctgagtctgtctgccgtgtgcagggatctgtttaccgcctccaatgaccctctcctgtggcgtttcttgtatctgcgcgatttccgtgacaacacagtgcgtgtccaggacacggattggaaggagctatacagaaaacgtcatatccaaagaaaggaatctccgaagggaagattcgtcatgttactgccgagctccacacacacgattcccttttatccaaatcctctgcaccccagacctttcccatcctctcggttgccacccggcatcattggaggggagtatgaccagcgcccgacgctgccatacgttggcgacccaatttcttctttgattcctggacctggtgaaactccctcgcaatttccaccactcaggccccgattcgatcccgtggggcctcttcctgggcccaacccgatcctgcccggccgaggtgggcctaacgatcgattcccttttagacctagccgcggccgacctactgatgggaggttatcttttatgtag

SEQ ID NO: 116865 - DNA, 699 bp, synthetic construct
  misc_feature 1..699: note = Description of Artificial Sequence: Synthetic coding sequence
  source 1..699: mol_type = other DNA
atgcagctcaccttcgcgtggttacacgtgtttgggagaaccctccggatgatgaacttttcaggaaaagggtgtgcaaacccctgggggcattgctccatttacaataagaaccctccattggggtttagtttccggaagttatacatgcagctggacgagggtagtctgactttcaacgccaaccccgacgaaggtgtgaactatttcatgagcaaggggatcctcgatgactcacctaaagagatagctaaattcattttttgtacgcgcacgctaaactggaagaagttaagaatttacctggacgagaggcgggacgtgctcgacgacctggtaactctgcacaactttcgtaaccaatttcttcccaatgcactgagagagttctttcgacacattcacgccccggaagaacgcggcgaatatctagaaacattgattacaaagtttagccaccgcttctgcgcctgtaaccctgacctaatgagagaacttggcctgagccctgacgccgtttacgttctgtgctactcactgatcttgctctctattgatctcaccagtccgcatgtcaaaaacaagatgtccaagcgggagttcatcagaaataccagacgtgccgcacagaatatttccgaagattttgtagggcacctctatgacaacatctatcttatcgggcatgttgcagcatag

SEQ ID NO: 116866 - DNA, 960 bp, synthetic construct
  misc_feature 1..960: note = Description of Artificial Sequence: Synthetic coding sequence
  source 1..960: mol_type = other DNA
atgggtcaggggctatggcgggtcgtgcgcaaccagcagctgcagcaagaggggtacagtgagcagggctacttgaccagggagcagagtcgtcggatggccgcctctaacattagtaacacgaaccaccgtaaacaggtacaggggggaatcgacatttatcacctgttaaaagcccgtaaatccaaggagcaagaggggtttattaatttggagatgttacccccagaactgagctttactatcctgtcatacctgaacgctactgatctctgtctcgcatcatgcgtctggcaggacttggccaacgacgaactgctgtggcaagggttgtgtaagtctacttgggggcactgtagcatttacaataagaacccacctcttggtttttcgttcagaaaactgtatatgcagctggatgaaggatctctgacattcaatgctaatccagacgaaggagttaattacttcatgagcaagggcatcctggatgactcccccaaggagatcgcaaaatttatcttctgcactcgcactctgaactggaagaaattgcgcatctacctcgatgaacgccgcgacgtgttggatgatctcgtcacactgcacaacttcaggaatcagttcctacctaatgccctccgggagtttttcaggcacattcatgctcccgaagagcgaggagagtatttggagacactcatcaccaagttttctcaccggttttgtgcttgtaaccctgatctcatgcgagagctgggacttagcccggacgccgtctatgtgctgtgttacagcctgattttgctttccatagacctaacgagccctcatgtgaaaaataaaatgtcaaagagagagtttatccggaacacacggagagccgctcagaacatctcagaagactttgtaggacatctgtacgacaacatttacttaattgggcacgtagccgcatag

SEQ ID NO: 116867 - DNA, 555 bp, synthetic construct
  misc_feature 1..555: note = Description of Artificial Sequence: Synthetic coding sequence
  source 1..555: mol_type = other DNA
atgggacaaggactctggagagtcgtgagaaaccagcagcttcaacaggaaggctactcggagcagggttacctcactcgcgagcagtctcggcgaatggccgctagtaacatttccaacaccaaccaccgtaaacaggtgcagggcgggattgacatctaccacttgctaaaagccagaaaatcgaaagaacaggagggctttattaatctagagatgctgccacctgagttgagcttcactatccttagttatttaaacgcaacggacctttgcctggccagttgcgtgtggcaggacctggcaaacgacgaactgctatggcagggactttgcaaatcaacatggggtcactgttctatttataataaaaacccccctctgggatttagcttcagaaagctctatatgcagttggacgagggttctctaacctttaacgcaaaccctgatgagggcgtgaactattttatgtccaaaggcatccttgatgacagtcctaaggagatagctaagttcattttttgcacccgaacccttaactggaaaaagtag

SEQ ID NO: 116868 - DNA, 1344 bp, synthetic construct
  misc_feature 1..1344: note = Description of Artificial Sequence: Synthetic coding sequence
  source 1..1344: mol_type = other DNA
atgccagacattatatgggttttccctccacaagccgaggccgaggaggactgccactcagacaccgtcagggccgatgacgacgaggagaatgagtccccggccgaaaccgacttacaggcccagttacagatgttccgcgcgcaatggatgttcgagctcgctcctggcgtgtcctcttcgaatctggagaaccggccctgccgagcagcccgcggcagtcttcagaagactagtgctgacacaaagggcaaacaggagcaggctaaggaggaaaaggcacgcgagctgttccttaaagcagtggaagaagaacagaacggcgccctgtatgaagccattaagttttaccgccgagccatgcagctggtccctgatatcgagttcaagataacttatacaaggtcccctgacggagacggggttgggaactcctatatcgaggataacgacgatgattccaagatggctgacctcctgtcctactttcagcagcaacttacgttccaggaatcagtgttgaagctgtgccagcctgaactggagagcagccagatacacattagcgtcctgccaatggaggtcctcatgtacatcttcagatgggtggtctcctccgacttggatctccgctccctcgaacagctgtctcttgtttgcagaggattctacatatgcgcccgggatccagaaatatggcgtcttgcatgcctcaaggtctggggccgctcttgcatcaagctggtgccttacaccagttggcgggagatgtttctcgaaaggcctcgtgtgcgcttcgatggcgtctacatttccaagactacatatattcggcaaggggagcagtcactggatgggttctaccgtgcctggcaccaggttgagtattaccggtatattaggttcttcccagatgggcacgttatgatgttgactacaccagaagagccccagagcatcgtgccccgccttcgaactcgcaacacccgaaccgacgcgatcttgcttggtcactatcgattatctcaggacactgacaaccagacgaaggtgttcgctgtgatcacgaaaaagaaggaggagaagcctcttgattacaagtatagatattttcgacgagtgcctgtgcaggaagcagaccagtcctttcacgtgggtctgcagttatgtagttcaggccaccaacgatttaacaaattaatttggatccaccactcctgtcatattacgtataaatctactggagagacagctgtgtccgccttcgagatagacaagatgtatacccccctcttttttgcacgagtcaggtcctacactgccttctccgagagacccctttag

SEQ ID NO: 116869 - DNA, 1314 bp, synthetic construct
  misc_feature 1..1314: note = Description of Artificial Sequence: Synthetic coding sequence
  source 1..1314: mol_type = other DNA
atggccgaggctgaggaggactgtcattccgacactgtcagagcggacgatgacgaggagaacgaatcccccgctgagacagatctgcaggcacaactccagatgttcagggcccaatggatgtttgagttggctccaggggtgagctcaagcaatctggaaaatagaccatgccgggctgcacgcggcagtctgcagaaaacgtccgccgatacaaagggtaaacaagagcaggccaaagaggagaaagcgagggaactgtttttaaaggccgtggaagaagagcagaacggcgcactgtacgaggctattaagttttaccgaagagctatgcagctcgtaccagatattgaattcaagataacctacactaggtctcccgatggcgacggagtcggtaattcctacatcgaggacaacgatgacgacagtaaaatggctgacctgttgagttactttcagcagcagctcacgttccaggaatctgtgcttaagctctgccagccggaactggagtcaagtcagattcatattagcgtgttacccatggaagtgttaatgtacatattcaggtgggttgtgtcttcggatctggatctccgcagcctggaacagttatctctcgtatgtagaggattctacatctgtgcccgtgatcctgagatctggaggctcgcttgccttaaagtgtggggccgaagctgcatcaagctcgttccttacacatcctggagggaaatgtttctggagcggcctagagtgcgcttcgacggtgtctacatcagtaaaacgacatatatccgacagggggaacagtccctggatggtttctatagggcgtggcaccaagtcgagtattatagatacataaggttctttcccgacggacatgtcatgatgctgactacccccgaggagcctcaatccatagtgcctcggctgcgaaccaggaacactcgcacggacgcgattctgctcggccattatcgcctgtcccaggataccgataatcagacaaaagtgttcgccgtaatcacgaaaaaaaaggaggaaaaaccgttagattataagtatagatacttccgccgggtccctgtccaggaggccgaccaaagcttccacgtaggactgcagctgtgctcttccggacaccagaggttcaataagctcatttggatccatcactcctgtcacatcacatacaaatctacaggggagactgccgttagcgcatttgagatcgacaagatgtacacgcccctgttcttcgcccgtgtgagaagttacactgcttttagtgaaagacccctgtag

SEQ ID NO: 116870 - DNA, 1212 bp, synthetic construct
  misc_feature 1..1212: note = Description of Artificial Sequence: Synthetic coding sequence
  source 1..1212: mol_type = other DNA
atgttcagggcccagtggatgttcgaacttgccccaggcgtgagcagttcaaacctggaaaacagaccctgtcgtgcagcgaggggatcgctacagaaaactagtgccgataccaagggcaagcaggaacaggcaaaagaagagaaggctcgagagctgtttctcaaggctgttgaggaggaacagaatggggccctgtacgaggcgatcaaattttatcgacgagctatgcagctcgtgcctgatatagagttcaagatcacatacacccgatcccccgacggggacggcgtgggaaacagctacatcgaagacaacgacgacgatagcaagatggccgaccttctttcctattttcagcagcagctaacctttcaggaaagtgtgctgaagctgtgccagcccgaactggaatcgagccagatccacatctcagtgcttccgatggaggtgctcatgtatattttccggtgggtggtgagctcagacttggatctgaggagtctcgaacagctgtccctggtatgcaggggcttttacatctgcgcccgcgatccagaaatttggcgactggcctgtttaaaagtctggggccgatcctgcatcaagctggtgccctataccagttggcgggaaatgtttctcgagaggccaagagtgaggtttgatggcgtgtatattagcaaaacaacttacatcaggcagggcgagcagtcccttgatgggttttatagagcatggcatcaggttgagtattataggtatatccggtttttccctgatggtcacgttatgatgcttaccaccccagaggagcctcaatccattgtccctcggctgcgtactcgaaatacacggacagacgccattttattgggccactataggttgtctcaggacaccgataatcagactaaggtcttcgccgttatcacaaaaaagaaggaagagaaaccgctcgattataagtacaggtacttccgcagggtgcccgtgcaggaagccgaccagagtttccacgtgggcctgcagttgtgttcttctggccaccagagattcaacaaactaatatggattcatcacagctgtcatattacttacaaatcaactggggaaactgcagtatcagcattcgagattgataagatgtataccccgcttttcttcgctcgggtgcgctcgtatactgctttttctgagaggcctctctag

SEQ ID NO: 116871 - DNA, 147 bp, synthetic construct
  misc_feature 1..147: note = Description of Artificial Sequence: Synthetic coding sequence
  source 1..147: mol_type = other DNA
atgtttcgtgcccagtggatgtttgaacttgctccgggtgtatcctcgtctaatctagaaaaccgcccctgcagagcagcccgaggatccctccaaaaaacgagtgccgatacaaagggtaagcaggagcaagccaaggaggagtag

SEQ ID NO: 116872 - DNA, 357 bp, synthetic construct
  misc_feature 1..357: note = Description of Artificial Sequence: Synthetic coding sequence
  source 1..357: mol_type = other DNA
atgttcagagcacagtggatgttcgagctggcaccaggggtgagctcaagtaatctggagaacagaccctgccgggccgctcgtggctctctgcagaagacatctgccgatacaaaagggaagcaggaacaggctaaagaggagaaagcacgcgagctcttcctcaaagcagtggaagaggaacagaatggggctttgtatgaggcaatcaagttttatcgcagggccatgcagcttgtcccagatatcgagttcaaaatcacttatacacgcagcccagatggcgatggggtggggaatagctatattgaggacaatgacgatgacagtaagatggctgatctactctcctattag

SEQ ID NO: 116873 - DNA, 438 bp, synthetic construct
  misc_feature 1..438: note = Description of Artificial Sequence: Synthetic coding sequence
  source 1..438: mol_type = other DNA
atgtttcgggctcaatggatgttcgaattggctcccggagtatcatcctcaaacttagaaaaccgcccttgtagagctgctagaggatctctgcagaagaccagcgcggacaccaaaggaaagcaggagcaggccaaggaagagaaagctcgagaattgttcctgaaggctgtagaggaagagcagaacggcgccctgtatgaagccattaagttctaccggcgcgcaatgcagttggtccccgatattgagttcaaaattacttacacacgcagtcctgacggggatggagtcggaaacagctatatagaggataacgatgacgattcaaagatggcagatttgctcagctattttcaacagcagctgacatttcaggagtctgtacttaaactgtgccagcctgaattggaatcgagccaaatacacattagctag

SEQ ID NO: 116874 - DNA, 3132 bp, synthetic construct
  misc_feature 1..3132: note = Description of Artificial Sequence: Synthetic coding sequence
  source 1..3132: mol_type = other DNA
atgcggaggttcaaaagaaaacatttaactgcaattgactgtcagcatctggcccgcagtcaccttgcagttacccagcccttcggtcagcgctggaccaatcgcgacccgaatcacggattgtatcccaaaccccgaaccaagcgcgggagtaggggccagggctcacagagatgcattcccgagttcttccttgcggggaagcagccttgcacgaacgatatggcaaaatccaatagtgtgggacaggacagctgccaagactccgaaggggatatgatctttcccgccgagtctagctgtgctctcccccaggaagggagcgcgggtccaggaagtccaggatccgcgccccctagcagaaaacggtcatggtcttccgaggaagaaagcaatcaggccacagggacgagcaggtgggacggtgtgtctaagaaggctcctagacatcacttgagcgttccatgcactcgtcctagagaagccagacaggaggctgaggactcgacttctcggctatcggctgagtctggagagaccgaccaggacgcaggcgatgtcggccctgatccgattcctgacagctattatggactcctcggaacattgccgtgtcaggaagccctaagtcacatctgttctctgccgtccgaggttctgcgtcacgtgttcgccttcctgcccgtcgaggacctctactggaatcttagtctggtgtgccatttgtggcgggagatcattagtgatcctctgttcatcccatggaagaagctgtatcacagatatctcatgaacgaggagcaggccgtcagcaaggtggacggaatactaagcaactgtggcattgaaaaggaatctgatctctgcgtgttaaatctgataagatacacggctaccacaaagtgctcgcccagcgtggacccagagcgagtactttggagcctgcgtgatcacccattattgccagaggctgaggcttgtgtgagacagcacctcccggatctatacgcggccgcaggaggtgttaatatctgggcccttgtcgccgccgtcgtgcttctttcctcgtcagtgaatgatatacagaggctcctgttctgcttgcggcgcccaagctcaactgtgaccatgcctgatgttacagagactctgtattgtattgctgtgctgctgtacgccatgagagaaaagggtataaatatcagcaaccgcatccattacaacattttttattgcctttatctccaggaaaattcttgcacccaggcaaccaaagttaaagaggagcctagtgtttggcctggtaagaagaccatccagttgacacatgagcaacagctgatcttaaatcataaaatggagcctctgcaggtggtgaagatcatggcgttcgcgggcactggtaaaacttccactttggtgaaatacgctgaaaagtggtcccaatcaaggttcctgtacgtgacattcaataaaagcatagccaaacaggctgagcgcgttttcccatcaaatgtgatttgtaaaacgtttcattccatggcctacggccatatcggtagaaagtaccagtctaagaagaagcttaacctgtttaagctgacccccttcatggtcaacagtgttctcgctgaaggtaagggggggttcatccgcgctaagctggtctgcaaaacgttagaaaactttttcgcgtctgctgatgaggagcttacaatcgatcatgtgcccatctggtgtaagaactctcaggggcagagagtcatggtggagcaatctgaaaaactgaacggcgtattggaggcatcacgtctttgggacaacatgcggaagctcggagaatgtacagaggaggcccaccagatgacgcatgatggctatttaaagctttggcagcttagcaagccttccttagcgtccttcgacgccatcttcgtagacgaggctcaggactgcacccccgcgatcatgaacattgttctatcacagccttgcggaaagatcttcgttggtgatccccaccagcagatctataccttccgtggagcagtcaatgctctttttacagtccctcacacccacgtcttctacctgacccagtccttcagatttggggtcgaaatcgcatacgtgggtgcaacaattttagatgtgtgtaaacgcgtgcgtaaaaagaccctggtgggtggaaaccatcagagcggtattcgcggagatgcgaaaggccaggtggcgctgctgagccggactaacgctaacgtttttgacgaggcagtgcgggtcactgaaggagagttcccatcgaggatccacctgatcgggggcatcaagtcattcggtctggacaggataattgatatctggattttgttgcagccggaggaggaacggaggaaacagaacctcgtgatcaaggataaattcatcagaagatgggttcacaaagagggcttctcgggctttaaacgctacgtgacagcagctgaagacaaagagttggaagcaaagatagcggttgtggaaaagtataacatccgcattccagagctggtccaaagaatagagaagtgccacattgaagatctagatttcgccgagtatattctcggtaccgtgcacaaggcaaagggcctagagtttgatacagtgcatgtcctggatgatttcgtcaaagtgccctgcgctagacataatctcccacagctgccccacttccgggtagaatctttttccgaggacgagtggaatctcctctacgtcgccgtcacaagggcaaaaaagcgactcatcatgacaaagtcgctagaaaatatcttgacgctagcgggagaatactttctgcaggctgagctcacatccaacgtgctgaagaccggggtggtgagatgctgcgttggacagtgcaataacgcgattccagtagacaccgttctgactatgaaaaagctgccaatcacctacagcaatcgcaaggagaataaagggggttacctttgccatagctgtgccgaacagcgcatcggacctctcgcctttctgaccgcttcaccagaacaggtgcgcgccatggaacgcaccgtcgaaaacatcgtgctgccgagacacgaagccctgcttttcctggtcttctag

SEQ ID NO: 116875 - DNA, 1215 bp, synthetic construct
  misc_feature 1..1215: note = Description of Artificial Sequence: Synthetic coding sequence
  source 1..1215: mol_type = other DNA
atgaacgaagagcaggcagtgtccaaggttgatggaattttgtccaattgtgggatcgaaaaggagtctgatttgtgcgtgctgaatctcatcaggtatacagcaactaccaagtgtagtccctccgtcgacccagagagggtcctttggtccttgagagatcatccacttctgccagaggccgaagcctgtgtacgtcagcacctacctgatctttatgccgccgcaggcggcgtgaacatctgggcactggtggcagcagttgtgctgctgtcctcaagcgtgaacgacattcagcgtctgctgttttgccttcgccgcccttcatccaccgttacaatgcccgacgtgactgaaacactgtattgtatagcagttctcctgtacgcgatgagagaaaaggggattaatatctccaatcgcattcactacaacattttttactgcttatacctccaggagaattcatgcacacaggctaccaaggtgaaggaggagccgtcagtgtggccgggaaagaagacaattcaacttacgcacgaacagcaacttattttgaaccacaagatggaacccctgcaggtcgtcaaaataatggccttcgctggaacaggtaaaactagcacattagtgaagtatgccgagaagtggagccagagtcggtttttatacgtgaccttcaacaaatccattgcgaagcaggccgaaagggtgtttcctagcaacgttatctgtaagacctttcactctatggcctatggacacattggaagaaaatatcagagtaaaaaaaagttgaacctttttaaactgacgccgtttatggtgaatagcgtactcgctgaaggtaagggtggcttcatacgggctaaactggtatgcaaaaccctcgaaaacttctttgcctccgcagacgaggaactgacgatcgatcacgtgcccatttggtgtaagaattctcagggtcagcgggtcatggtggagcaaagcgaaaagctgaatggcgtcttggaggcatcccgactttgggataacatgaggaaactgggtgaatgtaccgaggaagcacatcagatgacgcatgatggctacttgaagctatggcaattgagtaagccttctctggccagtttcgatgccatctttgtggacgaggcccaggccggagccaggcatggggcccattgcggagagcatcggaccgcaccagcctag

SEQ ID NO: 116876 - DNA, 3285 bp, synthetic construct
  misc_feature 1..3285: note = Description of Artificial Sequence: Synthetic coding sequence
  source 1..3285: mol_type = other DNA
atgtcctacgaagttacgagcgggtgccactggacttgccaggtccccgaaagctgtgataacggtctgcattgcgctgggcccctgggacacctgcatcgccgctgccagcgtacatctgctcacctgctcgtgttcaccgaacacgcggaaatgaggaggttcaagagaaagcacttaaccgccattgactgccagcatcttgctcggagccacttggccgtgacccaaccgtttggccagaggtggacaaatcgggatcctaatcatggcctctacccgaaaccccgcacaaagagggggagtcgggggcaaggctcccagcgctgcatccccgaattctttctggccgggaagcaaccctgtacaaacgatatggcaaagtctaattccgtgggccaggactcgtgccaagactccgaaggagacatgatctttccagccgaatccagctgcgccctccctcaggagggttcagcaggacctgggtcgccagggtccgctccaccctccaggaaaaggagctggagcagtgaggaggagtcaaaccaggccactggtactagccgctgggacggggtgtcgaagaaggctccccggcaccacttatcagtgccctgcacacgtccacgggaggctcgccaggaagcagaggattctacctcccgcctctccgcggaaagcggggagacagaccaggatgcgggtgacgtcgggcccgaccccattccggatagttactacggactgctcggtacactgccgtgtcaagaagccctgtcccatatctgcagtctgcccagcgaagtcctgcgacacgtatttgcctttttgcccgtcgaggacttgtactggaacctctccctggtgtgccacctctggagagagattatctcggacccgctctttataccatggaaaaagctgtatcatagatatcttatgaacgaggaacaggccgtttccaaagtagacggtatcctctcaaactgtggaatcgagaaggagtctgacttgtgcgttctgaatttgatcaggtacaccgccactaccaagtgtagcccctctgtcgatcccgaacgggtcctgtggagcctcagggatcaccccctgctacctgaggctgaggcttgcgtgcggcagcatctgccagacctctatgcagctgctggaggtgtgaatatatgggctcttgtggcagccgttgtgctccttagctcctctgtgaacgacatccaacgcctgttgttctgtttgaggcggccaagctctacagttactatgccagacgtcaccgaaacactgtactgcattgccgtactactgtacgccatgcgggagaaagggatcaacatcagcaacaggattcactataacattttctattgcttgtatctgcaagaaaattcctgtacacaggcaaccaaggtcaaggaagagcctagcgtgtggccaggaaagaagaccattcagcttacacatgagcagcagctgatcctgaatcataaaatggaaccactgcaggtggtcaaaattatggccttcgctgggaccggcaagacctcaacgctggtgaagtacgccgagaaatggtctcaaagtcggttcctctatgtgaccttcaacaaatcaatagccaagcaagccgagagagtcttccctagcaatgtgatttgcaagacatttcactcaatggcctatgggcatattggtcggaaataccagagcaagaaaaagcttaacctgttcaaactgactccttttatggtcaacagtgtgcttgctgaggggaaggggggttttattagggcgaaattggtctgtaagacccttgagaatttcttcgcctccgctgacgaggaactcactattgaccacgtgcccatatggtgcaagaactctcagggccagagggtgatggtagaacagagcgaaaaattgaatggcgtcctggaggcttcacgtctgtgggataatatgcgaaaactcggggaatgtacagaagaggctcaccaaatgacccacgacggctatctcaagctgtggcagctctccaagccaagtctggcctctttcgatgccatattcgtggatgaagcccaggattgcacgccagcgatcatgaacattgttctgagccagccctgcggtaagatctttgtgggggacccacaccagcagatctatacattccggggagctgtcaacgctctgtttaccgttccccatacccacgtgttttaccttactcagtcgtttcgcttcggtgtggagatcgcctacgtgggcgccactatcctggatgtctgtaagagagtgcgcaaaaagaccctagtgggcggtaatcatcagtcaggcattagaggggacgctaagggccaagtagctcttctcagcagaaccaatgcaaacgtatttgacgaagctgtgcgcgtcaccgagggagaattcccgagtaggatacaccttattggggggatcaaaagttttggtctcgacagaattatcgatatctggattctgctgcagcctgaggaagagcggcgcaagcagaatctggtcattaaagacaaatttattcgacggtgggtgcacaaggaagggttctccggctttaagcgttatgtaacagccgccgaagataaggagctcgaggctaagatcgccgttgtggaaaaatacaatatccgcattcctgagctggtgcagaggatcgagaaatgccacatcgaggacctggactttgccgagtacatactcgggacagtgcataaggcaaaaggcttagagttcgacactgtgcacgtcctagatgattttgtaaaagttccttgcgcccggcataatttgccgcaactgccccattttagagttgaatcgttctctgaggatgaatggaaccttttgtatgtggcggtgacacgggcgaagaagaggttaattatgaccaaaagccttgaaaatatactcactcttgccggagaatacttcctccaggctgagcttaccagcaacgtactgaaaactggggtcgtacggtgctgcgttggacaatgtaataatgcaattcccgttgatactgtgttgaccatgaagaagctgccaattacctattccaaccgcaaggaaaacaaaggtgggtatttgtgccattcatgtgctgaacagcggatcggccccttagctttcctgaccgccagtcccgagcaagtccgcgctatggaacgtaccgtggagaatatagtattgccaagacatgaggccttgctcttccttgttttttag

SEQ ID NO: 116877 - DNA, 1644 bp, synthetic construct
  misc_feature 1..1644: note = Description of Artificial Sequence: Synthetic coding sequence
  source 1..1644: mol_type = other DNA
atggcgtatggccatatcgggagaaaatatcaaagcaaaaaaaagctaaatctgtttaaacttacacctttcatggtgaattcagtgctcgctgaaggtaaaggaggattcatccgggctaagttagtatgcaagactctggagaacttctttgcatccgctgatgaagaactgactatcgatcacgtcccgatctggtgcaaaaacagccagggtcagagagtaatggtcgaacagtccgaaaagctgaatggtgtgctggaggctagtaggctgtgggataatatgcgaaaactgggcgaatgtaccgaagaggcccatcagatgacccacgacgggtacctcaaactctggcagttgagcaagcccagcttggcaagcttcgacgcaatcttcgtggacgaggcgcaagactgtactcctgccatcatgaacattgtcctttcacagccttgcggcaagatattcgtgggcgatcctcaccagcagatttatacattcagaggcgcggtcaacgccctctttacagtaccgcacacgcatgtgttctacctgacacagagttttcgcttcggcgtggagatcgcctatgttggggccactatccttgatgtgtgcaagagggtgagaaaaaaaacacttgttggagggaaccaccagtccggaattaggggagatgcaaagggtcaggtagccctgctctctcgaacaaatgcaaacgtgttcgacgaggccgtgcgtgtgaccgaaggagagtttccctctcggatccacctgattgggggaatcaagtctttcggacttgatcgcatcatcgatatttggatactcctgcagcccgaggaggaacggagaaaacagaatttggtgatcaaagataagtttatcaggcgatgggtgcataaagaaggattttccgggtttaagaggtacgtcaccgccgcagaagacaaggaactggaagcgaagatcgccgttgtggagaaatataatataagaattcccgaacttgtgcagcggatagaaaaatgtcacatagaggacttagactttgcagaaatggaaagccaccacgtcggtcaagctggactggaacttccaaccagcgagtatattcttggcaccgttcacaaagctaagggtctggagtttgataccgttcacgttcttgatgacttcgtgaaggtgccttgtgctagacacaacttgccccagctacctcacttccgcgtcgagtcgttcagtgaggatgagtggaatctgctctacgtggccgttaccagggccaagaaaagattgatcatgaccaagtcattggaaaacatcctgactttagcaggggaatatttccttcaggctgaactgacgagcaacgtcctaaagactggcgtggtgaggtgctgcgtgggtcagtgtaacaacgccataccagttgacacggtgctgactatgaaaaagcttcccatcacttacagcaacagaaaagagaacaaaggggggtacctgtgccactcttgcgctgaacagcgtattggccccctggcttttctgacagcctctcctgaacaggtgagggccatggaaagaactgttgagaacatcgtgcttccacgtcacgaagcgctcctcttcctggtgttctag

SEQ ID NO: 116878 - DNA, 1215 bp, synthetic construct
  misc_feature 1..1215: note = Description of Artificial Sequence: Synthetic coding sequence
  source 1..1215: mol_type = other DNA
atgaatgaggagcaggccgtgtctaaggtggacgggatcctgtctaattgtggtattgaaaaggagtctgacctgtgtgttctgaaccttatccggtatacagcgacaacgaagtgcagtccatcagtcgacccagaacgagtgctttggtccttgcgagaccatccactgctgcccgaggccgaggcctgtgtacggcagcatctgccagacctgtatgccgccgctggcggggtgaatatttgggccctggtcgccgccgtcgtgctgctcagtagcagtgtgaacgacatccagagactgttgttctgccttcggaggccgtcctcaaccgtcacaatgcccgacgtcactgagacattgtactgtatcgctgtgctgctgtacgccatgagagagaaagggatcaacatcagtaacaggatacattacaatattttttattgtctgtaccttcaggagaatagctgcacccaggccaccaaagtgaaagaagagccctccgtgtggcccggaaagaagacaatccagcttacccacgagcagcagctaatcctgaaccacaagatggagcccctgcaggtggtgaagattatggccttcgccgggaccggcaagacgagcacgctcgtgaagtatgccgaaaagtggagtcagagtcggttcttgtacgtgacctttaacaagtctatcgccaagcaggcagagcgcgtgttcccctccaacgtcatttgcaaaactttccattccatggcatacgggcacattggtagaaagtatcagagcaagaaaaagctgaatctgttcaagctgacccccttcatggtgaactctgttttagccgagggtaaaggcggctttatcagggcaaaactggtgtgcaagactttggaaaatttcttcgcatcagccgatgaggaacttactatcgaccacgtgcctatttggtgcaaaaattcccaaggccagagagtaatggtggagcagtccgagaagctcaacggagtgctggaggcatccaggctgtgggataatatgcggaagctgggcgaatgtacggaagaggcgcatcagatgacacacgacggctacctcaaactatggcagctcagtaagccttccctggcttcgtttgatgccatctttgtcgacgaagctcaggccggcgcacggcacggcgcccattgcggcgagcaccgtactgctcctgcctag

SEQ ID NO: 116879 - DNA, 576 bp, synthetic construct
  misc_feature 1..576: note = Description of Artificial Sequence: Synthetic coding sequence
  source 1..576: mol_type = other DNA
atggatcctaagcagaccacacttctctgcctggttctgtgtttggggcaaagaattcaggcacaggaaggtgacttccccatgccttttatctcagccaagagtagtccggtcattccgctagacgggtctgtcaagatccagtgccaagcgatcagggaggcttatctgacacaactaatgattattaagaattcaacgtatcgggagattggacgacgcctgaaattctggaatgaaacagacccagaattcgtaatcgaccacatggacgcaaataaggcagggagataccaatgtcagtatcgcattggacattacagatttaggtattctgacacactagagctggtggtcaccgatagcattcaccaggactatacaacacagaatctgatccgcatggcagttgcaggtctggtgctcgtcgccctgttggccatcctggttgagaactggcacagtcacacagcgctcaacaaggaggcctccgccgatgtggccgagccatcttggtcacagcagatgtgccagcctggactgacatttgcccgtactcccagtgtctgtaagtag

SEQ ID NO: 116880 - DNA, 537 bp, synthetic construct
  misc_feature 1..537: note = Description of Artificial Sequence: Synthetic coding sequence
  source 1..537: mol_type = other DNA
atggaccccaagcagacgactctattgtgcctaggcttatacggcaaaccctttctgagtgccgatcgtggattagttctgatgcctggggaaaacatttctcttacatgctccagcgcacacataccttttgatcggttctccttggccaaagagggggagctgagtcttccacagcaccagtctggcgaacatccagccaacttttctctgggtccagtggacttaaatgtctccggcatatataggtgctatggctggtataacaggtccccttatctttggagcttcccctcaaacgcactcgaactggtggttacagacagcatacatcaagattacaccacccagaacctgatccgcatggctgtggcaggtctggtgctggttgcactgctcgccatactcgtcgagaactggcattcacacaccgcacttaacaaggaggccagcgcggacgtggccgagccctcctggagccagcagatgtgccagccaggccttacgtttgcaaggacaccgtcggtctgcaagtag

SEQ ID NO: 116881 - DNA, 864 bp, synthetic construct
  misc_feature 1..864: note = Description of Artificial Sequence: Synthetic coding sequence
  source 1..864: mol_type = other DNA
atggaccctaagcagaccactctcctgtgtctcgttctgtgccttggacagaggatacaggctcaggagggggatttcccaatgcctttcatctctgctaagagttcacccgtcattccactggacggcagcgtgaagatacagtgccaggcgattcgagaggcctatcttacacagctaatgatcatcaagaattctacgtatcgggagattggacggcgcctcaagttctggaacgagaccgaccctgaatttgtgattgatcacatggatgccaacaaggctggacggtatcagtgccaatacaggattgggcattatcggtttcgttactcagacaccctcgaactcgtggtcactggactatacggaaagccctttctaagcgctgacaggggtctagtacttatgccaggtgaaaacattagcttgacttgctcctctgcgcatatcccgttcgatcgcttttcgctagcaaaagaaggggaactcagtctgcctcaacatcagagcggcgagcatcccgctaacttctcactggggcccgtggacctgaacgtgtccgggatctacaggtgttatggatggtacaaccggtctccctacctctggagctttccttccaatgccttggaactcgtagtgaccgacagtattcaccaagactacaccactcaaaacttgataaggatggcagtggccgggctggtcttggtcgccttgctggcgattctggtggagaattggcattcacacacggcattgaataaggaagcttccgctgacgtggctgagccgagttggagtcagcagatgtgccagccaggcctgacattcgcacggaccccaagtgtatgtaagtag

SEQ ID NO: 116882 - DNA, 828 bp, synthetic construct
  misc_feature 1..828: note = Description of Artificial Sequence: Synthetic coding sequence
  source 1..828: mol_type = other DNA
atggaccccaagcagactaccttgctgtgcctgggagactttcctatgccattcatttctgctaagtcctctcccgtgattcccttagatggttccgtgaaaattcagtgccaggccatccgcgaggcttatctgacgcaattgatgatcattaaaaattcaacctatcgggagatcggtcgaaggctcaagttttggaatgagacggatcccgaatttgttatcgatcatatggacgcaaataaggcaggacgctaccaatgccagtataggatcggacattataggttcagatatagcgatacgttggaattggtggtcaccggtctgtatggcaaacccttcctgagcgctgatcgcggcctcgtcctgatgcctggcgaaaatatctcccttacttgtagctccgcccatatccccttcgatcgcttttcgctagccaaggagggcgagctgagtttacctcaacatcagtctggggagcaccccgccaacttttctctgggcccagtggacctgaacgtcagcggcatatacaggtgctatgggtggtacaatcggagtccttatctgtggtcgttcccgagcaatgcactggaattagtggtcacagactcaatccaccaggactacaccacccaaaatctgattaggatggcagtggcagggttagtccttgtggctctactggccatactggtggagaattggcattcccacactgcccttaacaaggaggcctctgctgacgtagctgagccctcttggagccagcagatgtgtcagccaggtttaactttcgctcgaaccccatccgtatgcaaatag

SEQ ID NO: 116883 - DNA, 630 bp, synthetic construct
  misc_feature 1..630: note = Description of Artificial Sequence: Synthetic coding sequence
  source 1..630: mol_type = other DNA
atggaccctaaacagaccacgctgctgtgtctgggggacttccctatgccctttatctcagccaaatcttcgcccgtcattcccctggacggctcagttaagatccaatgccaggcaatccgagaggcctacctcacccagctgatgattatcaagaattccacctaccgagagattgggcggcgcttaaaattctggaatgaaactgatccggagtttgttatcgaccacatggatgcaaataaagcggggaggtaccaatgtcagtatcgaatcggccattacaggtttagatactccgacaccctggagttagtggtgaccggtctctatggaaaacccttcttgagtgccgacaggggcctggtgctgatgcccggcgaaaacataagccttacctgcagcagtgcccacattccgttcgacagattctcactcgctaaggagggggagctctcactccctcagcaccagagcggagagcaccctgccaacttttctctggggcccgtggatcttaacgtgagcggtatctaccggctgcaccccccacgactgcacgatgccgaactcgacccgcatggccgaggcagaaccggtcccaggggatctctgggccatacaggttag

SEQ ID NO: 116884 - DNA, 762 bp, synthetic construct
  misc_feature 1..762: note = Description of Artificial Sequence: Synthetic coding sequence
  source 1..762: mol_type = other DNA
atggatcccaagcagacaaccctgttgtgtctcggcgattttcctatgccattcatttctgccaagtctagtccggttattcctctggatgggtcagtcaagatacaatgccaggcgataagggaggcctatcttacccagctcatgatcatcaagaacagcacatatagagagatcggccggagattgaaattttggaatgagactgaccccgaattcgtcattgaccatatggatgcgaataaggcaggaaggtaccaatgccagtatcggatcggccattataggtttagatactccgacacactcgagctggtcgttaccgggttatacggtaaaccctttctttctgcggatcgagggctcgtgttgatgcctggcgagaacatcagtttgacttgttccagcgcccatatccctttcgataggttctcgctggctaaagaaggggagctcagcctcccccaacatcagagcggggagcatcccgccaatttttctctaggacccgttgacctcaatgtgagcggcatttatcgctgctatgactccatccatcaggattataccacacaaaacctgatcaggatggccgtggccggcctcgtgctggtcgctctgttagccatcctggtcgagaactggcacagtcacacggcactgaataaagaggcctcagccgacgttgccgagccgtcgtggtcccagcagatgtgtcagcccgggctgactttcgctcgtaccccttctgtgtgtaagtag

SEQ ID NO: 116885 - DNA, 798 bp, synthetic construct
  misc_feature 1..798: note = Description of Artificial Sequence: Synthetic coding sequence
  source 1..798: mol_type = other DNA
atggatccgaagcaaacgaccctcctgtgcctcgtgctctgtctgggccagcggattcaggcgcaggagggcgatttcccaatgcccttcatcagcgcaaaaagctcccccgtaataccgttagacgggagcgtcaagatccaatgccaggctatacgggaggcgtacttgacccagctaatgatcatcaagaatagtacatacagagagatcggaaggaggctgaaattttggaatgagacagatcccgagtttgttatagatcacatggacgctaataaggcaggccggtatcagtgtcagtataggattggccactacagattccgctatagcgataccctggagctggtcgtgaccggactgtacggaaaaccctttctgtcagctgatcgagggctcgtgctgatgcccggagagaacatctccctgacttgttcaagcgcgcacatccccttcgatcggttctcattggctaaggagggcgaactgtccctgcctcagcatcaatccggtgagcaccctgccaatttttcccttggaccggtggacttgaatgtctctggtatctaccgctgctacgactcaatccatcaggattacactacccagaacctgatccgtatggctgtcgcaggattggtcctcgtggctttacttgcaatattagtggagaattggcactctcatactgcacttaataaggaagcctcagccgacgtggccgaaccctcctggtcacagcagatgtgccagcccggtctgacgtttgctaggaccccttccgtgtgcaaatag

SEQ ID NO: 116886 - DNA, 540 bp, synthetic construct
  misc_feature 1..540: note = Description of Artificial Sequence: Synthetic coding sequence
  source 1..540: mol_type = other DNA
atggacccaaagcagaccacgctgctgtgcttgggtgactttccaatgcctttcatttctgcaaaaagctccccagtgattcctctggacggatctgtcaagattcagtgccaggcgatcagagaagcctatctcacccagcttatgatcataaagaatagtacctatcgggagattggtcggagactcaaattctggaatgagactgaccccgaatttgtaattgatcacatggatgctaataaggccggccgctatcagtgtcagtaccggataggtcattacaggtttcgatattccgacacactggagctggtggtgacggatagcatccaccaagactacaccactcaaaacctgattaggatggctgtggctggcttggtgctggttgctctgctcgccattttagtggaaaactggcacagtcacacagcgctaaataaggaagctagtgctgacgtggcagagcctagttggtcccaacaaatgtgccaacccgggctgacctttgcacgaacaccatctgtgtgcaagtag

SEQ ID NO: 116887 - DNA, 720 bp, synthetic construct
  misc_feature 1..720: note = Description of Artificial Sequence: Synthetic coding sequence
  source 1..720: mol_type = other DNA
atggacccaaaacaaaccacgctgctttgtcttgtcctgtgcttgggccagcggattcaggctcaagaaggcgattttcccatgccttttatcagtgcaaagagctcccccgtcatccccttggacggaagtgtcaagattcagtgtcaggctatccgtgaagcttacttaacacagcttatgattattaaaaatagcacatatcgcgagatcggacggaggttgaagttctggaacgaaaccgaccccgaattcgtgattgaccacatggacgcaaacaaggcagggcgataccagtgtcagtacagaattggacactaccgctttagatactccgacacattggagctcgtcgtaactggcctctacggcaaacccttcctgtcagccgacagagggctagtcctgatgccgggtgagaacatcagcctgacctgtagcagcgcccacatcccattcgataggttctcactggcgaaagaaggcgagctgagtttaccacagcaccaaagtggagagcaccctgccaatttcagcctgggacctgtcgatctcaatgtttccggtatttacaggtgctatgggtggtacaatcggtccccctatctgtggagcttccccagtaatgcgctggagttggtggtcacagggaggtacagacccgtgcagccttgcgtgtgggtgggctgcccaggaccgtgtcaccgcgccgggatttag

SEQ ID NO: 116888 - DNA, 774 bp, synthetic construct
  misc_feature 1..774: note = Description of Artificial Sequence: Synthetic coding sequence
  source 1..774: mol_type = other DNA
atggcacctgccatggagtctccgacactgctttgcgtcgctctcctgttctttgcccctgacggtgtcttggccgtcccccagaagcctaaagtgtccttgaaccccccgtggaatcgtatttttaaaggcgagaatgttactttgacttgtaatggtaacaacttttttgaggtgtcttccactaagtggtttcataatggatctctgtctgaggaaacaaattctagcttgaatatagttaatgcaaagtttgaagatagcggtgagtacaaatgtcagcaccaacaggtgaacgaaagtgagcccgtttatctcgaggttttctctgactggctgctgttacaggccagtgccgaagtggtaatggagggacaacctctctttctaagatgccatggctggcggaattgggacgtgtacaaggtcatctattacaaagatggcgaggctttgaaatactggtatgagaatcacaatatttctattacgaacgccacagttgaggactcggggacctattattgtaccggtaaagtttggcagctggactatgaatccgaacctttgaatattacggtcattaaagcccctagagagaaatactggttgcaattctttatccctctcctggtggtgatcctgtttgcggtcgatacaggattattcatctctactcagcagcaggtcacttttctgctcaaaatcaagcgaacgcgcaaggggtttagactgctgaatcctcacccgaaacccaaccccaaaaataattag

SEQ ID NO: 116889 - DNA, 261 bp, synthetic construct
  misc_feature 1..261: note = Description of Artificial Sequence: Synthetic coding sequence
  source 1..261: mol_type = other DNA
atgatcccagccgttgtgttgttactgctccttttggtggagcaggctgcagccctgggggaaccgcaactctgctatattctggatgcgatcctcttcctctatggcatcgtccttacactgctctattgccgattgaagatacaagttcgcaaggcagccatcacctcatacgagaagtcagacggtgtgtacactggcctctccacgagaaaccaagaaacctacgagacactcaagcatgaaaagcccccccagtag

SEQ ID NO: 116890 - DNA, 339 bp, synthetic construct
  misc_feature 1..339: note = Description of Artificial Sequence: Synthetic coding sequence
  source 1..339: mol_type = other DNA
atgattcccgctgtagtactcctcttgctgcttctggtggagcaggcagccgccttgggcgaacctcaactgtgctatatactagatgccattctgttcctgtatgggattgtcctgacacttctgtattgtcgattgaaaatacaggtgcgaaaggcagcaattaccagttacgaaaagagcgacggtgtctacacaatggaatctcccagcattacaagactggaatgctccggcatgatctgggctcattgtaatctgtgtttgctcggcagcagagactcacgcgcgtctccctcccgcgtcgctaagaccaccggaacaaccatgccttcctag

SEQ ID NO: 116891 - DNA, 792 bp, synthetic construct
  misc_feature 1..792: note = Description of Artificial Sequence: Synthetic coding sequence
  source 1..792: mol_type = other DNA
tagtgctcctttggcgtgcagctgatgggaaagtgggtaccatgggtgtctgtgtttcaggaggagacggtcacactgcattgcgaggtccttcacttgccaggctcgtcatccacccagtggtttttaaatggtaccgcaactcagacctctacccccagttatagaatcacaagcgcctctgtgaatgacagtggcgagtaccgctgtcagagaggtttgtccggtcgctccgacccaattcaattggagattcaccgcgggtggcttttattacaagtttcctctcgcgtctttatggagggagagccattggccttaagatgtcatgcctggaaggataagctggtatataacgtcctctactatcggaacggaaaggccttcaagttttttcattggaattccaatctgacaattctgaaaacaaatatctcccataatggaacttatcactgctctggtatggggaagcacagatacacatccgccgggatttcacagtatacagtaaaaggccttcagctacctactcccgtgtggtttcacgttctattctacctggcagttggcatcatgttcctcgtgaataccgtgctgtgggtcactatccgcaaggaattgaagcgcaaaaagaagtggaatctggagatcagtttagactccggacacgagaaaaaggtgatctccagcctacaagaggaccgccatttggaggaagagctgaagtgccaggaacaaaaggaggagcaactgcaggaaggagtgcaccgaaaggaaccacagggatag

SEQ ID NO: 116892 - DNA, 567 bp, synthetic construct
  misc_feature 1..567: note = Description of Artificial Sequence: Synthetic coding sequence
  source 1..567: mol_type = other DNA
atgtggtttctgaccacgctgcttctctggggctggctcctgctccaagtgagttctcgcgtctttatggaaggcgagcccctggcactccgctgtcacgcatggaaagacaagctagtttacaatgtcctctactatcgtaacgggaaggcgttcaaatttttccactggaattctaacctgacgatcttgaagaccaatatctcccacaacggcacctatcactgctccgggatggggaagcacaggtatacctccgccgggatctctcaatatacggtgaaggggcttcagcttccaactccggtttggtttcacgtgcttttctacctcgccgtcggaattatgttcctggtgaataccgtactgtgggtcactattcggaaggaactcaagaggaaaaaaaagtggaacctggagattagcctcgattctggacatgaaaaaaaagtaatcagctctctgcaggaagacagacatctggaggaggagctgaaatgtcaggaacagaaggaagagcagctccaggagggagtccatcggaaagagcctcaaggggccacttag

SEQ ID NO: 116893 - DNA, 843 bp, synthetic construct
  misc_feature 1..843: note = Description of Artificial Sequence: Synthetic coding sequence
  source 1..843: mol_type = other DNA
atgtggttcttgaccactctgctgctgtgggttccagttgacggccaggttgacacaacgaaggccgtgatcactctgcagccgccttgggtatcagtcttccaagaggaaaccgtgacactacactgcgaggttctacatctgccaggttcaagcagcacgcagtggtttctcaatggcaccgccactcaaacatcgacaccttcctatagaattacctccgcctctgttaacgactctggcgagtatcggtgccaacgagggctgagcggcagaagtgaccccatccaactggagatccacagagggtggttgctgctgcaggtttcctccagagtgtttatggaaggagaacctctggctctcagatgtcacgcatggaaagataaattggtgtacaacgtgctttactacaggaacgggaaggccttcaaatttttccattggaattccaacctgacaatccttaagaccaatatttctcacaacggaacctaccactgttccggtatggggaaacacaggtacacgtccgccggcataagtcagtacacagtcaaggggttacaacttcccacacccgtgtggttccatgttctattctacttggctgtgggaattatgttcctggttaacaccgtcctgtgggtgactatcaggaaggagctcaaacgaaaaaagaagtggaatttggaaatcagcttggactctggacatgaaaaaaaagttatctcttccctccaagaggaccgacacctcgaagaggagttgaaatgccaggaacagaaggaagaacagctccaagagggcgtccataggaaagagcctcagggggctacttag

SEQ ID NO: 116894 - DNA, 954 bp, synthetic construct
  misc_feature 1..954: note = Description of Artificial Sequence: Synthetic coding sequence
  source 1..954: mol_type = other DNA
atgactatggagacacaaatgagtcagaatgtgtgcccacggaacctttggctattgcagcccctgactgtccttctattgctagccagcgcggactctcaggcagcagccccacctaaggccgtgctgaagctggaaccgccttggataaacgtgctgcaggaagactctgttacacttacttgccagggcgctagaagccctgaatccgactccattcagtggttccataacggcaacttaatcccaactcatacacagcctagttatcggtttaaggctaataataatgactcaggcgagtatacctgccagaccgggcaaacaagcttgagcgaccccgtgcaccttaccgttcttagcgagtggctcgttttgcaaacccctcaccttgagtttcaagagggtgagaccattatgctccggtgccatagctggaaggataagcctctggttaaagtcacattttttcagaacggtaaaagccagaagttttctcacttggatcctacattcagcatcccccaagccaaccattcccactccggcgactatcactgtactgggaacatcggttacacactgttttcttccaagcctgttaccattaccgtgcaagtgcctagcatgggatcatcctcccccatgggtataatcgtagctgttgtgatagcaaccgctgttgccgcaattgttgccgcagtggtggccctgatatattgtcgaaagaagaggattagcgccaactcaactgatcccgtgaaggctgcccagtttgagccccctgggcgacagatgattgccatacgcaagcggcagctggaagaaaccaataacgactacgagaccgcagacggaggttacatgacgctcaatcccagagctccaactgacgatgacaagaacatttacctcacgttgccaccgaatgaccatgtcaactccaacaactag

SEQ ID NO: 116895 - DNA, 951 bp, synthetic construct
  misc_feature 1..951: note = Description of Artificial Sequence: Synthetic coding sequence
  source 1..951: mol_type = other DNA
atgacaatggagacccaaatgtcgcagaacgtgtgtccacgtaacctgtggttgctgcaaccactgacagtgctcctgctgctcgcaagcgcggactcacaggccgcaccaccaaaagccgtgctgaagttggaaccgccatggattaacgtgttacaggaagattccgtcacactgacctgccaaggtgcccgttctcccgagtctgattcaatacaatggttccacaacgggaatctaatccccactcacacacagccgtcgtaccgcttcaaggctaataacaatgacagtggagagtatacttgccaaaccgggcagacatcactgagcgatcccgtccacctgaccgttctgtcggagtggctggtcctgcagaccccccacttagagtttcaggaaggcgaaactatcatgctgcggtgccattcttggaaagataagccactggtaaaggtcacgttctttcaaaatggtaaatcacagaagtttagccacctggacccaactttcagtatacctcaggccaaccacagccattctggcgactatcattgcacggggaacatcggctacactttgtttagctccaaacccgttaccatcactgtgcaggtgccaagtatgggttccagcagccctatgggcataatagtggcagtcgtgatcgctacagccgtggctgccatcgttgccgcagtagttgctctaatctattgtcgcaagaaaaggatttcagcaaactctaccgaccccgtgaaggcagcccagttcgagccccctggcaggcagatgattgccataagaaaaaggcaattggaggagaccaacaatgattacgaaacagccgatggcggctatatgactttgaatcctagggctccaacggatgacgataaaaacatatatctgaccttacctcccaacgaccatgtgaactcgaacaattag

SEQ ID NO: 116896 - DNA, 876 bp, synthetic construct
  misc_feature 1..876: note = Description of Artificial Sequence: Synthetic coding sequence
  source 1..876: mol_type = other DNA
atgggcattctgagttttctccctgtgctggcgactgagtccgattgggcggactgtaagagcccccaaccatggggacatatgctgctctggaccgctgtcctgttcctggcccccgttgcgggcactcctgcggcccctccaaaggctgtcctcaagctggagccacagtggattaacgttttgcaggaggatagcgtgaccctcacctgtcgaggaacacacagccctgagtccgattctatccaatggttccataacggcaacctcattccaacccacacccaacctagctaccggttcaaggccaacaataatgacagcggcgaatacacatgtcagactggtcaaacttccctctctgacccagtccacctgaccgtgctgtcagagtggctcgtcctgcaaaccccacacctcgaattccaagagggagagactatagtcttaagatgccacagctggaaggacaagcctctggtcaaagtgactttttttcagaatggaaagtctaaaaaattctcccggagcgaccctaattttagcatccctcaggccaatcatagtcatagcggggactatcactgtactggaaatatcggctacaccctgtattcctcaaaacccgtcacaattacagtccaggctcctagttcctcccctatggggattattgtcgcagttgtgactggaattgccgtcgcagctatcgtcgctgcggtcgtggcccttatttactgcagaaaaaaacggatttccgctaaccctacaaatccagatgaagcagacaaagtgggtgccgagaacacgatcacatacagtctcctgatgcaccctgacgctctggaggaacctgatgaccagaacagaatttag

SEQ ID NO: 116897 - DNA, 933 bp, synthetic construct
  misc_feature 1..933: note = Description of Artificial Sequence: Synthetic coding sequence
  source 1..933: mol_type = other DNA
atgggcattctatcttttcttcctgttctggctaccgaatctgattgggccgactgcaagtcaccgcagccctgggggcacatgctgctgtggaccgctgtcttatttctggctcccgtggccggtaccccggcggcgccaccaaaggcagtgctgaaattggaaccccaatggattaatgtgttgcaggaggattctgttactttaacttgccgcggcacacactctcctgaaagcgacagtatccagtggttccataatggcaacctgatcccgacccatacacagccgtcctaccggttcaaagccaacaataacgactctggcgagtatacctgccagacaggccaaactagtttatctgaccctgtccacctcactgtcctcagcgaatggttggtgcttcagacgccccatctggaattccaggaaggagaaaccatcgtcctgcgatgccactcttggaaggataaacccctggtgaaggtgaccttcttccaaaatggaaagtcaaagaaattctctcgcagtgatcccaattttagcatacctcaggcaaatcatagtcacagcggggattatcattgtacaggaaatattggttataccctgtattctagtaaaccagtcacaatcaccgtgcaagctccatcctcttccccgatggggattatcgtggccgtcgtgaccggcattgccgtcgcagctattgttgctgctgtggtggcgctgatatattgccggaagaaacgcatttcggcgctcccaggttacccggagtgtcgcgaaatgggcgagacccttcccgagaaacccgccaaccccacaaacccggatgaggctgataaggtcggggccgagaatacaatcacatatagcctgctgatgcatcctgatgcactggaagaacctgacgatcagaataggatctag

SEQ ID NO: 116898 - DNA, 912 bp, synthetic construct
  misc_feature 1..912: note = Description of Artificial Sequence: Synthetic coding sequence
  source 1..912: mol_type = other DNA
atggggattctcagcttcctccccgtgctagcgaccgaatctgactgggcagattgtaaatcccctcagccttgggggcacatgcttttgtggacagcagtgttgtttcttgctgccccccctaaggctgtcctgaagctcgaaccacagtggataaatgtgctccaagaggacagcgtgactctcacatgtcgggggacacatagccccgaaagtgactcgattcagtggttccacaatggaaatttaatcccaacgcatacacaaccttcataccgcttcaaagccaataataatgacagcggcgaatacacgtgtcagactggccagacatcgttaagcgatccagttcatttgactgtgttgtcagagtggttggtgttgcagacaccccatcttgagttccaggagggagagacaatagtgcttaggtgccactcatggaaagataaaccattggtgaaagttactttctttcagaatgggaaatctaagaagttctcacgttccgatcccaacttttccataccacaggccaaccactctcacagtggagattaccactgcacgggcaatatcggatacacactctacagctcaaagccggtgactataactgtccaggccccatcctcctctcccatgggcatcatcgtggctgtggtgaccggcatagccgtggccgcgatagtagcagccgtcgtagctcttatctactgtaggaagaagaggatcagcgcattacccggctatcctgagtgccgcgaaatgggagagacactgcctgagaagcccgcaaaccctactaatccagatgaggcagacaaagtgggcgccgaaaataccattacatactctcttctcatgcatcccgatgccctggaggaacctgacgaccagaacaggatttag

SEQ ID NO: 116899 - DNA, 912 bp, synthetic construct
  misc_feature 1..912: note = Description of Artificial Sequence: Synthetic coding sequence
  source 1..912: mol_type = other DNA
atgggcatactgtcctttcttcccgtcctggccacagagtccgattgggcagattgcaaatcacctcagccatggggccacatgttactttggactgcagtgttatttctcgccgctccaccgaaggcggttctcaaattggaacctcagtggataaatgttttgcaggaggacagtgtcactctcacatgtcggggcacccatagcccagaatcagatagcattcagtggtttcacaatggaaacctgatcccgacgcatactcagccttcttacaggttcaaggcgaacaacaatgattctggggagtacacttgccagacaggccagaccagtctgtctgaccccgtgcacttaacagttctgagcgaatggctggtgttgcaaacacctcacctggagttccaggaaggagaaactattgtgctgcggtgtcatagttggaaagacaagccactcgtgaaagtgaccttcttccagaacgggaaatcaaagaaattttcacgaagcgatcctaatttttctatcccccaggctaaccatagtcactccggagactatcactgcactggtaatattgggtacaccctctatagctccaaaccggtcacgatcactgtgcaagcgccatcaagcagccccatggggattatcgttgccgttgttacgggaatcgcagtcgcggccatcgtagcagcagtggttgcattaatatactgccgtaaaaaaagaatctcagccctgcccggatacccggaatgccgggaaatgggcgaaacactccctgagaaaccggccaaccctacgaatcccgatgaagctgacaaagttggggccgagaatacaattacgtatagtctcttaatgcatccggacgcccttgaggagcctgacgaccagaaccgtatttag

SEQ ID NO: 116900 - DNA, 933 bp, synthetic construct
  misc_feature 1..933: note = Description of Artificial Sequence: Synthetic coding sequence
  source 1..933: mol_type = other DNA
atggggatccttagttttctccctgttctggcaaccgagtcagactgggctgactgcaagagcccacagccatggggccacatgctgctgtggaccgccgttctgttcctagcacccgttgcagggacacccgcggccccaccaaaagctgtgctgaaacttgaaccgcaatggatcaatgttctacaggaagactcagtgactctgacttgtagggggacacatagccctgagtcagactctattcaatggttccacaatgggaacttgattccaacccacacgcagcccagctataggtttaaggcaaataacaacgatagcggagagtatacctgccagacaggtcagacttccttgtccgatcccgtccatctgaccgtcctatcagagtggcttgtgctccagacaccgcacttggaatttcaggagggagagaccatcgtcctgcgatgccattcatggaaggacaagcccctggttaaagtgactttcttccagaacggcaagtcaaaaaagttcagccgatctgacccaaattttagtatcccgcaagctaatcactcccactcaggggactaccattgtacggggaatattgggtacactttgtattcgtccaaacccgtcactatcactgtacaagctccatcttctagcccaatgggcatcattgtggctgtcgtgaccgggattgcggtagccgccatagtggctgccgttgtcgcactgatctattgcaggaagaagcgcatcagcgcattacctggatatcccgaatgtcgggaaatgggcgagacgttgccagaaaagccagcaaaccccaccaaccccgatgaggcagataaggtcggggccgagaacactattacttactccctgctcatgcatccagacgcgctggaagagcctgacgaccagaaccggatctag

SEQ ID NO: 116901 - DNA, 876 bp, synthetic construct
  misc_feature 1..876: note = Description of Artificial Sequence: Synthetic coding sequence
  source 1..876: mol_type = other DNA
atggggattctgtcgttcctgcctgtgttggctaccgaatcagactgggcagattgcaaaagcccccaaccttggggtcacatgctcctctggaccgcagtgttattcctggctcctgtggcgggtactcctgccgcccccccaaaggctgtgctgaaactggagccacagtggatcaatgtcttgcaggaggattctgtaaccctgacctgtcgagggactcattctccggagtccgatagtattcaatggttccacaatggcaatttaatcccaacccacactcagccatcttacaggttcaaagcaaataataatgattctggtgagtacacctgtcaaacaggccagactagtttgtccgatccagtgcacctcaccgtcctctcagagtggctcgttcttcagacgcctcatcttgaatttcaggagggagagaccattgtccttcggtgccactcctggaaagacaagccactggtcaaagtgaccttctttcagaatgggaagtcaaaaaagttcagccgcagcgaccctaacttctcaattccacaggcgaaccattctcactccggcgactatcattgcactggcaacatcgggtatacactgtactcaagcaagccagtgactatcacagttcaagcccccagttcctcccccatgggaattatcgtggcggttgttacaggaatcgccgtggctgcaatcgtcgctgctgtggtggccctcatttactgccgcaagaaacgcatttctgccaacccgactaaccccgacgaggctgacaaagtcggtgccgaaaacaccatcacgtactctctcttgatgcatcctgatgcactggaagaacccgacgaccaaaaccgcatctag

SEQ ID NO: 116902 - DNA, 705 bp, synthetic construct
  misc_feature 1..705: note = Description of Artificial Sequence: Synthetic coding sequence
  source 1..705: mol_type = other DNA
atggggattctttcatttctgcctgtcctggctaccgaatcggactgggcagattgcaagagtccccagccatggggacacatgctgctctggactgccgtgctgttcctggctcccgtggctggaacaccagcagctccacctaaagctgtactgaaacttgaacctcagtggataaacgttctgcaagaggattctgttaccctcacttgtaggggaacgcactctcccgaatctgattccattcagtggtttcataatggcaacctgatcccaacccacacacagccctcttatagattcaaagccaacaacaacgatagtggcgagtatacatgtcagacaggacagaccagtctttccgaccctgtgcatttgactgtgctttccgaatggctggttcttcagacccctcacctggaattccaagagggggagactatcgttctgagatgtcatagctggaaggacaaaccactcgtgaaagtcactttctttcagaacggcaagtcaaaaaaattttcgcggtccgaccccaacttttccatacctcaggccaatcattcccactctggtgattatcactgtactgggaacataggatacaccctgtactcaagtaagcccgtgacaattaccgtccaggggcctagattaagaacggcggccaaacagagctcattggtgggggcagaagtgccgtag

SEQ ID NO: 116903 - DNA, 771 bp, synthetic construct
  misc_feature 1..771: note = Description of Artificial Sequence: Synthetic coding sequence
  source 1..771: mol_type = other DNA
atgggtattttgtcattcctgcctgtcctggcaacagagtctgactgggcagactgtaagagccctcagccatggggccacatgttattgtggaccgcagtgctgttcctgggagagagcggtcccccagctgcacccccgaaagctgtccttaaactggagccccagtggattaacgtgttgcaggaggacagcgtcacccttacttgccggggcacgcactctccagaatctgactcaatccagtggttccacaatgggaaccttattcccacccacacacaaccctcatataggttcaaagcaaataataatgactctggtgaatatacctgtcagacaggccaaacctcccttagtgacccagtccacttgaccgtgctgtccgagtggctagttctgcagacgcctcacctggaatttcaggaaggcgagacaatcgtattaagatgccactcttggaaagacaaaccacttgtgaaggttaccttttttcagaatggaaagagtaaaaaattttcgcggtcggacccgaatttctccatccctcaggctaatcattcccattctggtgactatcactgtaccgggaacattggttacactctgtactccagcaagcctgtcaccatcaccgtgcaagctccgagttcatcccccatgggcatcatcgttgctgtggtaacgggaattgcagtagccgctattgtggccgctgtggttgcgctaatctattgcagaaagaagagaatctccgttagcacctggtag

SEQ ID NO: 116904 - DNA, 765 bp, synthetic construct
  misc_feature 1..765: note = Description of Artificial Sequence: Synthetic coding sequence
  source 1..765: mol_type = other DNA
atgtggcagctgctcctccctactgctctattgcttctggtgagcgccggtatgagaaccgaggatcttccaaaggctgttgtgtttctagaaccacagtggtaccgcgtattggagaaggattcagttacgctcaaatgccagggggcctattctcccgaggataacagtacccagtggttccacaatgagagcctgatttccagtcaggccagctcctattttatagacgcggccaccgtcgacgattcgggagaatatcgatgccagaccaatctttccacactttccgatccagtccagctcgaagtgcacataggctggctgctgctacaggccccaaggtgggtgttcaaggaagaggatcccatacaccttcgctgtcacagctggaagaatacagccctccacaaggttacctatcttcagaatggaaaggggagaaagtacttccaccacaacagtgatttctacatcccaaaggcaaccttgaaggacagcggatcgtatttctgcagagggttattcgggtcaaaaaatgtctcatcggaaaccgttaacattaccatcacccagggcctcgcggtctccaccataagttctttttttccaccaggttatcaagtatccttttgcctagtgatggtgcttctttttgctgtcgatactggactgtatttcagtgttaagacaaacatcaggtcatccacccgggattggaaggaccataagttcaaatggcggaaggacccccaggataaatag

SEQ ID NO: 116905 - DNA, 873 bp, synthetic construct
  misc_feature 1..873: note = Description of Artificial Sequence: Synthetic coding sequence
  source 1..873: mol_type = other DNA
atgggcgggggcgccggggaaagactgtttacatcttcatgtctggtcggccttgtccccttggggctccgcatatccctggtgacctgcccccttcagtgcggtattatgtggcagctgctgctgccgaccgcgctgcttctgctggtcagcgccggaatgagaaccgaggatctccccaaggcagtcgtgttcctggaacctcagtggtatcgggtcctggagaaagatagcgtcacactcaagtgtcaaggcgcgtactccccagaagacaattctacccaatggttccacaacgaatctctaattagcagccaggccagcagctatttcattgatgcagcaacagtggacgatagcggggagtatcggtgccagacaaatctgagcactctttccgaccctgtgcagcttgaggtccacatcggatggctgctactgcaggctccccggtgggtattcaaggaagaagaccctatccaccttcgctgccactcttggaagaacaccgctctccataaggtgacttatctgcaaaatggaaaaggccgaaagtattttcatcataactctgatttttatattcccaaggccactctgaaggactctggatcctatttttgtcgaggactcttcgggagcaagaatgttagctccgagactgtgaacatcaccatcacacaggggttagcggtgagcactattagttcattttttcctcccgggtaccaggttagcttctgcctggtcatggtgctactctttgctgtggacactggattgtatttctcagtgaaaacaaacattcgctccagcacaagagattggaaggaccacaaattcaaatggaggaaggatcctcaggataagtag

SEQ ID NO: 116906 - DNA, 816 bp, synthetic construct
  misc_feature 1..816: note = Description of Artificial Sequence: Synthetic coding sequence
  source 1..816: mol_type = other DNA
tgaccgctgggtctcaggatttctctggtgacttgtccgttacagtgcggtatcatgtggcaattgctgctgccaactgctcttttactcctcgtgagcgccggaatgcgcacagacctccccaaagctgtcgtgtttttggaaccccagtggtaccgagtgctcgagaaagattctgtcaccttaaagtgccagggcgcgtactcgccagaggataactctacccagtggtttcacaatgaatctctgatcagctctcaggcgagttcttatttcatcgacgctgcgacagtcgatgactccggagagtacagatgccagaccaacttgagcacgttaagcgatccagtgcaattggaggtccacatcggctggttgctgttgcaggccccacggtgggtgttcaaagaggaggatcccattcaccttagatgtcattcctggaaaaataccgctctgcataaggtgacctatctacagaacgggaagggcagaaaatacttccaccataatagcgatttctacattcccaaggcaaccctgaaggatagcgggtcatacttttgtaggggcctgttcggaagtaagaatgtgagtagtgagacggtgaacatcactatcacacaggggctcgccgtatccacaataagcagcttttttccccctggataccaggtgtcattctgcttggtgatggtactcttgttcgccgtcgatactggactatatttctccgttaaaacaaatataagatcatctacacgggattggaaggaccataaatttaagtggcgtaaggatccgcaggacaagtag

SEQ ID NO: 116907 - DNA, 765 bp, synthetic construct
  misc_feature 1..765: note = Description of Artificial Sequence: Synthetic coding sequence
  source 1..765: mol_type = other DNA
atgtggcagctgttattacccacagcactgctgctattagtgtcagccggtatgcgcaccgaggacttgccaaaggcggtggttttcttggagcctcagtggtaccgagtgctggagaaagattccgtgacactcaagtgccagggggcctacagtccagaggacaatagtacccaatggttccacaatgagagtctcatctccagtcaggcatcctcatatttcatcgacgcggccacggtcgatgacagcggcgaatatagatgtcagactaacctcagcacgctctccgaccctgttcagctggaggtccatatcggatggctgctgctacaggccccccgctgggtctttaaggaggaagatcccatccatttgcggtgtcatagttggaagaacacagccctgcacaaggtcacgtacttacagaacggcaaaggtcggaaatatttccaccataacagcgatttttatataccaaaagcaaccctcaaagattccgggtcatatttttgtagaggtctgtttggtagcaagaatgtgagtagcgagactgttaacatcacaatcacccaagggctagctgtgagtacaataagttcgttttttccaccgggctatcaggtctcattctgcctcgtgatggttctgttattcgccgtcgacaccggcctgtattttagcgtgaaaaccaacattcgcagcagtaccagagactggaaggatcacaaattcaagtggcgcaaggacccgcaggacaaatag

SEQ ID NO: 116908 - DNA, 318 bp, synthetic construct
  misc_feature 1..318: note = Description of Artificial Sequence: Synthetic coding sequence
  source 1..318: mol_type = other DNA
atgtggcagctgctgcttccaacagccttactcctccttgtgtcagccggcatgaggacggacctgcccaaggccgtggtgtttctcgagccgcagtggtacagggttctggagaaggactctgtcacgctgaaatgtcagggcgcctattctcctgaagacaacagcactcagtggttccataacgagtctttgatctcgtcacaggcatcttcctattttattgacgccgccaccgtggatgattccggagagtatcgttgtcagaccaacttgagcaccctgtccgaccctgtgcagctggaggtacacatttag

SEQ ID NO: 116909 - DNA, 870 bp, synthetic construct
  misc_feature 1..870: note = Description of Artificial Sequence: Synthetic coding sequence
  source 1..870: mol_type = other DNA
atgggtggaggtgctggggagagattatttacgtcttcatgtctggtcggcctggtcccactgggcctgcgaatttccctggtgacctgcccactccagtgtgggatcatgtggcaactcctcttacccactgctctgctacttctggtctcggcggggatgcgcacagatctgcccaaggcagtagtatttcttgagccccagtggtatcgcgttcttgaaaaagacagcgtgactttgaagtgccagggtgcgtacagtcctgaggataatagtacccagtggtttcacaatgagtctctgatcagctcccaggcgagctcctatttcatcgacgctgccactgttgatgatagcggagaatatcgctgccagaccaacttgtcaaccctgtctgatccagtgcaactggaagtgcacattggatggcttcttctacaggctcccaggtgggtgttcaaagaggaggacccaatccacctccgttgccactcatggaaaaataccgccctgcacaaagtgacctatctgcagaatggaaagggtcggaagtacttccaccacaactccgatttctacattccgaaagcgactttaaaggactctgggagttacttttgtcggggtttgtttggcagtaaaaatgtgtcaagtgagacggtgaatattaccatcacccagggactggcagtttccacgatttcaagttttttcccccctggatatcaagtgtccttctgcctggtaatggttttgctcttcgccgtcgatactggcctgtactttagtgtaaagactaacatccggagctcaaccagggactggaaagaccacaaatttaagtggaggaaggatccacaggataagtag

SEQ ID NO: 116910 - DNA, 765 bp, synthetic construct
  misc_feature 1..765: note = Description of Artificial Sequence: Synthetic coding sequence
  source 1..765: mol_type = other DNA
atgtggcagctactgctgccaacagccttgctcctactcgttagcgccggtatgcgcacggaagatctgccaaaggccgtggtatttctagaaccgcagtggtacagggtgttagaaaaagattccgtcactctgaagtgtcagggcgcctacagccccgaggacaattctacccagtggttccacaacgaaagcctgataagtagtcaggcttcctcatacttcatagatgccgccactgtcgacgattctggtgaataccgctgtcagaccaacctttctacattgagtgatcccgtccagctggaggtacacattggctggcttttgttgcaggctccccgctgggtgttcaaagaagaagatcctatccatctgcgctgccacagttggaagaacaccgctttgcacaaagtcacttacctgcagaatggaaaagggcgcaagtactttcatcataactccgatttctacatacctaaggccacactgaaagatagcggcagctacttctgcaggggcctgtttggctcaaagaacgtgagttcggagaccgtaaacattaccatcacgcagggactggcagtgtcgacaattagtagcttctttccccctgggtatcaagtttctttttgccttgtgatggtgcttctattcgccgtcgatactggcctttatttttccgtgaaaactaatataaggagtagtacgcgagactggaaggatcataaattcaaatggcgcaaggatcctcaggataagtag

SEQ ID NO: 116911 - DNA, 702 bp, synthetic construct
  misc_feature 1..702: note = Description of Artificial Sequence: Synthetic coding sequence
  source 1..702: mol_type = other DNA
atgtggcagctgctcctacctaccgcgctcctgcttcttgtgtctgcaggcatgcggactgaagacctgccaaaggctgtagtattcttggagccgcagtggtactcagtactggagaaagactcggtgacactcaagtgtcagggggcatactccccggaggataattccactcagtggtttcacaacgaaaacctgatcagctcccaggcctccagctatttcattgatgctgctacagtgaacgactcaggcgagtatagatgccagactaatctgtccaccctttcagaccccgtgcagctcgaagtccatattgggtggttattgctgcaagcccccaggtgggtgttcaaggaggaggaccccattcatctgcggtgtcacagttggaagaacactgctctccacaaggtgacctatcttcaaaacggtaaggatcgcaagtattttcatcacaacagtgatttccacattcccaaagccaccctaaaggactccggttcttacttttgcagaggactcgtggggtccaagaatgtcagcagtgagacagtgaacattactataacgcagggcttggcagtttctaccatttcttcattcagtccgcctggctaccaggtctctttctgtctggttatggtcctgttattcgctgtggacacggggctgtattttagcgtaaaaaccaatatctag

SEQ ID NO: 116912 - DNA, 702 bp, synthetic construct
  misc_feature 1..702: note = Description of Artificial Sequence: Synthetic coding sequence
  source 1..702: mol_type = other DNA
atgtggcagctgttgttgccgacagctttgcttcttctggtgtcagcgggaatgcggactgaagacctacctaaagcggtagtgtttttagagcctcagtggtatagcgtcttggaaaaggatagcgtaaccctgaagtgtcagggtgcctactccccggaggacaattcaacacaatggttccacaacgaaaacctgatctcgagccaggccagctcctacttcatcgatgccgccaccgtgaatgacagcggcgagtatcggtgtcaaacgaatctgagtaccctgagcgaccccgtacagctggaggttcatataggctggctacttctacaggcaccacgctgggtctttaaagaggaagatcctattcatctgagatgtcactcttggaaaaataccgcgttgcacaaagtaacctatctccaaaatggtaaagatcggaaatattttcaccataattctgacttccacataccaaaagccaccctgaaagatagcggcagctacttttgtagagggctcgtaggctctaaaaacgtcagttccgagaccgttaacattacaatcacccaggggctggcggtgagcactatctcgagcttcagcccccccggttatcaggtttccttttgcctcgtcatggtgctgttgttcgccgttgacacaggcctgtatttctctgttaaaaccaacatctag

SEQ ID NO: 116913 - DNA, 2076 bp, synthetic construct
  misc_feature 1..2076: note = Description of Artificial Sequence: Synthetic coding sequence
  source 1..2076: mol_type = other DNA
atggaaatcgccccccaagaagcgccccctgtacctggggccgacggagacattgaagaggcccccgcggaggctggttcccccagtcctgcttccccaccggccgatggcaggctgaaggccgcggccaagagagttacttttcctagtgacgaagatatcgtgagtggtgcagtagagcccaaggatccctggcgtcacgcccagaacgtgactgttgatgaagtcatcggcgcttataaacaggcctgccagaagctgaattgtagacaaattccaaagctcctgaggcagctgcaggaattcaccgatttgggccacaggctggactgtctggatctgaagggagagaagcttgactacaaaacatgcgaagctctcgaagaagtcttcaaacggctccagttcaaggtggtggaccttgagcaaacgaatttggatgaggatggagcttctgccctgtttgacatgatcgaatactacgaatccgccacacatctgaacatctcctttaataaacatatcggcacaagggggtggcaggccgccgcgcatatgatgaggaagacctcctgccttcagtatttggacgcacgaaacaccccactgttagaccactcagccccatttgtcgcaagagccctgcgcattcgctctagcctggccgttctccacctagagaacgcctccctcagcggtcgccccctgatgttgctggcaacggcactcaaaatgaacatgaacctccgggagctgtacctggctgataacaagttaaacggcctgcaggattcagcacagcttggtaatctgctgaagttcaactgttctctgcagatccttgacctgagaaacaaccatgtcctggatagtgggttggcttatatatgcgaaggactcaaagaacagcgaaaagggctggtgaccctagtgctttggaataaccagttaactcataccgggatggcttttctgggtatgacactgccacacacacaatcactcgaaacactaaacctggggcacaaccccatcgggaacgagggcgtgcgccatctcaagaacggcttgatttccaaccgtagcgtcctgcgactgggtctggcatctacgaagttgacctgtgagggcgccgtagctgtggcagaattcatcgctgagtccccccgtctcttgcggctcgacttgagggagaatgagataaaaacgggtgggctgatggcactgagtctggcattaaaggttaaccattcgttgctccggctcgacctggatagagaaccaaaaaaggaagccgttaagtctttcattgaaacacagaaagcgctgctagctgaaatacaaaatggctgtaaaagaaacctggtgcttgcaagggagcgcgaggagaaagaacaacctcctcaattgagtgcctccatgcctgagacgacagccaccgagccacaacctgacgatgagccagccgcaggcgtccaaaatggtgcacctagccccgccccctccccggacagcgatagcgacagcgattctgacggtgaagaagaggaagaagaggagggcgaaagagacgaaacaccgtgtccagcccttgtacccccaaccgacagcctcggtccaggtgaccgctcgcctcccggctctccatctacacctaccgaacagaggatttcggtcagttctcctgggagggggcataaggtgttcgtagtgacaagagtggaaagcccaccagagagagctgaaccccccgcgtcaccgacaccgccgtcccctcctccgcccccttccccccctgcatctccctcattgcccccagccggcgccatcgacacccgggataccgggagttctgaacctcagcctccaccagagcctccacgttctggaccacccctgccaaatggcctcaagcccgagttcgcgctggccttgccacccgagcctcctcctggcccggaagttaagggcggttcatgcggcctggagcatgagctatcttgctccaagaatgaaaaagaactggaagagctgctccttgaagcctcccaggagtcgggccaagagactctgtag

SEQ ID NO: 116914 - DNA, 459 bp, synthetic construct
  misc_feature 1..459: note = Description of Artificial Sequence: Synthetic coding sequence
  source 1..459: mol_type = other DNA
atgggggtgcctcgccctcaaccatgggcccttggtctgctgctgttccttctgccaggttccctgggtgcggagtctcacctgtcgctgctttatcatctgaccgccgtgtcttctcctgctccaggaacccctgctttctgggtgtcaggctggttggggccccagcagtatctatcatacaattctctccgtggtgaggctgagccctgcggcgcatgggtgtgggagaatcaggtgtcttggtactgggaaaaagagacaacagacttaagaattaaggaaaaactgtttttggaagcctttaaggcgttgggtggtaagggaccgtacactcttcaggggctgttaggctgtgagttgggcccggataacacaagcgtgcctactgcctgcgggagtacctggaggggcgcagccgagacttggtcaggtcgatcaccaccaccatgcgcatag

SEQ ID NO: 116915 - DNA, 1098 bp, synthetic construct
  misc_feature 1..1098: note = Description of Artificial Sequence: Synthetic coding sequence
  source 1..1098: mol_type = other DNA
atgggcgttcctcgtccacagccctgggctctgggactgctcttatttttgctccccggctcattgggcgccgaatcccacctgtccttgctgtaccacttaacggctgtgtcgtcgcccgctcccggaacaccagccttctgggtctccggctggctgggacctcaacagtatttatcttataatagtctgcggggtgaggccgaaccgtgtggggcctgggtgtgggagaaccaggtaagttggtactgggaaaaggaaaccactgacctgcggatcaaggagaagctgtttcttgaggctttcaaggcactgggaggaaaaggcccctacaccttgcaaggtctcctggggtgcgagctcggaccggacaatacatctgtccccacagctaaatttgctttgaatggcgaggagtttatgaattttgatctcaagcagggcacatggggcggtgactggccggaagccctggcaatatctcagagatggcagcagcaggataaggctgccaataaggaactgacattcctgttatttagttgccctcaccggctgcgagagcacctggaacggggtaggggcaacctcgagtggaaggaacccccctccatgaggcttaaggccagaccctccagccctggctttagcgtgctgacttgctcagccttttcattttacccacccgaactgcagttgcggtttctcaggaatgggttagccgccggcactggccagggagactttggccctaacagcgatggcagtttccatgcttcttcctccttgaccgtaaagagcggcgatgagcatcactactgctgcatagtgcaacacgccggcctggcccagcctctgcgagtagagctggaatcacctgcaaagagcagcgtactggtggtgggtattgtgatcggggttctgctgctgacggccgcagccgtgggaggcgcgctactgtggaggcgcatgcgtagtggcttacctgccccatggatctcacttaggggagatgacacaggggttctgcttccaaccccaggcgaggcacaagacgctgatttgaaggacgtcaacgtgattcccgccacagcttag

SEQ ID NO: 116916 - DNA, 708 bp, synthetic construct
  misc_feature 1..708: note = Description of Artificial Sequence: Synthetic coding sequence
  source 1..708: mol_type = other DNA
atgggcgtcccacggccgcagccttgggccctgggactcctgctcttcttgttgcctggatccctcggggcagagtctcacctcagcctactttaccatctgacggccgtctcatcccctgctcctgggacaccagcattctgggtgagtggttggttagggccgcaacaatacctgagctacaatagtctgagaggcgaggccgagccctgcggggcttgggtttgggaaaaccaggtcagttggtactgggagaaggagacaaccgacctcaggattaaggagaagctctttctggaagcttttaaggcgttgggtggaaaggggccatatacactgcaggggcttctcggttgtgagctgggtccggacaataccagtgtaccaacagccaaatttgccctcaacggtgaagaatttatgaattttgacctaaagcaggggacgtggggtggagactggccagaggccttagctatatctcagaggtggcagcagcaagacaaggccgctaacaaggagttaacattcctgctgttcagttgtcctcaccggctgagggagcacctcgaacgtggacggggaaatctggagtggaagggctgttggactaagatcgatacttcttggggctgtgctcagatatttattccaagtgcaaccaaggagaaactgcgcctgaatcagagcccaccaccttgcgcttag

SEQ ID NO: 116917 - DNA, 1734 bp, synthetic construct
  misc_feature 1..1734: note = Description of Artificial Sequence: Synthetic coding sequence
  source 1..1734: mol_type = other DNA
atggatggcgaagcgactgtgaagcccggtgaacagaaagaggtagtgaggagaggtagggaggttgattacagccggctgattgcaggcacccttcctcagtcccatgtgacatcgagaagggctgggtggaaaatgccactgtttctgattctgtgtttattgcaggggagtagtttcgcgctgccccaaaagaggccacacccgcgctggctgtgggagggctctctgccgtctcgcactcatctgagggccatggggactctcagaccctcttcacccttgtgctggagagaagagtcttcgtttgccgctcccaacagcctgaagggttcacgcctcgtgagtggggagcctggtggcgcagtcactattcaatgtcactacgcgccaagctcggtgaaccgccaccaacgcaagtattggtgcaggctgggtcctcctcggtggatctgtcaaacaatcgtttcgacaaatcagtatactcaccacaggtaccgcgatagggtggcgctcaccgactttcctcagcggggactcttcgtagtgcggctgagccagctatcccccgatgatattggttgttatttatgtggcatcggtagtgagaataatatgctgtttctgagcatgaacctgacgatcagcgcagggccagcatctacactgccaactgcaacccctgccgccggcgaacttactatgaggagttacgggaccgcgtcacctgtcgccaatcggtggacacctgggacaacccagacgcttggacaagggaccgcctgggacacagtcgcttctacccctgggacatctaagaccacagcatccgccgaaggcagaagaacacctggcgctacccgacctgctgcccccggcacagggtcttgggcggaaggcagcgtcaaagctcctgcccccataccagaaagtccgccatcaaagtcaaggtcaatgtccaatactacagagggcgtctgggagggcaccaggtcgagcgtcacaaatcgggctcgggcgtccaaagaccggcgcgaaatgaccacaaccaaggccgaccgccctcgggaagacatcgagggggtcaggatcgctttggacgccgccaagaaagtccttggcacaattggtccccccgcccttgtgtcagaaaccttggcctgggagatactccctcaggctacccctgtgtccaaacagcagagccaaggcagtattggcgagaccaccccagccgccggcatgtggactctggggactcccgccgccgatgtgtggatactcggcaccccggctgcagacgtgtggacatcgatggaggctgcaagtggcgaaggatcggccgctggggaccttgacgccgcgacaggcgatcgcggacctcaggcgacgttgtcacagacccccgctgtcggaccttgggggccaccaggaaaagagagcagtgtcaagagaacgttcccagaggacgagtcaagtagcaggaccctggctccagtgagcacgatgctcgccctgttcatgttaatggccctggtgctccttcagcgcaaactgtggagaaggcgcacaagccaagaggccgaacgcgttacactgattcagatgacccactttctggaggtcaacccccaggcagatcagctgcctcacgtagagaggaaaatgctccaggacgatagcttgccagccggtgcaagcctcacggctcctgagcgaaatccgggtccttag

SEQ ID NO: 116918 - DNA, 1608 bp, synthetic construct
  misc_feature 1..1608: note = Description of Artificial Sequence: Synthetic coding sequence
  source 1..1608: mol_type = other DNA
atggacggggaggcgacagtcaagccaggcgaacaaaaggtgccgctgtggacacacggctggccacccgatgaccccagcccctcttttgcagcaggtagttcattcgcattgccccagaagcgccctcatccccggtggctatgggaaggttcactaccctctaggacgcatctgcgagccatgggaacactcagaccctcttcacctttgtgctggcgggaggaaagcagctttgcagctcccaactcactaaaggggagccgtctggtatcaggcgagccaggcggtgccgtaaccattcagtgtcactacgcaccaagttcagttaaccggcaccagcgcaaatactggtgtcggttaggcccccctcgatggatctgtcagaccatcgtgtccacaaatcagtacactcaccatcgctatcgcgacagggtggctctgaccgacttccctcaaagaggcctgttcgtggtcagactgtctcagttgtctccagacgatattgggtgctacttgtgcggtatcggatcggaaaacaatatgctcttcttgagcatgaatctgaccatcagcgccggccctgcaagtacgctgccaaccgccactccggctgccggggagctgaccatgagatcgtatggcactgccagcccagtggccaatcgctggacaccagggaccacccagacgctagggcagggtacggcttgggataccgtggcgtccaccccaggcacctccaagacgaccgcgtcggcagaaggacggcggacccccggcgccactcgaccagccgctcctggcaccggatcttgggccgaagggtcagttaaagcccctgcgcccatacccgaatcccccccttccaagagccgatccatgagcaatactactgaaggagtatgggaaggtacgaggtccagcgttaccaatcgagccagggctagtaaggaccgccgggaaatgaccaccaccaaagctgaccggccacgcgaggacatagaaggggttcgtatcgccctggacgccgctaaaaaagttttgggtactattggacccccggcgctggtgtcggaaactcttgcctgggagatactgccacaggccacaccagtgagcaagcagcagtcccagggttctatcggcgagacaactcccgccgccggaatgtggacacttggaacaccagcagccgatgtgtggattacctcaatggaagccgcttctggggaaggcagcgcagcaggggacctcgacgctgccactggggatcgcggcccccaggcgacccttagccagacccctgcagttggaccctggggccccccaggaaaggaaagcagtgtaaaacgcgctacctgccccggtttaagcacactgaaggagatcaaggtttccgccgtgttgacccagaatccacactctctcctctgcgtaagcgcagctcaggaagcagaaagagtgacactgatccagatgacccacttcctcgaagtcaacccacaggctgaccagcttccgcatgtcgaacgtaaaatgctccaggacgattccttgcctgcaggcgcatcactgactgctccggaacgcaacccaggaccctag

SEQ ID NO: 116919 - DNA, 798 bp, synthetic construct
  misc_feature 1..798: note = Description of Artificial Sequence: Synthetic coding sequence
  source 1..798: mol_type = other DNA
atggacggtgaggctacagtcaaacccggcgagcagaaagaagtggtgagacgcggaagagaggtggattacagtcggctaatagcgggcaccctgccccaatcgcatgtcaccagcagaagggctgggtggaagatgccgttgtttctgattctgtgtctgctgcaggggtcatccttcgccctcccccagaagcgacctcaccccaggtggctctgggaaggctcattgccaagccggacacatctgagagccatgggaactttgagaccttcttcgcctctgtgttggcgggaggagtcttctttcgcggccccaaatagcctgaaaggctctaggttggtgagtggtgaaccagggggggcggtgacgatccaatgtcactatgccccctcttctgttaatcggcatcaaaggaagtattggtgccgccttgggccccctcgttggatctgccagacgatcgtctccacaaatcagtacactcaccatcggtatagggaccgggtggcactgacagactttcctcagcggggtctgtttgtcgtgagactttcacaactgtcccccgatgatattgggtgttacttatgcggaatcggtagtgaaaataatatgctttttctttctatgaatttaactatatcggcagtgctgttccaaaaaatgaaggctgctctcgggccttggctactgagcctgccctgctggccctgtctgtgtctgtggctttggttttattgtaaaggctcttcaggagagggcggcccactaaggcgccagaaaggaagtccgtag

SEQ ID NO: 116920 - DNA, 798 bp, synthetic construct
  misc_feature 1..798: note = Description of Artificial Sequence: Synthetic coding sequence
  source 1..798: mol_type = other DNA
atggacggggaggcaacggtaaagcctggcgaacagaaagaagtagtccgtcggggaagagaggtggactatagtcggttgattgcagggacattgccacagagccacgtcactagtagaagggcagggtggaaaatgcctctgtttcttattttgtgcttactacagggcagttccttcgctcttccccaaaaaagacctcatccccgctggctgtgggaagggtcgcttcccagtcgcactcacctgcgcgcgatgggtactttacgaccctcaagccccctgtgctggagagaagagtccagctttgctgctccaaacagccttaaggggtctcggctggtgagcggcgagcctggcggggctgtaaccattcagtgtcactatgctccgtccagtgtgaacaggcatcaaaggaagtattggtgtcggctcggtccaccacgatggatctgccagacaatagtgtcaacaaaccagtacacgcatcaccgctaccgcgacagagtcgcactcactgactttcctcaacgagggctgtttgtcgtgcggctttcacagctaagcccagacgacatcgggtgctatctatgcgggatcggcagcgaaaataacatgctgttcctgtcgatgaatctaacgatctccgccgttctgttccagaaaatgaaggcggctctgggaccatggttgctgtcactgccatgctggccctgcctgtgcctatggctgtggttctactgtaaggggagcagcggcgagggggggcccctgagaaggcagaagggtagtccgtag

SEQ ID NO: 116921 - DNA, 1101 bp, synthetic construct
  misc_feature 1..1101: note = Description of Artificial Sequence: Synthetic coding sequence
  source 1..1101: mol_type = other DNA
atgctgccacggctactgctccttatctgtgcaccactgtgcgagcccgccgagctgtttttaatagcatccccttcacatcccacagaagggtctccagtcaccctgacatgcaaaatgcccttcttgcagagctccgacgcccagttccagttctgtttttttcgcgacactcgggccctaggtcctggatggtcttcttctcctaaactacagatcgcagccatgtggaaggaagataccggaagctattggtgcgaggcccagacgatggcgtctaaagtgttacgcagccggcggagtcaaattaacgtccacagggtgcctgtggcagacgtctcactggaaacacagccaccgggcggtcaggtcatggagggcgacagattggtgctaatctgtagcgtagccatgggcacaggcgatatcaccttcttatggtacaaaggtgctgtgggactgaacttacagtcgaagacacagcgcagtcttaccgccgagtacgaaattccctcagtcagggagtcagatgctgagcagtactactgtgtcgccgaaaatgggtatggccccagtccctcaggcctcgtaagcataactgtgcgaatccccgtctcacgccccatcctcatgctgcgggcacctagagcgcaagcagctgtggaggacgtcctagagctgcactgcgaagccctgagagggtccccccctatactatattggttttaccatgaggacattacactgggaagtcggtcagccccatccggaggcggggcgagttttaatctctccctcaccgaggaacatagcggcaactacagctgtgaggctaacaatggccttggagcccagcgatctgaggcggtgacactcaattttaccgggcgtaggtctgctcgcgacccactgcggagcctcccatcaccacttcctcaggaattcacttatctgaactcccccacacctggacagctgcaaccaatctacgagaatgagcccagagagcagtctgttgctgttcatggcaggcagcagcactcttctgagcagaaagctcagaaaccctggggccatatttggagaaccaggttcccttag

SEQ ID NO: 116922 - DNA, 1290 bp, synthetic construct
  misc_feature 1..1290: note = Description of Artificial Sequence: Synthetic coding sequence
  source 1..1290: mol_type = other DNA
atgctgcctaggttgctgctccttatctgtgccccactgtgtgagcccgccgagctgttcctgatcgcctcacccagccaccccacagagggatctcctgttacactcacctgcaagatgccattccttcagagttctgacgcacagttccagttctgtttcttccgggatacgagagccttgggccctgggtggtcatcctcccctaaactccagatcgctgccatgtggaaggaagacacggggtcctattggtgcgaggcccaaacgatggctagtaaagttttgaggtctaggaggagccagatcaatgtacatcgggtgcctgtggccgatgtgtctctggaaacccagcctccaggtggtcaggttatggagggtgatcgcctcgttctcatttgcagcgtcgcaatgggcacaggagacataaccttcctctggtataaaggtgccgttggattaaatctgcagtcaaagacccagcggagcctgaccgctgaatatgagatcccatcagtgcgtgaatctgacgccgaacaatattattgcgtggccgaaaacggatatggcccctccccaagcgggctggtcagcatcacagttcggatccccgtctctagaccaattctgatgcttcgcgcgcccagagctcaggcggccgttgaggatgtgctcgaattacactgcgaagcactgaggggatcccctccaattttgtactggttttatcatgaggatataacgctaggcagtaggtctgccccctctggaggcggggcctctttcaacctgtccttgacagaagagcacagcggtaattactcttgcgaagccaacaacggacttggcgcacagaggtcagaggcggtgaccctgaatttcaccgttccaacgggggctagatctaaccatttaacttcaggggtcatagaggggttgttgagtacactagggcctgccactgttgctctgctattttgctacggccttaagcggaagattggtcgaagatcagcgcgcgacccgctgagatctctcccctcacctctgccacaggagttcacatatctgaatagtcctacacccggacagctgcagccaatttatgaaaacgtcaatgtcgtgtctggggacgaagtgtattcactggcttattacaaccagccagagcaggagagcgtggctgccgagacactgggcacccatatggaggataaagtctccttggacatttactcccgcctacgaaaggccaatatcactgatgtagattacgaagatgcaatgtag

SEQ ID NO: 116923 - DNA, 1287 bp, synthetic construct
  misc_feature 1..1287: note = Description of Artificial Sequence: Synthetic coding sequence
  source 1..1287: mol_type = other DNA
atgctgcccagactcctcctgctgatctgcgcacccctgtgtgagcccgcagagttattcttgattgccagcccctcgcatccaaccgaaggctcccctgtgactctgacgtgtaaaatgccctttctgcagtcatccgacgcacagttccagttctgtttcttccgtgatactagggctctgggacctggctggagcagctccccgaaactgcaaatcgccgcgatgtggaaggaggataccggaagctattggtgtgaggcccagacaatggcttccaaagtactcaggtccaggcgctcacagattaacgtacatagagtccctgtggccgatgtgtctctcgagactcagcctcccgggggccaagtgatggagggcgaccggctcgttctcatatgtagtgtcgcgatgggaactggagacattacatttctgtggtacaaaggcgccgtgggtctaaatcttcagtcaaagacccagagatcattgactgccgaatatgaaatacctagcgtaagagaatcagatgcagagcagtattattgcgtggctgagaatggctatgggccttccccatcaggtctggtctccataactgtgcggattcccgttagtcgccctatcctgatgcttcgggcgcccagagctcaggcagcggtggaggacgtgctggagctccactgtgaggcactgaggggctcgcctccaattctatactggttttatcatgaggatattacactgggcagtaggtccgccccttcaggcggcggagccagcttcaacctgtcacttaccgaggagcactctggtaactactcctgtgaagccaataacgggttgggagcccaacgttccgaagccgtgacactgaacttcacagtgcccaccggtgcaagatctaaccatctgactagcggcgttatagagggtctgctgtctacgctcggacccgccaccgtggctcttctattttgttacggcctcaagcgcaaaattgggaggcgaagcgccagggaccctctgcgttcccttccgagccccttgcctcaggagttcacctacctgaactccccaactcccggacagctacagccaatttacgagaatgtgaacgtggtgagcggagacgaggtgtacagcctggcttactataatcagcccgaacaggagagcgtggcagagacactcggaacccatatggaagataaggttagcctggacatttatagcaggctgcgaaaagcaaacataactgatgtggattacgaagacgccatgtag

SEQ ID NO: 116924 - DNA, 2670 bp, synthetic construct
  misc_feature 1..2670: note = Description of Artificial Sequence: Synthetic coding sequence
  source 1..2670: mol_type = other DNA
atgagctatttcggtgaacacttttggggcgagaaaaatcacggctttgaggttctctaccactccgtgaaacagggaccaatcagtactaaagagttggcggatttcatccgcgagcgggcaactatagaggagacatacagtaaggctatggctaaactctcaaaactggcttccaatgggaccccgatgggtacgttcgctcctctgtgggaggtgtttagggtgtcctccgataaactagctctctgtcacctggagctgacaaggaagttacaggatctgatcaaggacgtactgaggtatggtgaagaacagctgaaaacacataagaaatgtaaagaagaagtggtgagtacactggacgctgtgcaggtgctaagcggcgtttcacagctgctgcccaagtcaagagagaactacttgaaccggtgcatggaccaagagcggctcaggcgcgaaagtacctcccaaaaagaaatggacaaggccgagactaaaacaaagaaggccgcagaaagtctccgccgttctgtggaaaagtacaactctgcacgggccgactttgaacaaaagatgctagattccgctctcaggtttcaagctatggaagaaacacatctcagacacatgaaagccctcctgggatcatacgcacactctgttgaggatacacacgtgcagattggccaggttcacgaagagtttaagcagaatatcgagaacgtctctgttgaaatgctgctcagaaaattcgcagagagcaagggtaccgggagagaaaaacccggtcctcttgactttgaggcctacagcgcggcagccctgcaagaggcaatgaagcgtctgagaggagcgaaagcctttagactgccggggttgtctaggagggaaagggaacccgagccccccgcggctgtggacttccttgaacctgacagcggcacctgtccagaggtggacgaagaagggtttactgtcagacctgacgtgacccagaatagtacagccgaaccatcccgattcagttcgtccgactctgacttcgacgacgaggaaccgcgcaagttctatgtgcacattaaacctgctcccgcgagggcccccgcatgtagtccagaagctgctgctgctcagctcagagcgacagctgggagcctcattctgccccccggccctgggggcaccatgaagagacactcctctagggatgccgcaggaaagccacagagaccacgctccgccccgcggacatcttcttgcgcagaacggctgcagagcgaagaacaggtgtctaagaatctgtttggaccgcccttggagtccgcgtttgaccacgaggacttcacaggatcaagctcccttggattcacttcaagcccatctccgtttagtagtagctctccagaaaatgtggaggactccggtctggacagccccagccacgcggccccaggccccagtccagattcatgggtccctagaccaggcactccgcagagtccgccatcatgccgcgccccccctccggaagcccgcggcattagggcgcctccacttcctgatagcccccagcctctcgcaagttcccctgggccctggggattggaggctctggcagggggtgacctgatgcccgcacccgcagatccaacggcaagggaaggacttgcagcgccgccgcgccgcctcaggtccaggaaggtgtcttgtcctctgacgcgctccaatggcgatttgtcccgtagtctgtcaccttccccccttgggagtagtgcagccagcactgcactagaacggccttcattcctgtcccagactggccacggtgtgagtcggggaccttcgcctgtggtcctgggcagtcaggatgctctgccaatagcaacagcattcactgaatatgttcatgcctactttcgcggccacagcccaagctgccttgctagagttactggtgaattgaccatgaccttccccgccgggattgtgcgcgtgtttagcggaacaccaccacctcctgtcctttcctttaggctggttcatacaacagccattgaacacttccagcccaacgcagatctcctgtttagtgatcctagccagtccgatccagagaccaaagatttttggctcaacatggccgcactcacagaagccctgcagagacaagccgagcaaaatcccaccgcctcatattacaatgtggtccttttgcggtatcagttctctcgccccggcccacagtctgtccccctacagctcagcgcgcactggcaatgtggtgccacccttactcaggttagtgtggagtatgggtatcgaccaggagcaactgccgtgcccacccccctgacaaacgtacaaattcttttacccgtgggggaacctgtaacgaacgttagactccagccagcagctacatggaacctggaggagaagaggctgacatggaggctcccggacgtttcagaagccggaggttcagggaggctgtctgcgagttgggagccactctccgggccctccaccccctctcccgtggcggctcagtttacatctgagggaaccacacttagcggagtggacctggagctggttggatcaggctatagaatgtccttggtaaagaggcgcttcgctacaggcatgtacctggtatcttgctag

SEQ ID NO: 116925 - DNA, 2670 bp, synthetic construct
  misc_feature 1..2670: note = Description of Artificial Sequence: Synthetic coding sequence
  source 1..2670: mol_type = other DNA
atgtcctactttggcgagcacttttggggggagaaaaatcatggtttcgaggtcttgtaccacagcgttaagcagggacccatttcaaccaaggaacttgcggacttcatccgtgagagggccacaattgaagaaacttatagcaaggctatggctaaactcagcaaactggcttccaacggtactcctatgggaactttcgctccactgtgggaagtctttcgagtgtcttctgataaactggctttatgccaccttgagctaaccagaaaactccaggaccttataaaagacgttttgcgctatggagaggagcagctgaagacccataaaaagtgtaaggaagaagtggtgagcactctcgacgctgtgcaggttttaagtggggtctctcaactgttgcctaaaagtagggaaaactacttgaaccgctgtatggaccaagaacgcttacggagggaatctacctcacagaaagaaatggataaggccgagacaaaaactaaaaaagccgccgagtccctcagacgctccgtcgagaagtacaacagcgcacgagctgactttgaacaaaaaatgctggacagcgccctaagatttcaggccatggaggagacccacctacggcatatgaaggcactcctgggctcttatgcccacagcgtagaggacacccatgtccagatcggacaagtccacgaggaatttaagcagaatattgaaaacgtcagtgttgagatgctgctgcggaagtttgccgagagtaaaggaacagggagagagaaacctggcccactcgattttgaggcatatagtgccgccgcgcttcaagaggcgatgaagcgactgcgcggcgcaaaggcattccgcctaccaggcttgagccgccgagaaagagaaccagaacctcctgccgccgtggacttcctcgagcccgactcaggcacatgccctgaggtagacgaagagggtttcacggtgaggccagatgtgacacaaaattctactgctgagccttccagattttcttcatccgactccgattttgacgacgaggaaccacgcaagttctatgtgcacatcaagccagctcccgcccgggcaccagcgtgctcccctgaagcagccgccgcgcagctgcgggctacagccggcagtctgatcctgcctccgggacccggcggtaccatgaaacggcatagttctcgcgatgccgcagggaagccccagcgacccaggagcgccccgcgcacctcttcttgcgccgaacgcctccagtcagaggagcaggtgtctaagaacctcttcggcccccccctcgagtccgctttcgaccacgaggattttaccggctcctcttccctgggtttcacgagttcaccatcaccattttccagctcaagtccagagaacgtagaggactcggggttggactccccctcccatgccgcccctggcccatcccccgattcttgggtgccacgacccggtacgccacagtcgcctcccagttgccgagcgcctccacccgaggcgagagggatcagggcccctccgctgcccgactccccccagcccctggccagtagccccggaccatggggccttgaggccctcgccggaggtgatctgatgcccgcacccgccgaccccacagcccgagagggccttgccgcgccaccgcgaaggctgcggagtcggaaggttagctgtccattgaccaggagcaacggcgacctgagcaggtcccttagcccttcacccctcgggtcaagcgccgcatccactgccttggaacgtccgagcttcctctcacagactgggcacggagttagtcgaggtccgagcccagtcgtcttgggctctcaggacgcgctgcccattgcaacggcttttactgaatatgttcacgcatatttccggggacactctccatcttgcctggcaagggtgaccggggaactgactatgacgttccctgccggcatcgtgagggttttctctggcactcccccacctcccgtcctatcatttcggctggttcataccactgcaatcgagcacttccaacccaacgctgatctgctattcagcgacccctcacagtcggaccctgaaaccaaagacttctggctgaacatggctgctttgaccgaggcacttcagcgccaggcggagcaaaacccgacagcaagctactacaacgtcgttctccttcgataccaattcagccggcctggaccacagtccgtgccgttgcagctcagtgctcattggcaatgtggagctactctgacccaggtgagtgtggagtatgggtaccgacccggcgccaccgccgtccccactcctttgacaaacgtgcagattttactgccagtgggggagcccgtgactaacgtgcgtcttcagcctgccgccacatggaatctcgaagagaaacgacttacctggcgccttcccgacgttagtgaagctggcggtagtgggcggttaagcgcctcctgggaacctctctcggggccctctacacctagccctgtcgccgcccagtttacatcagaggggaccactctgagcggggtggatctggaacttgtcggatcaggttacaggatgagcctagtcaagcgcagattcgctaccgggatgtaccttgtcagttgctag

SEQ ID NO: 116926 - DNA, 2670 bp, synthetic construct
  misc_feature 1..2670: note = Description of Artificial Sequence: Synthetic coding sequence
  source 1..2670: mol_type = other DNA
atgtcctattttggcgagcacttctggggcgaaaagaatcatggcttcgaggtgctgtatcactccgtaaaacagggccccattagcaccaaggagctggccgattttattagggaacgcgctacaatagaagagacatattccaaggccatggctaagctcagtaaactggcatccaacggtaccccgatggggacttttgccccactttgggaggtctttagagtcagctccgacaagcttgcactgtgccatctggagctgacccgtaagcttcaggatttaattaaggatgtcctccgctacggggaagagcagctcaagactcacaaaaagtgcaaagaggaggtggtttcaacactggacgccgtacaagtacttagcggggtgagccaacttttgcctaagagcagggaaaactacctgaatcggtgtatggaccaggaacgacttcggcgtgaaagcacatcccaaaaagagatggacaaggccgagaccaaaaccaaaaaagccgcagagagtctgaggaggtcggtcgagaagtataacagtgctagagcagattttgagcagaaaatgctcgactcagcactacgatttcaggcgatggaggagactcatctccgccacatgaaggcactgttgggatcatacgcgcactctgtggaggacacccatgtccagattggacaagtccacgaagaattcaagcaaaatatagagaatgtgtctgtggagatgttactaagaaaattcgctgagagcaaaggcacaggtcgggagaagccaggccccctcgatttcgaggcctacagcgcagccgcattacaagaagccatgaagcggctgcgcggcgccaaggccttccgcctccccgggctctcccgaagagaaagggaaccagagccgcccgctgccgtcgactttcttgagcccgacagcgggacatgtcccgaggtggacgaagagggtttcaccgttaggcccgatgttactcagaactccaccgctgaaccctcccggttcagttcctccgacagcgactttgatgacgaagaaccccgaaagttctatgttcatatcaagccagcccccgctcgcgcgccagcatgcagtccggaggcagcagcggcccagttgcgggccaccgccggaagtttgatattgccgcctggcccaggcgggaccatgaaaaggcattcttcgcgggatgcagcagggaaacctcagcgtccaaggagcgctcctcggactagcagttgtgcagagagactgcagagtgaggagcaagtgtctaagaatctgtttggtcccccactggagtctgccttcgaccacgaagactttaccggctctagcagtttagggtttacgagttccccttcccctttttcttccagcagccctgaaaatgtggaggactcaggcttagattcccccagtcatgcagctcctggaccgtcgcccgactcatgggtgcccaggccagggacaccgcagagcccgccttcttgtcgcgcccctcccccagaggctcgagggatccgagcaccgcccctgcccgacagccctcagccactcgcaagctcccccggcccatggggactggaggcactggctggcggggacttgatgcctgctcccgccgaccccacggccagggagggccttgcagctccaccacgtaggttgcgctcgcgtaaggtgtcctgtccacttaccagatctaacggggacctctctagatcactctctccctctcccttgggtagctcagccgcgagtaccgccctcgaaagaccttcgtttctttcccagacgggacatggcgtgagtcggggtccttcccccgtggtgctaggcagccaggatgcccttccaatagctacagccttcacagagtatgtgcatgcatacttcaggggccatagcccttcctgcctcgccagggttacaggcgaactgacgatgaccttcccagcaggcatcgtccgggtcttttcaggtacaccacccccccccgtgctgtctttccggctggttcacactactgcgattgagcattttcagcctaatgccgacctcctgtttagcgaccctagtcagtcagatcccgagaccaaagacttctggctaaatatggctgcgctcactgaagcgctgcaaaggcaggccgaacagaaccctaccgcgtcttattataacgttgttctgttgcgttatcaattcagccggcctggtcctcagtccgtgcccttacagctgtctgcacattggcagtgcggagcaacattaacacaagtaagtgtggagtacggataccggccaggtgctacagccgtgcccacgcctcttacaaacgtgcagatactcctgcccgttggagagccagtgaccaacgtaaggctgcagcctgcagcaacctggaatctcgaagagaaaagactgacttggaggctgccagacgtcagtgaggcaggagggagtggccgcctaagcgctagctgggaaccgctctcgggcccaagtacacccagcccagtggccgctcagttcacaagcgagggcaccacactcagcggagtggacttggagttagtcggatcaggttatcggatgtctctggtgaagaggcgcttcgcgacagggatgtacctggtgagctgttag

SEQ ID NO: 116927 - DNA, 2676 bp, synthetic construct
  misc_feature 1..2676: note = Description of Artificial Sequence: Synthetic coding sequence
  source 1..2676: mol_type = other DNA
atgtcttattttggagaacacttctggggtgaaaaaaatcacgggttcgaagtattgtatcactcggtgaaacagggtcccatctctacgaaggagttggctgattttattagggagagagctactatcgaggaaacgtactcaaaagctatggctaagcttagtaagttggcgtcaaatggcactcccatggggacctttgcgcctttatgggaggtcttcagggtgagctcggacaagttagccctgtgtcacctagaactgacacgcaagctacaggatctgatcaaggatgttttacggtatggcgaggagcaactgaagacacataaaaagtgtaaggaagaagtggtgtctactctagacgcggttcaggtgttatcgggagtgtctcaactgctcccgaagtccagggaaaactatctaaaccgttgtatggaccaggagcggttgagacgcgaatctacgtcccagaaggaaatggataaggccgaaacaaaaacgaagaaagccgcggagtcactgcggcgctcagtcgagaaatacaactctgcccgtgcggactttgagcagaagatgctggattcagccctgagatttcaggcaatggaagaaactcatttaaggcatatgaaggccctcttggggagctatgctcatagtgtagaggatacgcatgttcagatcgggcaggtccacgaagagttcaaacaaaatatcgaaaatgtgagtgtagagatgctgttaagaaaatttgccgaatccaaaggaacaggtagggaaaagccaggaccattggatttcgaagcgtatagtgcagcggctctgcaggaggccatgaaaaggctcaggggcgccaaggcgttcagattacctggcctcagtcgtagggaacgggaacctgaaccccctgcggcggtggacttcctcgagcccgattccggtacttgtccagaggtggacgaagaaggattcactgttcgtccagacgtgacccagaacagtaccgcagagccgagtagattcagtagtagcgattccgactttgacgatgaggagccccggaagttctacgttcatattaagcccgcccccgcacgagctcctgcttgtagcccggaggcagccgcagcgcagctgagagctacagctggttcgctgattctgccgccaggtcccggaggcacaatgaagcggcactcaagccgggatgctgctggcaaaccgcagaggccgaggtctgcgccgcgcacaagcagttgtgctgagcgtctgcaaagcgaagaacaggtgtccaaaaacctcttcgggcctcctctggaatctgcttttgaccatgaggattttaccggaagcagtagtcttgggtttactagttccccctcccctttctcctcaagctctcctgagaacgtcgaagactctgggctggactccccctcccacgctgctccagggcctagccccgattcgtgggtccccaggcctggaacacctcagtctcccccaagctgtcgggctccccctcccgaagcccggggtattcgagcgccgcctcttccagactcacctcagccattagcctccagtcccggaccctggggcctcgaagctctcgccggaggtgacttgatgcctgcgcctgcggatcccacggcacgggagggcctggccgctccacccaggagactccggtctcgcaaagtgagctgccctctcacacgaagcaatggagacctcagccggagtttgagcccctccccgctcggctctagcgctgcctctaccgccttggaacggccttccttcctaagccagacagggcatggagtgtcgagaggccccagcccagtggtcctgggctcccaggacgctctccccatagccaccgctttcaccgaatatgtacacgcctatttccggggacattctcccagctgtttggccagggtcactggcgagttgaccatgacatttccagcgggaatcgtccgggtcttctcaggtactccccccccccccgtcctgtccttccgtttggttcataccacggccatcgaacactttcagcctaacgccgacctcttgttttccgatccgtctcagagcgacccagaaactaaagacttttggctgaacatggcagcactcaccgaggcgcttcagagacaagcggagcagaatccgactgcctcttactacaatgtcgtccttcttcgctaccagttttcccgaccaggtccacagtcagtgccactgcaactgtcagcgcattggcagtgcggagcaactctgacacaagtgtcagtggagtatggataccgtcctggagccacggctgtgcccacccccttgactaatgtccaaatactcttacctgtaggagagcccgtcaccaacgtccgcctgcagcccgcggccacctggaacctggaggaaaaaagattaacctggcggttgcccgacgtgtctgaagcaggtggatcgggcagactgtcagcgtcttgggaaccacttagtggcccttctactcccagtcccgtggcggcacagttcacgagcgaaggaaccacactctccggagtggatcttgaacttgtcggctctggttaccgcatgagcctggtgaagcgtaggtttgcgacagcagcccctccccagggatgtacgtggtag

SEQ ID NO: 116928 - DNA, 2520 bp, synthetic construct
  misc_feature 1..2520: note = Description of Artificial Sequence: Synthetic coding sequence
  source 1..2520: mol_type = other DNA
atggcaaaactctctaagctcgcatccaacgggacacctatggggacttttgcccccctgtgggaagtcttcagggtgtcaagcgacaaacttgctctgtgccacctcgaactgacacgcaaattgcaggacctgataaaggacgtgcttagatacggcgaggagcagctgaagacccataaaaaatgcaaggaagaggtggtctccacgctagatgccgtccaggtgctcagcggagtctctcaattactacccaaatcgcgggaaaactacctgaacaggtgtatggaccaggagcgtttgcggcgtgaaagcacaagccagaaggagatggataaggccgaaacaaagacgaaaaaagccgcggaaagtctgcgaaggagcgtggagaaatacaattccgctagagccgacttcgaacagaaaatgctggattctgctcttaggttccaggctatggaagagacacatctcagacacatgaaagctctgctgggctcttacgctcactccgttgaagacacacatgttcaaatcgggcaggtgcacgaggagtttaaacaaaacatcgagaatgtaagtgttgagatgctccttagaaagtttgcagaatctaagggtactgggcgagaaaagcccgggccccttgactttgaagcttattctgccgctgcactccaggaagccatgaagaggctgcgcggagcgaaagctttcagacttcctggcctgtctcgcagggaaagagagccagagcctccggctgcagtcgactttctggagccggatagtggaacttgcccagaggtagatgaagagggattcaccgttcgccccgacgtgacccagaatagtacggccgagccatctcggtttagtagttcagattctgacttcgacgatgaggagcccagaaagttttacgtgcatataaagccagcccccgcccgggcccccgcgtgttctcccgaagctgctgccgcgcagctgagagctaccgccgggtccctgatcctgcctcctggtcccggcggcacaatgaagaggcatagctcaagagacgcagcggggaaaccccagaggccccggtccgcacctaggacgtcctcttgtgctgagcggctgcagtcagaagaacaggtttcaaagaatctttttgggccacccctggagagcgccttcgaccatgaggacttcacagggagtagttctcttggtttcactagctccccctcccccttctcttcctcctctcccgaaaatgttgaggacagtggcctggatagcccttcccacgccgcccccggtccctcaccggattcctgggtaccaagacccgggacaccacagtctccgccgtcttgccgggctcctccgcccgaggcacgcggaattagggctcccccactaccggatagtcctcagcccttagcctccagcccaggcccttgggggttggaggctctggccggcggggaccttatgccagcccccgctgatccgacagccagggaaggtctggctgctcctcctcgacgtctgagaagcaggaaggtctcttgtcctttgacccgttctaatggggatctgtctcgaagcttgagtccctcgcccctcgggtctagcgcggcttctactgctttggagagaccctcctttcttagtcagacggggcatggggtgtcccgcggaccatctccagtggtgttggggtcccaggacgccctgccaatcgctactgcattcaccgagtacgtccacgcctacttccgcggccacagcccaagctgtttagcccgagtaacaggggagttgacgatgaccttccccgccggaatcgttagggtcttctccggaacccctccacccccagttctctcctttagactggtgcatactaccgctattgaacatttccagccaaacgccgacctgctcttttcggatccttcccagagcgaccctgagaccaaggacttttggctgaacatggccgctctgaccgaagcgcttcagcggcaggcagaacagaaccccacagcaagctactacaacgtggttctgctgagatatcagttctcccggcccggccctcagagtgttcccttgcaactgagcgcccattggcagtgcggagccaccctgacccaagtttcagtcgagtatggatacagaccaggggcgacagccgtcccaacaccactgactaacgtccagattctactacctgtcggggagccagtcacgaatgtgaggttacagccagccgctacctggaacctggaggagaagagactcacctggaggctgccggacgtctcggaggccggaggttctgggcggctgtccgcttcttgggaaccattgagtggaccaagcactccgagtcccgtcgctgcacaattcacgagtgaggggacaacgctatctggcgtggacttggagctcgtgggatccgggtatcgtatgtcactggtaaagcgccgcttcgcaaccggtatgtacctggtaagctgttag

SEQ ID NO: 116929 - DNA, 2670 bp, synthetic construct
  misc_feature 1..2670: note = Description of Artificial Sequence: Synthetic coding sequence
  source 1..2670: mol_type = other DNA
atgtcctattttggcgaacatttttggggggaaaagaatcatggcttcgaagtgctgtaccattccgtgaagcaaggacctattagtacaaaagaattagccgactttattcgagagcgcgccacgatagaagaaacgtatagtaaagccatggcaaagctcagcaaactggcctccaacggaacaccaatgggtactttcgccccattatgggaggtctttagggttagctctgacaaattagccctttgccacctggaactcacacgcaagctgcaggatctgataaaagatgtgctcagatacggagaggaacagctgaagactcataagaaatgcaaagaggaagtcgtaagcaccctagatgctgtccaggttctatccggcgttagccagttgcttcctaagagtcgcgagaactacctcaatagatgcatggatcaagaacggctgagaagggagagcaccagccagaaagaaatggacaaagcggagactaaaaccaaaaaggccgcagaaagcttgcggagatcagtggaaaaatacaattccgctagagcagatttcgagcaaaaaatgttagattccgcactgcgcttccaggccatggaagagactcacctgaggcacatgaaggctctgctcggaagctatgcccacagcgtcgaagacacccacgtgcagatagggcaggtgcacgaggaatttaaacagaatattgaaaatgtctccgtggagatgctgctgaggaaatttgctgagtcaaagggcactggcagagagaagcctggcccgctggatttcgaggcttacagcgccgccgccctgcaggaggccatgaagcgcctcaggggcgccaaagcctttaggttgccaggcttgtcacgaagagaaagggaacccgagccgccggcggcagtcgacttcttggagcccgattccggcacatgtcccgaagtggacgaggaagggttcacggtccggccggacgttacccagaacagcaccgcagagccatcaagattttcaagttctgacagtgactttgacgacgaagagccccgcaaattttatgtccacataaaaccagcacccgctcgagccccggcctgtagccctgaagccgccgcagctcagctgagagccacagcaggctccctgattctgcctcccgggcctggcggtactatgaaacgacactcatctagggacgcagccggtaagccccagagaccccgtagcgcccctcgtacctcaagctgcgcagagcggctgcagtctgaggagcaggtttcgaagaacctcttcggtccgccattggaaagtgcattcgaccatgaggactttactggatcctcttctctcgggttcacaagttccccttcgccatttagcagttcttcacccgaaaatgtggaggacagcggattggacagccctagccacgcggcgccagggccatcccctgactcatgggtcccacggcccgggacaccccagtcaccgccttcttgccgggcacctccgccagaggctcgcggcatcagagccccccccctgccagactctccacagccattggcaagcagccccggcccctggggcctcgaggctcttgcaggaggcgatttgatgcctgctcctgccgaccctacagcccgtgaggggctggccgcccctccaagacggctgaggtctagaaaggtgagttgcccactgacaaggagtaacggtgacctgagccgaagtttgagcccttcacctctgggctccagtgccgcatcaacagcgctcgagcggccatcgttcctctcgcaaacaggacatggcgtctcacgtggaccttccccagtagtcctgggctcacaggatgccctgcccatcgcgactgcctttacagagtatgtccacgcgtacttccgagggcactcacccagctgtctggctcgagtaaccggggaacttactatgacctttccggccggcattgtgcgcgtgttcagcggcacacctccgcccccagtgctctctttccgattggtgcacacaaccgccatcgagcattttcagcctaatgccgatttgctgttttcagatccctcacaaagcgatcccgagaccaaggatttctggttgaacatggctgcactgaccgaagccctgcagaggcaggccgagcagaacccaactgctagttactataacgtggttctgctcagataccagttctcccgcccaggccctcagtctgtgcccttgcaactgtctgcccactggcagtgcggggcaacccttactcaggttagcgtggaatatgggtaccggccaggcgcgactgccgtgcccacgcccttgacaaatgttcagatattactccctgttggggagcccgtgacaaatgtcaggcttcaacccgctgccacgtggaacctggaggaaaaacgccttacttggcgtctgccagatgtctcagaagccggcggttctggccgactgtccgcgtcttgggaacccctgtctgggccgtctacaccttcccctgtggccgcccagttcaccagcgaaggcaccactctctccggagttgacctggaactagtcggatcagggtatcgtatgagtctcgtgaagcgacgctttgctactggcatgtaccttgtctcctgctag

SEQ ID NO: 116930 - DNA, 2670 bp, synthetic construct
  misc_feature 1..2670: note = Description of Artificial Sequence: Synthetic coding sequence
  source 1..2670: mol_type = other DNA
atgagctactttggggagcacttctggggggagaagaatcacggatttgaggtgctatatcatagtgttaaacaaggtcctatcagcaccaaagagcttgctgattttattagagagagagcaactatcgaggaaacatacagcaaggccatggccaaactgtccaagcttgctagtaacggcacacctatgggtacatttgctcctctttgggaggtatttcgggtgtcttcagataagctggcactctgccacttggagctcacccggaaactgcaggacctgattaaggatgtactacgctatggggaagagcaattgaaaacccacaaaaagtgtaaggaggaggtagtgagtactctggatgccgtccaagttctgtctggagtttcccagctgttgccaaagagccgtgagaactacctgaaccggtgcatggaccaagagagactgagacgcgagagcaccagccaaaaggaaatggataaggcagagaccaaaactaagaaagctgctgaaagtcttcggcgctccgtagaaaaatacaactccgcccgagctgactttgagcagaagatgctcgactctgcactacgtttccaggctatggaagagacgcacttacgacatatgaaagctctactggggagctacgcacacagtgtggaggacacccacgtgcagataggccaggtccatgaggagtttaagcagaacatagaaaacgtgagcgtcgagatgcttcttcgtaaattcgcagagtctaaggggacgggaagggaaaagcctggtcctctggacttcgaggcttactccgcagccgctctccaggaagctatgaaaagattaaggggagcaaaggcctttcggttaccaggtctgagtcggagggaaagagagcccgagcctcctgctgcagtggactttctcgagccagattccggaacatgcccggaggtcgatgaggaagggttcaccgtccggcctgacgtgacccagaactcaacggctgagccgagccgattctcctcttcagattctgatttcgatgacgaagaaccccggaagttttacgttcacattaaaccagccccagcacgcgcccctgcatgcagccccgaagccgccgctgcacagctgcgggcaaccgccgggtccttgattcttccgcccggcccgggaggcaccatgaaaagacattcttctcgggacgccgcagggaaaccccagagacctcggtcagccccacggacctcaagttgcgctgaacgcttacagtcagaggaacaagtaagtaaaaacctgttcggcccaccccttgaaagcgctttcgaccacgaagattttactggctcgagcagtctgggcttcacatcttccccctccccatttagctcttctagcccagagaatgtggaggatagtgggctggatagtccaagtcacgccgcacccgggccttccccagacagctgggtccctcgtccggggactccgcagtcacctccaagctgtcgggcccctccccccgaggctagaggtatacgagccccccctctgccagactcccctcaacccctagcctcctcaccggggccctggggactggaggccttagccgggggggacctcatgccagcaccagccgatccaacggccagagagggcctagctgccccgcctagacgcctacgctcccgcaaggtctcttgcccactgacccgaagcaatggcgacttgtcaaggagtctcagcccaagccctctcggctcaagcgctgcttccaccgcccttgaaagacccagctttctatcccagaccggccatggggtgtctcgagggccttcccctgtcgtcttggggtcgcaggacgccttgccaatcgccaccgcctttacagagtacgtgcatgcatactttcgcggtcattctccctcctgccttgcccgggtgaccggagaactcaccatgacctttccagcggggatcgtgagagtgtttagcggcactccccctcctccagtcctcagtttccggctcgtgcacactaccgcaatcgagcacttccagccgaacgcagacctgcttttttcagacccttcccagtccgatcccgagactaaagatttttggcttaacatggcagctctcactgaagccctgcagcgacaagctgaacagaaccctacagccagctactacaacgttgtcctgttacgctaccagttttcacgacccggtccccagtctgtaccgctccagctctctgcccattggcagtgtggtgcgactttgactcaggtgagtgtcgagtacggctatcgaccaggcgctactgcagttcctacaccacttacaaatgtgcagattctgctccctgtgggagaacctgtgacgaacgttcggttgcagccggcagctacttggaacctggaggaaaagaggttaacctggaggctgccggatgtcagcgaggcgggaggttctggaagattaagcgctagctgggaacctctgtctggcccttctaccccgtcccctgtggcggcccagtttacaagtgagggaacaacgctcagcggagttgatctagagctcgtcggctctggctaccgaatgtctctggtgaagcgccgctttgcaacagggatgtacctcgtttcctgctag

SEQ ID NO: 116931 - DNA, 1137 bp, synthetic construct
  misc_feature 1..1137: note = Description of Artificial Sequence: Synthetic coding sequence
  source 1..1137: mol_type = other DNA
atggtcatggcatatttcgtagaaaatttttggggggaaaaaaactctggcttcgacgtgctgtatcacaatatgaagcatggccagattagtaccaaggagctagctgattttgtgcgcgaaagggcgactattgaggaagcgtatagccgcagcatgacaaaattggctaagtccgcctccaactactcccagttagggacttttgcacccgtatgggacgttttcaagacctcaacagaaaaactagctaattgccatctagatctggttcggaaactacaggagttgattaaagaggtacagaagtatggggaggagcaggtgaaatcgcacaagaaaacgaaagaagaggtggcagggacactcgaggcggtgcaaacaattcagagtataactcaagcgctgcagaaaagcaaagaaaattataacgcgaagtgcgtggagcaggagagattaaaaaaagaaggggcgactcagcgagagatcgaaaaagccgcagtgaagtctaagaaggccacggacacatataagctttatgtcgaaaagtatgctctggcaaaagccgacttcgagcagaagatgacagagaccgctcagaaattccaggacattgaggagacgcaccttatacacattaaggagataatcggatccctaagtaacgcaattaaggagatacatttgcagatcggccaagttcatgaggaattcataaataatatggcaaacacgaccgtggaatcactgattcaaaagttcgccgagagtaaaggaactggcaaggagcgccccggcctcatcgagtttgaggaatgtgataccgcttccgctgtggaaggtatcaagccccggaaacgaaagactttcgccttgccggggatcattaaaaaggaaaaagatgccgagtcggtgtggagctttaccgtggtggcccaggtgggcatgcaatggcgcgatctcggacttctacactcacccccacccagatttaagaggttttccagttatctttccttaccgagcagctggaactacggcgcacaccatcacatctggcttattttttgcattttcagcagagacagggttagcccatactggcccggttggtcgagaacccccgatttacgctag

SEQ ID NO: 116932 - DNA, 2433 bp, synthetic construct
  misc_feature 1..2433: note = Description of Artificial Sequence: Synthetic coding sequence
  source 1..2433: mol_type = other DNA
atggttatggcgtacttcgtagagaatttctggggagaaaagaatagcggtttcgatgtcctttatcacaatatgaagcacggacaaatctctacaaaggaactggctgacttcgttcgcgaacgggctacaattgaggaggcttacagcagaagtatgaccaagctggcaaaatctgccagcaattattcccagttagggacctttgcaccggtctgggacgtgtttaaaaccagtacggaaaagctcgccaattgccatctcgacctggtgcggaaactgcaggagctcatcaaggaggtccaaaagtacggcgaagagcaggtgaagagccataaaaaaaccaaggaggaggtcgctggtactttagaagctgtgcaaactattcagtccatcacccaggcactgcagaagtctaaagaaaattataatgctaaatgcgttgaacaggagcgactgaagaaggagggggccacacagcgcgagatagaaaaggccgcagtgaagagcaagaaagcaaccgatacgtataaattgtacgtcgaaaaatacgcattggccaaggccgattttgagcagaagatgacagagaccgcccagaagttccaggacatcgaagaaacacaccttatccacattaaggaaataatcggaagcttatccaatgccataaaggagatccatctgcagattggtcaggtgcatgaggaattcatcaataacatggcgaataccacggtggaatcacttatccagaaatttgccgaatcaaaggggacaggcaaagaacgtccaggactgatcgaatttgaagagtgcgacacagcatcagcggtagaaggtattaagccccgtaaaaggaagactttcgcccttccggggatcatcaaaaaggagaaagatgccgaaagcgtggagtgccctgacgctgattcgctaaacatacctgacgttgacgaagaggggtacagcatcaaacccgaaactaatcaaaatgacactaaggaaaaccatttttactcctccagtgacagtgactctgaagacgaagaaccaaagaaataccggatcgagattaaacctatgcatccaaataactcccaccacaccatggccagtctggacgagctgaaggtctctattggtaacatcaccctctcgcccgccatcagtgtgtccaccaacacgagactgaacagaaatttcaacgatgaagagttgactaaaagcaagccctccgctcctcccaatgaaaaggggacctctgatttacttgcatgggatcctctctttggcccgtcactggattcttccagctcatcatccctgacatcctcatccagcgcacggcctactacacctctgagtgtcggaacaatcgtaccccccccccgtcccgcatctcgcccgaaactaacatctggaaaactgagcggcattaatgagatcccccggcccttctccccgccagtgacttccaacacaagccccccgccagccgccccactggccagagcagagtcttcgtccagcatatcaagttctgcctcccttagtgctgccaataccccaactgtaggcgtgtccagaggcccttctcccgtgagcctaggcaaccaggacaccctacctgtcgctgtggctctgacagaaagcgtcaacgcctattttaagggagccgaccccaccaagtgtatagtcaagatcacaggagacatgactatgtcctttccatcaggcatcattaaagtgttcacaagtaatcccacacccgcagtgctgtgttttcgagtgaagaatattagccggttggagcagatcctccccaacgcacagcttgtcttctcggatccatctcagtgtgattctaatacaaaggatttctggatgaacatgcaagccgtcaccgtttacttgaagaaattgtcagagcagaaccctgctgcgtcttactataatgtagatgtcctaaagtaccaggtctcctccaatgggatccagtctacacccctgaacctcgctacatattggaagtgctctgccagcacaacagatttgagagtggattacaagtataacccagaggcaatggtggctccatctgtgctttcaaatattcaggtggtggtgcccgtggacggaggcgtgacgaacatgcagagtttgccacctgccatctggaatgcagaacagatgaaagcattctggaagctcagtagcatctcagagaaaagcgagaatggcggaagcggttccctgcgtgcaaagttcgacctgagtgagggccccagtaaacccactacactcgcagttcagtttttatccgagggatccacattgtctggcgttgattttgagctggttggcactggttatcgcctgtcacttatcaaaaaacgttttgcaacgggaagatatctggcggattgttag

SEQ ID NO: 116933 - DNA, 2433 bp, synthetic construct
  misc_feature 1..2433: note = Description of Artificial Sequence: Synthetic coding sequence
  source 1..2433: mol_type = other DNA
atggtaatggcatactttgtcgaaaatttctggggtgagaagaactctggatttgatgtcctctatcacaatatgaagcacggtcaaatatccacgaaggaactagctgatttcgtgagagaacgagccacaattgaagaagcctactcccgatccatgactaaactggctaagtcagcatccaattacagccagttggggacttttgctcctgtctgggatgtgttcaagaccagcacggagaaactcgcgaattgtcacctagacctggtgcgaaagttgcaggagctgatcaaagaagtccagaaatacggtgaggaacaagtcaagagccataagaagacaaaggaagaggtggctggaactcttgaggcggtacagaccattcagtccataacccaagcactgcagaagtctaaggagaattacaacgccaaatgcgtggagcaagagaggctcaagaaagagggggcgacacagcgtgaaatagaaaaagcagctgtgaagagcaagaaagccaccgatacttacaaactttacgtggagaaatacgccctggccaaggcggatttcgagcaaaaaatgaccgaaaccgcccagaaattccaggacattgaagaaacccacttgatccatatcaaggaaattatcggatctctcagcaacgctataaaggaaatccatctgcaaatcggtcaggtgcatgaggaatttataaacaacatggctaatactaccgtagaaagtttgatccagaagttcgcagaaagtaaaggcaccgggaaagagcgacccggcctaattgagttcgaagagtgcgataccgccagtgccgtcgaaggcatcaaaccgaggaagagaaaaacctttgcactgcccggaatcatcaaaaaagagaaagatgcggagagcgtggagtgcccagatgcagactccttaaacattcccgacgtcgacgaggagggatactctatcaagcctgaaaccaatcaaaatgatacgaaagagaatcacttctatagtagttctgattccgatagcgaggatgaggagccaaagaagtacaggatcgaaattaaacctatgcatcctaacaattcccatcatacaatggcaagtctggatgagctcaaggtgtcaatcggcaatattacgctgagtcccgctatctcccgccactcccccgtgcaaatgaaccgcaacttatctaatgaagagctgacaaagagtaagcccagtgccccgccaaacgaaaaaggcacatctgacctcttagcttgggatcctctgttcgggccctctctcgattcatcctcatcttccagtcttacatccagcagttccgcaaggccaaccactcccctgtccgtcggcacaattgtgcccccaccaagacctgcgtcccgtcccaagctgaccagcggaaagctttctggcataaatgaaatccccaggccattctcaccacccgttactagcaatacttcccccccgccagcagcaccattagcgcgcgctgaaagctcctctagcatcagcagctctgcatccctgagtgcagccaacactcctacagtgggggtgagccgggggccttccccggtttccttaggcaaccaggacacgttgcctgtggctgtggccctgacggagtctgtgaatgcgtacttcaaaggcgcagatcccacaaagtgcatcgtgaaaattacaggggatatgaccatgtcatttccatccggaattattaaagtgtttactagcaaccctacccccgccgttttgtgtttccgagtgaaaaacatctctcggttagaacagatcctgcctaatgcacagctagtgttctcagatccttctcagtgcgacagcaatacaaaagatttttggatgaacatgcaggcagttaccgtgtacttgaagaagctgtcggagcagaaccctgccgcgtcctactacaatgttgacgtgctgaaatatcaggtgagttctaacggtattcaaagtactcccctgaatctagccacttactggaagtgttcagcctccaccacagaccttcgcgttgattacaaatataatcctgaagctatggtggctcccagcgtgctgagcaacatacaggtcgtggtgccagtggacggcggggtgaccaacatgcagagcctccctccagccatttggaacgcggagcagatgaaagccttctggaaactctcttctatttcagagaaatcggagaatggaggcagcggcagtcttcgggcaaaatttgacctgagcgaagggccgagtaagcctacaacacttgccgtccagtttctaagcgagggatccaccctgagtggggtggacttcgagctggttgggactggttacagattatccctgatcaaaaagcgattcgctactggccggtacttagccgactgttag

SEQ ID NO: 116934 - DNA, 2334 bp, synthetic construct
  misc_feature 1..2334: note = Description of Artificial Sequence: Synthetic coding sequence
  source 1..2334: mol_type = other DNA
atggtgatggcttacttcgtcgagaatttttggggtgaaaaaaattccggctttgacgtcctctatcataatatgaaacacggtcagatcagtacaaaagaactcgcagacttcgtccgcgagcgggcaactatcgaagaagcctactcgcgcagtatgacgaagctggccaaatcagcctccaactacagtcagttgggcacatttgctcctgtttgggacgtgtttaaaacaagcaccgagaaactggccaactgccaccttgacctggtgagaaaattacaggaacttatcaaggaagtgcagaaatatggggaggagcaggtgaaatcccacaaaaaaacaaaggaggaggttgcaggcacattggaggcagtacagaccattcagagcatcacccaggctttgcagaagtccaaggagaactataatgcaaaatgtgtggagcaggagcgtctaaaaaaggagggggccactcagcgggaaattgaaaaggccgctgtgaagagcaaaaaagccactgacacctacaagttatacgtagaaaagtatgcacttgctaaagccgactttgagcagaagatgacagaaactgcccaggttcatgaggaatttataaacaatatggccaataccacagttgagtctctgatacaaaagtttgcggaatccaaaggaacaggaaaggaacgtccaggcctaattgagtttgaagagtgtgatacagccagcgctgtggagggaattaagcctagaaaaaggaaaacattcgctctgcctggtattattaaaaaagagaaagacgcagagtctgtcgagtgtcctgacgcggattctctcaacatcccggatgtggacgaggaggggtatagcataaagcccgagacgaatcagaacgacaccaaggagaatcatttttactcctctagcgatagtgatagcgaggacgaggaaccgaaaaagtatagaatcgagatcaaaccgatgcatcctaacaacagccaccatacaatggcatctttggacgaattgaaagtgagcattgggaatattaccctcagccctgccatctcaagacattccccggtccaaatgaatagaaatctgagtaacgaagaactgacaaagtcaaagccctcagctcctcccaacgagaaaggcacttcagatctgttggcatgggatccactgttcggccccagccttgattccagcagttcatcctcccttacatcctctagtagcgctcgccctaccacccccttgagcgtgggcacgattgtgccaccccctcgtccagcgtctaggcccaagttgactagcggcaagttgagcggtataaatgagatccctagacccttcagccctcctgtcacgtctaacacctccccccccccagctgccccacttgctcgggcagaaagcagttcttccatcagctcaagcgccagcttgtccgccgcaaacacgccaacagtcggcgtttccagaggcccttcacccgtttcactggggaaccaggacacccttccagtggcagtggctctcactgagagtgtgaatgcctacttcaagggggccgatcctaccaagtgcattgtgaagatcacaggcgacatgacgatgagcttccctagtggcattatcaaagtgttcacaagcaaccccacaccagccgtactatgcttcagggtgaaaaatatctctaggttggagcagatcctgcctaacgcccagctggtattcagcgacccttctcaatgcgacagtaacactaaggatttctggatgaatatgcaggccgtgactgtgtacctgaagaagctgtccgagcaaaacccagctgcctcttattacaacgtggacgtgctcaagtaccaggtgagtagcaacggcatacagagcactcccctgaacctggccacatactggaagtgttcagcaagcacgacagacttacgagtagactacaaatataatcccgaggccatggtggctcccagcgttctgtccaatatccaggttgtcgtgcccgttgacggtggcgtgaccaacatgcaatcgctgcccccagccatctggaatgcagagcaaatgaaggccttctggaaattgtcttctatttcagaaaagtctgaaaatggcggcagcggcagcctccgcgccaagttcgatctcagcgagggaccttcaaaacctacgacgctcgcagtgcagttcctgagtgaggggtccacactttctggtgtagatttcgagctcgtcggtactggttaccggttaagcctgatcaagaaacgcttcgccacgggaaggtacctcgcagactgttag

SEQ ID NO: 116935 - DNA, 1668 bp, synthetic construct
  misc_feature 1..1668: note = Description of Artificial Sequence: Synthetic coding sequence
  source 1..1668: mol_type = other DNA
atggcccggcctgacgacgaagagggtgccgctgtcgcccctgggcatcctctggctaaaggatacttaccgctccctcgcggagctcctgtgggcaaagagagcgtcgagctacagaacggaccaaaggctgggacattccccgtgaatggcgcacctcgcgactccctggcggccgcttctggggtcctaggcgggccacagactcccctggcgcccgaggaagaaacccaggccagactgctgccagctggtgccggcgctgaaacccctggggccgaatctagcccccttcccctgaccgcgttgtcaccccgtcggttcgtcgtcctcctgatcttttctctctacagcttggtgaatgcttttcagtggattcaatactcaatcatctctaatgtgttcgaaggattttatggggtcacactgctgcacatcgattggttgagtatggtttacatgctggcttatgtccccctcattttcccggcgacttggctcctggacaccagaggtttgagacttaccgctctgcttggcagtggcctgaattgcttaggcgcttggataaagtgcggttctgttcagcagcacctgttctgggtgaccatgcttggacagtgtctatgttctgtcgcccaggtctttattctcgggctaccctcacgcatagcatcagtttggttcggaccgaaagaggtatcaactgcctgtgccaccgcggtgctagggaaccaactggggacagcagtgggctttctgctgccacccgtactcgtgccaaacacccagaacgataccaatttactggcctgcaatatctccactatgttctacggcacttcagctgtagccacacttttgttcattctgacagccattgcattcaaagaaaagccccggtacccaccgtcccaagcacaggctgccctacaagacagtcccccagaggaatattcctataaaaaaagcattagaaacttgtttaagaatatcccctttgttctgctgctcattacgtatggcatcatgaccggagccttctactcggtgtctacgctgttgaaccagatgatcctcacctactacgagggagaagaggtgaatgcaggccgcataggactgacgttggtcgtcgcaggaatggtggggtctattctgtgcggtttgtggctggactacactaagacatataagcaaactacacttatcgtgtatattctatcatttattggtatggtgatcttcacatttacactggacctgaggtacatcattattgtctttgttacgggtggagtgcttggtttctttatgacaggctatcttccattaggctttgagttcgcagtcgaaataacctaccccgaatccgaagggacctcatctggacttcttaatgcctcagcccagatttttgggattctctttacgctagctcaggggaaactgaccagcgattacgggccaaaagcaggtaacatattcctgtgtgtgtggatgtttattggtattattctgactgctttgatcaaatctgacctacggcgtcacaatattaatatcggaatcacaaatgttgacgttaaagcaatccctgcggatagtccgacagatcaagaacccaaaacggttatgttgtccaagcagtctgagtccgctatatag

SEQ ID NO: 116936 - DNA, 2469 bp, synthetic construct
  misc_feature 1..2469: note = Description of Artificial Sequence: Synthetic coding sequence
  source 1..2469: mol_type = other DNA
atgggctttggatcagacctcaaaaattcccacgaggcagttctgaaacttcaggactgggaactgcgcctgctggagactgtgaagaaattcatggcactccggataaagagcgacaaagaatacgcatcgactctgcaaaacttatgcaatcaggtcgataaggagagtacagttcagatgaactacgtgagtaatgtctcaaagtcatggctgttgatgatacagcagaccgagcagcttagtcgcatcatgaaaacccacgcagaagatctcaactctggaccgttgcacagacttactatgatgatcaaagataagcagcaggtgaagaagtcgtacataggtgtgcaccaacagatagaggctgagatgattaaggttacaaaaactgagctagaaaagctgaagtgcagttacaggcagctgattaaggaaatgaactcagctaaggaaaagtacaaggaggccctggcaaaggggaaagagacggaaaaggccaaggaaaggtacgataaagccactatgaagttgcacatgctgcacaatcagtacgtcctggctctgaagggtgctcaactccaccaaaaccagtactatgacatcactttgcccctcttgctggactctcttcaaaagatgcaggaggagatgataaaagctctcaaagggatcttcgacgagtattcacagatcacatccctcgttacggaggaaatcgtgaacgtgcataaggaaatccagatgtcagtggagcagattgatccatcaactgagtataacaacttcatagatgtccaccggactacggcggctaaagaacaggaaatcgagttcgatacctctcttttagaagagaatgagaacctgcaggccaatgagataatgtggaacaacctgaccgccgagtcactccaagttatgctgaagactctggcggaagagctgatgcagacacagcaaatgctgctgaacaaagaggaggctgttcttgagctcgagaagcgcattgaggagagtagcgagacttgtgaaaaaaagtccgatatagtgcttctgctgtcacagaagcaggccctagaggaactgaaacagtccgtgcagcagcttaggtgtacagaagcaaagttttcagcacagaaggaactgttggagcagaaggtgcaggaaaacgatggaaaagaacccccccccgttgttaattatgaagaggacgcccgatcggtcaccagcatggagcggaaagaacgacttagcaaattcgaaagtatcaggcactcaattgcgggcatcattaggagccccaaaagtgccctcggctcttccgcattgtcagacatgatttccatttctgaaaaaccactggcggagcaggactggtatcacggagccattcccaggatcgaggcgcaagagttacttaagaagcagggggactttctcgtgcgggagtctcacggcaaacccggggaatatgtcttgagcgtgtacagtgatggacagcgacgacactttatcattcaatacgtggacaatatgtacagatttgaaggtacggggttctcaaatattccccaactcatcgatcaccattacacaacaaaacaggtcatcaccaagaaaagtggcgttgtgctgctcaaccctatccccaaagataaaaaatggatcctgtcacatgaggatgttatcctgggtgagctgttgggaaaagggaatttcggtgaggtgtataaggggacgctcaaggacaagacaagcgtagccgtcaagacatgtaaggaagatcttcctcaagagctgaagattaagtttctacaggaggctaagatccttaagcagtatgatcatcctaacatcgtcaaactaattggcgtatgtactcagcgtcaacctgtatacattattatggagcttgtctctggcggggactttttgacattcttgagacggaagaaagatgaactgaaacttaagcagctggtgaagttcagcctggacgccgcagccggcatgctgtatctggaaagcaagaactgcatacatcgggacttagccgctcgcaactgtctggttggcgagaacaacgtgttaaagatcagtgatttcggcatgtctcgccaggaggacgggggagtttactcttctagcggccttaagcagatccccataaagtggacagcccccgaagcactcaactatggtcgatactcatctgagagtgacgtgtggtcttttggaatccttctctgggaaacgttttcactaggggtatgtccctaccccggcatgaccaaccagcaggctagggagcaagtggaacggggatacaggatgagcgcacctcagcactgtccggaagatatatctaaaatcatgatgaaatgttgggattacaagccagaaaatagacctaagttcagtgaactccagaaggagcttacaatcatcaagcgcaagcttacttag

SEQ ID NO: 116937 - DNA, 1944 bp, synthetic construct
  misc_feature 1..1944: note = Description of Artificial Sequence: Synthetic coding sequence
  source 1..1944: mol_type = other DNA
atgaagctgcacatgctgcataatcaatatgtgctagccctgaagggagcccagttacatcagaaccaatattacgacatcactttgccactgctcctggacagcctgcagaaaatgcaggaggaaatgattaaagcccttaaagggatatttgatgagtactcccagataactagcttggttacggaagaaatagtgaacgtgcacaaagaaatccagatgtccgtggagcagattgatccatccacggagtataacaacttcattgatgtgcatcgcacaaccgctgctaaggaacaagagatcgagttcgacacctcactattagaagaaaatgagaatcttcaggctaatgagatcatgtggaacaatctgaccgctgaaagcttacaggttatgctgaagaccctggctgaggagctgatgcagactcagcaaatgttgctgaataaggaggaggccgtgctggagttagagaagaggattgaggaaagctcagagacatgtgagaaaaaatcagacattgtattactgctgtcacagaagcaggcactggaggaattaaagcagagtgtgcaacagctgcgctgtacagaagccaagttctccgcccagaaagaactcttagaacaaaaggtccaggaaaatgatggcaaagagcccccaccagtggtcaattatgaagaggacgccagaagtgtgacatctatggagaggaaagaacggctctcgaaattcgagagcatccgacattccatcgccggaataatccgctcaccaaaaagtgccctagggtcatcagccctctccgatatgatcagtatttccgagaagcctctcgcagaacaagactggtatcatggagcaatcccaagaatcgaggcgcaggaacttcttaaaaagcagggcgacttcctagtcagagaaagtcacggcaagcccggagagtatgtgctgtccgtgtacagcgatggccagaggaggcatttcatcattcagtatgtggataacatgtatagatttgagggaacgggcttttcaaatatccctcagctgattgatcaccactatacaactaagcaggtaattacaaaaaaatcaggcgttgttctcttgaatccaatccctaaggacaaaaagtggatcctgtcccatgaggatgtgattctgggcgagctactcggcaaaggaaattttggtgaggtgtataagggaacgcttaaggataagacaagtgtggccgtgaagacttgcaaggaagacctgccgcaggagctgaagattaaattccttcaggaggctaagattttaaaacagtacgatcaccctaacatcgtgaaactaatcggggtctgcactcagcggcagcctgtgtacatcatcatggaactggtctctggcggtgattttctgacgttcttgcgtcgaaagaaggacgaattaaagctgaagcagctggtaaagttctctctggacgctgccgcaggcatgctctatctggagtctaaaaattgcatccatagggacttggcggccagaaattgcctggtgggagagaataacgtcctcaaaatctccgatttcggaatgagccggcaagaagatggcggggtatactcatctagtggtctaaaacagatacctatcaagtggacagcccctgaggcactgaattacggtaggtatagtagcgagtccgacgtgtggtccttcggtatcctgctgtgggagacctttagcttgggggtttgcccatacccgggtatgaccaaccagcaggcaagagaacaagtggagagggggtaccgcatgagcgcgccccagcattgccccgaggacataagcaagattatgatgaagtgctgggactacaagcctgagaatcgacccaagttctcggagttgcagaaggagctgactattattaaacgcaagctcacgtag

SEQ ID NO: 116938 - DNA, 981 bp, synthetic construct
  misc_feature 1..981: note = Description of Artificial Sequence: Synthetic coding sequence
  source 1..981: mol_type = other DNA
atgggcttcggctccgacctaaagaacagccatgaagccgtcttgaagttgcaggactgggaactgcggctcctagaaacggtgaaaaagtttatggcactgaggataaagtccgacaaggaatacgccagcacgctgcagaacctgtgtaaccaggtggataaagagagcacggtgcagatgaactacgtctctaatgttagtaagtcatggctgctgatgatacagcaaacagagcagctgagccggatcatgaaaacccacgccgaggatctgaactcgggtccactgcataggctgaccatgatgatcaaggataagcaacaggtgaagaagtcatacatcggagtgcatcagcagatcgaagctgagatgattaaagtgactaaaaccgaactggaaaaactgaagtgtagctaccgccaactgatcaaggagatgaatagtgccaaagagaagtataaggaggccctggccaaaggcaaggagacggaaaaagcaaaggaaaggtatgacaaggctactatgaagctgcatatgctgcacaatcagtacgtcctcgccctgaagggcgcccaactgcaccagaaccagtattacgatataactctgcctttattattggatagcctgcagaagatgcaggaggagatgatcaaggccctgaagggcatcttcgacgagtatagccagatcacctccctggtcaccgaggagattgtgaacgtgcacaaagagattcagatgagcgtggaacagatagatccaagcactgaatataacaatttcatagacgtgcatcggaccacagcagctaaggaacaggaaatcgaattcgacaccagcctgctggaggagaacgagaatctccaggcaaacgagattatgtggaacaacctcacagcggaaagcttacaggtaatgaaagagcgccgggggtatcctaatttaaacttattcgttatacagttactggagtag

SEQ ID NO: 116939 - DNA, 3855 bp, synthetic construct
  misc_feature 1..3855: note = Description of Artificial Sequence: Synthetic coding sequence
  source 1..3855: mol_type = other DNA
atgcacgtgtttatcgtgggaatgtcgttgagttctgtgacgttggccagcgcattgcaggtgagaggagaggcactgtccgaggaggagatatggagtctcctgttcctcgcggcagaacagctccttgaggacctgcggaatgactcgtctgattatgtggtctgcccttggtctgctctgctctcggcagcggggtcactgtctttccagggccgcgtgtctcatattgaggctgccccgtttaaggccccggaactcttgcaggggcagtccgaagatgaacagcccgacgcgtcccagccactgcagctgtgcgagccactccattcaatcctgttgaccatgtgcgaggatcagccacacagacgttgtacgctacagtctgtgctggaagcgtgtagagttcatgagaaagaagtgtctgtgtaccctgcaccagcaggtctgcacattcgccgcctagtgggcttagtgcttggaaccatctcagaggtcgaaaaaagggtggttgaagagtctagctcggttcagcagaaccgcagttacctgctcagaaaacgcttgcggggaactagctcagagtcacctgctgcccaagccccggagtgcctccatccctgccgcgtgtctgagcgaagtacagagacccaatcatctcccgaaccacattggtccacacttacccacagccattgctcgttgctggttaacagggcactgccaggcgcagatccccaggaccagcaagctgggcgtcgcctcagctctggctcggtgcactcagcggccgactctagttggccaacaacaccaagccaaagaggattcctccagcggagatcaaagttttcaagacccgaattcattctcttggccggggaggccccaatgaccctgcatcttcctggaagcgtggtaacgaaaaaaggcaaatcatatcttgctctgagagatctgtgcgttgttctgctgaacggccagcacctggaggtcaaatgcgacgtggagtccaccgttggagctgtttttaacgccgtgacttcatttgccaatctggaggaattgacctactttggactggcctatatgaagtcgaaagagttcttcttcctggactccgagacgagactctgtaaaattgcacccgaagggtggcgcgagcagccacagaagacatctatgaacacattcacactctttctgagaatcaaattttttgtgtcccattatggactgctccaacattctctcactcgtcatcagttttatttacagcttcgcaaagatatcctggaagagagactgtactgcaatgaagagattttgcttcagctgggagtgctagctctgcaggcagagttcgggaattatcctaaggaagtggaaagcaaaccatatttccacgttgaggattatatcccagcctcgctcattgagcggatgactgctctgagggttcaagttgaggtcagcgagatgcaccgcctgtcaagcgcactctggggcgaggatgccgagctgaaattcctgagggtcacacagcagcttcccgaatacggcgtcctcgtacaccaggttttctctgaaaaaagaaggcctgaggaggaaatggctctcggcatatgtgctaagggagtcatcgtgtacgaggtgaagaacaactctcggattgccatgctgcgattccagtggagggaaactggtaagatatcaacgtaccagaaaaaatttacaattactagctcggttaccggcaaaaaacacacattcgtgacagactccgccaagacaagcaaatatcttttggacttgtgctcagctcagcacggatttaacgcccagatggggtccgggcagcccagccacgtgctgtttgaccatgacaagttcgtacaaatggccaacctatccccagcccaccaggcaagatcgaaacctctcatttggatacagcgcctatcttgctcagagaacgagttgtttgtcagtcgtctgcagggggccgctggtgggttgctgtcaacaagtatggataacttcaacgtcgacggttccaaggaggcaggcgccgaagggattggacgtagtccatgtactggaagagagcagctgaaaagcgcttgtgtgattcagaagccaatgacatgggacagcctgtctggaccaccggtgcaatccatgcatgccgggtcaaaaaacaatcgacgtaagtccttcatcgcagagcccgggagggaaatcgtgcgtgttactctgaagcgcgacccgcatcggggcttcggattcgtcataaacgagggtgaatatagtggacaagcagacccaggaatttttatttccagtatcatcccaggtgggcccgcagaaaaggcaaaaacgattaaacccgggggacagattttagctcttaatcacatctctctggagggctttacattcaacatggctgtccgcatgatccagaattctccggataatatcgagcttataattagtcagtcaaaaggagttggaggcaacaatccagacgaagagaagaactcgaccgctaattcaggcgtgagctccactgatatactgtcttttggctaccaaggcagtcttctgagccatacacaggaccaggacaggaataccgaggaactggatatggctggggtccagtctttggtgccgcggcttagacatcagttgtcctttctgcctttaaagggggctggatccagctgcccaccctcaccacctgaaatctcagctggggagatatatttcgtggaacttgtcaaagaggacggtacccttggcttttctgtgacgggggggataaatacttctgtcccctacggtggaatttacgtcaaaagcatagtgcctggaggtcccgccgccaaggagggccagattctacagggagaccggctgctccaggtggatggcgtgatattatgcggcctgactcataagcaggcagttcaatgcctgacaggtcccggacaggtcgcaagattagtcctcgaaagacgcgtgcctcgtagtacacagcagtgtccctcagcaaacgattcgatgggggatgaaagaaccgctgtcagtctcgtcaccgccctgcccggccggccctcctcctgcgtgtccgtaaccgacgggcctaagtttgaggtgaaactcaaaaaaaacgccaacggtctgggtttctctttcgtgcaaatggagaaagaaagttgttcgcacctgaagagcgacctggtgcggattaaacgtctgtttcctggtcagccagccgaagaaaacggagcaatagccgcaggcgatataattcttgctgttaatggaaggtcaaccgaagggctgattttccaagaagtgctccacctactgagaggggcaccacaggaggtaacattgctgctgtgtcgccccccgcctggagctctgccagaattagaacaggaatggcagaccccagagttaagtgccgacaaggagtttacacgggccacgtgcaccgactcctgtacttcacccatactcgaccaggaagacagctggcgggatagcgcgtccccagatgcgggagaggggctgggattacgccctgaatccagccagaaggccatacgggaagcacagtggggacagaaccgcgagcgtccatgggcatccagtttaacgcattcgccagagagccatcctcatctgtgcaaactccatcaggaacgggatgagagcactctggcaacatctttagagaaggacgtgcggcaaaattgttacagcgtgtgcgatataatgcgtctgggcagatactccttcagcagtcccctaacaagactgagcactgatatcttttag

SEQ ID NO: 116940 - DNA, 3930 bp, synthetic construct
  misc_feature 1..3930: note = Description of Artificial Sequence: Synthetic coding sequence
  source 1..3930: mol_type = other DNA
atgcaacccttgactaaagacgccggcatgtcactttcttctgtgacgttggcctccgccttgcaggtgaggggagaggccctgagtgaggaggagatttggagtcttctgtttctggctgccgaacagcttttggaggatctgagaaatgatagtagcgactacgtagtctgcccttggtcagctttactaagcgccgccgggtcattgtcattccaggggcgcgtcagtcacatcgaggctgcccctttcaaagcccccgagttgctgcaagggcaatccgaggacgaacagcccgatgccagtcagatgcacgtgtactccctcggcatgacactgtactggagcgcaggattccacgtacccccacatcaaccccttcagctgtgcgaaccattgcattctatacttttgacgatgtgtgaagaccagccacacagaaggtgcactctgcaaagcgtgctggaagcttgccgcgtacacgagaaggaagtgagcgtctatccagcacccgccgggctgcatattcgcagattggttgggctggttctcggaacaatctccgaagtggagaaacgagtggtcgaggagagtagctctgtccagcagaataggagttaccttttgagaaagaggttaagaggaacttccagcgagtcccctgccgcccaagcaccagaatgtctgcatccgtgcagggtcagcgaaaggagcactgaaacacagagcagccctgaacctcactggtcgaccttaacacattcccattgttccttacttgtaaacagggcgctccccggcgccgacccacaggatcagcaggccggccgcaggctctcctctggttcagttcattctgccgcagactcctcatggcctacaacccccagccagcggggctttctgcagagaaggagcaaattttcccggcccgagttcattttacttgcgggtgaagctcccatgaccttgcatttacccggtagcgtggtcacaaagaagggaaagagctacctggccctcagagatctgtgcgtcgtgcttttgaacggtcaacatcttgaggtaaagtgcgacgtggaatccaccgttggtgccgtatttaatgctgtgactagctttgccaatctggaggagcttacctactttggtttagcttatatgaagtcaaaggaattctttttcctggacagcgaaaccagactgtgcaaaatcgctccagagggatggagagaacagccccagaaaacttcaatgaatacctttactctgttcctgcggatcaagttcttcgttagccactacggccttctgcagcattcgcttacccgccatcagttttacctgcagctgcgtaaggacattctcgaagagagattgtattgtaacgaagaaattctgctacagctcggagttctggccctccaggccgagtttggaaactacccaaaagaacaggtcgaaagtaaaccctatttccatgttgaggactacatcccagcctctctgattgagcgcatgaccgccttgagagtgcaagtggaagtttccgaaatgcaccgcctgtcttcagccctttggggggaagatgcagaactgaagtttctgagagtgacacagcagctgcccgaatacggggtgctggtgcaccaggtgtttagcgaaaagcgtagacccgaggaggaaatggctttaggaatttgcgccaaaggggtgatcgtctacgaggtgaaaaacaatagcagaatcgcgatgttaagattccaatggcgggagactgggaagatttcaacctaccagaaaaaattcacaataacgtctagcgtcacgggcaagaagcacaccttcgtgactgacagcgctaaaacgtctaagtacctgctagacctctgctccgcccagcacgggttcaacgcccaaatgggatctggccagccttctcacgttctcttcgaccatgacaagttcgtgcaaatggctaatttaagccccgcacatcaggctaggagcaaaccgttaatctggattcagcggctgtcctgctccgagaatgaactgttcgtatccagactccagggagcagcaggcggcctgcttagcactagcatggacaactttaacgtcgacgggtccaaggaggcgggtgcagagggaatagggcggagcccctgcacaggaagggagcagctgaagagcgcttgtgtcatccagaagcccatgacctgggactctctgagcggtccaccagtacaaagcatgcacgccggttccaagaataacagaagaaaatctttcatcgccgaaccaggcagggaaatcgtcagagtgaccctcaaaagagacccccaccggggatttggctttgtgatcaacgaaggggagtacagtggccaggccgatccaggtatattcatttctagcattatcccgggtgggccagctgagaaggccaaaaccataaagcccggcgggcaaatactggccttgaatcacatctctctggagggttttacattcaatatggccgtgcgcatgattcagaactcgcctgataacatagagctgattatcagccaatctaagggtgtaggaggcaacaacccagacgaagaaaagaatagcacagctaattccggagtgtctagtacagacattctgagcttcggttatcaaggcagtctcctgtctcacactcaggaccaggataggaatactgaagagctcgatatggcaggtgtgcagagcctggtacctcgattgcggcaccaactcagttttctgccccttaaaggcgctggctcatcatgcccccctagtccacccgagatctccgctggagaaatctatttcgtcgaactggtaaaagaagacggcacactcggtttctccgtcactggcggcatcaatacctccgtgccatacggtggaatctacgtgaaatctatcgtgccgggggggcccgccgctaaggaaggtcagatcctacagggagacagattactgcaagtcgacggtgtaatactctgcggtctgactcataaacaggccgtgcagtgccttacaggtcctggtcaggtcgctagactggttctcgaacgcagagtcccaagatccacacaacagtgtccctctgccaacgattccatgggagacgaacgaacagccgtgagcctggtcaccgctctgcccggcagaccaagttcatgcgtgtccgtcacggacggacctaagtttgaggtaaagctcaagaagaatgcaaatggactgggatttagcttcgtccaaatggaaaaagagtcatgcagtcacttgaagagcgaccttgtgcggataaaaagacttttccccggacagcccgcagaggaaaacggtgcaattgcagcgggggatatcattttggcagtgaacggaaggtcaactgaaggactgattttccaagaggtcctgcacctgttacgcggggctcctcaggaagtgactctgttactgtgcagaccaccccccggagccctccctgaacttgaacaggagtggcagactccagagctttccgctgacaaggaatttacacgggccacatgcaccgactcctgtacttcacccattttggaccaagaggacagctggcgggacagcgccagtcctgacgccggcgagggcctaggcctgcggcccgaatcaagtcaaaaagccattcgggaagcccagtggggccagaaccgtgagcgaccttgggcatccagtctgacccattcccccgaatctcatccacatctgtgcaaattgcaccaggagagggacgaatcaaccctggccacctctctcgaaaaggatgtgaggcagaactgctattccgtgtgtgacatcatgcgattaggcagatactcattcagtagccctctcacaagactgagtacagatatcttttag

SEQ ID NO: 116941 - DNA, 3834 bp, synthetic construct
  misc_feature 1..3834: note = Description of Artificial Sequence: Synthetic coding sequence
  source 1..3834: mol_type = other DNA
atgagcttaagctccgtgacactggcctccgctttgcaggttcgcggggaggctctgagtgaggaagagatttggtctctgctgtttttggctgcagagcagctgttggaggatctccgaaatgatagctccgactatgttgtgtgcccctggtccgctctcctctcagctgccggctccctctcctttcagggacgggtgtctcacatcgaggctgcccctttcaaagcccccgaactcctccagggacagtcggaagacgaacagcccgatgctagtcagccactgcagctttgtgagccgctgcatagcattctcctgacaatgtgtgaggatcaacctcatagacgttgcactttacagagtgttctggaggcttgccgcgttcacgagaaagaagtctctgtttacccagctccagccggcctgcacattcgtcgtctcgtcggactcgtgctcggcaccatttctgaggtagagaaaagggtggtcgaagaaagcagctctgtgcagcagaacaggtcttacctccttcgaaaacggctgcgggggacgagttctgaaagtcccgctgctcaggccccagagtgcctgcatccatgcagggtatctgagcggtcaaccgaaacacagtcctcgccagagccgcattggagcactttgacacacagccactgcagcctgctcgtgaaccgggccctccccggggcggatcctcaagaccagcaggcaggcaggcgtctcagcagcggttcggtgcactctgcagctgacagcagctggcccaccacacctagccagcggggctttctgcagcggcgatctaagttcagtcgccctgaatttatcctgctcgctggtgaagctccaatgaccctgcacttgcccgggtcagttgttacaaaaaagggtaaaagctatttagcgcttcgcgatctgtgcgttgtattgctcaatggacagcatctcgaggtaaagtgtgacgtagagtccactgtgggagcagtcttcaacgctgtaacatccttcgccaatctcgaggagttaacttatttcggtctggcatacatgaaatctaaggaatttttttttttggattctgaaacgagactctgtaaaattgcacccgaggggtggcgcgagcagccacagaaaacctccatgaacaccttcacgctattcctgcgcattaagttcttcgtgtctcattacggtcttctccagcatagccttacacggcaccagttctacctgcagctgcggaaggacatcctcgaagagagactgtactgcaacgaggagattctcttacagctcggcgtgctggcactgcaggctgagttcggaaactatcctaaggaggttgagtccaaaccatatttccacgttgaggactacatcccggcaagtctgatcgagcggatgacggccctgcgggttcaggtcgaggtgtctgaaatgcaccgtctgagcagtgccctgtggggggaggatgccgaattaaaattcttgcgggtgacccagcagctgccagaatacggagtgctggtgcaccaggtcttttctgaaaaaaggcgtcctgaagaagagatggccctgggcatttgcgctaagggagtgatcgtgtacgaggtgaagaacaactctagaattgccatgttgaggtttcaatggcgcgagaccgggaagattagcacttaccagaagaaatttacaattacaagctcagttactggaaaaaagcataccttcgtaacagactcggccaagacatcgaagtacctgctggacttgtgttccgctcagcatggctttaacgcacagatgggttccggccagccatcgcacgtcttgtttgatcacgataagttcgtgcagatggccaatctatcaccagcccatcaggctaggtccaagcccctgatttggattcagcggttgagttgttctgagaatgaactgtttgtgtctcggcttcagggtgctgcgggcggcctcctgagcacatccatggacaacttcaacgtcgatggaagtaaagaggcaggcgccgaggggattggaagatccccttgcacgggcagggaacagctgaaatccgcttgtgttatccaaaaaccgatgacctgggattccctttcagggccacccgtacaatccatgcacgccggaagcaagaacaaccgacggaagagctttatcgcagagccaggacgggaaattgtaagagtaaccctgaagagagatccacacagagggtttgggttcgtcatcaacgaaggcgagtactcaggacaagccgaccccggaatctttatcagtagtatcattccggggggaccggctgaaaaagccaaaactatcaagcccggcggacagatactcgctctgaatcatatctcactggaagggttcacattcaacatggccgttaggatgatccagaattcccctgacaacattgaactcatcatatcccagtccaagggagtgggaggtaacaaccctgatgaggaaaaaaattcaacggcgaacagcggcgtaagctctactgatatcttgtcattcggctaccagggttctttactctcacatacccaagatcaggacaggaatacagaagagctggatatggctggcgttcagtctttggtgccacgcctcagacaccagctttcatttctgcccttgaaaggtgctggcagtagctgtccaccaagtcccccagagatctctgccggcgaaatctatttcgttgagctggtgaaagaggatggaactttaggattcagcgtaaccggggggatcaacacctccgtgccttacgggggaatttacgttaaatccatcgtgccgggaggccccgctgccaaagagggccaaatccttcagggagatcgccttctgcaggtggacggcgtcatcctgtgcggacttactcacaaacaggctgtgcaatgtctgaccggccctggacaggtggctaggctggtgttggagagaagagtccccagatcgacgcagcaatgcccctccgctaatgacagtatgggcgatgagaggaccgctgtttctcttgtgaccgctctgcccggaaggccctcctcttgtgtgtcggtaaccgacggtcccaagtttgaagtgaaactcaaaaagaatgcaaatggtctgggattcagctttgtccagatggagaaagaatcctgctctcaccttaaaagtgatctggtgcgcatcaaaaggctgtttcctggccaaccagccgaggaaaacggtgcgattgccgcaggagatattattctggcagttaacggcagatccaccgaaggcttaattttccaggaagtgttgcatttgcttaggggtgcaccccaggaggtgacccttctcctgtgtcggcctcccccaggggcattgcctgaattagagcaggagtggcagactcctgaactgagtgctgataaggagtttactagagctacatgtacagattcttgcacttctcctatcctggatcaggaggatagttggagggacagcgctagcccagatgcgggcgaggggttgggcttgcggcctgagtcttcgcagaaggcaatcagagaggcccagtggggacaaaatagagaacggccctgggcaagctccctgacacactccccagagtcccacccacacctgtgtaaactgcatcaagagagagacgagtcaactttggccacgagcctggaaaaggacgtccgacaaaactgttattcagtttgtgatatcatgcggcttggccgttacagtttcagtagccccttgacgaggctcagcaccgatattttttag

SEQ ID NO: 116942 - DNA, 786 bp, synthetic construct
  misc_feature 1..786: note = Description of Artificial Sequence: Synthetic coding sequence
  source 1..786: mol_type = other DNA
atgggtgatgaacggacagctgtgtcccttgtcacagcgcttcccggtcgtccatctagctgtgtttcagttacagacggcccgaaattcgaggtgaagctgaagaaaaacgccaacggattgggcttttctttcgttcagatggagaaggagagctgtagtcacctaaaatcagatcttgttcggataaaacggttattccccggacagccagcggaggagaatggcgccattgccgccggtgatattatcctagctgtgaatgggagaagcactgagggcctgatttttcaggaggtcctccacctgctgagaggggcccctcaggaagtgaccctgttgctgtgcagacccccgcccggggcactgccagaactggagcaggagtggcagactcctgaactcagcgcagataaagagtttacacgggctacttgcacggattcgtgtacatctcccatccttgaccaggaggatagctggagagatagtgccagcccggatgcgggagaggggctagggttgcgccctgagtcgtctcaaaaggccattagagaggcccagtgggggcagaaccgggaacgaccatgggccagcagcctgacccactctccagagtcccaccctcacctatgcaaactgcatcaagaaagagacgagtcaactctcgccactagcctggagaaggatgtacgtcagaattgctatagcgtgtgtgacataatgcggcttgggcggtattcatttagctctcccttgactcggctctctactgacatcttctag

SEQ ID NO: 116943 - DNA, 3936 bp, synthetic construct
  misc_feature 1..3936: note = Description of Artificial Sequence: Synthetic coding sequence
  source 1..3936: mol_type = other DNA
ttctcatcgcaccggaccaagagctctggatggcccccaccctccggcacatggggtctttcccaggtgcccccctatgggtgggagatgaccgcgaatagggatgggagagactactttattaatcatatgacccaggcaattccttttgacgatcctcgactggaatcgtgtcaaatcatcccgccagcgccgagaaaggtcgagatgcggagggatcccgttttgggatttggattcgtggctgggtctgagaagccggtcgtagtgcgctcggtgactcctggcggtccctccgaaggaaagctaatccctggtgaccagattgtgatgataaatgatgagcctgtgtctgcagccccacgagagcgtgtaatagacctagtgcgaagctgtaaggaaagcattttgctcaccgtaatccagccctacccgtcacccaaaagcgccttcataagcgcagcaaaaaaggccagacttaaatctaaccctgtaaaggttcggtttagtgaggaggtgatcatcaatgggcaagtttccgagacggtgaaagataactcgctcttattcatgcccaacgttctgaaggtgtacctagaaaacggccagacaaagagtttcaggtttgactgctccacctcaatcaaagacgtgattctgacattacaagagaagctcagtatcaagggaattgagcatttctctctcatgctcgagcagcgcacagagggggctgggactaagctgctcttactgcacgagcaagagacactgacacaggtcacccagagaccctctagccacaagatgagatgtctctttcgcatttcatttgtgccaaaggatccgattgacctgctgcgccgggatcccgtggcctttgagtatctctacgttcagtcctgcaatgacgtggtgcaagagagatttggccccgagctaaagtatgatatcgcactgcgcctggccgctctgcaaatgtacattgccacggtgacaacaaagcagacacagaagatttccttaaagtatatcgagaaggagtggggcctcgaaacatttctgccctcagccgtactccagtcaatgaaggagaagaacattaagaaagccctgagccacctagtgaaggccaatcagaacctcgtgcctcctgggaaaaagttatccgccctccaggcaaaggtccattatctcaagtttctgtcagatctgaggctgtacggcggtcgcgtgttcaaagcaacactggtgcaggcggagaaacggtcagaggttacgctgctcgtcggccctagatacggcatttcccacgtcatcaatacaaaaacaaacctggtggccctgctggctgatttctctcatgtgaataggatcgagatgtttagcgaagaagaaagtctggtgcgagttgagctccatgtactggacgtaaagcctatcacattgctgatggaatcgagcgatgcgatgaatctggcttgcctgacagctgggtattaccggctgctagttgattccaggagatccatctttaacatggcaaacaagaagaacacggctactcaggagacaggccccgagaacaagggaaagcacaatctcttaggcccggactggaactgtatcccccagatgaccacgtttatcggcgaaggggaacaggaggcacagattacctacatcgatagcaagcagaagactgtggaaatcactgactccacaatgtgtcccaaggagcaccgccatctatatattgataatgcctatagctctgatggactgaaccaacagctctcccagcccggtgaggcgccttgcgaggcggactaccggtccttagcccaacggtcgctgctgacactgagcggacctgagaccttaaaaaaggctcaggagtctccccgaggtgcaaaggtcagttttatctttggggattttgcattagacgatggcatttctcctcctaccctgggatacgagacattgcttgacgaaggccccgaaatgctcgaaaaacagcgcaatctctatattggcagcgccaacgatatgaaaggcttggacttgacgcctgaggcagaggggattcagtttgtggagaatagcgtatatgccaacatcggagacgtgaagtccttccaggctgccgagggcatcgaggagcccttgcttcatgacatctgttatgctgagaacactgacgacgctgaggatgaagatgaagtaagctgcgaggaggacctggtcgtcggagagatgaatcagccagcaatcctgaatctctcaggttcatcagatgacataattgacctgacctccctgcctccacccgaaggggacgataacgaggacgatttcttgttaaggtctctgaatatggccatcgccgctcccccacccggatttcgggattcctccgatgaagaggacagccaatcccaggcggcatcctttccagaggacaaggagaagggatcctcactacagaatgatgagatcccggtgagccttattgacgccgtgccgacctctgccgagggcaaatgcgagaagggtttagataacgctgtcgtctcaaccctaggcgcgttggaggcattatcggtgtccgaggaacagcaaacctccgataattccggagtcgctatccttcgagcctactcacccgaatcgtcctctgatagcggcaacgaaactaactccagcgaaatgactgaaagttctgaactggcgaccgcccagaagcagagtgaaaacctgagcagaatgtttttggccacacacgaaggctatcacccattggccgaggaacagaccgagtttcccgcatccaagactccggctggcggcctgccaccaaagagtagccatgccctcgcggcgagacctgcaacagacctgccccccaaggtcgtgccaagtaagcagttattacactcggaccacatggagatggaaccagaaactatggagaccaagagcgtcaccgactatttttccaagctccatatgggcagtgtggcctattcttgtacgtcgaaaaggaagtccaagttggccgacggagaagggaaagccccccctaacggaaacacgactggcaagaagcagcaagggaccaaaaccgctgaaatggaggaagaagcatctggaaagttcggtaccgtgagttcacgtgactcacagcacctcagtacattcaacctggaaaggacggctttccgcaaggattctcagaggtggtacgtggctacggagggtgggatggctgagaagtccggtctagaggccgctaccggaaagacctttccacgggcatcgggcctgggcgcgagggaggctgaaggcaaggaagagggagccccagatggcgaaacctcagatggctcaggtttgggccaaggtgatagattcctcacagacgttacttgcgcctcttctgctaaagatcttgataatcctgaagatgccgactcctcaacctgtgaccatccctccaaacttcctgaggccgatgaatctgtagcacggctgtgcgattaccatctcgccaagaggatgagttctttgcaaagcgagggccacttctcattgcagtcctctcaagggtcctccgtggatgcaggttgtgggaccggtagcagcgggtcagcatgcgcgacacccgtagagtcaccactgtgcccttcgcttggtaaacatctgattcctgacgcaagtggaaagggcgtcaactacatcccttctgaggagcgagctcctggactgcctaatcatggtgcaacctttaaagagttacatccacagacagaagggatgtgccctcgaatgacagttcctgctttgcataccgccatcaacactgagccactgtttggaactctccgggacggatgccatcgcctcccaaaaattaaagagaccaccgtgtag

SEQ ID NO: 116944 - DNA, 3969 bp, synthetic construct
  misc_feature 1..3969: note = Description of Artificial Sequence: Synthetic coding sequence
  source 1..3969: mol_type = other DNA
atggacgtgttcagcttcgtcaaaatcgctaagctgtcctctcacagaactaaatcttctggatggcctcccccatctggtacgtggggtctgtctcaagtgccaccctacgggtgggagatgacagccaacagggatggaagagactattttatcaaccacatgacacaggccatccccttcgacgatcctcgcctggagtcatgccagatcattcctccggctccaagaaaagtggagatgcgccgagaccctgtgcttgggtttgggttcgtggcaggatccgagaagcccgtggtagtacggtctgtgacgccgggggggccgtccgagggaaagctcattcccggcgaccagatcgtaatgattaatgacgagccagtcagcgcggcccccagggagagggtgattgacttggtccggtcatgtaaggaaagtatcctgcttacggtaatccagccctatccgtcccctaaatcagcatttatcagcgctgccaagaaggcccggctgaaatccaacccagtaaaggtgaggttctcagaggaagtcattattaacggtcaggtgagtgagaccgtgaaggataacagccttctctttatgccgaacgttttgaaggtctaccttgagaatgggcagaccaaatcatttcgttttgattgcagtacatcaatcaaagatgtgattctgacattgcaggagaagttatccataaaagggatcgagcacttcagcctcatgctggagcagcgaacagaaggggctggtaccaaattactgctcttacacgagcaggagacacttacacaggtgacccagcgcccttcttctcataagatgcgatgtctgtttaggattagttttgtccctaaggatcctattgacctcctgcgccgggatcctgtcgctttcgagtacctgtacgtccagagctgcaacgacgtcgtgcaagagaggtttggtcccgaacttaagtatgacattgccctgaggttggccgcattacagatgtacatcgctactgtcaccaccaagcagacccaaaagatctccctgaaatacatagagaaggagtggggtctggaaaccttcctaccctctgccgtgttgcaatcaatgaaagagaaaaatatcaagaaggcgttgtctcacctcgtgaaagcgaaccagaacctggtcccacctggtaaaaagctcagtgctctgcaggctaaagtgcactatttgaagtttctttcagatttgcggctgtatggggggcgggtgtttaaagcaacactggttcaggccgagaagcgttccgaggtcacgttgctcgtgggccctagatatggaattagccatgttataaataccaaaacaaacctcgtcgcgctgctggccgactttagccacgtgaataggattgagatgttttcagaggaagaaagtttagtgagagtcgaattgcatgtgctcgacgtgaagcccattacactgctgatggaaagctctgatgctatgaacctggcatgcctaaccgcgggatattatagactcctagtagacagtagacgctctatctttaatatggccaacaaaaaaaatacggcaacccaggaaacggggcctgagaataaaggaaaacacaacctgcttggaccagactggaactgcatcccacagatgaccacctttatcggagagggcgaacaggaagcccagattacatacattgatagtaagcagaagaccgtcgagattacggactctaccatgtgtccaaaggaacaccgccacctctacatcgataacgcctactcttccgacggacttaaccagcagctgagtcagcccggcgaagcaccatgtgaggccgactatcggtccctcgcccaacggagcctgttgaccttatctggtccagaaacactgaagaaagctcaggagtctccgagaggcgcaaaagtctctttcatcttcggagattttgcactcgatgatggaatcagtccgcccaccctgggctatgagactttgcttgacgaaggaccagagatgcttgagaagcagcggaatctgtatatcgggtctgccaatgacatgaaagggttggatctcactcccgaggccgaaggtatccagtttgtggagaacagtgtgtatgcgaatattggagacgtgaaaagctttcaagccgccgagggtattgaagagcctttgcttcatgacatatgctacgctgagaacaccgacgacgccgaggacgaggacgaagtatcttgtgaggaagacctggttgttggagaaatgaaccagcctgccattctgaatctgagcggctctagtgacgacatcatcgaccttacctccctgcctccacctgaaggggacgataatgaggatgatttcctcctgaggagtcttaatatggcaattgccgcgccccctcccggatttagagacagcagtgatgaggaggactcacagtcccaggctgcctcgttccccgaggataaggagaaggggagctccttgcagaacgacgaaatacctgttagtctgatcgatgctgtgccaacctccgccgagggaaaatgcgaaaaaggtctggataatgccgtggtatccaccttgggggctttggaggcactgagtgtgagcgaggaacagcagacttcagacaactcaggcgtggctatactgagggcctacagccccgagagtagttccgactcaggcaacgaaaccaactcctcggagatgactgagagcagcgagctggcgactgcccaaaagcagtccgaaaatctctcccggatgtttctggctacacacgaggggtaccaccctctggccgaggagcagaccgagttcccggcaagcaagacccctgccggggggttgccgccaaagtcaagtcatgcattggcagcacggccagccactgacctgcctccaaaggtggtccccagcaaacagctccttcactcggatcatatggagatggaaccagaaaccatggagacaaaatcagtgactgactacttttctaaactccacatgggatccgtcgcttatagctgcacctcaaaacggaaatcaaagctggccgacggagaagggaaggcccctcctaatggaaacacgacagggaagaaacagcagggaactaagaccgctgagatggaagaggaggcttctgggaaatttgggacggtgtcctccagagattcacagcatctgagcacctttaaccttgaaagaactgcgttccgcaaagactctcaacggtggtatgtggctacggaggggggcatggcagagaagtcaggtctggaggctgcgaccggtaaaacttttccccgagcaagcggactaggtgcaagagaagctgaaggtaaagaagagggtgctcctgacggagaaaccagcgacgggagcgggcttggccagggcgaccgatttttaaccgatgtcacctgcgcttcttctgctaaagatttagataaccctgaagatgcggactcctccacttgcgatcacccgtcgaaactcccagaggccgacgaatcggtggctcgtctttgtgactaccatttggcgaagagaatgagttctctgcagtcagaaggtcacttcagcctgcaaagctcgcaaggctcaagtgtggatgccggttgcggcaccggatcaagtggatccgcctgtgccaccccagtggagtcaccactttgtccatccctcggcaagcacctcatcccagatgctagtggaaagggcgttaactatatcccttctgaggaaagagctccgggcttgcctaaccatggggctacctttaaagagctgcatccccagacagaggggatgtgtccccggatgaccgtaccggcactccacacggccataaatacggagccattgttcggcactcttagggatgggtgtcatcgactgcccaagattaaggaaacaacagtatag

SEQ ID NO: 116945 - DNA, 3942 bp, synthetic construct
  misc_feature 1..3942: note = Description of Artificial Sequence: Synthetic coding sequence
  source 1..3942: mol_type = other DNA
aaatcccactctccgcacagaaccaagtcttcggggtggcctcctcccagcggaacctggggattatcccaagtgcctccttacggctgggagatgacagccaatagggatgggagggactactttatcaaccatatgacacaggcaatccccttcgacgaccctcggctggagagctgccaaatcatacctccagccccacgaaaagttgagatgagacgggacccggttcttggcttcggcttcgtcgccggctctgaaaagccagttgtggttcgctctgtcaccccgggtggacccagcgaaggcaagctgatccctggagatcagatcgttatgattaacgacgaaccagtcagcgccgcaccaagagagagggtgatcgacctagttcgctcctgtaaggagtccatattgttgactgtaattcagccatacccctcgcccaagagcgcatttatctccgcggccaaaaaggcccgtctgaaatccaatccggtgaaggtaaggtttagtgaggaggtgattattaatggccaggtgtctgaaactgtgaaggacaattcactgctgttcatgccaaatgtgcttaaggtatatctggaaaacggccagactaaaagctttagattcgactgttctacttctatcaaggacgtgattctaaccttgcaggaaaagcttagcattaaaggtatcgagcacttttcacttatgcttgagcagcggacagaaggcgccggcaccaaactgctactgcttcacgagcaagagaccctgacacaggtgacccagcgtccgagcagccacaaaatgcggtgtctcttccggatctcattcgttccgaaggacccgatcgatttgctgcgccgggacccagtagcgtttgaatacctgtacgtgcagtcctgtaacgatgtcgtacaggagagatttggtcccgagctcaagtacgacatcgccctgcggctggcagccctgcagatgtatatcgccaccgtcactactaagcagacacaaaagatcagccttaaatacattgagaaagagtggggtctggagacgtttctgccgtctgctgttttgcagtccatgaaagagaagaacataaagaaggccctgagccatctagtaaaggctaaccagaacctcgtaccaccggggaagaagctgtctgcactgcaggcaaaggtacactacttgaagttcctctcggatttgagactgtatgggggacgcgttttcaaggctactttggtgcaggctgaaaaaagaagcgaggttacgctactcgtgggcccccgatatgggatcagtcacgtgattaataccaagaccaatttggttgctctgcttgctgatttttcgcatgtgaataggattgagatgttctctgaagaagaaagcctagtgagagtcgagctgcatgtgctggacgtgaagccaatcactctcctcatggagtcgagtgatgctatgaatctggcctgcctgacagccggttactatcgcctgctcgtggactcacgacgttccatttttaacatggcaaataaaaaaaacacggcaacccaggaaacaggccctgagaacaaaggaaagcacaacctgctggggcctgattggaattgtattccccaaatgaccacattcattggcgagggggagcaggaggctcaaataacgtatattgacagcaagcagaaaacagtagagataaccgactctacaatgtgtcccaaagagcacaggcatctctacattgataacgcgtattcgagtgatgggttgaaccaacagctctcacaacctggggaggccccttgtgaggcagactacaggagcctagcacagcggtctttgctcactttgtcaggtccagaaacactcaagaaagcgcaagaatcaccacggggggccaaggtgtcattcatctttggcgacttcgccctggacgacggtatcagccctccaacactcggttacgaaaccctactagacgaagggccagagatgctggaaaagcagaggaatctttacatcgggtccgccaatgatatgaaaggtctggaccttactccagaggctgagggcatccaatttgtagaaaattccgtctatgctaatataggcgacgttaagtccttccaagccgcggaaggcattgaggaacccctccttcatgacatctgttatgcagagaatactgatgacgcagaagatgaagatgaagtatcttgcgaggaggatttagtggtaggggagatgaaccagcctgctattttaaacctgagtggaagttcagacgacattatcgaccttacatctctgccacccccagagggagacgataatgaggatgattttctgcttaggtctctgaacatggccatagccgccccaccacccggattccgtgacagctccgatgaagaagattcccagtcacaagctgctagctttcccgaagacaaggaaaaaggatcctctctgcagaacgatgagatacccgtgtccctgatcgacgcagtgccgacttctgccgaggggaagtgcgaaaagggtcttgacaacgccgtggtcagtacattgggagctttggaggcgctcagcgtcagcgaggaacaacagacatccgacaacagcggagtagctatcctccgcgcttactctcctgagagtagttcagacagcggtaatgaaacaaatagctccgaaatgacagaatcttctgagctggcaaccgcgcaaaagcaaagcgaaaacctgtcccgcatgttcctggcaacgcatgagggatatcatcccttagccgaagagcagaccgagtttcctgcctccaagacaccagctggtggtctgccacccaaatctagtcacgcacttgccgcacggccagctaccgacctgccgcctaaggtagtgccgtctaagcagttgctgcacagcgatcatatggagatggagccggaaacgatggagactaagtcagtcacagattatttcagcaaacttcacatgggcagtgttgcttactcgtgcacttcaaagcgcaaatctaaattagcagatggcgagggcaaagcacctcctaacggtaatacaactggaaagaagcagcagggaacaaaaactgccgagatggaggaggaagcctcgggaaagtttggcacagttagttccagagattcacagcacctaagtacctttaaccttgaacgcactgcctttagaaaggacagccagcggtggtacgtagccacagaagggggaatggcagagaaatcgggactcgaggcggcgacaggcaaaaccttcccaagagccagcggcctgggtgcccgagaagcagagggtaaggaggagggtgcacctgatggcgagacttcagatggttcaggactgggccagggagaccggttcctgaccgacgttacctgcgcctcttccgctaaagatttggacaacccagaggatgccgacagcagcacctgcgaccaccccagcaaactaccagaggccgacgagtccgtcgcacggctgtgcgactatcacctcgccaaaagaatgtctagcctacagagcgaaggtcacttttcactccagtcttcccagggttcctccgtggatgcgggttgcggcactggaagcagtggatctgcatgtgcaacccccgtggagtcacctctgtgtccaagtctggggaaacacctgatcccggatgcctcaggcaagggagtcaattacattcccagtgaagaacgtgcgccgggtctgcccaaccatggggctaccttcaaggagctgcaccctcaaacagagggcatgtgcccacggatgaccgtgccggcccttcacaccgccatcaacacggaaccgctgtttggaaccctgcgtgatggatgtcatcggctgcccaagatcaaggagactactggatag

SEQ ID NO: 116946 - DNA, 1794 bp, synthetic construct
  misc_feature 1..1794: note = Description of Artificial Sequence: Synthetic coding sequence
  source 1..1794: mol_type = other DNA
atgtttgcctcttgccattgtgtccccagaggccgcaggaccatgaaaatgattcacttccgttctagcagtgtgaagtctttatcgcaggaaatgcgctgtaccatccgccttctcgacgactctgaaatctcctgtcacatacagcgagagactaaaggacagttccttatcgatcatatttgtaactactactctctactggaaaaggattattttggcatccgatatgtagatcccgaaaagcagagacactggttagaacccaacaagagtatttttaagcagatgaaaacccaccccccctacacaatgtgctttcgggtaaaattttatcctcacgagccccttaagattaaagaggagctcacgagatatctcctgtatctgcagataaaacgcgatattttccatggaagactgctgtgctccttctccgatgctgcttaccttggggcttgcatcgtgcaggccgaactgggagattatgacccggatgaacaccctgagaactatatatccgagtttgagatctttcccaagcagagccaaaagctggaacggaagatcgtagaaatccataaaaatgagttacgcggacagtctcctcctgtggctgagttcaacctgcttctgaaggctcacaccctggaaacatatggcgtggatccccatccttgcaaagatagtacgggcacgacaacctttcttgggtttacagccgccggttttgtcgttttccagggtaacaaaagaatccacttaattaagtggcccgacgtgtgcaaactcaagtttgaaggtaaaactttttacgtgatcgggacccagaaggagaagaaggccatgttagcctttcacacgtccactcccgctgcatgtaaacatttatggaagtgtggcgttgaaaaccaggctttctataagtacgccaaatcatcccagatcaagaccgtaagctcctcaaaaatcttctttaaaggatcccgctttcggtacagtggtaaggtggctaaggaagtggtggaagctagctccaaaatccagcgtgagcctcctgaggttcatcgggcaaacatcacacagagccgctcttcccactctctgaataagcagcttattattaatatggaaccccttcagcccctgctaccatccccgtccgagcaggaggaagaactcccgttaggagagggcgtacccctccccaaggaggaaaacatcagcgcaccactaatttctagcagccccgtgaaagctgcacgcgagtatgaagaccccccaagcgaagaggaagacaagattaaagaagagccactcacaatttccgaattggtctacaatccctctgcatcactattacccactcctgtcgacgatgatgagatcgacatgctcttcgattgcccatcgcgcctggagctggaacgagaggacaccgatagcttcgaagacttggaggctgatgaaaatgcttttctgatcgctgaggaagaggaactgaaggaagcccgaagagcgttaagctggagttatgacatcttgactgggcacatccgggtcaaccccttagtaaaatcattcagtagactcttggttgtgggcctcggactactactgttcgtattcccattgctcctcttactgcttgagtccggcattgacctctcgttcctttgcgaaatacggcaaacccccgaatttgaacaattccactatgagtattactgcccccttaaggagtgggttgccggcaaagtacacctcatcctctacatgctcgggtgttcttag

SEQ ID NO: 116947 - DNA, 642 bp, synthetic construct
  misc_feature 1..642: note = Description of Artificial Sequence: Synthetic coding sequence
  source 1..642: mol_type = other DNA
atgcaggccgaggagaccaaaggcattggaatcacatctatggctaaatgcctggttaaaatacaaacaagacgctcattgcaactgcatatggtgaaccattgtaattcaaacgtattcgtcagactgctgcggctgggctccaaggttacagcacgaaataccggggtcccactgcccaaggaagaaaacatctctgcccccctgatctccagtagccctgtcaaagccgcgagagaatacgaagaccccccctctgaggaggaagacaagatcaaagaggagccactgacaatctcagaattggtatacaatccctcggcttcactcttgcctacgcccgtcgacgacgacgagatcgatatgctgtttgactgtccaagtagattagaacttgagagagaagataccgactctttcgaggatctcgaggctgatgaaaacgcctttctaattgcagaggaagaagaactcaaagaggcacgcagagccttaagttggagttatgatatactgactgggcatatacgagttaatcccctggttaaatctttctctcggctcctggtcgttgggctgggactgctgctgtttgttttcccactgctccttctactcctcgaaagcgtgtctatgcagtag

SEQ ID NO: 116948 - DNA, 804 bp, synthetic construct
  misc_feature 1..804: note = Description of Artificial Sequence: Synthetic coding sequence
  source 1..804: mol_type = other DNA
atgtgctttcgggtgaagttctatccccacgagccgctgaaaataaaagaggagctaacaaggtatctcctttacttacagatcaagcgcgatattttccacggcaggctactgtgtagcttttccgacgctgcatatctgggtgcctgtatcgtgcaggctgagctgggagattatgatccggatgaacacccagaaaattacatcagtgaatttgaaatatttccaaagcagtcgcagaagctcgagcggaagatcgtggagatccacaagaatgagctccgaggacagtcaccccccgtcgccgagttcaacttgctgttgaaggctcacactctggaaacctacggcgtggatccacatccttgcaaagacagcacgggcactacaactttccttggatttactgctgctgggtttgtcgtctttcaggggaacaagcggatccacctcattaagtggccagacgtctgcaagctgaagtttgaaggcaaaaccttctacgtgataggaacccaaaaagagaagaaagccatgctggcctttcacacatcaacgcctgccgcatgtaaacacctgtggaagtgcggcgtggagaaccaagcattttacaagtatgcgaaatcaagtcagatcaagaccgtgtcctcctctaaaatcttcttcaagggcagtcgctttcggtatagcgggaaggtcgccaaggaggtagtagaagccagcagcaaaatccaacgggagcctcctgaggtccacagatgcgttcagaagaagatttgttcgtgctttggggttacctggtag

SEQ ID NO: 116949 - DNA, 1089 bp, synthetic construct
  misc_feature 1..1089: note = Description of Artificial Sequence: Synthetic coding sequence
  source 1..1089: mol_type = other DNA
atggtgttccgcagaggacaatctccaccagtggccgaattcaatcttctgctaaaggcccatacactggaaacctatggggtggatcctcacccttgcaaagattccacagggaccacgacgtttcttggcttcacagctgccggattcgtggtgtttcaggggaacaagagaatccatctgattaagtggccagacgtgtgcaaattaaaattcgaaggtaagactttttacgtgatcggaacacagaaagagaaaaaggccatgctggcatttcacacgagcacccccgctgcctgcaaacatctctggaagtgtggggtggagaatcaggccttctacaaatacgcaaaaagctcacaaatcaagacagtttccagttcaaaaattttcttcaagggatccagattcagatactccggaaaagtcgcgaaggaagtagtcgaagctagctccaaaatacagagggaacctccggaggtccaccgcgccaacatcacacagagccggagctcacacagcctgaacaagcagcttatcatcaacatggagccccttcaacctttacttccttccccctccgagcaggaggaggaactgccactcggtgagggggtaccattgccaaaagaggaaaatatctcggcacccttgatcagctcgtccccagtgaaggcggcaagggagtatgaagaccctcccagcgaggaggaagacaagatcaaggaagagcccctgactatctcagagctcgtgtataacccaagcgccagcctgctgcccaccccagtcgatgatgatgagatcgatatgctctttgactgtccttcccgcctcgaattagagcgtgaggacacagattcatttgaggatttggaggctgacgagaacgcctttctcattgctgaggaggaggagctaaaagaagcacggagagccctctcttggtcgtacgatatcctcacagggcacattcgagttaatccactagtgaagagcttctcgaggctgctcgtagtgggcctagggctgctgcttttcgtgttcccattgctcctcctgctgttagagtcagtcagcatgcagtag

SEQ ID NO: 116950 - DNA, 1671 bp, synthetic construct
  misc_feature 1..1671: note = Description of Artificial Sequence: Synthetic coding sequence
  source 1..1671: mol_type = other DNA
atgttcgcaagctgtcactgtgtacctcgaggccggaggacgatgaagatgatccatttccggagctctagtgtaaagtcccttagccaagaaatgcggtgtacaatcagattgctggacgatagtgaaatttcatgtcacattcagagagagactaaaggccagttcctcatcgatcacatttgtaactactatagtcttcttgagaaggattactttggtatcaggtacgtggatcccgagaagcaacgacactggttagagcccaataagtcaatcttcaagcaaatgaaaactcaccctccatatacaatgtgcttcagagtgaaattctaccctcacgagccactgaaaatcaaagaggagttgaccagatacctcctgtacctacagatcaaaagggacatcttccacgggagactgctttgcagctttagcgacgcagcttatctgggagcctgcattgttcaggccgagctcggcgattatgaccccgacgagcacccggaaaattacattagcgaatttgaaatctttccaaaacagtcacagaaactcgagagaaaaatagtggagattcacaagaacgaactgagaggccagagcccccctgttgcagaattcaatctattacttaaggcccacacacttgagacatacggcgtggacccccacccctgtaaagattcaactggcaccacaaccttccttggctttaccgcagccggatttgtcgtttttcaggggaacaaaagaattcatctcattaaatggccggatgtgtgcaagctaaagttcgagggcaaaaccttttacgttattgggactcagaaagagaagaaggccatgctcgctttccacacctccacaccagccgcttgcaaacacctgtggaaatgtggcgtggagaaccaggccttctacaagtacgctaagagcagccagataaagaccgttagctctagtaaaattttttttaagggatcccgcttccggtactcaggcaaagtcgcaaaggaggtcgtcgaggcctccagcaagatccagagggagccacctgaggtccatcgtgctaacataacacagtcgcggagctcgcactctctcaacaagcagctcataatcaatatggagcccctccagccattgctgccaagcccgtcagagcaggaagaggagttaccccttggcgaaggcgtgccattacccaaggaagaaaatatcagtgcaccccttatctcgtcgtcacccgtgaaagccgcccgcgaatacgaagaccccccatccgaggaggaggacaagatcaaggaagagcctctgaccatctccgaactcgtgtataatcctagcgcctccttgctgccaacccccgttgacgatgacgaaattgacatgctttttgactgtccaagtagacttgaactggaaagagaagataccgatagcttcgaagatctggaagcggacgagaatgcctttctaatcgctgaagaggaggagttaaaagaagctcgccgggctctcagttggtcctacgatattctgaccggtcacatacgggtgaatcccttggtgaagtcattttcccgattactagtggtgggcctcgggctgctgttattcgtctttcccctcctgctacttctgctggagtctgtgtccatgcaatag

SEQ ID NO: 116951 - DNA, 423 bp, synthetic construct
  misc_feature 1..423: note = Description of Artificial Sequence: Synthetic coding sequence
  source 1..423: mol_type = other DNA
ggaaccacaactttcctgggtttcaccgccgccgggtttgtggtcttccagggaaataagcggatccatctcatcaaatggccagatgtctgcaagctcaaatttgaggggaagaccttttacgtgatcggtacccagaaggagaagaaggcaatgctggcctttcacacctctaccccagccgcctgcaaacatctatggaaatgtggcgtggagaatcaggccttctataaatatgccaagtcttcccaaatcaagactgtttcctcaagtaaaatcttttttaaaggcagccgcttcaggtattccggcaaggtggcaaaagaagtcgtggaagccagctccaaaatccagcgcgaaccccccgaagtccataggtgcgtccagaaaaagatatgcagttgtttcggtgtgacctggtag

SEQ ID NO: 116952 - DNA, 2145 bp, synthetic construct
  misc_feature 1..2145: note = Description of Artificial Sequence: Synthetic coding sequence
  source 1..2145: mol_type = other DNA
atgctgcacctcaaagtacagtttctggatgatagccaaaagatattcgtagtcgaccaaaaatcaagcgggaaggccctctttaacctgtcttgcagtcacctgaacctggccgaaaaagaatatttcggcctggagttttgttcccattctgggaataatgtatggctggagttgctgaagccaatcaccaaacaggtcaagaaccctaaagagatcgtgttcaaattcatggtcaaattctttccagtggacccaggacatctgagggaggagttaactcggtacctcttcaccctgcagatcaagaaggacctcgctttaggcaggcttccctgttcagacaactgcacagctctaatggtgtctcacatcctccaatccgagctcggagatttccatgaggaaactgacaggaagcatctggcccagacccggtatctgccgaaccaagattgcctcgaagggaagattatgcactttcaccaaaaacatatcgggcggtctcctgccgaatcagatattttgcttctcgatatagctaggaagttggacatgtatgggattagaccccaccccgccagtgacggagagggtatgcaaatccatttggctgtggctcatatgggagttcttgtgcttaggggcaatacaaaaatcaatacgttcaattgggcaaagatacgcaagctgtcatttaagcgcaaacatttcctcattaagctgcacgccaacatcctggtcctgtgtaaggacacattggaattcacaatggcgtctagggatgcctgcaaggcattttggaaaacttgcgtcgaataccatgcattttttcgtctcagcgaagaacctaaaagcaagccaaaaacgttactgtgcagcaaggggtctagttttcgctatagcggtcgcacccaaaggcagctgctcgagtacggccgcaagggccggttaaaatccctgcccttcgaaagaaagcattatccaagccaatatcatgaacgtcaatgcaggtcctctcccgatctgctgagtgatgtctctaagcaggtcgaggatctgaggctcgcatacggtggcgggtattaccagaacgtgaatggcgtgcatgcctccgagccagtgctagagtctagacggcgtaactccgccctagaggtgacttttgcaacagaacttgaacacagcaagcctgaagctgacccaaccctcctacaccagtcccagtcaagctcttcctttccattcatatacatggatccagtgtttaatacagagcccaatcctaacccagaccccagggacattttcagcgagcgctccagtttgagtagctttcagacgtcctgtaaattcagcggaaaccacatgtcaatatacagtggcctcactagcaaagtgaggcctgcgaaacagttgacttatacagacgttccctacatcccatgcactggacagcaggtgggcataatgcctccacaagtcttcttttacgtcgacaagccaccacaagtgccccgatggtcccctattcgcgccgaggaacggactagtccccacagttacgtcgaacctaccgccatgaagccagcagaaagatctcctagaaatattcgcatgaagtcatttcagcaggatctccaagtgctacaagaggcaatcgccagaacctccggaagatcgaacatcaacgttggattggaagaggaggatccgaacctcgaagatgcatttgtatgcaacatccaggagcaaacccccaagcgtagccagagccaatcagacatgaagacaattcgattccccttcgggagcgaattccgacctttgggcccgtgccccgctctctcccataaagcagacctttttaccgatatgtttgcagaacaggagttgcctgccgtattaatggaccagtcaacggctgagaggtatgtcgcctcagaatcctcagatagtgaaagcgagattctgaaaccagactattatgcattgtatggaaaagaaatccgttcccccatggcacggatccgcctgtccagcggttccctgcagttggacgaggaggatgaggacgcctactttaacactcccactgccgaggatagaaccagcctgaagccatgcaattactttctcgcatag

SEQ ID NO: 116953 - DNA, 1785 bp, synthetic construct
  misc_feature 1..1785: note = Description of Artificial Sequence: Synthetic coding sequence
  source 1..1785: mol_type = other DNA
atggtgagccacatcctccaatccgaacttggcgacttccacgaggagaccgacaggaagcacctggcccaaaccaggtacctgccaaaccaggattgcctcgagggcaagatcatgcactttcaccagaagcacataggaaggagccctgccgagtcggacattcttctcctagatattgcccggaaactggacatgtatggaattcgcccgcatcctgctagcgacggtgaaggaatgcagatccatctggccgtggcccatatgggcgtcctggtgcttagaggcaacacaaaaatcaatacatttaattgggcaaaaattcgcaagctgagttttaagagaaagcacttcctgattaagctgcatgcaaatatcttggtgctctgtaaggacaccctcgagttcacgatggcttctagagatgcttgcaaggccttctggaagacttgcgtcgaataccacgccttcttccgcttaagtgaagagccgaagtctaaaccgaaaacacttttatgctcaaagggctcctcctttaggtactctggaaggacacaacgccagctgttggagtatggtagaaaggggcgactgaagtccctgccttttgagcgcaagcattatccaagtcagtatcatgagagacagtgtcgctcctcccctgatttacttagcgacgtctccaaacaagtggaggatctgagacttgcatacggcggggggtattaccagaacgtgaacggtgttcacgcttcggaaccagttttagaaagcagaagaagaaactcagcgttggaagtcactttcgccacagaacttgagcattccaagcctgaggccgatccgacgctcctacatcaatcacagagcagttccagcttccccttcatttacatggaccctgtgtttaacacggagccgaacccaaacccagacccacgtgacatcttttcagagcgctcaagcctgtctagcttccagacttcctgcaaattctccggcaaccacatgagtatctactctggactcaccagtaaggtacgcccagccaaacagctgacttatacggacgtgccgtacatcccttgtaccggacagcaagtggggataatgcctcctcaggtttttttctacgtcgacaagcctcctcaggtgccacggtggagtccaatccgggccgaggaaaggaccagcccccacagctatgtggaaccgaccgccatgaaacctgcagagcgctctcccaggaatatcaggatgaaatcctttcagcaggatctccaggttctgcaggaagctatcgcaagaaccagcggtcgatcaaatatcaatgtcggactggaggaggaagatcctaacctcgaagacgcatttgtgtgtaatatccaggaacagacccctaagcggtcacaatcacaatccgatatgaagacaatacgttttccttttggatctgagttccgtcctttaggaccctgcccagcgctgtcccataaggcagacctcttcaccgatatgtttgctgaacaagaattacctgctgttctgatggatcagtctaccgccgaacgatacgttgcatctgagtcatcggactctgaaagtgagattttgaagccagactactacgcactctatggtaaggaaattagaagtcctatggcccggataaggctgtcctcaggcagtctgcagctagatgaggaagatgaggatgcctactttaatactcctacagccgaggaccgaacctctttgaaaccctgcaactattttttggcctag

SEQ ID NO: 116954 - DNA, 2043 bp, synthetic construct
  misc_feature 1..2043: note = Description of Artificial Sequence: Synthetic coding sequence
  source 1..2043: mol_type = other DNA
atggccctggatgggattcggatgcccgatgggtgctacgcagacggtacttgggaactatcggtacacgtgacggatctgaatagagacgtcactctgagagtcaccggcgaagtccatatcggtggcgtgatgctgaagttggttgaaaaattggacgtgaagaaagactggtctgaccacgcactttggtgggagaaaaagagaacttggctgctgaagacgcactggaccctggacaaatacggcattcaggcggacgcaaagctgcagttcacaccacagcacaaactccttagactgcagttgccaaacatgaaatacgtgaaggtgaaggtcaacttcagcgaccgggtgttcaaggcggtcagcgacatctgcaaaacctttaacattcggcacccagaggaactgagcttgctgaaaaaaccacgggatcctacaaagaaaaagaagaagaagctggacgatcagagtgaggatgaagcgcttgagctcgaggggccacttattactccaggctccggttctatctatagttccccgggcctttattctaagactatgacgcccacttatgacgctcatgatggaagccccttgtcacctacctcagcctggttcggcgactcagccctcagcgagggaaatccaggtattctggctgtgtcccagcctattacatcccccgagatcctcgccaaaatgtttaaaccccaagcactgctggataaagccaagattaatcaggggtggttggactcaagccgatctctgatggagcaggacgtgaaagagaatgaggcgcttctgctgcgctttaagtactattcttttttcgatctcaaccccaaatacgacgctatccgaattaatcagctgtacgagcaggccaaatgggctattctccttgaagaaatcgagtgtaccgaagaggaaatgatgatgttcgccgcattgcagtatcatataaacaaacttagcattatgactagtgaaaaccatctgaacaattcagacaaggaagtggacgaggtagatgccgcactttctgaccttgagataaccctggagggtgggaaaacatcgactattttgggggacatcacctccatacctgaactggcggactatatcaaggtcttcaagcccaagaagctgactctcaagggatacaaacagtattggtgcacttttaaggatacctccatcagctgttacaagagtaaagaagaatcctccggcacacctgctcaccagatgaatctcagaggctgcgaagtgactcccgatgtcaatatttcaggtcagaagttcaacatcaagctgctgattcctgtggcagagggaatgaacgaaatctggctaagatgtgataacgaaaaacagtatgcacactggatggccgcttgtaggcttgcctccaaaggcaaaaccatggctgacagctcgtacaacctggaggtccaaaatatcctcagtttccttaagatgcaacatctgaatcctgacccccagttaatcccagaacaaatcactacggacattacgcccgagtgcctggtgagcccccggtatctcaagaaatacaaaaacaaacagatcacagcaagaatcctggaagcccaccagaacgttgcacaaatgagcctgatcgaggccaagatgcgtttcattcaagcatggcagtcccttccggaatttgggatcacccatttcatcgcacgcttccagggcggcaagaaggaggagctgattggcatcgcctacaaccggctgattcggatggacgcttctaccggggacgcaattaagacctggcggttcagcaacatgaagcagtggaacgtgaactgggaaatcaagatggtaacggtggaattcgccgacgaggttcggctgagtttcatctgcaccgaagtggactgcaaggtcgtacacgaatttattggcggatatatattcctgagcacccgggcaaaagaccagaatgagtcactggacgaggaaatgttttacaagttgacttccggctgggtgtag

SEQ ID NO: 116955 - DNA, 2064 bp, synthetic construct
  misc_feature 1..2064: note = Description of Artificial Sequence: Synthetic coding sequence
  source 1..2064: mol_type = other DNA
atggcattagacggaattaggatgcctgacggatgctacgctgacggcacatgggaactatctgtccatgtgacagatctcaatcgagatgtgaccttacgagtaacgggtgaagtacacataggaggcgtgatgctgaaactcgtcgaaaagctggacgtgaagaaggactggtccgaccacgcgctgtggtgggaaaagaagcgaacgtggctgctgaagacgcactggacgttggacaagtacggtatccaagccgacgccaaattacagtttacaccgcagcataagctgctgcgcctccagctgcccaacatgaaatacgtgaaagtcaaagtgaatttctcagatcgggtgttcaaagcagtatctgacatatgcaaaacatttaatattaggcatcctgaggaactctccctgctgaagaaaccgcgggatccaacgaagaagaaaaaaaagaaattggatgaccagagtgaagatgaggccctggaactggagggcccactgataacccctggctcaggctccatctacagtagccccggcctctactcgaagaccatgactccaacttatgacgcccacgacggtagcccactgtcgccaacttccgcctggtttggtgacagtgcgctctccgaagggaacccgggcatcctagctgtgagccagcccatcacttcccccgagattctggctaaaatgtttaagccgcaggcgctgctcgacaaggccaagatcaaccagggatggttggattccagtcggtccctgatggagcaggatgtcaaggagaacgaagccttgctccttcgtttcaaatactacagcttttttgacctgaacccaaaatatgacgcgatcaggatcaatcaattgtatgaacaggctaaatgggccatcctgctggaagaaatcgagtgcaccgaagaggagatgatgatgtttgcagccctgcaatatcacattaataaactctccatcatgacgtccgaaaaccatttaaataactctgacaaagaagtggacgaggtagacgccgccctgagcgacctggagattaccctggagggcgggaaaaccagcaccatcctgggtgatataacatcaatacccgagttggccgactatatcaaggttttcaagcccaaaaagcttaccttgaaggggtacaagcagtactggtgcactttcaaggacacgtctatttcttgctacaaatctaaagaagaaagttccgggacccccgcacaccaaatgaacttacgtgggtgtgaagtgacaccagacgtgaacatttccggccaaaaatttaatataaaactcctgattcctgttgccgaggggatgaatgagatttggctcagatgtgataacgaaaagcagtacgctcactggatggctgcctgccggctggcctccaaaggtaaaacaatggccgattcttcttataacctggaagtccaaaatatactgtcatttctcaaaatgcagcatttgaaccctgatccgcagctaattcccgagcaaattactacagacattacccctgagtgcttggtttctccccgatatctgaagaagtataaaaacaagcaacctggatacatacgcgacctgatcaccgcccgcattctagaagcccatcaaaacgtcgcccagatgagccttatcgaggccaagatgaggttcatccaggcatggcaaagcctgcccgaatttggaataacgcattttattgcacggttccagggcggaaagaaggaggagttgatcggaatagcatacaatcggttaattcggatggatgcgagtactggggatgcaataaagacctggcggttctcaaacatgaagcagtggaacgtgaattgggagatcaagatggtaacggtggaattcgcagacgaagtgcgcctgtcattcatctgcaccgaagtggattgtaaagtggtgcacgagttcattggtgggtacatcttcctaagtaccagagccaaggatcaaaacgagagtttggatgaggaaatgttctacaaactcacatccgggtgggtttag

SEQ ID NO: 116956 - DNA, 2043 bp, synthetic construct
  misc_feature 1..2043: note = Description of Artificial Sequence: Synthetic coding sequence
  source 1..2043: mol_type = other DNA
atggccctggatggcattcgtatgccggatggctgctatgccgatggaacctgggagctgtctgtgcacgtgacagatcttaacagggacgtgacactaagagttactggggaggtacatatcggcggcgtgatgcttaaattggttgagaaactggatgtgaagaaggactggtccgaccacgcactctggtgggagaagaagaggacttggctgttgaagacacactggacccttgacaaatacggcattcaggccgacgcaaagttgcaattcaccccacagcacaagctgcttaggctacaactgcccaatatgaagtacgtcaaagtcaaagtgaatttctctgatagagtgttcaaggccgtatcggacatctgtaagacctttaatatacgacatccagaggagttgagccttctgaagaagcccagggaccccacaaaaaaaaagaaaaaaaagctcgatgaccagtccgaagacgaggctctggagcttgagggccccctcataacgcctggaagcggtagcatttattcctcccctggactgtactccaagacaatgacaccgacctatgacgcccacgacggaagtcccctcagtccaacttccgcttggttcggtgatagcgcactctcagagggcaatccaggaattttagctgtcagccaacccattacctcaccagaaattctagccaagatgtttaagccacaagctcttctcgataaagctaagatcaaccagggctggctcgattcaagccgaagcctgatggaacaggatgtgaaggagaacgaggcgctcctcttgcgctttaagtattattcgttctttgacctgaacccgaagtatgacgctattcgtatcaaccaactgtatgaacaggctaagtgggctattctcctggaagagatcgaatgtaccgaagaggaaatgatgatgtttgccgcactgcagtatcacattaacaaactctcgattatgacctctgaaaaccacctgaacaactctgataaggaggtggatgaggtcgacgccgccttgtctgacctggaaattacactggagggtggcaagacctccaccattctgggggacatcacaagtattccggaattagccgactatatcaaagtctttaagccaaaaaagctgacgctgaagggatacaagcagtactggtgtactttcaaggacacatctatcagctgttacaaaagcaaggaggaatctagcgggacacccgctcatcagatgaatcttcggggctgtgaagttacccctgatgtcaacatatctggtcaaaagtttaatattaagctgttgatcccagtcgcagagggcatgaacgaaatatggttaaggtgcgataacgaaaagcagtatgcccactggatggcagcgtgtagactggccagcaagggaaagacaatggccgattctagctataacctggaggtgcagaatattctatcattcctgaaaatgcagcatcttaatcctgatccccaattgattcccgaacagattaccacagacatcacccctgaatgcctagtgtcacctagatacctaaagaagtacaagaataagcagatcactgctcgcatcttagaagcccaccaaaacgtcgcacagatgtctctaattgaggcaaaaatgaggttcattcaggcctggcagagcctgcccgagtttggcatcacacacttcattgctcgctttcagggggggaaaaaagaggagttgataggcatagcgtataatcggttaattcgtatggatgcaagtacaggggacgctatcaagacttggcgcttttccaacatgaagcagtggaacgtcaattgggagatcaaaatggtcactgttgagtttgcggacgaagtccgattgagcttcatatgtacggaagtagattgtaaggtggtgcacgagttcatcggagggtacattttcctcagcacccgcgcaaaggaccagaacgagtctcttgatgaagaaatgttttataagttgacctccggttgggtgtag

SEQ ID NO: 116957 - DNA, 1902 bp, synthetic construct
  misc_feature 1..1902: note = Description of Artificial Sequence: Synthetic coding sequence
  source 1..1902: mol_type = other DNA
atggctttagacggaattagaatgccagacgggtgttacgccgatggtacttgggagctttcggtccacgtcacagatctcaacagagacgtgacactgcgagtaaccggggaggtgcatatcggaggagtcatgttgaagcttgttgaaaaactcgatgtcaaaaaggattggagcgatcatgccctttggtgggaaaaaaagcgcacctggctcctgaagacccactggacattggacaagtatggtatccaagctgatgccaagctgcagtttacacctcaacacaagctattgcgcctccagttgcctaacatgaagtatgtgaaggtgaaggtgaactttagcgacagggtcttcaaggcagttagcgacatatgtaagacctttaatatacggcatccggaagagctaagtctcctcaaaaaacctcgggaccctaccaagaagaaaaaaaagaagttggacgaccaaagcgaggacgaagctcttgaactggaaggcccccttattacaccagggagtggttcgatctactctagccctggcctctactctaagacaatgacaccaacatacgacgcccatgacggctccccgctcagccctaccagcgcctggtttggcgacagtgccctatcagaaggtaatccgggaatcctggcagtaagccaaccgattactagccccgaaatcctcgctaagatgttcaaaccacaggcactgttagacaaggccaaaattaatcagggctggttggacagctcgcgctcactgatggaacaggacgtgaaggaaaacgaagcactgctgctgcgatttaaatattacagtttttttgacctgaatcctaaatatgacgctattagaattaaccagctgtatgagcaggccaagtgggccattttgctcgaggaaattgagtgcacagaggaggagatgatgatgtttgccgcattgcaatatcacattaacaagctcagtattatgacaagcgagaatcacctcaacaatagtgacaaggaggtggacgaggtcgatgcagcactttccgatctggagatcacccttgagggcggtaagacctcgaccatcctgggtgacatcacatccataccggagcttgctgactacattaaagttttcaagccaaagaagttaaccctcaaaggctataagcagtactggtgcacattcaaggatacgagcataagctgttacaaatctaaagaggagagttcaggcacacccgcacatcagatgaatctgcgcggatgcgaagtgactccagacgtgaatattagcggccagaagtttaacatcaagttgttaattcctgttgcggaaggtatgaatgagatctggcttcggtgtgacaatgagaagcagtatgcccattggatggcagcatgcaggctcgctagtaaaggaaaaactatggcagatagcagctataatctggaggtacagaatatactgagtttcttgaaaatgcagcacctgaaccctgatccccagctgatacctgagcagatcacaaccgacattactccagaatgtctggtcagtcctcgctatctgaagaaatataaaaataagcagcccgggtatataagagatctcattactgcacgcatcctggaggctcatcaaaatgtcgctcagatgagcctcattgaggcaaaaatgcgattcatccaggcttggcagtctctgcccgaattcggtatcacccatttcatcgcacgcttccagggcggaaaaaaggaggaattaattggaattgcttataataggctgatcaggatggatgcaagcacaggagatgctattaaaacttggcggttttctaacatgaagcagtggaacgttaattgggaaattaaaatggtaaatagctag

SEQ ID NO: 116958 - DNA, 2064 bp, synthetic construct
  misc_feature 1..2064: note = Description of Artificial Sequence: Synthetic coding sequence
  source 1..2064: mol_type = other DNA
atggctctggacggaattcggatgcccgatgggtgctatgcagacggtacctgggagctgtccgtgcacgtgacagatctaaatagagacgtaaccctccgggtaacaggggaagttcacatcggcggggttatgttgaaattagtggaaaaactcgacgtcaagaaggactggtcagatcacgccctttggtgggaaaagaagaggacctggttactgaagacacactggaccctcgataagtatggaatccaggccgacgcgaagctacaattcacaccccagcataagctgcttaggctgcaactccccaatatgaagtatgtaaaagtgaaagttaacttctctgatagggtgttcaaggccgtttcggatatctgtaaaacttttaacattcgccacccggaagagctgagtttgctaaaaaaaccccgcgaccccaccaaaaagaaaaaaaaaaaactggatgaccagtccgaggacgaggcgctggaattggagggcccactgatcacccccggcagcggcagcatatatagtagtccaggcctttattctaagaccatgactcccacgtacgacgcccatgatggtagtcccttaagcccgacatcagcatggtttggagattcagctctgagcgagggaaatccaggaattctggctgtgtcccaacctattacatctcccgagatactggcaaagatgtttaagccccaggcactgctcgacaaagccaagatcaaccagggctggctggattctagcaggtctttgatggaacaagacgtcaaagagaacgaggcattattactacggttcaaatactactcttttttcgacctgaacccaaaatatgatgccataagaattaaccagctatacgagcaagcaaagtgggctattctccttgaagaaatagagtgtactgaagaagagatgatgatgttcgctgccctacagtaccacatcaacaagctgagcatcatgacttctgagaaccacctgaacaatagcgacaaagaggtcgatgaggttgacgctgcactgagtgacctggagatcacattggagggtggtaaaacttcaacgattcttggggatataaccagtattcctgagctcgcagactatattaaggttttcaagcctaagaagctgaccctgaagggttataagcagtattggtgcacatttaaggatacaagcatctcctgctataagtcaaaggaggagtccagcggaacccctgcccatcaaatgaacctgcggggctgtgaggtgacgcccgacgtgaatatatcgggacagaaattcaatattaaacttctgatcccagtggctgaagggatgaatgagatttggctccgctgtgacaacgaaaagcaatatgcccattggatggctgcgtgtagactggcctctaagggaaagactatggcagacagctcatataatctagaagtccagaacatcctatcatttctgaagatgcagcacctcaacccggacccccaactgattccggaacaaatcaccaccgacataacacccgaatgcctggtcagccccagataccttaaaaagtacaagaataaacagcccggctatattagagaccttatcaccgccaggattctcgaggcccaccaaaacgtggctcaaatgtcactgattgaggccaaaatgagattcatccaggcctggcagtctctaccagaattcgggattacacattttattgcacgcttccaaggtggcaaaaaagaggagttgatcggaattgcatacaatagattaattcgtatggatgcaagcaccggagatgccatcaagacatggcggtttagcaacatgaaacagtggaatgtaaattgggaaattaagatggtcaccgtggaattcgccgacgaggtgcgcctcagctttatttgtactgaggtagattgtaaggttgtccatgagtttatcggcggatacatctttttgtccaccagggcaaaagaccagaatgagtctctggatgaggaaatgttctataaactgacgtccggttgggtgtag

SEQ ID NO: 116959 - DNA, 462 bp, synthetic construct
  misc_feature 1..462: note = Description of Artificial Sequence: Synthetic coding sequence
  source 1..462: mol_type = other DNA
atggccttggatgggatccgcatgcctgacggttgctatgccgatgggacttgggaactgtctgtccatgtgaccgatctcaatagagatgttaccctgcgagttactggagaagtccatatcggaggggtcatgctgaagctcgttgaaaaactagatgtcaagaaggattggagcgaccacgcactctggtgggagaagaaacggacatggctgctgaaaacacactggaccctggataagtacggtatccaggccgatgctaagctgcagtttactccacagcataaactactcaggttgcagttacctaacatgaagtatgtgaaggtgaaagttaacttcagcgatagagtcttcaaagcggtttccgacatctgcaaaacctttaacataagacaccccgaggagttgtctctgttgaagaagccacgcgacccaacaaaaaaaaaaaagaaatag

SEQ ID NO: 116960 - DNA, 2004 bp, synthetic construct
  misc_feature 1..2004: note = Description of Artificial Sequence: Synthetic coding sequence
  source 1..2004: mol_type = other DNA
atggcgggaatgaaaaccgctagcggcgactatattgactcaagctgggagctgagagtattcgttggcgaggaagaccccgaggccgagagtgtgacactgagagtcaccggagagtcacacatcggaggggtgctgctgaagatcgtcgaacaaatcaataggaagcaggattggagtgaccacgccatttggtgggagcaaaagagacaatggctgttacagactcactggacactggacaagtatggaatccttgctgacgctcggctcttctttggcccccagcaccggcctgtgatcctgagactgcctaatcggcgcgccctcaggctaagagcatcattttcccagccattgttccaggcagttgcagctatctgccggctcctgtcaattcgacatcccgaagagctgagcctattaagagcccccgaaaagaaagaaaagaaaaagaaggaaaaagagccagaagaagagttgtacgacttgtcaaaagtcgtgctggctggcggagtggctcccgccttatttcggggcatgccagcgcacttttccgactctgcgcagactgaggcctgttaccacatgctatcccgcccccaacctccgccagacccactcttgctccagaggctgcctcgccccagctcattgtccgataaaacacagcttcatagcagatggcttgatagctctagatgtttgatgcaacagggaattaaggccggagatgcactttggctcagatttaaatactacagtttctttgatctggatcccaagacagaccctgtgcggctgacacagttatacgaacaagcccgatgggatctactcctggaggagatcgattgcactgaggaagaaatgatggtgtttgccgcactgcaatatcatataaataagctgagccagtcaggggaagttggggagcccgcaggcaccgatccaggtttggacgaccttgacgtagctctctcaaacttagaagtaaaactggaaggatccgctccaacagatgtcctagacagtctgaccaccatccctgagctaaaggaccacctgcgtatatttagaattcccagaagaccacgtaaactgaccctaaaggggtaccggcagcattgggtggtttttaaggagactacactgagttactataaatcacaggatgaggctcctggagaccccatccagcagcttaacctcaaggggtgtgaggtggtacccgacgtaaacgtgtcaggtcagaagttctgcattaaacttcttgtgccttccccagaaggtatgtcagaaatctacttgaggtgtcaggacgagcagcagtatgccagatggatggccgggtgcagactggcttcaaagggtaggactatggcggattcatcttacacttcggaggtccaggccattctggcttttttgtcgttacaaaggactggaagcgggggacctgggaatcaccctcacggcccagacgcgtctgcggagggtcttaatccttatggacttgtcgcccctaggttccagcgaaagtttaaagctaaacagctgacacctcgtattctcgaagcccatcaaaacgtcgcacagttgtccctggccgaagcgcagttgaggttcattcaggcttggcagtcccttccagattttggcatatcttatgtgatggtccgcttcaaaggttctcgtaaagacgagattctggggattgccaacaaccgtctcattcggatcgacctggccgtgggtgatgttgtgaagacttggcgcttcagcaacatgcgacagtggaatgtgaattgggacattaggcaggtcgccatcgagttcgatgagcatattaatgtcgctttcagttgtgtctctgctagctgtagaatagttcacgagtacattggaggctatatctttctgtccactagagagagggcccgcggggaagaactggatgaggacctgttcctccaacttacaggcgggcatgaagctttctag

SEQ ID NO: 116961 - DNA, 1992 bp, synthetic construct
  misc_feature 1..1992: note = Description of Artificial Sequence: Synthetic coding sequence
  source 1..1992: mol_type = other DNA
atggcaggtatgaagacagcgtctggcgattacattgatagcagttgggagctgcgggtgtttgttggcgaggaggatcccgaggccgagtctgtcactcttagggtgacgggagagtctcacattggtggcgtccttttgaaaatcgtggagcagattaataggaagcaggactggagtgaccatgcaatctggtgggagcagaagaggcagtggctgctgcagacacactggaccttggacaagtacggcattctcgcagacgccagactgtttttcggtccacagcaccggccggtgatcctcaggctgccaaatcgacgagccctacggctgagagcttccttctcccagccactcttccaggctgtagcagctatttgtaggctcctctcaatccgacatcccgaggagttgtccttactacgggcgcccgaaaaaaaggaaaagaagaaaaaggagaaggagccggaggaggaattgtatgatctcagcaaagtcgttttagctggaggtgtcgcaccggccctgttccgaggaatgccagcacacttctcggattccgcccagacagaggcatgttaccacatgctttccaggcctcagccaccccccgaccccttgctgcttcaaagactgccccggccatcatctttaagcgataaaactcagctgcatagtagatggctggacagcagcagatgtcttatgcagcagggtattaaagccggggacgcattatggctccgcttcaaatattatagtttttttgatttagaccctaaaaccgatccagttagattgactcagttgtacgagcaagctcgttgggatctgcttttagaggaaatcgattgtacagaggaggagatgatggtctttgctgcattgcagtatcatatcaacaaactaagtcagtctggagaggttggcgagcctgcagggacagaccctggccttgacgatctggacgtggcattgtccaacctcgaggttaaactagaagggagcgccccgacggacgtactggattcactgactacgattccggagctcaaggatcatcttagaatcttccggcccagaaaattgactctaaagggctaccgccaacactgggtggtcttcaaggaaacaactctgagctactacaagtcccaagatgaggctccaggagatcctattcaacagctgaatttgaagggttgcgaggttgttccagatgtgaatgtgtcaggccaaaagttctgtatcaagctgctagtgccgtccccagagggcatgagcgagatttaccttcgctgccaggatgaacagcagtacgcccgatggatggctggctgccgtttggcttctaagggtcgtaccatggctgactcttcatacacgtccgaggttcaggccatcctcgccttcttaagtctccagaggacgggctctggcggcccaggaaatcatcctcacgggcccgacgctagcgccgaaggccttaatccctacgggctagtagcaccgcggtttcagcgaaaattcaaggcaaaacaactcacccccaggatacttgaagctcaccagaacgtggcccagttgtccctcgctgaggcgcagctgaggttcattcaagcctggcagtctcttcccgacttcggcatttcctacgtaatggtcagatttaaaggatctcgcaaggacgaaatccttgggattgctaataatcggctgatacggatcgaccttgccgtcggcgatgttgtaaagacttggaggtttagcaatatgagacagtggaacgtgaactgggatataaggcaggtagccattgaatttgatgaacatataaatgtggctttctcctgtgtgagcgcctcatgcaggatcgttcatgaatacatcggcgggtatatcttcctctctacccgggaacgagcccggggggaggagctggacgaggacttgttccttcagcttactggaggccacgaggctttttag

SEQ ID NO: 116962 - DNA, 861 bp, synthetic construct
  misc_feature 1..861: note = Description of Artificial Sequence: Synthetic coding sequence
  source 1..861: mol_type = other DNA
atggctggtatgaaaactgcgtctggcgactacattgattcctcatgggagctgagggtgtttgtgggagaagaggatcctgaggcagagtccgtcacgctccgcgttaccggagagtcacacattgggggcgttctgctcaaaatcgttgagcagattaacagaaagcaagactggtccgaccacgccatatggtgggagcagaaacgacagtggctgctacagacccactggacactggacaagtacggcatcctcgctgatgcacggctgttctttggccctcaacataggccagttatattacgtttacccaaccgccgtgccctcaggctaagggcatccttttctcagccactgttccaagcagtcgcagccatatgccggttactgagtattcgacatcccgaggagttatctcttcttcgcgcaccagagaaaaaggaaaaaaagaagaaggagaaggagcccgaagaggaattgtacgatttgtccaaagtggttctggctggcggggtagcacctgcactcttccgcggcatgccagcccatttctctgactccgctcagactgaagcatgctatcacatgctcagccgtccgcaaccgccaccggacccgctcctgctgcagcgtctgccccgcccttctagtttatcagataagacacagctgcattctcggtggctcgattctagtcgttgcctgatgcagcagggaataaaagccggagatgccttgtggctcagatttaagtactactcttttttcgatcttgaccccaagacggacccagtcaggctaacacagctatatgagcaggccaggtgggacctgctccttgaggaaatcgactgttag

SEQ ID NO: 116963 - DNA, 555 bp, synthetic construct
  misc_feature 1..555: note = Description of Artificial Sequence: Synthetic coding sequence
  source 1..555: mol_type = other DNA
atggcggcagctggtggcgcgagactccttagggccgcatcagccgtgctgggcggacccgccggccggtggttgcaccatgctggcagcagggccggctcatctggcctccttagaaaccgaggccccggaggatcggcagaggcgagcaggtcactatcagttagtgcacgagcccggagctcctctgaggacaaaattaccgtccacttcatcaacagggacggcgagacccttaccacgaaaggcaaggtgggcgactctttactcgatgtcgtggttgaaaataacttggatattgacgggttcggggcatgtgagggaaccctggcctgttctacatgccacctgattttcgaggatcatatttatgagaagctggacgctattaccgacgaggagaatgatatgctcgatcttgcctacggtctgaccgatcgcagtcgcctgggatgccaaatttgcctcactaagtctatggacaatatgactgttagagtgcccgaaaccgtggccgatgcaagacaatcaatagacgtgggtaaaactagctag

SEQ ID NO: 116964 - DNA, 1494 bp, synthetic construct
  misc_feature 1..1494: note = Description of Artificial Sequence: Synthetic coding sequence
  source 1..1494: mol_type = other DNA
atggcctcccgctgttggcgttggtgggggtggtcagcctggccgcggacaaggctgccaccagccggcagcaccccctccttctgtcatcacttttctacccaagagaagacaccgcagatctgtgtggtggggagcgggccagctgggttttatactgcccagcacctgctgaagcatccacaggcacatgttgatatctacgagaagcaacccgtgcccttcggacttgtccgtttcggcgtcgctcccgatcaccccgaagtgaagaacgtgattaatactttcacgcagacagcacactcgggaaggtgtgccttctggggtaacgttgaggtgggtcgagacgtgacggtgcccgagttgagggaggcctatcacgccgtcgtcttatcctatggggctgaagaccatagagcactcgagattcctggagaggaactccccggagtctgctcagccagagcatttgttggatggtataatgggctaccagagaatcaggaactcgagcctgacctttcttgcgacactgcagtgatcctcggccaggggaatgttgctctggacgtagcacgcattcttctcacccctccggagcatttggaggcactgctgctctgccagcgtacagacataactaaggcagctctaggggttttgcgtcagtcgcgagtgaagacagtgtggctggttggaaggcgtggcccgctgcaagtcgctttcacaatcaaagaactgagggagatgatacagctgccaggcgcccggcccatattggacccagtggattttcttggcctccaagacaagatcaaggaggtaccgcgccctcgtaagaggctaaccgaattgcttctcagaactgcgaccgagaagcctggtccagctgaggctgcacggcaggcctcagcatcacgcgcctggggcctgcgattttttcggagtccacagcaggtgcttccttcgcccgacggccgaagagcagcaggcgttcgactggccgtgacaagactggagggtgtggacgaagctactagggccgttcccaccggggacatggaagacctgccatgcggcctggtcctgagttcgattggatataaatcacggcctgtagatccgagcgtgccattcgatagcaaattgggtgtgattcccaacgtcgaaggcagagttatggatgtgcctgggttatattgctctggctgggtcaagcggggacccacaggtgtgatcgccacaacaatgaccgattcctttctcaccggacagatgctgctgcaggacctgaaagcagggttgcttccgtctggcccacgacccggttacgctgcaattcaagctctgctcagcagccggggtgtgagacccgtaagtttcagtgattgggagaagctcgacgcagaagaagtggcccgtgggcagggaactggtaagccacgtgagaaactggtggatcctcaggaaatgctaaggctgctcggtcactag

SEQ ID NO: 116965 - DNA, 1569 bp, synthetic construct
  misc_feature 1..1569: note = Description of Artificial Sequence: Synthetic coding sequence
  source 1..1569: mol_type = other DNA
atggcctcacgatgctggagatggtggggctggtccgcgtggcccagaactagactcccaccagctggaagtactccaacatttggggggagcgatgaagtcagagatccggctaacgccaaggcccttagaaataaacggcgcaggatgcaggtaagagtgaaactgggaaaatttcagttactgcttgacattcaggagaagacgcctcagatttgcgtggtgggtagtgggcccgctggtttttacaccgcccagcatctgctgaagcacccacaggctcacgttgatatctacgagaagcaacctgtaccttttggtctggtgcgtttcggcgtggcccctgaccaccctgaagtcaaaaacgttataaacactttcacccagacagcccactctggacgctgtgctttttggggcaatgttgaggtcggacgcgacgttaccgtccctgagctccgcgaagcctaccatgcagtggtattaagctatggcgcagaagaccatagagcccttgaaatcccgggagaagagctcccaggtgtatgtagcgcacgggcctttgtaggttggtacaatggtctgccagagaatcaggagcttgagcctgatctgtcttgcgatacagcggtcatactgggccagggcaacgtcgccctggatgtagcccgcatcctgctaacccctcctgagcatctcgaacgcacagacataacgaaggccgcccttggtgtcctgaggcaatcaagagtcaagacagtttggctcgtagggcgtcggggtcccctacaggtagcttttaccatcaaagagctgcgggagatgatccagttgcctggtgcacggccaatccttgaccccgttgattttctcggtttgcaggacaaaatcaaggaagtcccacggcctcgcaagagactgacagagctactgctgcgtaccgccactgaaaagcccggacctgccgaggccgcacgccaggcatccgcgtctcgcgcctgggggctgcgcttctttagatccccgcagcaggtcctgcccagcccagatggcagaagagcagcgggagtgcgtcttgcggtgaccagactggagggggttgatgaagccacgagagccgtcccaactggtgacatggaggacctgccgtgtggcctggtactttcaagtataggctataagagccgccccgtggacccgtctgtgcctttcgatagcaagcttggagtgatcccaaacgtggaggggcgagttatggatgtgccaggtctgtactgctcaggatgggtgaagcggggccctacaggcgtgatcgccacaaccatgacggactcgttccttaccggtcagatgctgctccaggatctcaaggcaggcctgcttccaagcggtcctcgacccggttatgccgctatccaggcactgctgagcagtcggggcgttagaccagtttccttctccgattgggaaaagcttgacgcagaagaggtagcccgtggccaaggaacaggtaagcccagggaaaagttagtcgacccccaggagatgctgaggttactgggacactag

SEQ ID NO: 116966 - DNA, 1356 bp, synthetic construct
  misc_feature 1..1356: note = Description of Artificial Sequence: Synthetic coding sequence
  source 1..1356: mol_type = other DNA
atggcttcccgttgctggcgctggtgggggtggagtgcatggccccggacaaggctgccccctgccggtagcaccccctccttctgtcaccacttctctactcaggagaaaacgccacagatctgcgttgtgggcagtgggcccgcaggcttttataccgcccagcacttgctcaagcagcacccccaggcacatgtcgatatatacgagaaacaaccggttccattcggattagtgaggttcggagtcgccccggaccacccagaggtaaaaagctatggcgcagaggaccatcgggccctggagatcccgggggaggagttgccaggagtgtgcagcgctcgggctttcgtgggatggtacaatggcttacctgaaaatcaagaattggaaccagatctgtcatgcgacacagccgtgatcttgggccagggtaatgttgctctcgatgtagcgcgtatcctgctcacccccccagagcatttggaacggaccgacatcacgaaagcggctttaggggtcctacgacagagccgggtgaagactgtgtggctggttggtcgccggggccctctgcaggtcgccttcacaatcaaagagctgcgggagatgatccaattgcccggcgccaggccaatcctggaccccgtcgatttccttggcctccaggataaaatcaaagaggtgccccgcccacgaaaaaggttgactgagttgctcctcagaacagcgactgaaaagcccggccctgcagaggctgcaaggcaggcttctgcttcacgcgcctggggtcttcggttctttcggtcaccacaacaggtgcttccttcacccgacggcaggcgggcagcgggcgttagattagctgtgacgagactggagggggtggacgaggctacacgggccgtccctacaggggacatggaggacttaccgtgtggcctcgtgctgagcagcatcggatataagtctcgacctgtggatccctcagtcccttttgatagtaagttaggcgtcatccccaacgtagaaggccgtgttatggacgtgccgggactttactgcagcgggtgggttaaaagggggccaaccggggtgattgcaacaaccatgacagactcctttctgactggccagatgctactacaggatctgaaagcaggcttactgccttcggggccacgccccggctatgccgctatccaggccctgctcagcagtaggggtgtccggccagtgtctttcagcgactgggagaagctggatgccgaggaggttgcccgcggacagggcacaggtaagcctcgggagaaactggtggatccccaggagatgctaaggctgcttggacactag

SEQ ID NO: 116967 - DNA, 1605 bp, synthetic construct
  misc_feature 1..1605: note = Description of Artificial Sequence: Synthetic coding sequence
  source 1..1605: mol_type = other DNA
atggcgagccggtgctggcggtggtggggctggtctgcgtggcctcggactcgcctgcctccagccggctccacacccagcttctgtcaccatttctctactcaagaaaagacacctcagatctgtgttgtgggctccggtccagccggtttctatactgctcagcatttgctcaaacgggtagaagccttatgtagccagcccagggtgttgaactcccccgcgctgagcggtgagggggaggatctaggcgcatcccagccgctgtcactcgaccccacaagttgccatcctgtgccccagcagcacccacaggctcacgtcgatatctacgagaagcagccggtgcctttcgggctggtgaggtttggggtcgctccagaccatccggaagtgaaaaacgtgattaacacctttacccagaccgctcatagcggccggtgcgccttttggggcaatgtcgaggtggggagagatgtgacggtacctgagctgcgcgaagcttatcatgccgtggtcctcagctacggagcggaggatcaccgtgcactggagattccaggagaggaattgccaggtgtttgttccgcacgggctttcgtggggtggtataacggcttgcccgagaaccaggaactagagccagatctatcttgtgataccgccgtgatcttgggtcaaggcaatgtggccctggatgtcgcccggatactgctcacgcctcccgaacacctggaaagaaccgacataactaaagccgcattgggtgtgcttcgccagtcccgcgtcaaaaccgtatggctggtgggtcgtcgcgggccactccaagtcgcctttacaattaaggaactccgcgagatgatccaactgccgggcgcgcggcccattctggaccccgtggactttctgggcctccaggacaagattaaagaggtgccaagaccacggaaacggctgacagaactactgctgcgtacagctacggaaaagccaggcccggccgaagccgcccgtcaggcaagcgctagcagggcatggggtctgaggttcttcaggagccctcagcaagttttgcccagtccagacggacggcgagcagccggcgtaagactggcggtgacccggctggaaggggtcgacgaggcaacaagagcagtacccaccggggacatggaggacttgccatgtggcctggtcctctccagcatcgggtacaagagcagacccgtggacccttcagttccatttgattctaagcttggagtgatcccgaatgttgaagggagagtcatggacgtgcctggcctgtactgcagtggatgggtaaaaaggggacccactggggtgattgccaccaccatgactgattcttttctgactggccaaatgcttctgcaggatctgaaagccggtttgctgccttcagggcctcgtcctggctacgccgcgatccaggccctgctgtcttcacgcggggtgcgccccgttagcttctcagactgggaaaagctcgacgccgaagaagtcgccagagggcaaggaaccggcaaaccacgcgaaaaactggtagatccgcaagaaatgctgcgtctgttgggccattag

SEQ ID NO: 116968 - DNA, 1146 bp, synthetic construct
  misc_feature 1..1146: note = Description of Artificial Sequence: Synthetic coding sequence
  source 1..1146: mol_type = other DNA
atgaccacctgcaaggctggagttgttccacttgctagccaacaacacccacaggcgcatgtggatatctacgagaagcagcccgtacccttcggcttagttcgcttcggtgtcgccccggatcatccagaagtaaaaaatgtgataaacacttttacccagacggcccactccgggcggtgcgcattctggggtaatgtcgaggtgggtagagatgtgacggtgcccgaactgagagaggcctaccacgcagtggtgttgagttatggcgcggaagatcatcgggcactggagattccgggggaagagctccccggcgtgtgttcagcccgcgcttttgtggggtggtataatggtctccctgagaaccaggaactggagccagacctctcctgcgacacagccgtgattctgggccagggcaacgtggcattagacgtggctagaattctgttaacccccccagaacatctcgagcgtaccgatatcacaaaagccgctcttggagttctgcgccagtcacgggttaagactgtgtggctggtggggagacgcgggccactccaggtggccttcactataaaggaactccgggagatgatacagctccccggggcacggcctattctggatcctgtcgatttcctggggctgcaggataagataaaagaagtgcctcggccaagaaaaaggttgacagagcttctcctcaggactgctactgagaaacccgggcccgccgaggccgcgcgacaggcatcagcctcccgggcttggggcctgcggttttttcgttccccccagcaagtcctcccatcccccgacggtaggagggccgcgggcgtgcgattggctgttacccggcttgaggttagcttgatgttccttaaagacacccccttccccggtttatgtcatccaccgggagtcgcacatacattgccaaacagggtgagcatgagacccccagtgcagtgtccaagagagacatggaaaacatcactcgtgggttggtgctccgcagccctcgggatccgcgctgcactgagcactcaggcatgtcctctgaccccatcactgggctcttcaccgatgtggcgcgcaggcttatggatgtgtcaagcctccacagccgcagccggctag

SEQ ID NO: 116969 - DNA, 1320 bp, synthetic construct
  misc_feature 1..1320: note = Description of Artificial Sequence: Synthetic coding sequence
  source 1..1320: mol_type = other DNA
atggaagataaagatagagaacacccacaggcgcatgtggacatttacgagaagcagccagtgcccttcggattggtgcgattcggggtggccccggatcatccagaagttaaaaacgtgataaacacttttacccagacagcacattccggtagatgcgccttctggggaaatgtggaagttggacgggacgtaactgttccagaactgagggaggcctatcacgccgtcgtactttcctatggggcagaagaccatcgcgccctagaaatacccggagaagagttgcccggagtctgcagcgcccgcgcctttgtcggctggtacaatggcctgcctgaaaaccaggaactggaacctgatctgagttgcgacacagctgtaattctaggccagggtaatgttgccctcgatgtagcacgcatcctcctaacaccccccgaacatcttgaaagaaccgacatcaccaaagccgcccttggagtgctgaggcagtccagagtgaaaaccgtttggttggtcggtcggcgcggacctttgcaggtcgctttcaccatcaaggaattgagggaaatgatccagctccctggagctcgcccaatattggatcctgtggacttcctgggattacaagataaaatcaaggaggttcccaggcccaggaagcggttgaccgagctgctgctgagaaccgccaccgagaaacccggcccagccgaggccgcgagacaggctagtgctagcagagcctggggcttgcgatttttccgctcgccacagcaggtgctaccgtcccctgacggaaggcgggcggccggggtgcgcttagctgtgacacgcctcgagggcgtggacgaggctacgagagcggttcctactggagatatggaagacctcccttgcgggctggtcctgtctagcattggatacaagtcgcggcccgtggatccatctgttccttttgactcaaaacttggagtcatccctaacgtcgagggaagggtgatggacgtgcccggcctgtattgcagcggctgggtaaaaaggggccctaccggcgtgatcgccacaaccatgactgactcattcctcactggccagatgctcctccaggatctgaaagctggacttctgccgagcggcccccgccctggatatgccgctatccaagccctgttgagtagtaggggcgtccgtcccgtctcttttagcgactgggagaagctcgacgcagaagaggtggcacggggccaggggactggaaaaccacgagagaaactcgtcgacccccaagaaatgctgcgcctgctcgggcactag

SEQ ID NO: 116970 - DNA, 1494 bp, synthetic construct
  misc_feature 1..1494: note = Description of Artificial Sequence: Synthetic coding sequence
  source 1..1494: mol_type = other DNA
atggcctcacgttgttggaggtggtggggatggagcgcgtggcccagaacgaggctgcctcccgccggcagtaccccctcattctgtcaccatttttcaacccaagagaagacgccgcagatctgtgttgtcgggtccggcccggccggattctataccgcgcagcacctgctgaaacaccctcaggcacacgtggacatttacgagaaacaacctgttccgtttggattggtacggtttggcgttgcccctgatcacccagaagttaagaatgtgataaatactttcacccagacagcccattctggaaggtgcgcattttgggggaatgtagaggttggccgggatgtgacagtaccagagctgcgcgaggcctatcacgccgtagtcctatcttacggagctgaggaccaccgagcacttgagatacctggtgaagaattgccgggtgtgtgttccgcaagggcctttgtaggatggtacaacgggctgccagagaatcaagagctcgaaccggatctgtcgtgtgataccgcagtgattctggggcaaggcaatgttgccctcgatgtcgccaggatattgcttaccccaccagagcatctcgaagcattgctgctctgtcagaggaccgatatcactaaggctgctctcggagttttacgacagtccagggtcaagactgtatggctagtggggcgacgcgggccactacaggtggcgttcacaatcaaagagctgcgcgagatgatacagctgccaggcgctcgacccatcctcgatcctgtcgattttctcgggctccaggacaagattaaggaggtaccacgtccccgcaagcgtctaactgaactgctccttcggacagccaccgagaagccagggccagccgaggccgcacggcaggccagcgccagtagggcgtgggggctgcgcttcttccgatcccctcagcaggttttgcccagtccagatggtaggcgcgcggctggagttcgcctagcggtaacccgattggagggcgtggatgaagccactcgggcagttccaaccggtgacatggaagatctcccttgcggcctcgtgctgtcttctattggatacaaatcaaggccagttgatccttctgtccccttcgattcaaagttaggagtgattcccaatgtagaaggccgggttatggatgtacccggcctatactgtagtggttgggtgaagcgaggccccaccggtgtgattgctacgactatgactgactcttttctgacagggcagatgctgttgcaggatcttaaggccgggctgctgccctctggccctagacccggatatgcggccatccaggccctgctgagcagtcgcggggtccgaccggtcagcttcagcgactgggagaagttggatgctgaggaggtcgcaagggggcagggcactggtaaacctcgggagaaactggtcgacccccaggaaatgctacgcctgctgggacactag

SEQ ID NO: 116971 - DNA, 1452 bp, synthetic construct
  misc_feature 1..1452: note = Description of Artificial Sequence: Synthetic coding sequence
  source 1..1452: mol_type = other DNA
atggcttccaggtgctggcggtggtggggttggtccgcctggcccagaacacggttgcccccagcaggctccaccccatctttctgccaccattttagcacacaggagaagaccccacagatatgtgtggtgggaagtggacctgcaggcttctacactgctcagcatctcctcaaacatccgcaggcccacgtagatatatatgagaagcagccggtgcctttcggcttagtgcgttttggggtggcccctgaccaccctgaagttaagaccgcccattccgggaggtgcgccttctggggaaacgttgaagtggggagagatgtcacagttcctgagctccgtgaggcttaccacgccgtggtgttgtcctacggggcagaggatcaccgcgctctcgaaattcctggtgaggaactccccggtgtctgctcagctagggccttcgtaggatggtataacggtctgcccgaaaaccaggaactcgaaccggatctatcatgtgacactgcagtgatcctggggcaggggaatgttgctctagacgtggccaggatcttacttacacctcctgagcatctagagagaacggacataacaaaagctgctctgggcgtattaaggcaaagccgggttaagacagtctggctggtggggcgaagaggtccactgcaggtggcgtttacaatcaaggaacttagggagatgattcagttaccgggcgcgcggccaattcttgatcctgtcgattttctgggcctccaggataagattaaggaagtgcctcgccctcgcaaacgcctgaccgaactcttgttgaggaccgctacggaaaagcctggtcccgccgaagcagccagacaggcctcggccagcagggcatggggtctgaggttttttcgctctcctcaacaagttctccccagccctgatggacgtagggctgccggagttcgcctggctgtcacaagactggagggcgtcgatgaagctactcgggcagtgccaaccggagacatggaagacctgccttgtgggctggtgctgagcagcatcggatacaagagtagacctgtcgacccctcagtgccattcgactccaagctgggagtcatacccaacgtggaggggagggtcatggacgtgccaggattgtattgtagcggatgggttaaacgaggtcccacaggtgtgatagcaactacaatgaccgatagcttcttaacaggtcagatgctcctccaagacttgaaggcaggtcttctgccttctgggcccagacctggatacgcagctatccaggccctcctgtccagtagaggtgtgagacccgtctccttttccgactgggagaaactagacgctgaagaggttgctagaggacaaggaacagggaaacctcgtgagaagctagtcgatcctcaggagatgctgcgactgttaggccattag

SEQ ID NO: 116972 - DNA, 1881 bp, synthetic construct
  misc_feature 1..1881: note = Description of Artificial Sequence: Synthetic coding sequence
  source 1..1881: mol_type = other DNA
atggctgtgagcggatttacattgggcacttgtatccttttgctccatatttcttacgtagccaattatcccaatgggaaagttacccaaagttgtcatggaatgattccagagcacgggcatagccctcagtcggttcctgtacacgacatctacgttagccaaatgactttccgaccaggcgaccaaatcgaagtgactttgtcgggacacccattcaagggattcttactcgaagcccgaaacgcagaagatctaaatggcccgccaattggttccttcacattgattgattcagaggtatctcagctactgacctgcgaggatatccaaggaagcgccgtctctcaccgttctgctagcaagaagacggagattaaagtgtattggaacgcaccctcaagcgctcctaatcacacacagtttctggtcacagtcgtcgagaagtacaaaatctattgggtgaagattcctggacccataatctcccaaccgaatgcattcccttttacaacacccaaagccactgttgtaccactccctactcttcctccagtgagccacttgaccaagccattcagcgcttcagattgtggaaataaaaagttttgtatccgtagcccactgaactgcgacccagagaaggaagcttcttgcgtgttcctttcctttacacgggacgatcagagcgtcatggtagagatgagcggcccctccaaagggtatctgagcttcgcactctcgcacgaccagtggatgggcgatgacgacgcatacctgtgtattcacgaagaccaaactgtgtacatacagccttcacacttgactggaaggtcccacccggtgatggactcgcgggatactctggaggatatggcttggagactggccgacggtgtgatgcaatgctcatttcgacggaacattaccctcccaggtgtgaaaaacagattcgacctgaacacctcttactacatttttttggcggacggtgccgctaatgacgggcgcatctataaacattcacagcagcccctaatcacgtatgaaaagtatgatgtgaccgattcccctaagaacatcggcgggtcccactcagtcctcctgcttaaagtacatggcgccctgatgtttgtggcctggatgaccaccgtgtctatcggcgtgttggtggcccggtttttcaaacccgtgtggagcaaagcctttctcctgggagaggcagcttggtttcaggttcacaggatgctgatgtttactacgacagtgctcacgtgcatcgcatttgttatgcctttcatctatcgcggaggttggtcccgacatgccggttatcacccatacctcggctgtatagttatgacgctggcagttctgcagcccctgctcgccgtgtttcgacccccgctgcacgaccccaggcgccagatgttcaactggacacattggagcatgggcaccgcagcccgaattattgccgttgccgcgatgttcttgggaatggacctgcccggattgaacctgcctgattcctggaagacctacgcaatgaccggcttcgtggcatggcacgtcggcacagaggtggtgctggaactgaaatattggatgatgaccgaatttagaagcttctcgcatttactccaatggaagcagcgtgtgatgctactcaagcgacagtgctggcagttcatgtccgtggggatgctgctgttcagctcttacttctatctgcagagcaccatatacgaacaggctaaaacccttgcatttgctggtcaggtaattataatcattaagcctaagaagctggaggcctgcccggactgtctagagcacatatgtgaattctccctggggaggctggggtcttgcctgtag

SEQ ID NO: 116973 - DNA, 1779 bp, synthetic construct
  misc_feature 1..1779: note = Description of Artificial Sequence: Synthetic coding sequence
  source 1..1779: mol_type = other DNA
atggcggtctcaggcttcacgttaggcacctgtatccttctgctgcacatttcctatgtggctaattaccctaacggcaaagtgacccaatcatgccatgggatgattcctgaacacggtcattcacctcagtctgtccctgtgcacgatatatatgtttcccagatgactttcagacccggtgaccagatagaggttactctcagcgggcatccctttaagggttttctcctcgaggctcgtaatgccgaggacctgaacgggccgcctattgggtcgtttaccttgatcgatagcgaggtgtcccaactgttaacatgtgaggacatccagggttccgcagtttcacaccgcagtgcctcaaaaaaaacggaaatcaaagtgtattggaacgctccctcttccgccccgaaccacacccagttcttggtgacggtggttgagaaatacaagatctactgggttaagattccgggtccaattattagccaacctaacgccttcccctttaccacgccgaaagctactgtggtgcccctgcctacactgccgccggtgtctcacctaaccaagcccttcagcgcctctgattgcggcaataaaaagttttgcataagatcaccactgaactgcgacccggaaaaggaggcctcctgtgtgtttctgtctttcacacgggacgatcagagcgtgatggttgaaatgtctggcccgtcaaaagggtatctgtccttcgctctgtctcatgatcagtggatgggcgatgatgatgcttatctctgcatccacgaggatcagaccgtgtatattcagccttctcacttgaccggccgaagccaccctgtcatggacagtagggataccttggaagacatggcttggaggttagcagacggtgtgatgcagtgctctttcaggcgcaatataaccctgcctggtgtaaaaaatagattcgatctgaatacatcgtattatatcttcctggccgacggcgcagctaatgatgggagaatctataaacacagtcagcagccactcatcacatacgagaagtatgatgtaacggacagcccaaagaacatcggggggagccatagtgtgctactgcttaaagtgcacggtgctctcatgtttgttgcgtggatgacaaccgtctccatcggcgttttagttgctcggttcttcaagccggtgtggagtaaggcctttttgctcggcgaggccgcttggtttcaggtccacagaatgctgatgttcactactaccgtgcttacatgcattgccttcgtcatgccttttatctaccggggaggatggtctagacacgctggataccacccatacctaggctgcatagtcatgactctagctgtgttgcagcccctactcgccgtattccggcccccactccacgatcctcggaggcaaatgtttaattggacacactggagtatgggtacagctgcaagaatcatcgctgtcgcggcaatgttccttggcatggatctgcccggcctgaatcttcccgactcctggaagacctatgccatgaccggatttgttgcctggcacgtgggcacagaagtggtgttggaggtccatgcataccgtctctctcgcaaggtagaaattctggatgacgataggattcaaattttacagtccttcaccgccgtagagaccgaggggcatgccttcaagaaagccgtacttgccatctatgtctgtggcaatgttacgttcctgatcatcttcctgagtgccattaaccacctgtag

SEQ ID NO: 116974 - DNA, 729 bp, synthetic construct
  misc_feature 1..729: note = Description of Artificial Sequence: Synthetic coding sequence
  source 1..729: mol_type = other DNA
atgctcagttgcttccgactgctgtcccgccacataagcccttctctggcctctctccgacccgttcgttgttgttttgcgctgcctctccgctgggcaccgggacgtccactggacccaagacaaattgccccccggagacctctggcagctgcagcctcctcgcgagatcccaccggacctgctgcagggcctagtagagtgagacagaatttccacccggactccgaagctgcaatcaatcggcaaattaacctcgagctgtacgcttcttacgtctacctgtcaatggcttattacttttcccgtgacgacgtggccttgaacaacttctctagatattttctgcatcagtcacgggaggagaccgaacacgcagaaaagctcatgaggttgcagaaccagcgtggaggccggatcaggctgcaagacatcaagaagccagagcaggacgactgggaatccgggctgcatgctatggagtgtgcgcttctcctggagaaaaatgttaaccaatcccttctagaattacacgctctcgcctcagacaaaggcgaccctcacctgtgcgattttctggaaacatattacttgaacgaacaggtgaaaagcatcaaggagttgggcgatcacgttcacaacctcgttaagatgggcgcacccgatgcaggattagccgagtatctgttcgatactcacacactgggtaatgagaataagcaaaactag

SEQ ID NO: 116975 - DNA, 552 bp, synthetic construct
  misc_feature 1..552: note = Description of Artificial Sequence: Synthetic coding sequence
  source 1..552: mol_type = other DNA
atgacgacagcttccacgagccaagtccgtcagaattatcatcaagattctgaggcggctatcaaccgacagatcaacttagagctgtatgcttcatatgtttacctgagcatgtcttattatttcgatcgcgacgacgtggcgcttaagaattttgctaagtatttcctgcaccagagccatgaggaacgcgaacacgctgaaaaactgatgaaactacaaaatcagcgaggaggcaggatttttttgcaggacattaaaaagccagactgtgacgattgggagtcaggactaaacgccatggagtgtgccttgcatctcgagaaaaatgtgaaccagtccctcctggagctgcacaagttagctacagataagaacgatccgcacctgtgcgattttattgaaacgcattatcttaacgagcaggtcaaagccattaaagaattaggggaccacgtgactaatctgagaaaaatgggagccccggagtccggtctggcagaatatctgttcgacaaacatacgctgggcgattcggataatgagtcgtag

SEQ ID NO: 116976 - DNA, 699 bp, synthetic construct
  misc_feature 1..699: note = Description of Artificial Sequence: Synthetic coding sequence
  source 1..699: mol_type = other DNA
agcggctttcccgctagcactgtactgggtcgcaatccggccctggtgccccacccaggacggcctcccatcgcttctccccccagccctctgcaccgcactctcgggctgcctcagggtccccggaggcttagcttggtcgccgccatgactactgccagcacctcacaggttaggcagaactatcatcaggattcagaggcggccatcaaccgacagatcaatctagaactgtacgcttcttacgtctacctgagcatgtcttattattttgatcgggatgacgtggcattgaaaaacttcgccaagtattttctgcatcaatctcacgaagagagagaacacgcagagaagctgatgaagctccagaaccagagaggcggccgcatctttctgcaggacatcaaaaagccagactgcgatgactgggagtccggcctcaatgccatggaatgtgccttgcatctcgagaagaacgtcaaccaatcccttctggaacttcataaactggctacagataagaatgacccacacctctgcgactttattgagacacactatctgaatgaacaggtgaaggccatcaaggaactcggcgaccatgtgactaatctgaggaaaatgggcgctcccgagtccggcctagcagagtatttattcgataaacacacacttggagatagcgataatgagagctag

SEQ ID NO: 116977 - DNA, 462 bp, synthetic construct
  misc_feature 1..462: note = Description of Artificial Sequence: Synthetic coding sequence
  source 1..462: mol_type = other DNA
atgacgacggcttccactagccagtcttattattttgacagagacgatgtggccttgaagaacttcgcaaagtacttcctccaccagtctcacgaagaaagagagcacgccgagaagctgatgaagctgcagaatcagcgcggggggagaattttcctgcaggacatcaaaaagcctgactgtgacgactgggagtccgggctgaacgccatggaatgcgcacttcatctcgaaaagaacgtgaatcagagcttgctggagctgcacaaactcgctaccgataaaaacgatcctcacttatgtgatttcatcgagacccactatctgaacgagcaagtcaaagccattaaggagctgggagaccacgtgacaaaccttagaaagatgggtgcacctgaaagtgggctggctgagtacttgtttgacaaacataccctgggtgattctgacaatgaaagctag

SEQ ID NO: 116978 - DNA, 552 bp, synthetic construct
  misc_feature 1..552: note = Description of Artificial Sequence: Synthetic coding sequence
  source 1..552: mol_type = other DNA
atggctactgctcagccctcacaggtgcggcagaagtacgacacaaactgcgacgccgcaatcaattcccacatcacactcgagctctatacgagctatctctatctgagcatggcattttacttcaaccgcgacgatgtcgctctcgaaaacttcttcagatactttctgcgcctatccgatgataaaatggagcatgcccagaagctgatgcgccttcagaatctgcgtggcggtcatatatgcctccatgacatccggaagcccgagtgccagggatgggaatccggtttagtagccatggagtccgcttttcatctcgagaaaaatgtcaaccagagcttactcgacctgtatcagctcgctgtagaaaaaggagaccctcagctgtgtcactttctcgagtcccactacctgcatgagcaggtgaagacaattaaggagctgggggggtatgtctcaaatttgcggaagatttgttcgcctgaagcgggtcttgctgaatatctatttgataaactgacactgggtgggcgcgtgaaggagacatag

SEQ ID NO: 116979 - DNA, 528 bp, synthetic construct
  misc_feature 1..528: note = Description of Artificial Sequence: Synthetic coding sequence
  source 1..528: mol_type = other DNA
atgtcttcacaaattcggcagaattactctactgacgttgaggctgcagtcaacagcttggtcaacctgtacctgcaggctagctacacatatctgtctctaggtttttacttcgacagggatgatgtcgccttggaaggcgttagccatttttttagggagttagccgaggaaaagagagagggatatgagaggctgctgaagatgcagaatcagaggggagggcgggctctcttccaggacattaagaaaccagctgaagacgagtgggggaaaactcccgacgccatgaaggctgcaatggccctggagaagaagttgaaccaagccctcctggacctccacgctcttgggtccgccaggactgacccacatctgtgcgacttcctggagacccacttcctcgatgaagaggtcaagcttatcaagaaaatgggggatcacctcaccaatcttcatcgactgggaggccctgaagcgggtctcggcgaatatctgtttgagcggttaacattgaagcacgattag

SEQ ID NO: 116980 - DNA, 573 bp, synthetic construct
  misc_feature 1..573: note = Description of Artificial Sequence: Synthetic coding sequence
  source 1..573: mol_type = other DNA
atgagctcgcagatccggcagaactattcaacagatgtggaagcggccgtcaactccctggtcaacctgtacctgcaagcttcttacacctatctgtccctgggtttctatttcgacagggacgacgtcgctttggagggcgttagccacttcttcagagagctcgcagaggaaaagagggaggggtacgagagacttttaaaaatgcagaaccaaaggggggggagagctctctttcaggatatcaagaaacccgcggaggatgagtggggcaagactcccgatgctatgaaggcagctatggccctggagaagaagctcaatcaggctctgctggatttacatgccctgggctcagctcgaacggacccccacttgtgtgatttcttagaaactcacttcctggacgaggaggtcaagctcatcaaaaaaatgggagatcatttgaccaacttgcaccgactcggaggaccagaagctggattgggagagtatctctccaagggttccctgagttcgaccacaaagtctttattatcacccgccacttccgaaggcccacttgcgaagtag

SEQ ID NO: 116981 - DNA, 1272 bp, synthetic construct
  misc_feature 1..1272: note = Description of Artificial Sequence: Synthetic coding sequence
  source 1..1272: mol_type = other DNA
atgcggtcactgggtgccaatatggccgccgcactcagagccgccggcgtgctgctccgggaccctctagcttcttctagctggcgagtctgtcaaccctggaggtggaagtccggtgccgctgcagcagccgtgacaactgaaaccgctcagcacgcccagggagcaaagccgcaggtccagcctcaaaagagaaagccgaagaccgggattctcatgctaaatatgggcggacctgagaccttgggagacgtgcacgactttctacttcggctgtttctggatcgggacctgatgacccttcccattcagaacaagctcgccccgttcatcgcaaagaggcggactccgaagatccaagaacagtaccggagaattggcggggggtccccaattaagatttggacctccaaacagggagaaggaatggtgaaactgctggatgagctctctcctaacacagcaccccataagtattatattggtttcaggtacgttcatcccctgaccgaagaggccattgaggaaatggaaagggatggcctggagagagcaatcgcgttcacccagtaccctcagtatagttgcagtactaccgggagtagcctgaatgcgatctaccgttattacaatcaggtcgggaggaaaccgacaatgaagtggtccacaatcgaccgctggccaacgcaccatttgctcatccagtgtttcgctgaccatattctgaaagagctggaccactttcctctggagaaacgctccgaggttgtcatcctgttttctgcgcacagcctaccaatgtccgtggttaacaggggggatccgtacccccaggaggtcagtgccacagttcagaaggtgatggaacgcctggaatactgcaatccgtacaggctggtctggcagtccaaggtgggacccatgccctggctgggcccacagacagacgaaagtataaaggggctatgcgaacgcggccggaaaaacatcctgctcgtgcctatagccttcacgtctgaccatattgagacactatatgagctcgatatcgagtactcacaggtcttagcgaaggagtgcggggtcgagaatatccgtcgtgcagaatctttgaacggcaaccccctgttttcaaaagctcttgctgacctggttcattcacacattcagtcaaacgaactgtgtagcaagcagctgaccctgtcatgtcccttgtgtgtcaatcccgtttgtcgggagacaaagtccttcttcaccagtcagcagttgtag

SEQ ID NO: 116982 - DNA, 1290 bp, synthetic construct
  misc_feature 1..1290: note = Description of Artificial Sequence: Synthetic coding sequence
  source 1..1290: mol_type = other DNA
atgcgcagcctcggtgccaatatggcggccgcgcttcgggctgctggcgtcctgcttcgagaccccctcgccagttcctcttggagagtgtgccaaccttggagatggaagagcggtgctgctgctgccgcagtgactacagaaactgcgcagcatgcacagggagctaagcctcaagtacagcctcagaaacggtatgaaagcaacattcgaaagcccaagacagggattttgatgcttaatatgggcggtcctgagaccctgggcgacgttcatgattttcttctgcggttatttcttgacagagacctgatgacactgcccatccagaataagctggcaccatttattgcaaagcggaggactcctaagatccaagagcagtacagaaggattggaggtggtagcccgatcaagatctggaccagcaagcaaggagagggaatggtcaaactcctggacgagctgagcccgaacacggcaccccataagtactacattgggtttcgctatgtccatcccctcaccgaagaggccatcgaagagatggagcgagacgggctggagagggcaatcgcatttacacagtacccacagtactcctgcagtaccaccggctcttctttgaacgccatataccgttactacaatcaggtcggaagaaagcccacaatgaagtggagcactatcgatcgatggcccacccaccaccttctgattcaatgctttgcggatcacattctaaaggagcttgaccacttcccgctcgagaagcgcagcgaggtggtgatcctctttagtgctcactccctgcctatgagcgtggtgaacaggggcgatccataccctcaagaagtgtccgcaacggtgcagaaggtgatggagaggctcgagtactgcaatccctaccgccttgtatggcagagcaaggtgggccctatgccttggctgggcccccagacggatgagtctattaagggcctatgcgagagggggcgaaaaaatatactgttggtgccgattgctttcaccagcgatcacatcgaaaccctgtatgaactggacatagagtactcacaagtgctcgcgaaagaatgtggggtggagaatatccgacgcgcggagtcactcaacgggaaccccctattttctaaggctctggcggatctcgttcacagccacattcagtcaaatgaattatgtagtaagcagctgaccctgtcctgcccattatgcgtgaaccccgtgtgtagggaaaccaaaagcttttttacttcccagcagctgtag

SEQ ID NO: 116983 - DNA, 1149 bp, synthetic construct
  misc_feature 1..1149: note = Description of Artificial Sequence: Synthetic coding sequence
  source 1..1149: mol_type = other DNA
atgggtttgttactgcctctcgcattatgcatcttggtgctctgttgcggagccatgagtccaccacagctggcactgaatccctccgctctgttgtccagggggtgtaatgattctgacgtcttggctgtggccggtttcgctcttcgcgacatcaataaggatcggaaggatgggtatgtcctgaggctcaaccgtgtgaacgatgctcaggagtatcgtcggggaggccttggaagcctgttctacctcacactggacgtactcgaaaccgattgtcacgtgttgaggaagaaagcctggcaagactgcggcatgcgcatcttctttgaaagcgtgtatggacagtgcaaggccatcttttacatgaataacccatcacgcgtgttgtatctggcggcgtataactgtacactgcgtccagtgtctaaaaagaagatatacatgacctgtccagattgtcccagttctatacctacggactcttcgaaccatcaggtcctggaggctgccactgaatctttagctaagtacaataatgagaataccagcaaacagtactccttgttcaaagtcacacgtgccagcagccagtgggtcgtcggcccgtcttattttgttgagtatctgattaaggagtcaccatgcactaagagccaggctagtagctgctctttacagagcagtgattcagtgcctgtcgggttatgcaagggcagtctgaccaggacccattgggagaaattcgtctcagtcacgtgcgacttctttgaatcacaagctcccgccacgggatctgaaaatagcgctgttaatcaaaagccgactaatctgccaaaagtggaagagtcccagcagaaaaacacccccccaaccgactcacccagtaaggccgggccgcgcgggtctgttcagtatctcccggatctggacgataaaaactcccaggagaaaggccctcaggaagcctttccagtgcatctcgacctgaccaccaatcctcaaggagagactctggacatttcatttctctttctcgaacctatggaagagaaactcgtcgttttgcctttccccaaagagaaggcacgcacggctgagtgtcctggccctgctcagaatgccagcccgttggtgctgccaccgtag

SEQ ID NO: 116984 - DNA, 1149 bp, synthetic construct
  misc_feature 1..1149: note = Description of Artificial Sequence: Synthetic coding sequence
  source 1..1149: mol_type = other DNA
atggggctgttattaccacttgctctgtgcattttagttctctgttgcggagccatgagcccccctcagcttgcactaaatccatcggccctgttgtcccgcggatgtaatgacagtgacgttcttgcagttgctggattcgcactacgcgacataaataaggaccgaaaggacggatacgtcctgcgactgaaccgcgttaacgacgctcaggagtatcgaagaggcggtttagggtcgctattttatcttacactggacgtcttggagaccgattgtcacgtcctgaggaagaaggcttggcaagactgcggaatgcgtattttcttcgaaagtgtttacggacaatgtaaggctatattctatatgaataacccctcgcgcgtactgtacttagcagcgtacaactgcaccctccgacctgtgtctaagaaaaaaatctatatgacttgccccgactgcccttccagcattccgacagattcatccaaccaccaggtactggaagcagcgacagaatctttggccaagtacaacaacgaaaatacctctaagcagtatagcttgttcaaggtgacacgcgcgagcagccaatgggtggtcggaccctcctattttgtggagtacctgattaaagagtccccttgtaccaagtcccaagcatcttcctgcagcctgcaatccagtgattcggtgcctgtgggcctctgtaagggctccctgacccggacacactgggagaagttcgtgtctgtgacatgcgacttcttcgagagccaggctcctgccacgggaagcgagaactctgctgtgaaccagaaacccacaaaccttccaaaggtggaggaaagccagcagaagaacacgccgcccacggactctcccagcaaggcaggaccccgcggtagtgttcagtacctccccgatctggacgacaaaaactcacaggagaagggaccccaggaggcctttcctgtacatctggatcttacaacaaatccacagggagagacgctggacataagtttcctttttttagaaccgatggaagaaaagctcgtagtcctccctttcccgaaggaaaaagcccgcacggccgaatgccccggccccgcccagaacgctagcccactggtgctacccccttag

SEQ ID NO: 116985 - DNA, 705 bp, synthetic construct
  misc_feature 1..705: note = Description of Artificial Sequence: Synthetic coding sequence
  source 1..705: mol_type = other DNA
atgacatgcccggactgcccttcaagtatccccactgacagcagcaaccatcaggttctggaggcggccactgaaagcctggccaagtacaacaatgagaacacatctaaacagtactcactgttcaaagtcacgagggcatccagccagtgggtggtggggccctcctactttgtcgaatatcttatcaaggagtccccttgcaccaagtctcaagcctcttcgtgttcccttcagtctagcgacagcgtcccagtgggcctgtgcaagggtagtctgacgcgaacccactgggaaaagtttgtgagcgtcacatgcgatttcttcgagtctcaggctccagccaccggttcagagaattctgccgttaatcagaaacctacaaatctacctaaagtagaggagtcccagcaaaaaaatacccccccgacggacagccctagcaaagcgggaccccgaggaagcgtgcaatatttgcccgacttagacgacaaaaacagtcaggagaaggggccccaagaggcattcccagtgcacctcgacttgacaacaaaccctcaaggtgagaccttggacatttcttttctgtttctggaaccgatggaggagaaactggtggttttgccatttcctaaagaaaaagcgagaacagcagaatgcccaggacccgcccagaatgccagccctctcgtgttgccaccatag

SEQ ID NO: 116986 - DNA, 717 bp, synthetic construct
  misc_feature 1..717: note = Description of Artificial Sequence: Synthetic coding sequence
  source 1..717: mol_type = other DNA
atgaggcaatcgggagctagtcagccactgctgatcaacatgtaccttcccgaccccgtgggagatggactctttaaggacggtaagaacccctcttggggcccactgtcccccgccgttcaaaagggatccggacagattcagctctggcagtttctgctggaactgttggcagatcgcgccaacgctgggtgtatagcttgggaaggaggacacggtgagttcaagttaaccgacccagacgaggtggccaggcgctggggggagcggaagtccaagcccaacatgaattatgataagttgagtcgcgccttacgatactattatgacaagaatattatgtccaaggtccacggcaagaggtatgcctaccggtttgatttccagggactggcccaagcatgtcagccccctccagcccacgcacatgccgcagcagccgcagcagcggcggccgctgccgctcaggatggcgccctttacaagctgcccgcaggactggcccccttgccttttcccggcctctcaaagcttaacctaatggctgcaagcgctggagtggcccccgcaggtttctcttattggcctggcccaggtcccgccgccaccgccgctgcagccacagccgctctctacccctctccaagtttacaaccccctcctgggccgttcggcgcagtggctgccgcaagtcatcttggcggtcactaccactag

SEQ ID NO: 116987 - DNA, 1416 bp, synthetic construct
  misc_feature 1..1416: note = Description of Artificial Sequence: Synthetic coding sequence
  source 1..1416: mol_type = other DNA
atggatagctcttgccataatgcaacgaccaagatgctggccaccgcgcctgcaagaggtaatatgatgagtacctccaagcctctggcattttcaattgagaggattatggcacgaacaccagagcctaaagccctgcccgtgccacactttctccagggagcactgcccaagggagagcccaagcattctctccatctcaattctagtatcccatgcatgatcccattcgtgcctgtggcctacgatacttctccaaaggcgggggtgaccggaagcgagccgaggaaggcttccctagaagcccccgcagccccagcggctgtgcctagtgcccctgcgttctcatgttccgacctgttgaactgtgctctgtccctgaagggcgacctggcccgggatgctctgcccctccagcagtataagctcgtgaggccccgcgtggtgaaccacagctcgttccatgcgatgggggctctatgctatttgaaccgaggcgatgggccctgccaccccgcagcaggggtcaacatacatccagtggcaagttactttctgtccagccctcttcacccccagccaaagacctatttggccgagcgcaacaagctggttgtccccgctgtcgagaagtacccatcaggagtagcattcaaagatctctcccaggcgcaacttcagcattatatgaaagagtccgcccaactgctatccgaaaagattgcatttaaaactagcgacttctcccgtgggtcccctaacgccaaacccaaagttttcacatgtgaagttttcaatgcgcactacaacctgaccaggcatatgcccgtgcacactggggcgcgtccattcgtctgcaaagtgtgtggtaaaggttttcgacaggccagtaccttgtgtcgacacaagatcatacatactcaggaaaaaccgcataagtgtaaccagtgtggcaaggcctttaaccgcagctctaccttaaacacccataccaggattcacgccgggtacaagccttttgtttgcgagttctgtggcaaagggttccatcagaaaggcaactataaaaatcacaaactgacacactccggcgagaagcagtttaaatgtaatatttgtaacaaggcgttccaccaagtgtacaacctaaccttccatatgcatactcataatgacaagaagccatttacatgccccacctgcggcaagggcttctgccggaactttgaccttaaaaagcacgtaagaaagttgcacgacagctcattgggtctcgccagaactccagccggggagccaggtaccgagcccccacccccccttccacagcagcctccaatgactctgccacctctccaaccgccgctccctacccccgggccccttcagccagggctccatcagggtcaccaatag

SEQ ID NO: 116988 - DNA, 108 bp, synthetic construct
  misc_feature 1..108: note = Description of Artificial Sequence: Synthetic coding sequence
  source 1..108: mol_type = other DNA
atggattcaagctgccataacgcgaccaccaaaatgctggcgacggcgcccgcccggggcaacatgatgagtacttccaagcccttggccttcagcatcgaaaggtag

SEQ ID NO: 116989 - DNA, 1278 bp, synthetic construct
  misc_feature 1..1278: note = Description of Artificial Sequence: Synthetic coding sequence
  source 1..1278: mol_type = other DNA
atggactccagctgtcacaatgccaccacaaagatgcttgccacggcgccagctagagggaatatgatgagcacctctaagcctctggcgttttcaattgaacgcataatggcaaggacaccagagcctaaggcgctgcccgttccgcatttcctgcagggagcactccccaaaggcgaacccaagcactctctccaccttaactcaagcatcccatgcatgattccatttgttcccgtagcttacgacacatctccaaaagcgggagtgacgggatccgagcctcgcaaggcctcattggaggccccggccgccccagccgcagtacccagcgcccctgcattctcttgcagcgatctgctgaattgcgcgctttcccttaagggcgatcttgctagagatgctttacctctgcagcagtataagctgccaaaaacatatctggcggaacgcaacaagctggttgttcccgctgtggaaaaatatccttcaggcgtagcatttaaggacctttctcaggcacagttacagcattacatgaaagagtcagcgcaactgctatctgagaaaatcgcctttaagacaagcgacttctcaagaggaagccccaacgcaaagcctaaagtgtttacttgcgaggtctgtggcaaagtgttcaatgctcactataatcttaccaggcacatgcctgtgcatacaggagcgagaccgttcgtgtgcaaagtctgcgggaaggggttccgccaggcatccacgctttgcagacacaaaattattcatactcaggagaagcctcataagtgtaatcaatgtggaaaggctttcaacaggagctcgaccctcaacacccatactcggatccacgcgggatacaaaccctttgtgtgcgagttttgtggtaaggggttccaccagaagggtaactataaaaaccataagcttacacattctggcgagaagcagttcaagtgcaacatctgtaataaggccttccatcaggtatacaacctcacgtttcatatgcacacccataatgacaaaaagccgtttacgtgcccaacttgtggaaaaggattttgcaggaactttgacttgaagaagcacgttagaaagcttcatgacagctcgttgggcctggcccggactccagcaggtgagcctggtacagagcctccccctcccctgccacagcagccccctatgactcttcctcccttgcagcctccactgcctacccccgggccgctgcagcctggtctgcaccagggacatcaatag

SEQ ID NO: 116990 - DNA, 1428 bp, synthetic construct
  misc_feature 1..1428: note = Description of Artificial Sequence: Synthetic coding sequence
  source 1..1428: mol_type = other DNA
atggacagtagttgtcataacgccacaaccaagatgctggcgactgctcctgcccggggcaacatgatgagcacttcaaaacctcttgccttttctatcgagaggattatggcccgtacacccgaaccaaaggccctgccggttccacatttcctgcagggagcactgcctaaaggggagccaaagcatagcttacacctgaattcttctatcccttgcatgataccctttgtccccgtcgcgtacgacacctccccgaaagctggggtcactgggtctgagcctcgcaaagcttccctggaagctcccgccgcacccgctgccgtcccgtcagctccagctttttcctgttctgatttgctcaattgcgccctaagcttaaaaggtgatctcgccagggacgcgcttccacttcaacagtacaaattggttagaccacgggtggtgaaccacagctccttccatgctatgggggctttatgttacctgaaccggggcgacggtccatgccaccccgcggccggagtcaacatccacccagtggcttcatacttcctgtctagccccctgcatccacagccaaagacctacctggccgagagaaataaactcgtcgtgccggccgtggagaagtacccgagcggagtcgctttcaaggacctctctcaggctcagctccagcactatatgaaggagtcagcacagctgctctcagagaaaatagcgttcaagacgtccgatttctcacgcgggtctcctaatgcaaagccaaaggtcttcacatgtgaggtctgcggaaaggtgtttaatgcccactataacctaactcgccacatgccagtccataccggagcacgtccatttgtatgtaaagtatgtggaaagggattccggcaggctagcacactttgtaggcacaagataatacacacccaggagaagccgcacaagtgcaaccaatgcgggaaggccttcaaccgtagctctacactcaacacgcacaccagaatccacgccggctataagccctttgtatgtgagttctgcggcaagggcttccatcagaagggcaactacaagaaccacaagctgacccattcaggtgagaaacaattcaaatgcaatatttgtaataaagcgttccatcaggtgtataatttaacttttcatatgcacactcataatgataagaagcccttcacctgtccgacctgcggaaaaggcttctgtagaaatttcgacctcaaaaagcacgtgcggaaacttcacgacagcagcttaggactcgccagaacaccggcaggcgagccaggcactgagccacccccgcccctgccccagcagcctcccatgacgctgccccctctgcagcccccacttccaacgcctggcccgctgcagccaggcctgcatcagggtcaccagtag

SEQ ID NO: 116991 - DNA, 1380 bp, synthetic construct
  misc_feature 1..1380: note = Description of Artificial Sequence: Synthetic coding sequence
  source 1..1380: mol_type = other DNA
atggcatcatcagctagcctggagacgatggtcccgcccgcctgccctagagcaggagccagccccgcaacgagcaagaccctggctttcagcattgagcgcatcatggccaagacttctgaaccacgtgctccgtttgagccgaggccgggcgccttggaagccgatggatctcagggaaaaaagctactgaatttatgcagccccctgccctgcatgattcccctgcaaccacttggttatgaggttccttccaagacgcttctgagctattccgaactttggaagtcttcactccgcgctggaggcggcggcggcgggggcggcgggggaggtggcggcggcggcggggcacccgtatgtggtgcgagtggattatgcaagacgaactgcggtgtctgctgtaaggccgaattgggcctcgctccttccgcactcccagcgggaagggtgattaaaccgcaggtaatcaatcaggctgtggggctgccagcaagcgggtccctgtactatttcaactacctcgattcaaccgcttaccccccttcggaacttctctcaggccacttgtttccctctggactcctgaatgcccaggcaccggccgctctggccgcccatccgaagctgttcctgctcgaaaacgctaaattagcaggcctggcggcagataagttcccccaccccgccccctacccccacaaagaacgcctccctgcccccttagagcaagtcctgaaagagaattctgccctgaccgccgaacgtggaggggtgaagggacattccaagctgcctgggggatccgctgatgggaagccgaagaacttcacttgtgaagtttgtgggaaggtttttaatgcccactataacttaacaaggcacatgcccgttcataccggggcccgccctttcgtgtgtaaagtgtgcggcaagggatttcggcaggctagcactctctgtagacataaaataattcacacccaagagaaaccccataaatgcaatcagtgtgggaaggccttcaatagaagtagcaccctcaacacgcacatccgaatacatgctggatataaaccttttgtgtgtgagttctgcggaaaaggctttcaccagaaaggcaactacaaaaatcataaacttacccattccggagagaagcaatataaatgtaccatctgcaacaaggcatttcatcaagtgtacaatctgacctttcacatgcatactcacaatgataaaaaaccatttacatgtgctacgtgcggcaagggcttctgtagaaactttgacctcaagaagcacgtgaggaagctgcacgattctgtcggcccagcggccccaagcgctaaggacctgacccgtaccgttcagtcttag

SEQ ID NO: 116992 - DNA, 1380 bp, synthetic construct
  misc_feature 1..1380: note = Description of Artificial Sequence: Synthetic coding sequence
  source 1..1380: mol_type = other DNA
atggccagctcagcctccctcgaaaccatggtccctccagcatgcccccgcgccggggctagcccagctacaagtaagacactcgccttcagtatcgagaggataatggccaagaccagcgaacccagagctccctttgagcctcggccgggagccctggaggccgatggcagtcaggggaaaaaactcctgaacctgtgttctccgttgccatgcatgattccacttcagcctctcggctacgaagtgccctcaaaaactttgctaagttactccgagctgtggaagagctcactgcgagctggcgggggagggggaggtgggggcggagggggtgggggtgggggcggtgcacctgtgtgtggtgcatcaggtctttgcaaaaccaactgtggcgtgtgttgcaaagctgaactggggctggctcctagcgctttgccggctggcagagtcataaagcctcaagtgattaaccaggccgtcgggttgcctgccagcgggtcactctactattttaactatctggactctaccgcttatcccccctctgaattgttgtctggccatctattcccaagtgggcttctgaacgcccaggcacccgctgcactagctgcacatcccaagctgtttctgttggaaaatgccaaactagcaggcctcgccgcggacaagtttccccatcctgctccttatccccataaggagcgcttgcccgcgcctctcgagcaagtgcttaaggagaactctgctttaaccgctgagcgtgggggcgtgaaaggccattccaaacttccgggaggatctgctgatggcaaaccaaaaaattttacttgcgaggtgtgcggaaaagtgtttaatgcccactataatctgacccgtcacatgcctgtgcataccggggcacgtccgtttgtgtgtaaagtgtgcggcaagggttttcgccaggctagcacattgtgtcggcacaagatcatccatacccaggagaagccgcacaagtgcaaccagtgtgggaaggcttttaacagatcatcaaccctaaacacacacatcagaatccatgcagggtacaaaccctttgtgtgcgagttttgtggcaaagggtttcaccaaaagggcaactataagaaccataaattgacacattccggagagaagcagtataagtgcaccatttgtaacaaagcctttcatcaagtgtataatctgacatttcatatgcacactcataatgacaagaagccttttacctgcgcaacatgcggtaaagggttctgtagaaatttcgatcttaagaaacacgtgcgaaaactccatgatagcgtcgggccggctgcaccttctgccaaggatctgactagaaccgttcagagttag

SEQ ID NO: 116993 - DNA, 1380 bp, synthetic construct
  misc_feature 1..1380: note = Description of Artificial Sequence: Synthetic coding sequence
  source 1..1380: mol_type = other DNA
atggcgtcttccgccagtttagagaccatggtccctccagcctgtccccgagctggcgcctcgcccgccacctctaaaaccttggcattctccatcgaaagaatcatggcgaagactagtgagcctcgggctcctttcgaacctcgtccaggcgcccttgaggccgatgggtcgcaggggaaaaaactcctcaacctatgcagtcccctgccttgcatgatccctctccagccacttgggtatgaggttccttcaaagactctgctctcttacagtgaattgtggaaatcctcactacgggctggaggcggcggaggcgggggcggtgggggcggcggcggaggcgggggtgcaccagtctgtggcgcttctggcctgtgtaagactaactgcggggtgtgttgcaaagcggagctgggtcttgccccgtctgcacttccggcggggcgggtcatcaagccccaggtcattaaccaggctgttgggcttccggccagcggctcactatattattttaattaccttgacagtacggcctatccaccatccgaactactttccggacacctgtttccatccggactgctgaacgcccaggccccagcagccttggcagcacatcctaaactctttctgctggagaacgccaagttagcaggcttggccgccgacaaattcccgcatcccgcaccctaccctcacaaggagcggctgcccgctccactggagcaagtcctgaaagaaaattccgccctcacagccgaaaggggaggcgtaaaaggtcacagcaagctaccagggggatccgccgacgggaagcccaagaacttcacttgcgaggtgtgtggcaaggtgttcaacgcccattataatctaacccggcacatgcctgttcacactggggccagacctttcgtgtgtaaggtgtgcggcaaagggttccgtcaggcatcaaccttgtgccggcacaagatcatccatacccaggagaaaccacataagtgcaaccagtgcgggaaggcatttaataggagttccacattgaatactcacattcggattcatgctggctacaagcctttcgtatgcgagttctgtggaaagggatttcaccagaaaggtaattataagaatcacaagcttactcacagcggagagaaacagtacaagtgcaccatctgcaataaagcgttccatcaggtatacaacttgacgttccacatgcacacacacaacgacaagaagccatttacatgcgccacttgtgggaagggcttctgcaggaactttgatctcaagaaacacgtaagaaagctgcacgactccgtcggacccgccgcacccagtgccaaggatttgactcggactgtccaaagctag

SEQ ID NO: 116994 - DNA, 1140 bp, synthetic construct
  misc_feature 1..1140: note = Description of Artificial Sequence: Synthetic coding sequence
  source 1..1140: mol_type = other DNA
atggctgccaccgccgccgcggtggtggccgaagaggacaccgaactgcgcgatttgcttgtacagacactcgagaatagcggtgttctgaacagaattaaggccgagctaagagccgccgtctttctggcccttgaagaacaggaaaaagtagagaacaaaactcctttggtgaacgaaagcctgaaaaagtttctgaacaccaaagatggacgtctcgtggcttctctggttgccgagtttctccagtttttcaacctagactttaccctggctgtttttcaacctgagacctcaactcttcagggcctcgagggacgagagaatctggctcgcgatctcggaattatagaggcggagggaacagttgggggacccctgcttttggaagtgatcaggcgttgccagcaaaaggagaaaggccccactacaggagagggagccttggatttgtctgacgtccatagccctcccaagtctcccgaaggcaagacaagcgcccagaccacccccagcaaaaaagccaacgacgaagcgaatcagtctgatacctccgtctcccttagcgagcctaaatccaagagctcgcttcatctgctgtcacatgagacgaaaattgggtcttttttaagcaatcggacccttgacgggaaagacaaagccggcctgtgtccggacgaggacgatatggaaggagacagtttctttgatgacccaatacctaagcccgaaaagacatatggacttaggaaggaaccccggaagcaggcaggtagtttagcaagcctgtccgacgccccccccctgaaatctggcctgagcagtttggctggagcaccgagcctgaaagacagtgagagtaagagaggaaacaccgttctgaaagacctgaaactcatctctgataagattggctcccttggcctgggaacaggggaagacgacgattatgttgacgattttaattccactagccaccgctctgaaaagtctgaaatttcgataggcgaggagatcgaggaggatctgtccgttgagatagatgatattaacaccagtgacaaactcgacgacctgacacaggatctgaccgtctctcagcttagtgatgtggccgactacctggaggacgtagcctag

SEQ ID NO: 116995 - DNA, 1200 bp, synthetic construct
  misc_feature 1..1200: note = Description of Artificial Sequence: Synthetic coding sequence
  source 1..1200: mol_type = other DNA
atggcagccacagctgccgccgtcgtagctgaggaggataccgaactgcgggacctcctcgttcagactctggaaaactctggcgttctgaacaggattaaagccgagttacgggccgcagtcttcttagcactggaggaacaggagaaggttgaaaacaagactccactagttaacgagtcgttgaaaaagtttctgaataccaaagacggaaggctcgtggcttctttggtggcagagttcttgcagttctttaacctggacttcactctcgctgtgtttcagccggaaacctctactctgcaaggtcttgagggacgagaaaacctggcccgagacctcggaattattgaagccgaaggcaccgtgggggggccattgctgcttgaagtgatcagacgttgtcagcagaaagaaaagggccctactaccggcgaaggagcactggacctgagtgatgtccattccccccccaagtctcctgaagggaagactagcgcgcagaccactcctagtaagattcctagatacaagggacaagggaagaagaagacttccggacagaaggctggtgacaaaaaggcaaacgatgaagcgaatcagtccgatacgagcgtaagtctgtctgaaccgaagtctaagtcatccttgcatctactgtcccacgagacaaaaattggcagcttcctgagtaataggacactggacggaaaggataaagctggtctgtgccccgatgaggatgatatggaaggagacagctttttcgacgaccctattcctaagcccgaaaaaacatatggcttgcgaaaagaacctaggaagcaggccgggtcgttagcctctctcagtgacgcacctcccttgaaaagcggactcagcagcctcgccggggcaccaagcctcaaggacagtgagagtaagagaggcaacacagtcttaaaagatctcaaactaatttcggataagattgggtccctcgggctcggcacgggtgaagacgacgattatgttgacgattttaattctacgagtcatcgcagcgagaagagcgagatttccatcggtgaggagatcgaggaggacctctccgtggaaatcgatgacatcaacacttccgacaaactggacgatctgactcaggacctcaccgtttcacaactcagcgacgtagcagactatttagaggatgtagcttag

SEQ ID NO: 116996 - DNA, 1095 bp, synthetic construct
  misc_feature 1..1095: note = Description of Artificial Sequence: Synthetic coding sequence
  source 1..1095: mol_type = other DNA
atggctgccactgccgctgcagttgtcgctgaagaagacaccgaacttcgagatttgctcgttcagaccctggaaaattccggagtgctcaatcgcattaaggcagaactccgggccgccgtattcttagcgctggaagagcaggaaaaggtcgagaataagactcctcttgttaatgaaagtctgaaaaagtttttaaatacaaaggacggccgcctggtggcttccctggtcgcggaattcctgcagttcttcaatctggactttacacttgcagtgtttcagcccgagacaagcactctccaaggcctggaggggcgggagaacctagctcgcgacctcggtattatcgaggctgagggaaccgtcggcggacccctgctcttggaggttataagacgttgccaacagaaggaaaagggtcctacaacaggggaaaaggctaacgacgaagctaaccaatcagacacttcagtttcactcagtgagccgaaatccaagtcctctctacatctgctcagccatgaaacaaagatcggatccttcttatctaaccgcacactcgacggcaaggacaaagcaggattgtgtcctgacgaagacgacatggagggtgatagcttctttgacgatcctataccaaaaccagagaagacttacgggctacggaaggagccgaggaagcaagcaggatccctggcttctctcagcgacgcacctcctcttaagagcggactctcaagcctggccggagcaccaagcctcaaagattctgagtcaaagaggggaaataccgtgctgaaagatctgaagctcataagtgacaaaatagggtcattgggcctaggaacaggcgaggacgacgactacgttgacgatttcaactccacatcccatagaagtgaaaagtccgaaatcagcattggtgaggagatcgaagaagatctttccgtggagatcgacgacataaatacctctgataagacaatcacccagctcgagtgtcttctgtcgatcggtgccctgcacttcaagaataccgccgacatctttaaagttatttttattctgctaaacaaaatcctgcctatttag

SEQ ID NO: 116997 - DNA, 420 bp, synthetic construct
  misc_feature 1..420: note = Description of Artificial Sequence: Synthetic coding sequence
  source 1..420: mol_type = other DNA
atgtcatctctccccgtgccatacaagctgccagttagcctttcagttggctcctgcgttataataaagggtacaccaattcactccttcatcaacgatccgcagcttcaagtggatttctatactgacatggacgaagattccgatatcgccttccgcttcagagtccattttggaaatcacgtggtgatgaataggagggagttcggcatctggatgttggaggagactacagattacgtgcctttcgaggacggaaagcaatttgagctttgcatctacgtacattacaatgaatacgaaatcaaagtaaatgggattagaatctacgggttcgtccacagaattcctccatcttttgtcaagatggtacaagtttctcgtgatatatccctcacttccgtgtgtgtgtgtaactag

SEQ ID NO: 116998 - DNA, 8616 bp, synthetic construct
  misc_feature 1..8616: note = Description of Artificial Sequence: Synthetic coding sequence
  source 1..8616: mol_type = other DNA
atgagacgaggacgactattagaaattgcactcggctttactgtgctgctggcctcctatactagccacggagctgatgcaaacctggaggcaggtaacgtaaaggaaaccagagcctctagagctaaacgcaggggaggagggggccacgatgcattgaagggtccaaatgtgtgtggtagtcgatacaatgcctactgttgccctgggtggaagacgttgcccggagggaaccagtgcatcgtgcccatctgcagacactcatgcggtgacggattttgctccaggcctaacatgtgtacctgcccctctggacagatcgcaccatcctgcgggtctaggagtatacagcactgtaatatcagatgcatgaatggaggaagttgcagtgacgatcattgcctctgtcaaaaggggtacatcggcactcactgtggacagccagtgtgtgagtctggctgtttgaacggcggccggtgcgtcgcacccaaccgatgtgcatgtacgtatgggtttacaggccctcagtgcgagcgcgattaccgaaccggaccctgctttactgtaataagcaatcagatgtgtcagggacagctgagcggcatagtctgtacaaagactctgtgctgtgctactgtcgggcgcgcttgggggcatccctgcgagatgtgccccgcacagccccatccttgtcgcagaggttttatcccgaacattcggaccggcgcttgtcaagacgtggacgagtgccaggccattcccgggctctgtcaaggcgggaactgcatcaacaccgtggggtctttcgagtgcaagtgtcctgcgggccataaactcaacgaggtgtcccaaaagtgcgaggacattgacgagtgctccactattcccgggatctgcgagggcggggagtgcaccaatacagtcagctcttacttctgcaaatgtccccctggcttttatacttcccccgacgggactcgttgcatcgatgtgcgccccggttattgctacacagcgctcacgaatggacggtgcagcaatcagctgccccagtcgattacaaagatgcagtgttgttgcgatgccgggaggtgctggagtccaggcgttactgtcgcccctgagatgtgccctatccgagccaccgaagactttaataaactctgtagtgtgcctatggtcatcccaggcaggccagagtaccccccaccacctctcggccccattcccccagtactgcctgtgcccccggggttccctccgggccctcagattcctgttccacgtccccccgttgaatatctttacccgtcccgcgagccaccacgggtgctcccagtgaacgtcactgattactgccagcttgtgcgctatctgtgccaaaatggacggtgtatacccactccggggtcttgccgatgtgaatgcaataagggatttcagttagatctccgtggagaatgcattgatgttgacgagtgcgaaaagaatccctgtgcgggtggagagtgcattaataatcaggggtcctatacctgtcaatgcagagctggttatcagtcaaccctcactagaaccgaatgcagggacattgacgagtgcctgcaaaatggacgcatctgtaataatggaaggtgcatcaatacagatgggtcttttcactgtgtttgcaacgccggcttccatgtcacccgagatggcaaaaactgcgaagatatggacgaatgttctattcgcaacatgtgtctgaatggcatgtgcataaacgaagacgggtcctttaaatgcatttgtaagccgggttttcagctggcatcagacggccgttattgtaaagacattaacgagtgtgagactcccggcatctgcatgaatgggcggtgcgtgaacaccgacggctcctatcgctgtgagtgctttccagggctcgccgtggggctagacgggcgagtctgcgtggatacacatatgcgatcgacttgttatggcgggtacaaacgaggtcaatgtatcaaaccgttatttggcgcagttaccaagagtgagtgttgttgcgccagtacagaatacgccttcggcgagccctgtcagccctgtcctgctcagaatagtgccgaataccaggctctgtgtagtagcgggcccggcatgacatctgcaggctcggatattaacgagtgtgccctcgaccccgacatctgcccaaatggaatatgcgaaaatctgcgagggacatataagtgcatatgcaacagtggatatgaggtcgactccacagggaagaattgtgtcgatattaatgaatgcgtgttgaactctttattatgcgacaatggacagtgcaggaatactccaggtagcttcgtgtgtacctgcccgaaaggcttcatctacaaacctgacctaaagacctgtgaggacattgacgagtgtgaatcgtccccgtgcataaatggagtgtgtaaaaattctcctgggtcctttatttgcgagtgttccagcgaatccacgctggacccaactaaaactatctgtattgagacaataaagggcacctgttggcagactgtgatcgacgggaggtgcgagattaacattaatggtgcaacccttaagtcccaatgttgcagctcactcggggccgcctggggcagcccttgtaccctgtgtcaggtggatcccatatgcggcaaaggctattcccgaattaagggaacccagtgtgaggacatcgatgagtgcgaggtttttcccggtgtctgtaagaatgggctgtgtgtgaatacaaggggcagtttcaagtgtcaatgtcctagtgggatgactttggatgcgacgggcaggatatgcctggatatccgactggagacttgtttccttcgctatgaggatgaagagtgcacgcttcccattgcggggcgtcatcgcatggacgcatgctgctgctcagtgggagccgcttggggtacggaggaatgtgaagagtgtcctatgaggaacacgccagaatacgaagagctttgcccacggggccccggattcgcgaccaaggaaattactaatggcaagccattcttcaaagacatcaacgagtgtaagatgatcccctctctgtgcacgcacggaaagtgccgaaatactatcggatcctttaagtgcagatgtgacagcggttttgctctcgactctgaggagcggaactgtacagatattgatgaatgtcgcataagcccagacctatgtggtaggggacagtgtgtcaatactcccggcgatttcgagtgcaagtgcgatgagggctatgaaagcgggtttatgatgatgaaaaattgcatggatattgatgaatgccagagggatccattactgtgtcgcggcggggtatgccataataccgaggggtcataccggtgtgagtgcccccccggacatcagctgtcaccgaatatatcagcatgcatcgacatcaatgagtgtgaactgagcgcccacttatgccctaacggaaggtgcgtaaatctcattggcaaataccagtgtgcttgcaatcctgggtaccacagcacaccagatagactgttttgtgtggatatcgatgaatgctcaatcatgaacggaggatgcgagacattttgtaccaattcagagggctcctatgaatgcagctgccagcccggcttcgcactgatgcccgaccagaggtcgtgtaccgacatcgatgaatgtgaggacaatccaaatatctgcgacgggggtcagtgcacgaacatccccggtgaatatagatgtctgtgttacgatggcttcatggcctcagaggacatgaagacttgcgtggatgttaacgagtgcgatctcaacccaaatatttgtttatcaggaacctgtgaaaacacaaaaggatctttcatctgccactgcgatatgggttatagcggaaaaaaaggaaagaccgggtgtaccgatattaacgagtgcgaaattggcgcccacaattgcggaaaacatgccgtgtgtacgaatacggctggttcttttaagtgctcttgttccccgggctggatcggcgatggaattaaatgtacggacctcgacgagtgctcaaatggcacacatatgtgctcacagcacgcagactgtaagaatacgatgggttcttatagatgcctctgcaaagagggctataccggtgacggatttacctgtactgacctcgacgaatgcagcgaaaacctgaacctgtgcgggaacggtcagtgcttaaatgctccaggcggatacaggtgcgagtgcgatatggggttcgttcctagcgccgatgggaaagcatgcgaagatatcgatgagtgtagtctacctaacatttgtgtgttcggtacttgtcacaatttgccggggttattcagatgtgaatgcgagataggttatgagttagatagatcagggggaaactgcaccgacgtcaatgaatgtttggatcccactacgtgtatctccggcaactgtgttaacactccaggctcatacatctgtgactgcccccctgacttcgaactgaatccaacgagagtcggctgcgtggacacgaggtctggaaattgttaccttgatatccgcccgaggggggataatggggacacagcctgtagcaacgagatcggcgtgggagtgtctaaggctagctgttgttgcagcctgggtaaagcctggggaacaccctgtgagatgtgccccgctgtgaatacctcggagtataagatcctgtgtcccggaggggagggtttcaggcccaatcctattacagtcattcttgaggatatcgatgagtgtcaggagttaccaggcctctgtcagggcggtaagtgtattaatacgtttggctcttttcaatgtcgctgcccaacgggatattatcttaatgaagacaccagagtatgcgatgatgttaatgaatgtgagaccccggggatttgcgggcctgggacttgttacaataccgtggggaactacacctgtatctgcccgcccgactacatgcaagttaacgggggcaataactgcatggacatgcgacggtccctttgctacaggaactattacgcggacaaccagacatgcgacggcgagctgctgttcaacatgacaaaaaaaatgtgctgttgctcgtacaatataggtcgcgcatggaataagccctgcgaacagtgccctatcccttcaacagatgagttcgcaaccttgtgtggctcccagcggccaggctttgtgatagatatctatacaggccttccggtagatattgatgaatgtcgcgagattcccggggtttgcgagaatggagtctgcatcaacatggttggctcatttaggtgtgagtgtcccgtgggcttcttctacaacgataagctgcttgtgtgtgaggacatagacgagtgccaaaacggacctgtgtgccaaagaaacgccgaatgcatcaataccgccggatcttaccggtgtgattgtaagccaggctacaggttcactagcacggggcagtgcaacgatcgcaatgagtgccaggagatccccaacatttgcagccatgggcagtgtatcgatactgtgggtagcttctactgtctttgccacactggattcaagaccaatgacgatcaaactatgtgtctcgacattaacgagtgcgagcgtgatgcatgtgggaacggtacgtgtaggaacactatcggatcctttaattgtaggtgtaaccatgggttcatcctttcccataataacgattgtattgacgtggacgagtgtgcctcaggtaatggtaacttgtgtaggaacggccagtgcattaacaccgtaggcagcttccagtgccagtgtaacgaaggctacgaggtcgctcccgatggcagaacgtgtgtggacattaatgagtgcttgctcgaaccccggaagtgcgccccaggaacttgccaaaacctggatgggtcttacagatgtatctgcccaccagggtactctctccagaacgaaaagtgcgaagatatcgacgaatgcgtggaggagccagaaatttgcgcactgggcacctgttccaacactgaaggcagctttaagtgcttgtgcccggaaggctttagtctcagctcctctgggcgacggtgtcaagatttgagaatgagttattgctacgctaagtttgaaggagggaagtgtagcagtcccaagtctcgcaaccattcaaaacaggagtgctgttgtgctctcaagggcgaaggatggggagacccatgtgagctttgccctacagaaccggacgaagcctttcgacagatctgtccttacggctccggtatcatagtcggccccgacgactcagctgtggatatggacgagtgtaaggaacctgatgtgtgcaaacatggccaatgtatcaatactgacgggtcttacaggtgcgagtgtccgttcggctacatcctagcagggaatgagtgtgtggacactgatgagtgtagcgtgggcaacccttgcgggaacggaacgtgtaagaatgtgattggtggatttgaatgcacttgcgaggagggcttcgagcctgggcctatgatgacttgcgaggacatcaacgaatgcgcacagaaccctctactgtgcgctttccgctgtgtgaatacatatggaagctacgagtgtaagtgtcccgtggggtatgtgctccgggaggacagaaggatgtgtaaggacgaggatgagtgtgaggaggggaaacatgactgcactgaaaagcaaatggaatgtaagaatcttatcggaacctacatgtgcatttgcggccctgggtaccagcgaagaccagacggcgagggctgcgtggatgaaaatgaatgccagaccaaacctggaatatgcgagaatgggaggtgcctgaacacccgaggttcctacacttgcgagtgtaacgatgggttcacagcgtcgccgaaccaggatgagtgcttggacaacagagaaggctattgtttcacagaggtcctgcagaacatgtgccagatcggctcgagtaatagaaacccagtgactaaatctgaatgttgctgtgacggaggtcgggggtggggacctcactgcgagatatgccctttccaaggtactgtcgcctttaagaaactttgtcctcacggccggggcttcatgactaatggggctgatatcgacgagtgcaaggtcattcacgacgtatgtaggaacggagaatgtgtgaatgatcggggttcatatcactgtatatgcaagaccggatacactcctgacatcacggggacatcatgtgtggacctgaatgaatgcaatcaggccccaaagccttgtaattttatatgcaagaacaccgaggggagttatcaatgttcctgtcctaagggctatatcctacaggaggatggccgaagttgtaaagacctagatgagtgcgccacaaagcagcataattgtcagttcctttgtgtgaacacgatcggggggtttacgtgcaagtgcccgccaggcttcacccagcatcatacaagctgtatcgacaacaatgagtgcacgagcgatatcaacctctgtggatctaagggtatctgtcagaacaccccgggcagcttcacatgcgagtgtcaacgggggttcagtcttgatcagacggggtccagctgtgaggacgttgatgagtgcgagggcaaccacaggtgccagcacggttgtcagaatatcattggcgggtacagatgctcctgcccccagggctacctgcagcattatcagtggaatcaatgcgtcgatgagaatgagtgcctttcagctcatatctgcggcggggccagctgccataataccctgggctcctacaagtgcatgtgtcctgccggcttccaatatgagcagttcagcggaggttgtcaggacattaacgaatgtgggagcgcccaggcaccctgttcctacggttgctccaacacagagggcggctacctctgtggatgtcctcccggctactttcgcattggtcaggggcactgtgtttcggggatggggatggggagaggtaacccggagcccccagtctcaggggagatggacgacaattccttgtcccctgaagcatgctatgaatgtaaaataaacgggtaccccaagcggggccggaaacgcaggtcaaccaatgaaaccgacgccagtaacatcgaagaccagagcgaaaccgaggccaacgtaagtctggccagctgggacgtggagaagaccgctatttttgcttttaatatttcccacgtttctaacaaagtgagaatcctggagctgctgccggcgttgactacattgactaatcataatcggtatctgatcgagtcaggcaacgaggacggtttttttaaaatcaaccagaaggaggggatcagttacctacactttaccaaaaagaagccagtggccgggacttattcactgcaaatctcaagcacccctctctataagaagaaggaactgaaccaactggaggacaagtatgacaaagactatttaagtggcgaactaggtgacaatctgaagatgaagatccaggtgttgctgcactag

SEQ ID NO: 116999 - DNA, 2958 bp, synthetic construct
  misc_feature 1..2958: note = Description of Artificial Sequence: Synthetic coding sequence
  source 1..2958: mol_type = other DNA
atgggtttcgtcccttctgctgatggaaaggcctgcgaggacatagacgagtgctccctacctaacatttgcgttttcggcacctgccacaacctccccggactgtttcgatgcgaatgcgaaatagggtacgaactcgaccgatctggcggaaattgcactgatgttaatgagtgcctcgacccaacaacctgcatttccggtaactgtgtgaacactccaggtagctacatttgtgattgccctcccgattttgagctgaatcctactcgcgtgggatgcgttgacacgcgcagcggcaattgctacctggatatcagacctagaggagataatggtgatacagcctgcagtaatgagatcggagtgggtgttagtaaggcttcgtgttgttgctctctcggcaaggcctggggcaccccgtgcgagatgtgccctgccgtgaatacatcagaatataagatactctgcccagggggggagggattccgccccaatccaatcacagtcattttagaggacatcgacgagtgccaggaacttcctggcctgtgccagggagggaagtgtataaacacattcgggagctttcaatgccggtgcccgacgggttactatttgaacgaggacactcgggtgtgtgacgatgtaaatgagtgcgagacgcccggaatctgtgggcccggaacatgctacaacaccgtcggcaactacacctgcatttgtcccccagactacatgcaggtgaatggcggcaacaattgcatggacatgaggcgctccctgtgctatagaaattactacgccgataaccaaacctgtgatggcgaactgctgtttaacatgactaagaagatgtgctgctgtagttataacatcggaagagcgtggaacaagccctgtgagcagtgtccgataccttctactgatgagtttgcaacactgtgcggtagccagcgcccgggcttcgtcattgatatttacacagggctgccggtagacatcgatgagtgtagagaaatccccggggtgtgcgaaaatggtgtgtgcataaatatggtgggaagctttcgttgcgagtgtcccgtcggatttttttataacgacaagctgctcgtgtgcgaggacatcgatgagtgtcagaatggacctgtgtgtcagaggaacgctgaatgtatcaacactgcaggaagctaccggtgtgattgcaagcctggctaccgattcacatccaccggccagtgtaatgatcgaaacgaatgccaggaaattcccaacatctgcagtcacggccagtgcatcgataccgtggggtctttttactgtctgtgccacaccgggttcaagacgaacgacgatcagactatgtgtttggacataaatgagtgtgaacgagacgcatgcggtaacgggacttgtcgcaacactatcggttcctttaactgtaggtgcaaccacggcttcattcttagccacaacaatgattgtatcgatgtagacgagtgtgcatcaggaaacggcaatctttgtagaaacggccaatgcattaacacagtaggatccttccagtgccagtgtaatgaaggttatgaggtggctccggacggcagaacttgtgtcgacattaacgagtgcctattggaacctcgcaagtgcgcacccggcacttgccagaaccttgatggctcatatcggtgcatttgcccacctggatactccctgcagaacgaaaaatgtgaagatattgatgagtgcgttgaggagcccgaaatttgcgcattggggacatgctcaaataccgagggctcttttaaatgtctttgtccagaaggtttcagccttagcagctcaggcagaaggtgccaggaccttcgaatgagttattgctatgcgaagttcgagggagggaagtgcagctctcctaaatccagaaatcactcgaagcaggaatgctgctgtgcactgaagggcgaggggtggggtgatccttgcgagctgtgcccaaccgagcccgacgaagcctttaggcagatctgtccctatggctctggcatcatcgttggcccagacgattccgcagtggacatggacgaatgcaaagagcctgacgtctgtaagcacggccagtgtatcaatacagacggaagttaccgatgtgagtgtcccttcggctatattttggccgggaatgaatgtgtcgacacagacgaatgcagtgtagggaacccttgtggaaacggtacatgcaagaatgtgatcggaggcttcgaatgcacctgtgaagagggcttcgaacctggcccaatgatgacctgtgaggacataaacgaatgtgcacagaaccctctcctttgcgcatttaggtgcgtgaatacatatgggtcatatgaatgtaaatgtcccgtgggctacgtgctgcgggaggaccggcgtatgtgtaaggacgaggatgaatgcgaggaagggaagcacgactgtactgagaaacaaatggagtgtaagaacttaatcggcacttatatgtgcatctgcggcccaggttaccagcgccgcccagacggcgagggctgcgtcgatgagaacgaatgccagaccaaaccaggaatatgcgaaaacggtcgatgcctgaacaccaggggcagttacacatgtgaatgcaacgatggttttacagcaagtccgaaccaggatgaatgcttggatgtgatactctcgcttttgctcctgtcccccgcttttccctcctgcttcttcagtccaaggacgatagggaagggaaccgctagccagcgctgttataaaacctgcgtgaggagcgccccagcaaccgggaccccctcccccaacaggaacgctgcagtaaccgagggagaagccggagtgccgaccgtgcgttctgccttatctcgaggtctctggctctctcggaatagtgtgccaatggcagaagactcttag

SEQ ID NO: 117000 - DNA, 3450 bp, synthetic construct
  misc_feature 1..3450: note = Description of Artificial Sequence: Synthetic coding sequence
  source 1..3450: mol_type = other DNA
atgaggagaggccggttgctggaaatagccctgggcttcactgttctgctcgcatcttatacatcccacggtgccgatgcaaatcttgaagcagggaacgtcaaggaaacccgtgcgagccgggccaagcgacggggtggtgggggccacgatgccttgaagggacccaacgtgtgcggctcccggtataatgcatactgttgccctggttggaaaacactgcctgggggcaaccagtgtattgttccgatctgtcggcattcttgtggcgacgggttctgttcaaggccgaacatgtgcacttgccccagtggtcagatcgctccatcctgtggatccagatccatccagcattgtaatatcaggtgcatgaatggaggttcctgcagcgatgatcactgcctttgccagaagggatacatcgggactcattgcggccagcctgtctgtgagagtggctgtctgaacggaggaagatgcgtggctccgaatcgatgcgcctgcacatatggattcactgggccccagtgcgaaagagattacaggactggaccctgctttacggtgatttccaaccagatgtgccagggacagctgtcgggcatagtatgtaccaaaacattatgctgcacatacattaatgaatgcgaaataggagctcacaattgtggcaaacatgctgtatgcaccaacaccgctggctcttttaaatgttcgtgttctcctggatggatcggcgatggaatcaaatgcactgacctagacgaatgttcaaacggcacccacatgtgttctcagcatgcagactgcaagaatacaatgggctcttacagatgcctgtgcaaagaaggatacactggggacggtttcacatgtaccgacttggatgaatgctctgaaaatctgaacctgtgcggcaatggacaatgcctgaatgctcctggcggttacagatgcgaatgtgatatgggctttgtcccttcagccgatggtaaggcctgtgaggacatcgacgagtgctccctgccgaatatctgcgtgttcgggacctgccacaatttacctggcctattccgttgcgagtgtgaaattggatatgagctagatcgttctggaggaaattgtactgacgtgaacgagtgtctggaccccactacctgcataagtgggaattgcgtgaacacaccaggatcatacatttgtgactgcccccctgattttgaacttaaccctactcgcgtcggatgtgtggatacccggtccggcaattgttatctcgacatacgccctagaggcgacaacggtgataccgcctgctctaacgagattggcgtgggagtgtcaaaggcctcctgctgctgttctcttggtaaagcttggggcaccccctgtgagatgtgcccggcagttaacacgtctgaatacaaaattctctgtccggggggggagggttttcgccctaaccctattacggttatcctggaggacatcgatgaatgtcaagaattgcctggactatgtcaaggcggcaaatgtatcaacacctttggctccttccagtgccggtgtcccacaggctattacctgaacgaggacacccgcgtgtgcgacgatgtgaacgagtgcgagacccctgggatttgtggtccaggaacgtgctataatacggtggggaactacacctgtatatgtccacctgattacatgcaggtgaatggaggcaataactgtatggacatgcggcggagcttatgttatcgcaattactatgcggacaaccaaacatgtgacggtgagctgctgtttaacatgaccaagaagatgtgttgctgctcctataacatcggccgcgcatggaacaaaccatgcgagcaatgtccaattccgtccaccgacgaattcgccactttgtgtgggtcccaacggccaggctttgtaatcgacatctacactggcctccccgtggatatcgatgaatgtcgggagatcccaggtgtatgtgagaacggcgtgtgcattaatatggtggggagcttccgctgtgaatgcccagtgggcttcttctacaatgataagcttctcgtgtgtgaagatattgacgagtgtcagaatggtcccgtttgccagagaaacgccgagtgtattaatactgcgggcagctaccggtgcgattgcaagccagggtacagatttaccagcactgggcagtgtaacgacaggaacgagtgccaggaaatccctaacatttgcagtcatggccagtgcatcgataccgtcggatcattttactgtctctgccacactggattcaagaccaatgacgaccaaaccatgtgccttgacattaatgagtgtgaacgtgatgcttgcggtaatggaacttgcagaaacacgatagggagctttaactgcagatgcaaccacgggttcatcttgagccacaacaacgactgcatcgacgttgatgaatgcgcttcaggtaatggcaacctgtgccggaatgggcagtgcattaataccgtgggctccttccaatgtcagtgcaacgaaggctatgaggtcgcacccgacggaagaacatgtgtggacattaacgaatgcctgctggagcctcgtaagtgcgcccccgggacttgtcaaaatctggacggctcatatcgctgtatttgcccaccagggtattcactgcagaatgaaaagtgtgaggacattgacgagtgtgttgaagagcctgaaatatgtgcattgggcacctgctccaatactgaaggatccttcaaatgtctatgcccagaaggtttctccctttctagctcagggaggcggtgccaggatctcaggatgtcttattgttacgcaaagttcgaagggggcaagtgctctagccctaagtctagaaatcattcaaagcaggagtgttgctgcgcgctcaaaggagagggctggggggacccctgcgagctctgccccacagaacccgatgaagccttccgacaaatttgcccttacgggagcggtatcattgtgggtcctgacgactccgcggtcgacatggacgaatgcaaggaacctgatgtgtgtaagcacggccagtgtattaacacagacggatcatacagatgcgaatgtccgtttgggtacatactcgcggggaatgagtgtgtggataccgacgagtgttctgtcggaaacccgtgtgggaatggcacgtgtaagaatgtgattggaggcttcgagtgtacctgcgaggaggggtttgaacctggaccaatgatgacctgcgaagacatcaatgagtgcgctcagaaccccttgctatgtgcgttcaggtgtgtcaacacttatgggtcttatgagtgtaaatgcccagtgggctatgtgctgcgtgaagatcggcgcatgtgtaaggatgaagacgaatgcgaagagggcaagcatgactgtacctag

SEQ ID NO: 117001 - DNA, 8739 bp, synthetic construct
  misc_feature 1..8739: note = Description of Artificial Sequence: Synthetic coding sequence
  source 1..8739: mol_type = other DNA
atgggacgacgtaggcgtctctgcctgcagctttattttctctggttgggctgcgtcgtcctctgggcacagggtacagccgggcagccccaacctccccccccaaagcccccacgccctcagccccctcctcaacaggttagaagcgcaacagccggatccgaagggggctttctggcacctgagtaccgagaggaaggagctgccgtggcatcaagggtgcggcggcgcggacagcaggacgtgttacgaggaccgaacgtgtgtggctctcggttccacagttactgttgtcctggttggaagaccctcccaggcggcaaccagtgcatcgtccctatctgtagaaactcctgcggggatgggttttgcagccgtcctaacatgtgtacctgtagctccggacagattagctctacgtgcggctcaaagtctatccagcagtgtagcgtccggtgcatgaacggtggcacctgtgccgatgatcattgtcagtgccagaaaggctacatcggcacatattgcgggcagcccgtttgtgagaatggctgccaaaatggaggaaggtgtatcggaccgaaccgctgtgcctgcgtgtacggctttactgggcctcaatgtgaacgtgattaccgcacaggaccctgctttacccaggtgaataatcagatgtgccagggacaactcaccggcatcgtgtgcactaagaccctgtgttgcgcgacaatcggccgcgcttggggccatccatgtgaaatgtgccccgcacagcctcaaccctgccgtcgaggcttcattccaaatatacggacaggtgcctgccaggacgtggacgaatgtcaggctatacctgggatatgccagggtggcaactgtataaacaccgtgggctctttcgagtgccggtgcccggctgggcacaagcagtcggagacaactcaaaagtgtgaggacatcgacgagtgctccatcatcccgggcatttgtgagactggagaatgcagcaacactgtgggttcatatttctgcgtttgccctagagggtacgtcacctctaccgacggcagccgttgtatcgaccagcggactggaatgtgtttctccggtttagtaaatggcaggtgcgcgcaggaactaccaggaagaatgactaaaatgcagtgttgctgcgagccaggacggtgctggggcattggaactatacccgaggcctgtcctgtccgaggttctgaagaatatcgtcgcctctgtatggatggacttccaatgggtggaatccccgggagcgccggaagccgccctgggggaacagggggtaatgggtttgcaccttctgggaatgggaacggatacggccccggcggaacagggttcatacctattcccggcggaaacggtttttccccgggcgtgggaggagcaggagtgggtgcaggcggacagggtcccattatcacgggcttgacaatactgaatcagacgatagacatttgtaaacatcacgcgaacctctgtttaaacggcagatgtattcctacagtgagctcgtaccgttgtgagtgtaacatgggatataagcaggatgcgaacggtgactgtattgacgtggacgaatgcacgagcaacccttgcaccaatggcgattgtgtgaatacacctgggagctactactgcaagtgtcatgccggcttccagagaacccccacaaagcaggcttgtatcgacatagatgagtgcatacagaacggcgttctgtgtaaaaatgggcgatgtgtgaatactgacggaagcttccagtgcatctgtaatgccgggtttgagcttactactgacggcaagaattgcgtcgaccatgacgagtgcacaacgacaaacatgtgtctgaacggtatgtgcattaatgaagatggcagctttaagtgcatctgcaagccaggcttcgtgctggccccgaacgggcggtactgtactgacgtggacgaatgccagacaccagggatctgcatgaacgggcactgtattaactccgaggggagtttccggtgcgactgtccccccgggctggctgtgggtatggacggaagagtgtgcgtcgatacccacatgcggtctacgtgctatggcggcattaagaagggcgtttgtgtccgcccgtttcctggagctgtgaccaaatccgagtgctgctgtgcaaatccagactacgggtttggggaaccatgccagccctgtcccgcaaaaaatagcgccgaattccacgggctgtgctcctccggtgtgggcataaccgtggacgggagagatattaatgagtgtgcgctagatcccgacatctgcgcaaacggaatttgtgagaacctccggggaagctaccgttgcaattgcaacagcggctatgagccagacgcgtccggtcggaactgtatcgacattgacgaatgtcttgttaaccgcctcctgtgtgataatggcctgtgccgaaatactcccggatcctacagttgcacatgcccgcccgggtatgtgttcagaacggagaccgaaacctgtgaagacattaacgaatgtgagtcgaatccctgcgtgaatggcgcatgccgcaataacctgggtagcttcaactgcgaatgcagtcccggctctaaactatccagtactgggctaatctgtattgactcattgaagggaacctgctggttgaacatccaagatagccggtgcgaagtaaatataaacggggctactttgaaaagcgagtgttgtgcaactttgggtgcagcctggggttccccttgtgaacgttgtgagctcgacacggcttgtccgcgggggctggcccgaataaagggcgtgacctgtgaagatgtgaatgaatgcgaagtctttcccggcgtgtgcccaaacggccgctgcgtcaacagtaagggaagctttcactgcgagtgccccgagggtctaacacttgacggcacgggccgggtatgtctagacatcaggatggaacagtgctatctgaagtgggacgaggacgaatgcatccatcctgtgcccggaaagtttaggatggatgcttgttgctgtgctgtgggcgccgcttggggcacagagtgcgaggagtgcccaaaaccaggcaccaaggagtacgagacgttatgtcctaggggtgcaggatttgctaaccggggtgatgtacttactgggcgtcctttctataaggacattaatgagtgcaaggcgtttccagggatgtgtacttatggcaagtgtcgcaacactatcggtagcttcaaatgcagatgcaatagtggtttcgctctggatatggaggagcggaattgtacagatattgatgagtgtaggatctcccctgatttgtgcggtagcggaatctgcgtgaatacccctggctctttcgagtgcgaatgcttcgaggggtatgagagcgggttcatgatgatgaagaactgtatggatattgacgaatgtgagagaaacccacttctgtgccgaggtgggacctgtgtaaataccgaagggtcctttcagtgcgactgccctctggggcatgaactcagtcctagtcgcgaagactgcgtagacattaatgagtgtagcctcagcgacaacttgtgtaggaacggcaagtgcgtgaacatgattgggacgtatcagtgtagctgtaatcccggttaccaagccactcctgaccgccagggttgcactgacatagacgaatgcatgatcatgaacggaggatgcgacactcaatgcacaaatagcgagggatcctatgagtgttcatgcagtgaggggtatgccctgatgcctgacggtaggtcctgtgccgacattgatgagtgcgagaataatcctgacatctgcgatggcggccagtgcaccaatattcctggcgagtacaggtgtctgtgttacgatggctttatggctagtatggatatgaaaacttgcatcgacgtgaacgaatgcgatctgaattccaatatttgtatgttcggagagtgtgagaacacaaagggaagcttcatctgtcattgtcagctgggttactcagtgaagaaaggcaccaccggctgcactgatgttgatgagtgtgagatcggagcccacaactgtgatatgcacgccagttgcctcaacataccgggctcgtttaagtgctcttgcagagagggatggattggcaacggtatcaaatgtatcgatttggacgagtgtagcaatggaacacatcaatgctctataaacgcccagtgtgtgaacactcctggctcttaccggtgtgcctgttccgagggcttcactggagatggcttcacttgtagcgacgttgatgagtgcgctgagaacataaatttatgtgagaacgggcagtgccttaatgtccccggggcttataggtgcgagtgcgagatggggttcacgcccgcgagcgactccagatcttgccaagacattgatgagtgctcgtttcaaaacatctgtgtgttcggcacttgcaacaatcttcccggtatgtttcactgtatctgtgatgacggatatgagttagataggactggagggaattgcaccgacatcgacgaatgcgctgacccaatcaactgcgtgaacggcctgtgcgtgaacactcccgggaggtacgagtgtaactgtccacctgacttccagctgaatcccactggcgtgggttgtgtcgacaaccgcgttgggaactgctacctgaagttcggcccgaggggagatggatcactctcttgtaacacggaaattggggttggggtatctcggagctcgtgctgttgcagcctgggaaaggcatgggggaatccctgcgagacatgcccaccagttaatagcaccgagtattatacattgtgcccaggtggagagggcttccggccaaatccgatcaccatcatcttagaagacatagatgagtgccaagaactgccagggttgtgtcagggaggtaattgtatcaacaccttcggtagtttccagtgtgagtgcccgcagggatattaccttagtgaagacacgcggatttgtgaggatatcgatgagtgcttcgctcatcccggagtttgcgggccaggcacctgttacaatacactcggcaattacacctgcatctgcccccctgaatacatgcaggttaacggggggcacaactgcatggacatgagaaagagtttctgttaccggtcctacaacgggacgacttgcgaaaacgagcttccattcaatgtgaccaagcgtatgtgctgctgtacctacaatgttggaaaggcttggaacaagccttgcgaaccttgtcccactcctgggactgctgactttaagacgatttgcgggaatatcccgggattcacctttgatatccatactgggaaggccgtggatatcgatgaatgtaaagaaattcctggaatctgcgcaaatggtgtttgtatcaaccagattggtagctttcgatgcgagtgccccactggattttcttataatgatttactcctggtttgtgaggacatcgatgagtgctctaatggagataatctctgccagcggaatgcagactgcatcaattccccaggttcgtacagatgtgagtgtgctgccggctttaaactgtctcccaacggagcctgtgtggacaggaacgagtgcctggagattcccaatgtctgttcccatggcttatgcgtcgatctgcaaggttcataccagtgtatctgccataacgggtttaaagcaagccaagatcagacaatgtgcatggatgttgacgagtgcgagcggcacccctgcgggaatggcacatgtaagaacactgttgggagctataactgcttatgctaccccggctttgagcttactcacaataatgattgtctggatatcgacgaatgctcctcattcttcggccaagtgtgtcggaatggccgctgctttaatgaaattggaagctttaagtgcctgtgtaatgagggatatgagctcacccccgatggaaagaattgtattgataccaacgagtgcgtggcactaccaggctcctgctcaccaggaacttgtcagaatcttgaggggtcattccggtgtatctgcccccccggatatgaggtgaagtctgaaaactgtatagacatcaacgaatgtgacgaagatcccaatatctgtttattcggctcctgcacaaacacacctggtggatttcaatgcctctgcccacccggctttgtgctctccgacaacgggcgcagatgttttgatacccgccagagcttctgtttcaccaacttcgaaaatggcaaatgttcagttcctaaggccttcaacactactaaggcaaagtgctgttgctcgaaaatgcccggcgaaggatggggtgatccctgtgaactgtgtccaaaggatgacgaggtagctttccaggatctctgcccatacggccacggcacagtcccatccttgcatgacacgcgggaggatgtcaatgaatgccttgagtcccccggaatctgctccaacgggcaatgtatcaataccgatggctccttcagatgcgaatgccctatgggatataaccttgattacaccggcgtgaggtgcgtagatactgacgagtgtagtattggcaacccatgtggtaatggtacctgcaccaacgttatcgggtctttcgagtgtaattgtaacgagggatttgagcctggaccgatgatgaactgcgaagacatcaacgagtgcgctcagaacccattgttgtgcgcattccgctgcatgaatacattcggaagctatgagtgcacttgcccgattggttatgccctccgagaggaccagaagatgtgtaaggacctggacgagtgtgcggagggcttgcatgattgcgaatcccggggaatgatgtgtaagaatctgattggtacattcatgtgtatctgccccccaggcatggcgcgacgacccgacggagagggctgcgtagatgagaatgaatgtcgaaccaagccaggtatttgtgaaaatggcagatgcgttaatatcatcggctcgtatagatgcgaatgtaacgaaggcttccaatcctcatcaagcgggactgagtgcctggacaatcgtcagggtttgtgtttcgctgaagtgctccagactatttgtcagatggcgagcagcagccggaacctggtcacaaagagtgaatgctgttgtgatgggggtcgtggatggggacaccaatgcgaactttgccccctcccgggtaccgcacagtacaagaaaatatgccctcatgggcctgggtacaccacagacgggagagatatcgacgagtgcaaggtcatgcccaatctgtgcacaaatggtcagtgtatcaacaccatgggaagcttccgctgcttctgtaaagtcgggtatactaccgatatttcaggaacatcatgtattgatttggatgagtgctcccaatctcctaaaccgtgcaactatatctgtaaaaacacagagggatcttatcagtgttcttgtcctcgcggctacgtgttgcaggaggatggaaagacttgtaaggacctggatgaatgccaaactaagcagcacaattgccagttcctgtgtgtgaataccttaggggggttcacgtgcaaatgccctccaggattcacacagcaccacaccgcatgcattgataacaacgagtgcggatcccaaccatcgctttgcggggccaagggaatctgccagaatacgcccggcagcttctcatgtgagtgtcagagaggcttttcgctggatgccactggcctcaactgcgaggacgtggatgaatgtgatgggaatcataggtgccaacacggctgtcagaatatccttggaggctaccgatgcggttgccctcagggatatatccagcactaccagtggaatcagtgtgtggacgaaaatgagtgtagtaacccaaatgcctgcggctctgcatcctgctataatacactgggttcttacaagtgcgcttgtccctcgggctttagcttcgatcagttttcttccgcctgccacgatgttaacgagtgcagctcctccaaaaacccctgcaattacggatgtagtaacacagagggagggtacttgtgcggctgtcctcccggttattatagggtagggcaaggccactgtgtctccggtatgggtttcaataaagggcaatatcttagcctcgatacagaagtagatgaggagaatgctctgtctccagaggcttgctatgaatgtaaaatcaacggttactccaagaaggattctcgacaaaaaagaagcattcacgaacctgatcccactgctgtcgaacagattagtctggaatccgtggacatggacagccctgtgaacatgaagttcaacctttctcaccttggttcaaaggagcatatactcgagctccgtcctgccattcagcctctaaataatcacattaggtatgttatttcccaagggaatgatgacagtgtgttccgcatccatcagcggaacggtctttcttacctgcacacagctaaaaaaaagctgatgcctgggacctacaccctcgagatcacctctatcccactgtacaaaaaaaaggagctaaaaaaattagaagagagcaatgaagatgattatcttcttggcgagctgggagaagcacttcggatgcggctacagatccagctgtattag

SEQ ID NO: 117002 - DNA, 8739 bp, synthetic construct
  misc_feature 1..8739: note = Description of Artificial Sequence: Synthetic coding sequence
  source 1..8739: mol_type = other DNA
atgggacggagaaggcgcctgtgtttgcaactgtactttctatggctgggctgtgtggtgctatgggctcagggaactgctggacagccacagcccccgcccccgaaaccgccacgaccccagcccccaccccagcaggtacggagtgctaccgcgggcagcgaaggtggctttttagcccctgaataccgggaggagggggccgccgtggcctcaagggtgcgcaggcggggtcagcaggacgtcctgcgaggccccaatgtgtgtggaagcagattccacagctattgctgtcctggatggaaaaccctgcctgggggaaaccagtgtatagtccctatttgcagaaactcttgtggggacggcttctgttctagaccaaatatgtgtacgtgctcaagtggccaaatatctagcacatgcgggtctaaaagtatccagcaatgttctgttcgatgtatgaacggagggacttgtgcagacgatcattgccaatgccagaagggctacattggaacttactgtggccagccggtctgtgagaacggctgtcagaacgggggccgctgcatcggcccaaataggtgcgcatgcgtgtacggattcaccggcccccagtgcgagcgggactatcggaccggcccctgttttacccaggtaaacaaccaaatgtgtcagggccagctgaccgggatagtttgcaccaagacactgtgttgcgcaactatcggccgcgcttgggggcatccctgcgaaatgtgtccggctcaaccccagccctgtcgcagagggttcattccaaatatccgaaccggggcctgccaagacgttgatgagtgtcaggccatccccggaatttgccagggcggaaactgtattaatacggttggaagcttcgagtgcagatgtccagccgggcataagcaaagcgaaacaacacagaaatgtgaggatatcgatgagtgtagtatcattcctggcatctgtgaaactggagaatgttctaataccgtcggcagctatttctgtgtatgccctcggggctacgtaaccagcactgacgggtcacgctgcattgatcagcggactggaatgtgtttcagtggcctcgtgaatggccggtgcgcgcaggaattgccaggccggatgaccaagatgcagtgttgctgcgagccaggccggtgctggggcatcgggaccatccccgaagcatgtccggtgaggggcagtgaggaatacagacgtctgtgcatggatggcctcccaatggggggaatccccggtagtgcaggcagtcggcccggaggcaccggcgggaacgggtttgccccttcagggaatggaaacggatatggacccggagggaccggttttattccaattccaggaggaaacggatttagcccgggcgttggtggggctggtgtgggcgctggcggccagggcccaataattacagggctgactattcttaaccagacaattgacatttgtaaacaccacgcaaacttatgtttgaatggccgttgcatacctactgtgtcgagttacaggtgtgagtgcaacatgggatataaacaggatgccaatggagactgtattgacgtggatgagtgtacatcaaacccttgcacgaatggggactgcgtgaatacacctgggagctattattgcaaatgtcatgcggggttccaaagaacaccgaccaagcaagcatgcattgacatcgatgaatgtatccagaatggcgttctctgcaagaacggacgctgcgtgaacaccgacggctcttttcagtgcatttgcaatgccggctttgagcttactactgatggcaagaactgtgttgaccatgatgagtgtactactacgaatatgtgcctgaatgggatgtgcattaatgaggatggcagcttcaagtgtatctgtaagcccggatttgtcctcgccccaaatggtaggtactgtactgatgtcgacgaatgtcagaccccaggaatctgtatgaatggacattgtatcaattcggaaggctcatttcgctgtgattgtcctcccgggctagccgtggggatggatggacgcgtttgtgtggacacgcacatgaggtctacctgttacggcggcatcaagaagggggtctgcgtgcgccccttcccaggagccgtgacgaagagtgagtgctgttgcgctaatccagactatggctttggggaaccatgccagccatgcccagctaaaaactccgccgaattccacggcttatgttccagtggagtcggcattaccgtagacgggcgggatatcaacgaatgcgccctcgaccccgacatctgcgccaacggtatctgtgaaaacctaagagggagctaccgttgtaactgcaactccggttatgagccagatgcatctgggcgaaactgtatagatatcgatgagtgccttgtgaatcggctgctctgcgataatggactgtgccgtaatactcccgggagctattcttgtacatgtcctcccggatacgtcttccgaacagagacagaaacctgtgaagatatcaacgagtgcgaaagcaatccctgcgttaatggcgcctgccgcaataatctcggcagtttcaattgtgagtgctccccaggtagcaagctgtcctccacgggattgatatgcattgactcccttaaggggacctgctggctgaatatccaagacagtaggtgtgaagttaatatcaatggtgccaccctgaagtccgagtgctgtgccaccttaggcgcggcatgggggtctccttgcgagaggtgtgagcttgacaccgcctgcccccgtggcctggctcggatcaagggcgtgacctgcgaagatgtgaacgaatgtgaagtgtttccgggcgtttgtcctaacggacgctgtgtaaattctaagggctcctttcactgtgagtgcccagagggtctgactctggacggcactggcagagtgtgtctcgacatacgaatggagcagtgttatttgaagtgggacgaagacgaatgtatacaccccgtgccgggcaaatttaggatggacgcttgttgttgcgccgtaggagccgcctgggggaccgagtgtgaggagtgtcccaagcccggcacaaaagaatatgaaaccttgtgccccagaggagccggttttgcaaaccgaggggatgtcctcaccgggcgccctttctacaaggacattaacgaatgcaaagcatttcctgggatgtgtacctatgggaagtgccgcaacactattgggtcctttaagtgccggtgtaacagcggattcgcactggacatggaagagagaaattgcactgacatcgacgaatgtagaattagtccggatttgtgtggaagcgggatttgcgtcaatacgcccggcagcttcgagtgtgaatgttttgagggctacgaatcgggttttatgatgatgaagaattgcatggatatcgacgaatgtgagcggaatcccctgctgtgtcggggaggaacatgcgtaaacactgagggttccttccagtgcgactgtccactcggtcacgagctgagtccatctcgtgaagattgcgtcgatatcaacgagtgctccctttctgataacctttgtcgcaacggaaagtgcgttaacatgattgggacctaccagtgctcttgtaaccccggatatcaggccacccccgataggcaagggtgcaccgacatcgatgagtgcatgatcatgaacggtggatgcgacacccagtgcaccaactctgaggggtcctatgagtgcagctgcagcgagggctatgccttgatgcctgatggccgcagctgcgccgacatcgacgaatgtgagaacaaccccgatatttgcgacgggggtcagtgcacgaacattccaggcgaatacagatgcctttgttatgatggctttatggctagtatggacatgaaaacctgcatagacgtcaacgaatgtgatctgaacagtaacatctgcatgtttggtgagtgtgaaaatactaaggggagttttatctgccactgccagctcggatattccgtcaaaaaggggacaacagggtgcaccgatgttgatgagtgcgagatcggtgcccacaattgcgacatgcacgcctcgtgcttgaacatccccggttcgttcaagtgcagttgtagagaaggctggattggaaacggcattaagtgtattgatctggatgaatgcagtaacggcacacaccagtgtagtatcaatgcacaatgtgtgaacacacctgggtcatatcgttgcgcctgcagtgagggatttaccggcgacggattcacctgttctgacgtcgacgaatgcgccgaaaacattaacctatgcgagaatgggcagtgcctgaacgtcccaggcgcctaccggtgtgaatgcgagatgggatttaccccagcttcagactctcggagttgccaggacatcgatgagtgctctttccagaacatttgtgtctttggaacttgtaataatctacctggcatgtttcactgcatttgcgatgatggatacgagctggatagaactgggggaaattgcaccgatatcgatgaatgtgccgatccaattaactgcgtcaatggtctgtgtgtcaatacccctggccgctatgagtgtaactgtccccccgacttccagctcaaccctaccggggtcggctgcgtggataaccgtgttggcaattgttacctgaagttcggaccaaggggcgatggcagtttgtcctgtaacactgagatcggtgtgggagtcagtcggagctcctgctgctgctctcttgggaaagcatggggcaatccatgcgagacgtgcccaccagtcaattcaacagagtactacacactgtgccccgggggggagggattcagacccaatcctattacaattatcctggaggatatcgatgagtgtcaggagcttcccggtctgtgccagggaggcaactgtatcaacactttcggcagctttcagtgcgaatgtccacagggctactacctgtcagaagataccagaatttgtgaagatatagacgagtgttttgcccatccgggggtctgtgggccagggacctgttataatacactcggaaattatacatgtatttgtccaccagagtacatgcaggtgaacggcggccacaactgtatggatatgcgcaaaagtttttgttacagaagctataacggtaccacatgtgagaacgaactcccattcaacgtgaccaagcgcatgtgttgttgtacatataacgtgggcaaggcttggaataaaccttgcgaaccctgccccacacctggcaccgctgattttaagaccatttgtggaaacattcccggctttacattcgatatacatacagggaaagccgtcgatattgacgagtgcaaagagatcccagggatttgtgccaacggtgtgtgcatcaaccagatagggagttttagatgcgaatgcccaaccggcttctcctataatgatctgctcctggtgtgtgaagatatcgatgaatgctcaaacggtgataatttgtgccaacgaaacgcggactgcattaatagccctgggagctacagatgcgagtgcgcagcgggtttcaagctgagccccaatggcgcgtgcgtcgaccgtaacgagtgtcttgaaatcccaaacgtgtgttcgcacggtctttgtgtggatttgcagggatcataccagtgcatatgccacaacggctttaaggccagccaggatcagaccatgtgtatggacgtggatgagtgtgagcggcatccatgtggaaacggcacatgtaaaaataccgtcggctcttataactgcctttgttatcctggcttcgaactaacccataataacgactgcctggacatcgacgagtgttcctctttcttcgggcaagtctgcaggaacggtcggtgctttaacgagattggctccttcaagtgcttatgtaatgaaggctatgagctgaccccagatgggaagaactgcatagacaccaacgaatgcgtggcacttcccggaagctgttcacctgggacttgccagaacctggaaggctcattccgatgtatatgtcctcctggttacgaagtgaagagtgagaattgcattgatataaatgagtgcgacgaagatcctaacatctgtctgttcggctcttgtacgaacacgcctggaggttttcagtgtctgtgccctcctggatttgtactctccgataacggccgtcgctgtttcgacacacggcagtcattttgctttaccaatttcgaaaatggaaaatgctcggtgcctaaggcattcaacacaaccaaagccaagtgttgctgtagcaaaatgcccggcgaggggtggggcgacccctgtgagctgtgtccaaaggatgatgaggtggcctttcaggatctgtgtccttacgggcacggaactgtgccttctctccacgacactagagaagatgtcaatgagtgcttagagagtcctggtatttgttctaacggacaatgcattaacactgacggcagctttcgctgcgagtgccccatggggtataatcttgattacacaggcgtgaggtgcgtcgacaccgacgaatgttctatcggaaatccatgtggcaacggcacatgcacaaatgttatcggatcgttcgagtgcaattgtaatgagggctttgagccgggccccatgatgaactgtgaagatataaacgagtgtgctcagaaccccctgctgtgcgcatttagatgcatgaacacgttcggtagttacgaatgtacatgcccgatcggctatgcattgcgcgaggaccagaagatgtgcaaggacctggacgaatgcgctgaaggacttcacgattgcgagtcccgggggatgatgtgcaaaaatctgattggcacgtttatgtgcatttgtcctccgggaatggctcgcagaccggacggcgaaggttgcgtcgacgagaacgagtgtagaaccaaaccaggcatctgcgagaacgggagatgcgtaaatatcattggatcctacagatgtgagtgtaacgagggctttcaaagctccagcagcggcacggagtgtttagacaaccggcaaggcttatgttttgctgaggtccttcagacaatctgccaaatggccagctcgagccgcaatcttgtcaccaaatccgagtgctgttgtgacggggggcgtggctggggccaccagtgcgagctgtgcccacttccaggcactgcccaatataagaagatctgccctcacgggccggggtacactaccgacgggagggatatcgacgagtgtaaagtgatgcccaacttgtgtaccaatggtcagtgcatcaacacaatgggctccttcaggtgcttctgcaaggttggttatacaaccgacatctctggcacgtcttgtatagatcttgacgagtgttcccagagccccaagccctgcaattacatctgtaaaaacaccgaagggtcctatcagtgttcttgtccgcgaggatatgtgctgcaagaagacggcaagacatgtaaggacctggacgagtgccagaccaagcagcataactgccagttcctgtgtgtaaacacactaggagggttcacctgcaagtgtccccccggcttcacccagcatcatacagcgtgcatcgacaacaatgaatgtgggtcgcagccatcattgtgtggagccaaagggatatgccagaacacgccagggagcttctcctgtgaatgtcagagggggtttagtctggatgcaactggtttgaattgcgaagacgtcgatgagtgcgatgggaatcacaggtgtcagcatggctgccagaacatcctgggaggctatagatgtggctgtccccagggctacatccagcattatcagtggaatcaatgcgttgacgagaacgagtgcagtaaccccaatgcgtgcggttctgcttcctgttacaataccctcggatcctacaagtgcgcttgcccgtcaggattttcattcgaccaattcagttcagcttgtcatgatgtgaatgagtgtagttcctctaagaacccctgcaactacggatgctctaacacggagggaggttatttgtgcggctgtccacctgggtattatagggtggggcaagggcattgtgtgtccggaatggggtttaataaggggcagtatttgagtctggataccgaggttgatgaagagaacgccctgtctcctgaggcctgttatgagtgcaaaatcaacggatactccaagaaggactcgcgccagaagaggtcaattcacgagccagatcccacagccgtcgagcaaattagtctggaaagtgtggacatggactccccggtgaatatgaagtttaatctctctcatttaggatctaaagagcacattttggagttgagaccagcgatccagcctctgaataatcacatccgatacgtgatatcccaaggcaatgacgatagcgtgtttcgcatacaccagagaaatggcctctcgtatctgcatacggcgaagaagaaactgatgccagggacatacacgctcgagataaccagcatccccctttataagaaaaaggagcttaaaaaactcgaggaaagcaatgaagacgactatcttttgggagaattaggggaagccctgagaatgcgtctccagatccagctgtattag

SEQ ID NO: 117003 - DNA, 597 bp, synthetic construct
  misc_feature 1..597: note = Description of Artificial Sequence: Synthetic coding sequence
  source 1..597: mol_type = other DNA
atgggactccggaaggggcatggcaccctaggacagggactgtctgccttacagagcgagcagggccgactcattcagttgctgtctgaatctcagggccacatggcacacttggtgaactccgtgtctgatatacttgatgcattgcagagagatcgcggtctggggaggccacggaataaagcagacctccaacgggctccagctaggggcactcggccacgcgggtgcgcaaccggtagccggccacgagactgcttggacgtgctactaagtggacaacaggacgacggcgtctattctgtcttccccacccattatccagctggcttccaggtgtattgcgatatgcggacagacgggggcggctggaccgtatttcagcggagagaagacggaagcgttaatttctttagagggtgggacgcttaccgggatggtttcgggcggctcacaggagaacattggcttggaccactggactggtgcactttgtctttggccctgctggttccagttgccccttcccccactcccccccacagttttgttaatgtgctgcaccctccagttccaggggggcccactctgcagtag

SEQ ID NO: 117004 - DNA, 912 bp, synthetic construct
  misc_feature 1..912: note = Description of Artificial Sequence: Synthetic coding sequence
  source 1..912: mol_type = other DNA
atgggactccggaaagggcacggcacattgggccagggtctaagcgctctccagagcgagcaggggagactaatacaattactatctgagagtcaggggcacatggcccaccttgtgaatagtgtgagcgatatcttggacgcactacaacgcgatagaggcctgggccggccacggaataaagctgatctccagcgggcacccgctcgcggcacacgcccacggggatgcgcaaccgggagccgcccacgtgattgtctagacgttctgctgtccgggcagcaggacgatggtgtgtatagcgtgttccctacccattatccagccggctttcaggtgtactgtgacatgcgcacggacggcggaggatggacggtattccagaggcgcgaggacggcagcgtcaatttttttcgggggtgggacgcttaccgggatgggttcggccggctgacaggtgaacactggcttggacttaagcgaatacatgcactgaccacccaagcagcttacgaactgcacgtggaccttgaggactttgaaaatggaaccgcttacgcccgatacgggtcattcggcgtgggactcttcagtgtggaccctgaggaggacggttatcccctgaccgtagccgattactcaggcacagcaggggactctcttctcaagcattccggcatgaggttcactacgaaggatcgggacagtgaccactcagagaacaactgtgccgccttctacagaggggcttggtggtaccgaaattgtcacacctccaacctgaatggtcagtatttacggggcgcccacgccagttacgctgatggagtggagtggagcagctggactgggtggcaatatagcctcaaatttagtgaaatgaaaattcgcccagtgcgcgaggaccgctag

SEQ ID NO: 117005 - DNA, 1386 bp, synthetic construct
  misc_feature 1..1386: note = Description of Artificial Sequence: Synthetic coding sequence
  source 1..1386: mol_type = other DNA
atggttaatgacagatggaagaccatggggggtgctgcccagctggaggatcggccccgggacaaaccccagaggccgtcttgcggttacgttctttgtactgtgctgctggccctggcagtcttgttagcggttgctgttaccggtgcagtgctgtttctcaaccacgcccacgcccccggcactgcccccccccctgtagtttctaccggggcagcttcggctaacagtgcactcgtcaccgtcgaaagggccgacagttctcacttgtccatcctgatcgacccacgatgtccggatctgaccgactcctttgcaaggttagagtccgctcaggctagtgtgttgcaggccctcactgaacaccaagctcagccccgcctggtcggcgatcaggagcaagagctactggacacactggcggatcagctccctagattgcttgcacgcgcatctgagttgcaaaccgagtgtatgggcctgaggaagggacacggaacgttaggccaaggcctgtccgcgctccagtctgaacaggggcgcctgatccagctgctctccgaaagccagggtcacatggctcatctggtgaactctgtttcagatattcttgacgcattgcagcgggaccggggtcttggacggccacgaaacaaggcagatctgcagcgcgcccccgcccggggaacccggcctcgaggctgcgccaccggcagcaggccccgggattgcctcgacgtattgctatcagggcagcaggacgacggcgtttattccgtgttcccaacccactatcccgcaggatttcaagtgtactgcgacatgaggaccgatgggggaggctggacagttttccagcgccgggaggatggatccgttaacttctttcgggggtgggatgcctatcgcgacggcttcggccggttgaccggcgaacactggctggggctcaaacggattcacgccctgaccacccaggctgcatacgaattgcatgtggacctcgaggattttgaaaacggaacagcttatgcacgctatggcagcttcggcgtgggcctgttttcggtcgatccagaagaggatggttaccctttgacagtggccgattactccggcactgccggggattccctgcttaagcattccggtatgcgtttcactactaaagatcgagattccgaccactctgaaaacaactgtgccgccttctataggggagcctggtggtaccgtaactgccatactagcaacctgaatggccaatacctgcgcggagcccacgcgagttatgctgacggtgtggagtggagttcgtggacaggttggcagtacagccttaagttttctgagatgaagatccgacctgtcagggaggaccgctag

SEQ ID NO: 117006 - DNA, 933 bp, synthetic construct
  misc_feature 1..933: note = Description of Artificial Sequence: Synthetic coding sequence
  source 1..933: mol_type = other DNA
tgaacaggggccgttctctttctgaatcatgctcacgctccaggcacggccccaccccctgtggtctcaacaggggccgcctccgcgaacagtgccctagtgacagtggagagagcggatagttcccatctgtcaattctgattgacccacgctgtccagatctgacggatagtttcgcccggctggagtccgcgcaggcctcggtactgcaggcactaaccgaacatcaggcacagccccggctcgttggtgatcaggaacaggaactcctcgacactctggccgaccagctgcccaggctgttagcacgcgcctccgaactgcagacagaatgcatgggtcttagaaagggtcatggtaccttagggcaggggctttctgcacttcaatcagagcagggacggctcatccaactactatctgagtctcaggggcacatggcgcaccttgtcaactctgtgtccgacattctggacgcgttacaacgggatagggggctgggacgcccgaggaataaagctgacttacagagggcgccggcccggggaacacgaccaagggggtgcgcgactggcagtagaccgcgcgattgcctggacgtcttgctctcaggccagcaagacgacggggtgtacagtgtgttccccacccactaccctgcaggttttcaggtgtactgcgacatgagaacggacggtggaggctggaccgtgttccagagaagagaggacgggagcgttaacttcttccgaggttgggatgcatacagggatggctttgggcgactgaccggggaacactggctcggccccctcgactggtgcactctctccctggcactcctcgtgccagtggctccttcaccgacccctccccactccttcgtgaacgtgcttcatccccctgtgccaggaggccctacgctgcagtag

SEQ ID NO: 117007 - DNA, 1386 bp, synthetic construct
  misc_feature 1..1386: note = Description of Artificial Sequence: Synthetic coding sequence
  source 1..1386: mol_type = other DNA
atggtcaatgacagatggaagacaatgggtggcgcagcacagcttgaagatagacctagagacaaacctcagcgccctagctgtggctacgtgctttgtaccgtgttgttggccctcgctgtgttactggccgtggccgtcaccggtgcagtcctctttttgaatcacgcacacgccccgggaacagcccctccaccggtcgtaagcaccggcgcagcctcagcaaacagtgccctagtgacagtggagcgcgccgattcttctcacctgtccatattgatcgatcccagatgcccagaccttactgattcctttgcgcggttagagtccgcgcaagcgtctgtgttacaggcactgacagaacaccaggcccagccacggctggtgggagaccaagaacaggaattgctcgacacccttgcagaccaattgccgaggctgcttgccagggctagcgagttgcaaaccgaatgcatggggcttcgaaaagggcacggcacattgggtcaaggcctgtcggcactccagagcgaacagggacggctcatccagctgttaagtgagtctcaggggcacatggctcatctcgttaattcagtctcagacatcctggatgccctgcagcgcgacagaggacttggtagaccgcgcaacaaagctgatttacagagagcccctgcgagggggacccggcctcggggatgtgctaccggctcccggcccagggattgtctggacgtcctcctcagtggacaacaagacgacggggtgtattctgtttttccaacccactaccctgcagggttccaggtctattgtgacatgcgaactgacggggggggttggaccgtgtttcagcggagggaggatggatcggtcaacttctttcgcggttgggacgcatatcgagacgggtttggaagattgaccggagaacactggttgggtctgaagcgcatccatgccctgactacgcaggctgcctacgagttgcatgttgacctcgaggactttgagaatgggacagcctacgccagatacggttccttcggggtggggctgttctctgtggatcccgaagaagatggttatccacttaccgtagcagattactccggaacagcaggcgactccctgctaaaacactctgggatgaggttcactaccaaggatcgggattctgaccattccgagaataattgcgcagctttctataggggcgcttggtggtacaggaattgccacacgtcgaacctcaacggccagtacctaagaggagcccacgcctcatacgcagatggagtggagtggtcgtcatggaccggatggcagtacagcctgaaattcagcgaaatgaaaatacgccccgttcgggaggaccgctag

SEQ ID NO: 117008 - DNA, 870 bp, synthetic construct
  misc_feature 1..870: note = Description of Artificial Sequence: Synthetic coding sequence
  source 1..870: mol_type = other DNA
atggttaatgataggtggaagacaatgggtggcgctgctcagctggaggataggcccagagacaagcctcagcggccttcctgtggctatgtgttgtgtaccgttctgctggccctggccgtactactggccgtggcagtgaccggagcagttctgtttctgaatcacgcgcacgcccccggcaccgccccacctccagtggtctcgacgggcgctgcctcagccaatagcgctcttgtcactgtagaacgtgccgacagtagtcacttaagcattctgattgaccctagatgcccagatcttaccgatagttttgctcggctagagtccgcacaggcctccgtgctgcaggccctgaccgaacaccaggcacagcccagattggttggcgatcaggaacaggaattgctggatacacttgcagatcagctccctagattgttggccagggcctctgaactccagacagaatgtatgggcctgcggaagggtcacgggactctgggtcaggggttgtctgccctacagagcgaacagggaaggctcattcagctgttaagcgagtcccagggccacatggcccatctcgtgaacagcgtgtcagacatccttgacgcactacagcgcgatcgggggttaggcaggccacgaaacaaagcggatctgcagagagccccggccaggggcaccaggccacggggttgcgccacaggcagcagacctcgggactgcctggatgttttactcagcggtcaacaggatgatggggtgtacagcgtcttccctactcactaccccgctggatttcaagtttactgcgacatgaggacggacggcgggggttggacggtattccagcgaagggaatag

SEQ ID NO: 117009 - DNA, 540 bp, synthetic construct
  misc_feature 1..540: note = Description of Artificial Sequence: Synthetic coding sequence
  source 1..540: mol_type = other DNA
atggtgaacgaccgctggaagacaatgggaggggcggcccaacttgaagaccggccgcgggataaaccacaagcccgaaagcttcggcttcgagaaaggccaagttgtggttacgtactgtgcaccgttctgctggctctagccgtgcttcttgcggtggccgtcacgggtgcggttttattcctcaatcacgcgcacgcacccggtactgcccctccacctgtcgtcagcactggcgcggcttctgctaattcagcgctggtgaccgtggaacgcgcggactctagtcatctgtctattctcattgatcccaggtgccccgacctcaccgacagttttgccaggctcgaaagtgcccaggcaagtgtgctgcaagccttgacagagcaccaggcccagcctagactcgtaggcgaccaagaacaagaactgctggatactctcgccgaccagctgcctcggttgttggcacgggctagcgaattgcaaaccgagtgtatgggtcttaggaaggggcatggtacattaggccagggatag

SEQ ID NO: 117010 - DNA, 1170 bp, synthetic construct
  misc_feature 1..1170: note = Description of Artificial Sequence: Synthetic coding sequence
  source 1..1170: mol_type = other DNA
atgcggagggttacactcttcctcaatgggtcacccaaaaacggcaaagtggtagccgtatacggcaccctctctgacctcttgtcagtagccagctcgaagctgggtatcaaggccaccagcgtgtataacgggaagggtggcctaattgatgacatcgccctgatacgggacgacgacgttttgtttgtctgcgagggtgaacccttcattgatcctcagaccgattcaaagccaccggaaggactccttggattccataccgattggttgacacttaatgtaggtgggcggtactttactacgactaggtccactctagtgaacaaggaacccgattcaatgctagcccatatgtttaaagacaaaggggtttggggcaataagcaggaccacagaggtgctttcttaatcgatcgttcaccagaatatttcgagcctatcctcaactatctacgtcacggccagctaattgtcaatgacgggattaacttactaggggtgttggaagaagctcgattcttcggaatcgattccttgattgaacacctggaggtcgcaataaagaatagccagccacccgaggatcactctccgataagtcgaaaggagttcgtgcggtttctcctcgccacgcctacaaaaagcgagctgagatgccagggtctgaacttctcgggagcagacttatccaggctggatctgcgatacattaacttcaaaatggcaaacctgagtagatgtaatctggcccatgctaacctttgttgcgcaaacctggagcgcgccgacctctctggatccgtgctcgattgcgccaatctgcagggcgtgaagatgctgtgctcaaacgcggagggggcttctctgaagttgtgcaatttcgaggacccttccggattgaaagccaatctcgagggcgcaaacctgaagggcgttgatatggaaggttcccaaatgactgggatcaaccttagggttgccactctgaagaacgcaaagctgaaaaactgcaacctccgtggagctacgctcgctggaaccgacctcgagaattgcgacctcagtggctgcgatctgcaggaagctaacttacgcgggtcaaatgtcaagggagccattttcgaggagatgctgactccactgcacatgagtcagagtgttcgctag

SEQ ID NO: 117011 - DNA, 939 bp, synthetic construct
  misc_feature 1..939: note = Description of Artificial Sequence: Synthetic coding sequence
  source 1..939: mol_type = other DNA
atggccaaggttttttcttttatcttggttacaacagcgcttacaatgggtagagagattagcgctctcgaggactgcgctcaggaacagatgaggctgcgcgcccaggtcagactgctcgaaacacgcgtcaaacagcagcaagtgaagattaaacagctgttacaagaaaacgaggttcagtttctggataaaggagatgaaaataccgtaatcgacctcgggtccaagcggcagtacgcagactgttccgaaatatttaacgatgggtacaaactgagtggattttataagatcaagcccttacaatcacctgcagagtttagcgtgtactgcgacatgtctgacggtgggggctggaccgttatccagcggaggtcggacgggtctgaaaattttaacaggggctggaaggattacgagaacggcttcggcaactttgtgcagaaacatggggagtactggttaggaaataaaaacctgcattttctgaccacacaggaggattacactctcaaaattgacttggcggactttgaaaaaaattcacgatacgcccaatacaagaatttcaaggtgggggacgaaaagaatttctatgagctgaacattggcgagtactcagggacagccggggactcacttgctggcaactttcaccccgaggtccagtggtgggcatcgcaccagcgtatgaagttcagtacatgggaccgggaccatgacaattatgaagggaactgcgcagaggaagatcagagtggatggtggtttaaccgctgccactcagcaaatttgaatggggtctactacagtggaccctacacagccaaaaccgataacggtatcgtttggtacacttggcacggatggtggtatagcctgaagtctgtggtgatgaaaatccgcccaaatgactttatccctaacgtgatctag

SEQ ID NO: 117012 - DNA, 939 bp, synthetic construct
  misc_feature 1..939: note = Description of Artificial Sequence: Synthetic coding sequence
  source 1..939: mol_type = other DNA
atggccaaggtgtttagtttcatattagtaacgaccgcccttacgatgggacgcgagatcagcgccctggaagactgcgcccaagagcagatgcggctgagggctcaggttcggctgttagagacgcgggtgaaacagcaacaggtcaagattaagcagctgctgcaggagaatgaagttcaatttctagacaaaggagacgagaatactgttattgacctggggtccaagcgacagtacgcagactgttcagaaattttcaacgatggatacaagctgtctggcttttataaaattaaacccctgcagagcccagcagaattttctgtctattgcgatatgtcagacggcggaggatggaccgtgatccagaggcgaagcgatggcagcgaaaactttaatcgaggatggaaggattacgaaaacgggttcggcaactttgtccagaaacatggggagtattggctggggaataaaaacctgcatttcctaactacacaggaggattacacgcttaaaattgacttggcagacttcgagaagaactcccgttacgctcagtataaaaatttcaaggtgggagatgaaaagaacttttacgagctgaatataggggaatacagcggaaccgccggcgattcactagcaggtaactttcatccagaagtgcaatggtgggcctcccaccaaagaatgaagttctccacctgggaccgcgatcacgataattatgagggcaattgcgcagaagaagaccagtctggctggtggtttaataggtgtcactctgccaacctaaatggcgtgtactattccggaccatatacagccaagacggataacggtatcgtctggtacacctggcacggatggtggtactcattgaagtcagttgtaatgaaaataaggcccaacgatttcatccccaatgtaatttag

SEQ ID NO: 117013 - DNA, 939 bp, synthetic construct
  misc_feature 1..939: note = Description of Artificial Sequence: Synthetic coding sequence
  source 1..939: mol_type = other DNA
atggccaaggtgttcagttttatcctagtgacaacggccctgacaatgggacgagaaatttcagccttggaagactgtgcccaagagcaaatgaggctgcgagcccaggttaggctgctagagactagggtgaagcagcagcaggtgaagattaaacagctgctgcaggaaaacgaagttcaatttctggacaaaggcgacgaaaataccgttattgacttagggtccaagcgccagtatgccgactgcagcgagatctttaatgacggatacaagctttctggcttctataaaatcaagccccttcagagcccagctgagttttccgtgtactgcgacatgagcgacgggggtggctggacagttattcagcgccggtctgacggcagtgagaactttaatcggggatggaaggactacgagaacggcttcggaaactttgtgcagaaacacggggaatactggctcgggaacaaaaacttacacttcctcactacacaggaagactatacccttaaaattgatcttgcagattttgaaaaaaacagtcggtacgcccagtacaagaactttaaagttggcgatgagaaaaatttttacgagctgaatattggggagtattcaggaaccgcgggagactctcttgctggaaacttccatcccgaggtgcagtggtgggccagccaccaaaggatgaaatttagcacttgggatcgcgaccatgacaattatgaaggcaattgtgccgaagaagaccaatccggttggtggttcaacaggtgccacagtgcaaatctaaacggggtgtactacagcggaccatacactgctaaaactgataatgggatcgtgtggtatacttggcatggatggtggtattctctgaaatcagtggtgatgaagataagacccaatgatttcatccctaacgtgatctag

SEQ ID NO: 117014 - DNA, 939 bp, synthetic construct
  misc_feature 1..939: note = Description of Artificial Sequence: Synthetic coding sequence
  source 1..939: mol_type = other DNA
atggccaaggtgttttcatttattcttgtgacaacggccctgaccatgggccgcgaaatcagcgccctggaggactgtgcccaggagcagatgaggttgcgcgcccaggtgcgcctcctcgaaactcgggttaagcagcaacaggttaagattaagcaattgctgcaagaaaatgaggtgcagttcctggataagggcgacgaaaatacagtcattgaccttggcagcaagaggcaatacgctgattgctcagagatattcaatgacgggtacaagctttccggtttttacaagatcaagccactgcaatccccggctgagttcagcgtttattgcgatatgtccgatgggggggggtggacagttatccagcggagatcggatggatccgaaaattttaatcgcggctggaaggactatgagaatggctttgggaattttgttcaaaaacatggggaatactggctgggcaataagaatctgcatttcctcacaactcaggaggattacacactgaagattgatttggccgactttgaaaaaaactctagatacgctcagtataaaaacttcaaagtcggagatgaaaaaaatttctatgagctgaatatcggtgaatacagtggcactgccggggacagccttgcagggaactttcatccagaagttcagtggtgggcgtcccatcagcgaatgaagttttctacttgggaccgcgatcacgataactacgaaggaaactgtgccgaggaagaccagtccgggtggtggttcaaccgctgccattcagccaatctgaatggtgtgtactatagcgggccctacactgcaaaaaccgataacggcattgtgtggtacacctggcacgggtggtggtactctttgaagtctgtggtgatgaaaatccggcctaacgacttcattccaaatgtgatttag

SEQ ID NO: 117015 - DNA, 939 bp, synthetic construct
  misc_feature 1..939: note = Description of Artificial Sequence: Synthetic coding sequence
  source 1..939: mol_type = other DNA
atggcaaaagtcttctcttttattttagtgaccacagccctgaccatgggtcgcgagatctcagccctggaggattgcgcccaagaacagatgcgacttcgggctcaggtaaggttgctcgagacccgggttaagcagcaacaagtcaagatcaaacagctcctgcaagagaatgaggtgcagttcctggacaagggcgacgagaatacagtcattgacctcggaagtaagcgacagtacgcagattgctcagaaattttcaacgatggttataagctgtccggcttctataaaattaagcccctacagagtccagccgaattctcagtgtattgcgatatgagcgacggaggagggtggactgtgattcaacggcgctcagacggtagcgaaaattttaaccgagggtggaaggactacgaaaacggatttggaaatttcgtgcagaagcacggagaatattggttggggaacaaaaatctgcatttccttacaactcaagaggactacactctgaaaatagacttagctgactttgagaagaattcacgctacgcacagtacaagaactttaaggtcggcgacgagaagaatttctatgagctcaatattggcgaatatagcggcaccgctggggatagcttggccggaaacttccaccccgaggtgcagtggtgggcctctcatcagcggatgaagttttccacatgggacagagaccacgacaattatgaaggaaactgtgctgaggaggatcagagcggttggtggttcaataggtgccacagtgctaacctaaatggcgtatattactcaggaccgtatacggccaagactgacaatggaattgtctggtacacttggcacgggtggtggtacagccttaagagcgtagtaatgaaaatccgacccaatgactttatcccaaatgtgatttag

SEQ ID NO: 117016 - DNA, 939 bp, synthetic construct
  misc_feature 1..939: note = Description of Artificial Sequence: Synthetic coding sequence
  source 1..939: mol_type = other DNA
atggctaaggttttttccttcatcctagtcactacagcactcaccatggggagagaaattagcgcactcgaggactgcgctcaagagcagatgcggctgcgggcccaagttagactactagagactcgggtgaaacagcagcaagtcaagatcaaacaattgctgcaggaaaacgaagtccagtttctggacaagggcgacgagaataccgtgattgacctgggcagtaagcgacagtacgctgattgcagcgaaatctttaatgatgggtataagttgagcggcttctacaaaatcaaacctctgcagtcccctgccgagttctccgtttattgcgacatgagcgatggcgggggttggactgtgatccagcgtagatcagacgggagcgagaattttaacagaggatggaaggactatgagaacggtttcgggaattttgtccaaaagcatggggaatattggctgggcaacaagaatttacacttccttactacccaggaggactacactcttaaaattgatctggccgactttgagaagaactctaggtacgctcaatataaaaacttcaaagtaggcgacgagaagaacttttacgaactgaacatcggtgagtactcaggtactgctggggactccctagccgggaatttccaccccgaggttcaatggtgggcatcgcatcagcggatgaagttttccacatgggatcgtgatcacgataattacgagggtaattgtgctgaggaggatcagtcaggctggtggtttaaccgttgtcacagtgcaaatctgaatggcgtgtattactcagggccatacactgccaaaactgataacggcattgtatggtacacatggcatggatggtggtactcgctcaagtcggtggttatgaaaatccgccccaacgacttcatccccaatgtgatatag

SEQ ID NO: 117017 - DNA, 849 bp, synthetic construct
  misc_feature 1..849: note = Description of Artificial Sequence: Synthetic coding sequence
  source 1..849: mol_type = other DNA
atgcgtctcagagctcaggtgcgtctgctcgaaacgcgcgtgaagcagcagcaagtgaaaataaagcaactgctgcaagagaacgaggtacagtttctggataaaggagatgaaaacaccgttatcgatctcgggagcaaacgccagtacgctgactgtagcgagatctttaatgatggctacaaacttagtgggttctataaaattaagcctcttcagtcacccgcagaattcagcgtttactgcgatatgagcgatggaggggggtggactgtgatccagaggcgatcagacggaagtgagaatttcaacaggggctggaaagattacgaaaatggttttgggaactttgtgcaaaagcatggcgagtactggttaggcaataagaacctgcattttttgaccacacaggaagactacacactgaagatcgacctggctgattttgaaaagaatagtaggtacgcacagtataaaaactttaaggttggcgacgagaaaaatttctatgaactgaacatcggcgaatactcagggaccgcaggagattccctagcaggcaactttcacccagaagtccagtggtgggccagtcaccaacgcatgaagttctctacctgggaccgcgaccacgataattacgagggaaactgtgccgaggaagaccagtctggttggtggttcaatcgatgccactcagcaaatctcaacggcgtgtactactctggaccctacacagccaaaaccgataacgggatcgtgtggtacacctggcacggatggtggtattctctgaagtcagtggtgatgaagataaggccaaatgactttatccctaacgtcatttag

SEQ ID NO: 117018 - DNA, 939 bp, synthetic construct
  misc_feature 1..939: note = Description of Artificial Sequence: Synthetic coding sequence
  source 1..939: mol_type = other DNA
atggcgaaagtgttttccttcattttggtgacaactgcccttacaatggggagggaaataagtgcactggaagattgtgcccaggaacagatgcgcctccgggcccaggtaagactgttggaaacaagggtcaagcaacaacaggtgaagattaagcagctcttgcaggagaatgaagtgcagttccttgataaaggagatgagaatacagttatcgaccttggatctaagcggcagtacgccgattgttccgaaatctttaatgatggctacaaactgtccggattctacaagataaagccactgcagagtcctgctgagttctccgtgtattgcgacatgtctgatggcggaggttggactgtaattcagcgaagaagcgatggttccgagaacttcaacagaggatggaaagattacgagaatggctttggtaatttcgtgcagaagcacggcgagtactggttaggcaacaagaatctgcattttctcaccacccaggaagactatactctgaagattgatctggcagattttgaaaagaactcaaggtatgcgcagtataagaactttaaggtgggagatgaaaagaatttttacgagcttaatatcggagagtactccggtacagccggggacagcctggcggggaacttccatcctgaagtgcagtggtgggccagccatcagaggatgaaatttagcacttgggaccgtgatcatgacaattatgagggtaactgtgccgaggaggaccagtctggctggtggtttaatcggtgtcattcagctaaccttaatggagtgtactacagcggaccatacacagccaagacagacaacggcatagtctggtacacttggcacggttggtggtatagcttgaagtccgtcgtgatgaagatacgccctaacgatttcatcccgaacgtcatatag

SEQ ID NO: 117019 - DNA, 1320 bp, synthetic construct
  misc_feature 1..1320: note = Description of Artificial Sequence: Synthetic coding sequence
  source 1..1320: mol_type = other DNA
atgaagctcgcgaactggtattggttaagtagcgcagtgctcgctacatatggattcttggtcgtagcgaataacgagactgaagaaatcaaagacgagagggctaaggatgtgtgtccagtaaggctggagtcccgcggcaaatgcgaggaggcaggtgaatgcccataccaggtaagccttccgcctctgacgatccagctgccaaaacagttctcccgcatcgaagaagtgttcaaagaagtgcagaacttgaaagagatcgttaattctctcaagaagagctgtcaggactgcaaactgcaagctgatgacaacggcgatcctggtagaaatggcctgttgctcccttccactggtgcgcccggggaagtaggcgacaacagagtacgcgagctggaatctgaagtgaacaagctgtcaagtgaactcaagaacgcaaaagaggagattaacgtgttgcatggaaggcttgagaagctgaacctcgtcaatatgaacaacatcgaaaactatgttgattccaaagtggctaatctgacatttgtcgtgaattcattagatggtaaatgttctaagtgtccctctcaagaacagatccagtctagaccagtgcaacacctaatttataaggactgtagcgactactacgccataggaaaacgctctagtgagacctaccgcgtaacacctgaccctaaaaattcttcatttgaggtctactgtgacatggagaccatggggggggggtggaccgttctgcaggcccgactggatgggtccaccaacttcacgcggacgtggcaggattataaagctggctttgggaacttgcggcgggagttctggctgggtaacgataaaatccaccttcttacaaaatctaaggagatgatcctgcgaatagatctcgaagattttaatggtgtggaactctacgcgctgtacgaccagttttatgtagctaacgaatttctgaagtatcgcttacacgtagggaactataatgggacagcgggagacgccctgcggtttaacaagcactacaaccacgaccttaaattttttacgacccctgacaaggataatgacaggtaccctagtgggaattgtggattgtattattcctcaggctggtggttcgatgcttgcctgtccgctaatcttaacggcaagtactatcaccagaagtataggggcgtgcggaatggaatcttctggggaacctggcctggggtaagcgaggcgcatccgggcggctacaagagctcatttaaggaggcaaagatgatgatccggcccaagcactttaagccttag

SEQ ID NO: 117020 - DNA, 1095 bp, synthetic construct
  misc_feature 1..1095: note = Description of Artificial Sequence: Synthetic coding sequence
  source 1..1095: mol_type = other DNA
atgacttccgaactggatatctttgtggggaatacgaccttaatcgacgaggacgtctacagattatggttggatggctactctgtgacagacgctgtggcactgagggtccggtccggtatacttgagcagaccggagcaacagctgctgtgctgcagtcggacacaatggatcattacaggacctttcacatgctagagaggttgttgcacgcacctccaaaactcctccatcagttaatcttccagatcccaccctcacggcaggcgttattgattgagaggtactatgcctttgacgaagcttttgtgagggaggttttgggaaagaaactttctaagggaacgaagaaagacctggatgatatttctacaaaaaccggcattacactgaagagctgcaggaggcagttcgacaattttaaacgcgtattcaaggtcgtggaggaaatgagagggtcattggtggataacattcagcagcactttctactgtccgacaggctagcccgcgactacgctgcaattgtgttttttgccaacaatcgctttgaaaccggcaaaaagaaacttcagtacctgagttttggggacttcgcattctgtgccgaactgatgatccagaactggacactcggagcggttggcgaagcccctaccgaccccgactctcagatggacgacatggacatggacctcgacaaggaattcctgcaggatctcaaggagctgaaagttcttgttgccgacaaagacctgctagatttacacaaatctttggtatgtacagcgctccggggcaagctcggagtgtttagtgagatggaggcgaacttcaagaatctgtctagaggcctggtcaacgttgccgctaagcttacccataataaagacgtcagagacctattcgtcgacctcgtggagaagttcgtggagccctgccggagcgatcactggcccttgagcgacgttagatttttcttgaaccagtattccgcaagtgtgcattcactcgacggattccgccaccaggctctgtgggatcgttacatgggcactttacgaggctgtcttctgaggctctaccacgactag

SEQ ID NO: 117021 - DNA, 1074 bp, synthetic construct
  misc_feature 1..1074: note = Description of Artificial Sequence: Synthetic coding sequence
  source 1..1074: mol_type = other DNA
atgacaagtgagctcgacatctttgtcggtaacactactctgattgacgaggatgtttacaggctctggctggacgggtatagcgtgactgacgccgtcgcactccgcgtgcggtcagggatcctcgagcagactggcgcaaccgctgccgtgctccagagcgacaccatggaccactaccgcactttccatatgctggaacgtctgttgcatgcccctcccaaattattgcatcagctgatcttccagatcccgccttctagacaggctctgctgatcgagcgctattacgcttttgatgaggcgttcgttcgtgaagtgctcggaaagaaattgtctaagggcaccaagaaggacctcgacgacatttctacgaaaacaggaattacccttaagtcatgtaggaggcagtttgacaactttaaacgagttttcaaagtcgtcgaagagatgcgtggctcacttgtggataacattcagcagcacttcttgctctccgacagactggcccgagattacgccgccatcgtcttcttcgccaacaaccgctttgagacaggcaaaaaaaaactgcaatacctatcattcggtgattttgcattttgtgccgaactgatgatacaaaattggacactgggcgccgtggattcccaaatggacgacatggatatggatctcgacaaggagtttttgcaggaccttaaagagctcaaggtcctggtagcagataaggatttgttggacttgcacaaatccttggtatgtaccgctctgagaggtaaattgggggttttcagtgagatggaagctaatttcaagaacctgtctagaggcctggttaatgtggccgccaagcttactcacaataaagatgtcagggatctatttgtggaccttgtcgagaaattcgtggaaccttgtagatccgatcactggcctctgagtgacgtccgcttcttcctgaaccagtacagcgcttctgtacactcactggatggcttccggcatcaggccctctgggaccgctatatgggcacactgcggggttgcctgctgcgcctgtaccacgactag

SEQ ID NO: 117022 - DNA, 1989 bp, synthetic construct
  misc_feature 1..1989: note = Description of Artificial Sequence: Synthetic coding sequence
  source 1..1989: mol_type = other DNA
atgtggagctggaaatgtctgctgttctgggcggtcttggtgaccgctacactctgtaccgctcgacccagccctacgttgcccgaacaggctcagccgtggggtgcccccgttgaggtcgagagttttctggttcatcctggggatctcctgcaactgcgatgtcgcctgcgtgacgatgtccagtctatcaattggctcagagacggggtgcagttggccgaaagtaatcggacgagaatcacaggggaagaggtcgaggtgcaggattcagtgccagcagactcaggcctgtacgcatgcgtgacaagttctcccagtgggtctgatactacatacttctccgtgaacgttagcgacgcacttccatcttctgaggacgatgatgatgatgacgatagcagctcggaagagaaggaaaccgacaacaccaaacccaataggatgcctgttgccccctactggacaagtcccgagaagatggagaagaaactgcacgcggtccccgcagccaaaaccgtgaagtttaagtgtccctcgagtggcacacctaatcctaccctccgatggctgaagaatgggaaagaattcaagcccgatcaccgcatcgggggctacaaagtgagatacgccacttggtctatcataatggattcagttgtgccctcagataaagggaactacacatgtatcgtggagaatgagtatgggtctattaatcatacataccagcttgacgtggtcgaacggtccccccatcgcccgatcctgcaggcgggattgccggccaataagaccgtggccctgggaagcaacgtagaatttatgtgcaaggtttatagcgatccccagcctcacatccagtggctgaagcatattgaagtaaacggctccaaaatcggcccggataatctgccttatgtacagatcctgaaaaccgcgggggtgaacacgactgacaaagaaatggaagttctacatttgcggaatgtctcgttcgaggacgctggcgagtatacttgtctagcagggaacagtatcggcctctcccaccactcggcgtggctcactgtgctagaagcccttgaggagaggcctgccgtcatgacatcaccactttatctggaaatcatcatctactgcaccggggccttccttatcagttgcatggttggatctgttattgtgtacaaaatgaaaagcggcaccaagaagagcgacttccacagccagatggccgttcacaaacttgctaagtcgatcccccttagacgccaggtaaccgtctcagccgactcatctgcatcaatgaactccggagtcttgcttgtccggccatcgagactgtcgtctagtggaactccaatgctggccggtgtgtccgagtatgaactgcctgaggatccccggtgggaactgcctagagatcgcctggtcctcggcaaacctctgggcgaaggctgtttcggccaggtcgttctcgctgaggcaataggcctggacaaggacaagcctaaccgcgtaacgaaagtcgcggtcaaaatgttgaagtccgatgccactgaaaaagacctgagcgacttgatcagcgaaatggagatgatgaagatgatcggcaaacacaaaaatatcattaacctcctcggggcttgtacccaggacggccctctttatgtgattgttgaatatgctagcaagggtaaccttagagaataccttcaggccagacgaccacctgggctggagtactgctataatccttcgcacaacccagaggagcaactctcctcaaaagatttggtatcttgcgcataccaggttgcaagagggatggagtatctggcgagcaaaaaagtttggaaccttaaggcgcctttggtccacaccccaaggccaggttcccaggagtgtccaggcgatcgcggtcagtgtgacgaagactcacgactgtggccaagaactggccacagcccccaccggctgttgtag

SEQ ID NO: 117023 - DNA, 1104 bp, synthetic construct
  misc_feature 1..1104: note = Description of Artificial Sequence: Synthetic coding sequence
  source 1..1104: mol_type = other DNA
atgtggagctggaagtgtttactcttctgggctgtgctggtgacggctactctgtgcacggccagaccgtcaccaactctgccagaacaggctcagccatggggcgcacccgtcgaggtggagtcatttctcgtacacccgggggacctcctccagctgcgctgtagattgcgggacgatgtgcagagtatcaactggctgcgggacggtgtgcagctggccgagtccaacagaacgcgcattaccggagaggaggtggaggtgcaggatagtgttcccgctgactccgggctttacgcctgtgtgacgagttccccctcgggaagcgatacgacttacttttctgtaaacgtcagcgtgcctatagatgcattgccttcttcagaagatgacgacgacgatgacgactcatcctccgaggagaaggagacagacaacactaagccaaaccccgtggctccatactggacctcacccgagaaaatggagaagaagttgcatgctgtgccagccgctaaaaccgtgaaattcaagtgcccatcgtcaggtacgcccaacccaactcttcgctggctgaaaaatgggaaagaatttaagccagaccatcggattggcgggtacaaagtaagatacgctacctggagtatcatcatggattctgtcgtcccttctgacaaaggtaactatacttgcatcgtcgaaaatgagtacgggtcaatcaaccacacttaccagctggacgtggtagaacgctcccctcaccggcctattctccaggcgggcctgcccgcaaacaaaacagtggctctcggtagcaacgtggagtttatgtgcaaggtctacagtgacccacagcctcacatccagtggctgaagcacatcgaggttaacggtagtaagatcggacccgacaatttaccttatgttcagatactgaaacacagcggaatcaattcaagcgacgctgaagtgctcactctgttcaatgttactgaagcacagagcggcgagtacgtgtgcaaagttagcaattatattggcgaagccaaccagtctgcctggcttacggtgacaagaccggtggccaaagattgttggtcctag

SEQ ID NO: 117024 - DNA, 2196 bp, synthetic construct
  misc_feature 1..2196: note = Description of Artificial Sequence: Synthetic coding sequence
  source 1..2196: mol_type = other DNA
atgtggtcatggaagtgtctgcttttttgggcggtgcttgtgacagccactttgtgtactgcgcgacccagtcctaccctgccagagcaagacgcactacctagttctgaggatgatgacgatgacgacgacagctcatctgaagaaaaagagactgataacacaaaacccaacccagtggcgccctattggacttcacctgagaagatggagaagaagttgcatgctgtgcctgctgccaaaaccgtcaaatttaaatgccctagttccgggacacccaatccgactctccggtggctgaagaatggaaaggagttcaagcctgatcatcggatcggcggctacaaagttaggtatgccacctggtccattattatggactctgtggttccttctgacaagggaaattatacatgcatcgttgagaacgagtacgggagcatcaaccacacctaccagttggacgtggtcgagcgcagtccacatagaccaatcctgcaagctgggctgccagctaacaaaacagtcgctcttggcagcaacgtagagttcatgtgtaaggtgtattccgaccctcagcctcacatccagtggctgaaacacattgaggtgaatggcagcaagatagggcccgataatttgccatatgtgcagattttaaagactgccggtgtgaataccaccgacaaggagatggaggttctgcacctgaggaatgtatccttcgaggatgccggggaatacacctgcctggcggggaattccattggactcagtcaccactcagcttggctgacagttcttgaggcactagaagagcgccccgcggtaatgacctccccgctctacttagagattattatctattgtaccggtgcgttcctcatttcttgtatggtggggtctgtcatagtctacaaaatgaaaagcggcacgaaaaagtcagattttcatagtcaaatggctgtccacaagttggctaagtcaattcctctaagaaggcaggtcacagtatcagcagatagctccgcctccatgaactctggcgtcctgctggtcagacctagccgcctgtcttctagcggcacccctatgctcgcaggcgtctctgagtacgagctcccagaggatcccaggtgggagctacctagggaccggcttgtgctgggtaaaccattaggcgaaggatgtttcggtcaagttgtgctcgcagaagcgatcggtctggacaaggataagcctaatcgcgtgactaaggtcgcggtaaagatgttaaagagcgatgcaacagagaaggacctctctgacttaataagcgaaatggaaatgatgaagatgattggaaaacacaagaatataatcaacctgctgggtgcctgtacgcaagatgggcctctttacgttattgtggagtacgcatcgaaagggaatctccgggagtacctacaggccagacgcccccccgggctggagtattgctacaatccttcacataatccagaggaacagctttccagcaaggatctagtgtcatgcgcttaccaggtggcaagaggaatggaatatttagcgtccaaaaagtgtatccatcgggatcttgccgctagaaacgtcctggtaacagaggacaacgtgatgaagatcgctgactttggattggcccgcgatattcaccacattgattattacaagaagaccacaaatggacgactgccggtgaagtggatggcaccggaagcgctattcgaccgtatatatacacaccagtcggacgtctggagttttggtgtcctattgtgggaaatttttacattgggagggtcaccctatcccggtgtcccagttgaagaacttttcaagctgttaaaggaagggcatagaatggataagccaagtaactgcactaatgagttgtatatgatgatgagagattgttggcatgctgtgcccagccagaggccgacttttaaacagctagtggaagatctggaccgcattgttgccctcactagtaatcaggaataccttgatctgtccatgcccctggaccagtattctccgagttttccagacacaaggtctagtacatgctcttcaggggaagactccgtctttagccacgaaccgctgcctgaagaaccatgccttccaaggcacccagcacagctcgccaacggggggctgaaaagaagatag

SEQ ID NO: 117025 - DNA, 2439 bp, synthetic construct
  misc_feature 1..2439: note = Description of Artificial Sequence: Synthetic coding sequence
  source 1..2439: mol_type = other DNA
atggctgccgtcacacgcgattttggagagatgctcctccattccggaagagttctgcccgccgaagcgcaaccatggggcgctcctgttgaggtcgaatcgtttctggtgcatcctggagatctacttcagctcagatgtaggctccgggatgacgtacagagtattaactggctgcgagacggcgttcaactcgcggagagcaatcggacacgaataaccggggaagaggtcgaggtgcaggatagcgtccccgcggacagcggactctacgcttgcgtgaccagctccccttctggcagcgatacaacgtattttagcgtgaacgtttccgacgcactgccctctagtgaggacgacgacgatgacgacgacagtagctcagaggaaaaggagactgataacacgaagccaaatcgaatgccggtagccccgtattggacctcccccgagaaaatggagaaaaaactacatgcagtcccagccgccaaaactgtgaagtttaaatgccctagcagcggtactccgaaccctaccctgcggtggctaaaaaatggtaaggaatttaaacctgatcaccgtattggtggctacaaagtgcggtatgccacatggagtatcattatggattccgtcgtaccttccgacaaggggaattacacttgcattgtcgagaacgaatatggatccattaaccacacctatcagctcgacgtagtcgagagatcccctcataggcctatccttcaggctggcctgccggccaataaaacagtcgcacttgggagcaacgtcgaattcatgtgcaaagtttactccgatcctcagccacatatccagtggctcaagcacattgaggtgaacggaagcaaaatcggaccggataacctcccctacgtgcagatattgaagacagccggggtgaacacaacggacaaggagatggaagttttgcatctgcggaacgtctctttcgaagatgccggcgaatatacgtgtcttgccggaaacagtatcgggttgtcacatcattccgcttggctgacagtgctcgaagctctggaggagcgcccagccgtcatgacctccccactgtatctggaaatcatcatatactgcactggagcgtttctcatctcctgtatggtggggtctgtgatcgtatacaagatgaaaagcggtactaagaaatctgattttcacagtcagatggcggtgcacaagctagcaaagtcaattcccctccgacggcaggttagtgcagacagtagcgcgagcatgaactccggtgttctgctggtaaggccgtcgcggctgtcatcttccggaaccccaatgctcgcaggagtgagcgaatacgaattacctgaagaccctcgttgggagctgccacgcgaccgcctcgtccttggaaagccccttggagaaggttgcttcggccaggtagtactcgccgaagctatcggcctggataaggacaaacctaatcgcgtgaccaaagttgctgtgaagatgttaaagtccgatgccactgaaaaggacctgagcgatctgatcagcgagatggaaatgatgaagatgattggcaaacataaaaatatcattaatctgctgggtgcttgtacacaagatgggcctctttacgtcatcgtcgagtatgcgtcaaaaggcaacctccgcgagtatctgcaggcccggcgaccaccaggtctcgagtattgctataaccccagccacaatccggaagagcagctctcttctaaggacctggtgagctgtgcttatcaagtcgccagaggtatggagtacctggcgagcaagaagtgcattcatagagatttggcagcgagaaacgttcttgtcacagaagacaatgtcatgaagattgccgattttgggctcgctcgcgatattcatcatatagactactacaaaaagacaacaaatgggcgcctgcctgtcaagtggatggctccggaagctttgtttgaccgtatttatacacaccagagtgacgtgtggtcattcggggttctcctctgggaaatcttcacacttggcggcagtccttatccgggagtcccagtggaggagttattcaaactcctcaaggaggggcaccgcatggataaaccctcaaactgcaccaatgaactgtacatgatgatgagggattgctggcacgcggttccatcgcagcgacccacatttaagcagctagtggaagatttggacaggatagtggccttaaccagtaaccaggagtaccttgatttgtcaatgcctttggaccagtactccccatccttcccagacacccgctccagcacatgctcttctggggaggactccgtgtttagccacgagccacttccggaggaaccctgcttgcctcgacatcctgcacaactagccaatgggggcctaaagaggcgatag

SEQ ID NO: 117026 - DNA, 2469 bp, synthetic construct
  misc_feature 1..2469: note = Description of Artificial Sequence: Synthetic coding sequence
  source 1..2469: mol_type = other DNA
atgtggagctggaaatgcttgttgttctgggccgtgctggtgaccgctaccctctgcacagctcggcccagtcccaccctccctgagcaggcccagccctggggggcccctgtagaagtagaatctttcctggttcacccaggagatctgctgcagctgcgctgcagactcagagacgatgtccagtccatcaactggctcagagatggcgtacaactggcagagtccaacagaacacgcattactggagaggaggttgaggtgcaggattccgtgcctgccgactcaggtttgtatgcatgtgttacttcatccccttcggggtcagacacaacatacttttccgtgaacgtatcagtcccaatcgatgcacttccctcttccgaggatgacgatgatgatgatgattcttcgagtgaagaaaaggagactgataatacgaagcccaaccccgtcgcgccttattggacctcaccagaaaaaatggaaaaaaagttgcatgctgtcccggctgcaaaaacagtgaagttcaagtgtccaagctctggaactccaaatcccacattgcggtggctcaaaaatggtaaagaattcaagcccgatcaccggataggtggttataaagtcaggtatgcaacatggagtattataatggattcagtcgtgccctccgacaaagggaattacacatgtatcgtggagaatgagtacggctccatcaatcacacatatcagcttgatgtcgttgaacgctcacctcatcggccaatcctccaagctggcctgccagccaataagacggtagctctaggctcaaatgtggaattcatgtgtaaagtttattccgacccgcagcctcacattcagtggctgaagcacattgaggtgaacggctcaaaaatcggacccgacaatctgccttacgtccagatcctgaagcactccggcatcaattcctctgacgcagaggttctcactctgtttaacgtgacagaagcccagtccggagaatacgtatgcaaagtgtctaactacattggcgaagcaaaccagtcagcatggctgacagtcacacggccagttctggaggaacgcccagctgtcatgacatcccccctttacctggaaatcataatctactgcaccggcgcattcctgatttcatgtatggtgggatcagtaatcgtatataagatgaaatctggtaccaaaaaatccgacttccactctcagatggcagtgcacaagctcgccaaatcaatccctcttagaagacaagtgacagtaagcgccgattcctctgcctctatgaactctggggtgctcctggtgaggccctcacggctgagttcctcaggaactcccatgctggccggcgtgtccgaatatgagctgcccgaggacccccgatgggaactcccccgtgacaggctggtgctcggcaagcctctgggagaggggtgctttgggcaggtggtgttggcagaagccatcggcctggataaagataaacctaaccgcgttaccaaggtcgccgtgaagatgcttaagagtgacgccactgaaaaagacctgagtgacctaatatctgagatggaaatgatgaagatgatcggtaaacacaagaacataataaatctcttaggcgcatgcactcaggacgggccgctctacgtaatcgtggaatacgcctctaagggaaatttacgggaatacctccaggcccggcggccccccggcctggagtactgttataatcccagccataatcctgaggaacagctaagcagcaaagacttggtgtcttgcgcatatcaggtggccagaggtatggagtaccttgcttccaaaaagtgtattcaccgcgacctggctgcccgcaatgtgctggtgacagaagataacgtcatgaagatcgccgatttcggcctcgcacgcgacatccaccacatcgattattataaaaagaccaccaatgggagactgccagtcaagtggatggctcccgaggcactgttcgataggatttacacccaccagtcagatgtttggtctttcggcgtgttgttgtgggaaattttcactctgggcggaagcccgtatcccggagtgcccgtggaagagctcttcaaactgctgaaagaagggcaccgaatggacaagccatcaaattgtaccaatgaattgtacatgatgatgcgcgattgttggcacgcagtacccagccagagacctacttttaaacagctcgttgaggacctggatagaatcgtggcactgacatccaatcaagagtatttggatttatcgatgccactagaccaatactcaccctcgtttcccgacacacgcagcagcacatgcagcagtggagaggactctgtgttttcgcatgagccattgccggaagaaccctgcttaccccggcatcccgcccagctggctaacggagggctcaaacggagatag

SEQ ID NO: 117027 - DNA, 2202 bp, synthetic construct
  misc_feature 1..2202: note = Description of Artificial Sequence: Synthetic coding sequence
  source 1..2202: mol_type = other DNA
atgtggagctggaaatgcttattgttctgggcagtgctggtgacagcaaccctgtgcacagcccggccgtccccaacgctgccagagcaggatgctctgccaagctccgaggatgacgacgatgacgacgattcttcttccgaagagaaagagactgacaatacaaagcctaaccgcatgccggtcgccccctattggacttcccctgagaaaatggaaaagaagctacacgctgtgcccgccgcaaaaaccgtgaaatttaagtgtcccagttccggtacgcccaatcccaccctgagatggttaaaaaacgggaaggagtttaaacccgatcaccgaatcggagggtacaaggtaaggtatgctacctggtctattattatggacagtgtagtaccctccgataaaggcaattacacatgcattgtggaaaatgaatatgggagcatcaaccatacataccagttggatgtggtggagagaagccctcaccgcccaatactgcaagctggcttgccagctaataaaacggtggcgctggggtccaacgtagaattcatgtgtaaggtctacagtgacccccaacctcatattcagtggctcaagcacattgaagttaatggcagtaagattggacccgataacctgccttatgtgcaaattctaaaaacagctggcgtcaatacgactgacaaagagatggaagtgctccatctcagaaatgtgtcctttgaagacgctggggaatacacttgcttagctggcaactcgatcggattgtcccaccacagtgcctggctcactgttcttgaggcactcgaagaacgacccgcagtgatgacatcaccactgtatctcgagataatcatttattgcacaggcgcgttcctgatctcttgcatggttggcagtgttatagtgtacaaaatgaagagcggaactaagaaatcagattttcatagtcaaatggctgtgcacaagctcgccaaaagcattccccttcggagacaagtcaccgtttcagccgacagttctgcgtcaatgaatagtggagttctcctggtgcgtccatctcggctttcgtcaagcggcacacctatgctggctggggtatctgaatatgaacttccagaagatccacgctgggagctgccccgggaccggctggttctaggtaaacctttgggtgagggctgcttcgggcaggtggttttggccgaagccatcggactcgataaagataaaccaaacagagtgactaaggttgcagtgaaaatgctaaagtcagacgccacggagaaagatctaagtgacttgatctccgaaatggaaatgatgaaaatgatcgggaagcacaagaacattatcaatcttcttggcgcctgtacccaagatggtccactgtatgtcatcgtcgagtatgcgagcaagggaaacctgcgtgagtatctgcaagccagaaggccccctgggttggaatactgctataatccaagccacaaccctgaagagcagctgagctcgaaggacctcgtgtcttgtgcctatcaagttgcgagagggatggaatacctggcatctaagaagtgcatccatagggatcttgcagcccgaaacgtgttggtaactgaagacaacgtgatgaagattgcagactttggactcgccagagacatccaccatattgactattataagaaaacaacaaatggcagactccccgtgaagtggatggccccagaggcgctgttcgaccggatctatacccatcagtcagacgtctggagttttggagtgctgttatgggagatattcacactggggggaagtccatatcctggtgttcctgtcgaagagttgtttaaactgctgaaggaaggccatagaatggacaaaccttccaattgtacaaacgagctctatatgatgatgagagattgctggcacgccgtaccatcgcagcggccaactttcaaacagctcgtggaggacctcgatcgaattgtggccctgacatctaatcaagaatacctcgatttgtcaatgccactagaccaatatagcccgtcttttcctgatacaagatcttcaacctgttcaagtggcgaggattccgtcttcagtcatgaacctttacctgaggaaccttgcctccctcgtcatccagcacagctggcgaatggcggtcttaaacggcgttag

SEQ ID NO: 117028 - DNA, 2463 bp, synthetic construct
  misc_feature 1..2463: note = Description of Artificial Sequence: Synthetic coding sequence
  source 1..2463: mol_type = other DNA
atgtggagttggaaatgcctgctgttctgggccgtcctggttacggccactctgtgcactgctcggccctcccctacactgcctgagcaggctcagccctggggcgctccagtggaagtcgaaagcttccttgtacacccaggggatctgctgcagctgcggtgccgcctccgcgacgacgtgcaaagcattaactggctgcgtgatggcgtgcaactggcagagagtaacagaactaggatcactggcgaagaggtggaggttcaggatagtgtacccgctgatagcggtctgtacgcatgcgtaacaagttcaccatctggatcagacaccacatatttcagcgtgaacgtttctgatgcactgccaagcagcgaggacgacgacgatgacgacgatagctccagcgaagagaaagagaccgacaataccaaacccaaccccgtcgccccttattggacatctccagagaagatggagaaaaaactccatgcagtcccagctgccaaaacagtgaaatttaaatgtcccagcagcggaactcctaaccctacactaagatggctcaaaaacggcaaagaattcaaacccgatcaccggattggtgggtacaaggtacggtacgctacctggtctatcatcatggattcagttgtcccatccgacaaaggcaactacacctgcatagtagagaacgaatatggttcaatcaaccacacataccagctcgacgtcgtggagcgctcaccgcatcggcccatactgcaagctggcctgccagccaacaaaacagtcgccctcggatcaaacgtagaatttatgtgcaaagtttactccgatcctcagccgcacattcagtggctcaaacatattgaagtgaatggctcaaagattggacccgataacttgccttacgtgcagattctgaagacggctggagttaacaccaccgacaaagagatggaagttttgcacttgcggaatgtcagctttgaagatgccggtgaatacacctgtctcgctggcaacagtattggcttgtcacatcattcagcttggctaacagttctggaagcccttgaggaacgccccgccgtcatgacctcacccctgtacctcgaaattatcatttactgtaccggcgctttccttatcagttgcatggtcgggtcagtgattgtttacaaaatgaaatcaggaacaaaaaaatctgactttcacagccagatggccgtgcataagctggctaagtcaattcccctccggaggcaagtgacagtcagtgccgattctagtgctagtatgaactccggcgttctcctggtgaggcccagtcgccttagcagttctggcactcccatgctggccggggtgtctgagtacgaactcccagaggaccccaggtgggaattacccagagaccgtctggtactcggtaagcccctcggggagggatgctttggacaggtagtcctggctgaagcaattggactggacaaagataagcctaacagagtcacaaaggtcgccgtaaagatgcttaaatccgatgcgaccgagaaagacctgtccgacctcattagcgagatggaaatgatgaagatgattgggaagcacaagaacatcattaatctgctgggtgcatgcacacaggacggccctctttatgttattgtcgagtacgcctctaaaggaaacctccgtgaatatctgcaagcccgaaggcctcctggtctcgaatactgctacaacccaagtcacaaccccgaagagcagttgagttccaaggatctggtctcttgcgcctaccaggtcgcacgaggcatggagtacctcgcatcgaagaagtgtatacaccgcgacttggccgcacggaatgtgctggtgactgaagacaatgttatgaagattgccgacttcggcctcgcgcgggatatccaccacattgactactataaaaaaacgacaaatgggaggctgcctgttaaatggatggctcctgaggcgctgtttgaccgcatttacacacaccaatcagatgtttggtcgttcggtgtccttctctgggaaatattcacattgggcggctcaccctaccccggagtgccagtggaggagctgtttaaactcctcaaagagggacatcgaatggacaagcccagcaattgcactaacgaactgtacatgatgatgcgggattgctggcatgctgtaccaagtcagcgccctacgtttaagcagttagtggaagacctggatcggattgtagcgttaactagcaatcaggaatacctcgacctgagcatgcccctcgatcagtattcccctagttttccagacactagaagtagcacctgctcctccggagaggactctgtcttttctcatgagcctctgcctgaggagccttgcttgcctcgtcacccggcccagcttgcaaacgggggtttgaaacgacgctag

SEQ ID NO: 117029 - DNA, 2202 bp, synthetic construct
  misc_feature 1..2202: note = Description of Artificial Sequence: Synthetic coding sequence
  source 1..2202: mol_type = other DNA
atgtggtcctggaagtgcttgctgttttgggctgtgttggtgacagcaactctctgcacagcaagaccctcgccgactcttcccgaacaggacgccctcccctcttcagaagacgacgatgacgacgacgactcaagttctgaggaaaaagaaactgacaacacgaaacccaatccagtagctccctattggactagtcctgagaagatggagaaaaagctccacgccgtacccgctgctaagaccgttaagttcaaatgccccagtagcggtacccccaaccctacgctgagatggctgaaaaacggcaaggagttcaaacccgatcatcgcatcgggggatataaagtacgttacgccacctggagcattatcatggattctgtggtgccttctgacaaggggaattatacctgcattgtggaaaacgagtacggtagtatcaatcatacctaccagctagacgtcgtggagagatcccctcataggcccattctgcaggctggcctcccagcaaataagactgtggccctcggctccaatgtggagtttatgtgtaaggtatattcagaccctcagcctcacattcagtggttaaagcacattgaggttaacggttccaagatcggtccagacaacttaccttatgtgcaaatccttaagcattcagggatcaatagttcagatgccgaagtgcttacactgttcaacgttaccgaggctcaatcaggcgaatacgtgtgcaaggtcagcaactatattggagaggcgaatcaatcagcatggctgactgttacaagaccagtcgcgaaagcgttggaggaaaggcctgctgtcatgacctctcccctctatctggaaattatcatttattgcacaggcgccttccttatatcatgcatggtgggcagtgtgattgtatataagatgaagagtgggactaaaaagagtgattttcattctcaaatggccgtacacaagttggccaagtctatccctttgcgtcgacaggttaccgtcagcgccgattctagcgcatctatgaacagcggcgtgctactggtccggccttcacgcctatcatctagcggaacgcctatgctggcgggcgtcagcgaatacgaactgccggaagatccacgatgggaactccccagagataggctcgttcttggtaaacctcttggcgaggggtgctttggccaggttgttctagccgaagccatcggcttggacaaggataaacctaaccgagtcacaaaggttgctgttaagatgctgaagtccgacgctactgagaaggatctgtctgacctcatctcagagatggagatgatgaaaatgattggaaagcacaagaatattattaatctcctcggtgcatgcacgcaggacggaccactctacgtgattgtggagtatgctagcaagggcaatctgcgagaatacctgcaagcgagacgcccgcctggtttggaatactgttacaacccatcccataaccctgaggagcagctctctagcaaggacctggtctcgtgtgcctaccaggtcgcacgcggcatggagtatctggcttccaagaagtgcatacatcgggatctagctgctaggaatgtgctggtcaccgaagacaacgtgatgaagatcgccgacttcgggctggccagggatatacaccatattgattactacaaaaagaccacaaacggcaggctccctgtgaaatggatggccccggaggctctctttgaccggatctacacgcaccagtctgacgtgtggtcatttggagtcttgctgtgggagatctttaccctgggtgggtccccatatcctggcgttcccgttgaagaactctttaaactcctgaaggaaggacatcggatggacaaaccctccaactgcaccaacgagctatacatgatgatgcgcgattgctggcatgccgtgcccagccagcgtccaacctttaagcaattagtcgaggacctggatcgaattgtggcattgacgtccaaccaggagtatctggatctgtcgatgcccctggatcagtacagtccatcttttccagatacccgaagctctacctgctccagcggtgaggactcggtatttagccatgaacccctgccggaggagccttgcctcccaagacatcccgctcaacttgccaacggcggcctgaagcgtcggtag

SEQ ID NO: 117030 - DNA, 2463 bp, synthetic construct
  misc_feature 1..2463: note = Description of Artificial Sequence: Synthetic coding sequence
  source 1..2463: mol_type = other DNA
atgtggagttggaaatgtctgttattctgggccgtcttggtgacagcaactctttgcacggctcgtccctcgccgacccttccagaacaagcgcaaccttggggggcgccggtagaagtcgagtcattcctcgtgcatcctggagacttactccagcttcgctgcaggctgcgtgatgatgtccaatcaataaattggcttagggatggggtgcagttggctgagagcaaccggacacgcataacaggagaagaagtcgaagtccaagactctgtgccggctgatagcggtttatatgcgtgcgtgacgagctcacccagtggctcagacaccacatacttcagtgttaacgtgagcgacgccctaccttcaagcgaagatgatgacgatgacgacgattccagctcagaagagaaggaaacagataacacaaaaccaaatcctgttgccccctactggacatcacctgagaagatggagaagaaactccatgctgttcctgccgccaaaactgtgaaatttaaatgcccatcttcagggacacctaatcccaccctgaggtggctaaaaaacggaaaggagtttaagcctgatcaccggattggcggttataaggtccggtacgccacttggtctatcataatggattcagtcgttccctccgacaaaggaaactatacatgtatcgtggagaacgagtacggctcaattaatcacacctatcagctcgatgtcgtcgaaaggtcgcctcataggcctattttacaggctggcctcccagccaataagacggtggcactcggcagcaatgtcgaattcatgtgcaaggtgtattcggacccccaaccacatatacagtggttgaaacacatcgaggttaacggctctaagatcggaccagacaatctcccgtatgtgcagatactgaagactgctggagtgaacactacagacaaagagatggaagtcttacacttgcgcaacgtgagtttcgaggatgcgggagagtacacttgtctagctggaaactcaattggcctgagccaccactcggcatggctgacggtccttgaggctctcgaagaacgcccagcagtgatgacgtcccctctgtacttggagattatcatctattgcacaggggccttcctcatcagctgcatggtcggatctgtgatagtctataaaatgaagagcgggactaagaaatccgactttcattcacagatggccgtgcataaactcgctaagtctattcccctacgtagacaggttacagtgagcgcagattccagcgcaagtatgaatagcggggtgctgctggtcagaccctctaggctttcatcaagtggcacacccatgttggcaggagtgtcggaatacgagctgccagaggaccccaggtgggaactgcccagagaccggttagtgcttggaaaacccctaggtgaggggtgttttggacaggtggtgctggcagaggcaatcggactggacaaggataagccgaatagggttactaaggttgcagtgaagatgctcaagtctgacgcaaccgagaaagacctaagtgacttaatatctgaaatggagatgatgaagatgatcggaaaacacaagaacataattaacttacttggtgcctgcacccaggatggccctttgtacgtcattgtggaatacgccagtaaggggaacctgcgggagtaccttcaagcccgtcgccctcccggactggagtactgctacaatcctagtcacaatcccgaggaacagctgtctagcaaggatttagtatcctgcgcctatcaagtggccagaggaatggagtacttggcgagcaaaaagtgtatccatcgagatcttgccgctcgtaatgtcctagtcactgaggacaatgtgatgaaaattgcagattttggcctcgcgcgggatattcatcatatagattattataaaaaaaccaccaatggaaggctgccagtgaaatggatggcacccgaggcactctttgacaggatatacacccatcagagcgatgtctggtccttcggcgttctgctttgggagatctttaccctgggcggcagcccttatccaggggtgcccgtggaagagctctttaaactgctaaaagagggacaccgtatggataagccttctaactgcaccaacgagctttacatgatgatgagagactgctggcacgccgtgccctcccagcgtcctacgttcaaacagctcgttgaggaccttgacagaatcgtagcccttacttccaatcaagagtacttagacttaagtatgccactagatcagtacagcccctctttccctgatacacgatcttccacgtgttcttctggcgaggacagtgtgttttcacacgagcccctgcctgaagagccgtgtctgcctagacaccctgcgcaactggcgaatggcggtctgaaaagaagatag

SEQ ID NO: 117031 - DNA, 2463 bp, synthetic construct
  misc_feature 1..2463: note = Description of Artificial Sequence: Synthetic coding sequence
  source 1..2463: mol_type = other DNA
atgtggagctggaagtgcttgctattttgggccgtgctcgtgaccgctaccctctgcactgcccgtccatcacctactctgcccgagcaggctcagccctggggagctcctgtggaggttgagtccttcctggtccatcccggcgacctgctgcagctgcggtgcaggttgagagatgacgttcagtccatcaattggttgagggatggagtgcaactggcagagtctaatcgcacgcggataacgggcgaagaagttgaggttcaggattcagttcccgctgactccgggctgtacgcttgtgtgacctcaagcccaagtggctccgatacaacatatttcagtgtcaatgttagtgacgctctcccctcaagtgaagacgatgatgatgacgatgatagttcatccgaggaaaaagaaaccgacaacacaaagcccaatcctgtggctccctactggacttcgcctgagaagatggagaagaagctgcatgctgttccggcagccaagacagtaaagttcaagtgtcccagttccgggaccccaaatccgactcttcgctggctgaagaatggcaaggagtttaaacccgaccacaggatcggagggtacaaagtcaggtatgcgacatggtcaattattatggactcagttgttccatccgacaaaggtaactacacctgcatagtggagaatgaatatggatctatcaaccacacgtaccagctggacgtggtggagaggtcccctcatagaccaatcctacaggccgggcttcccgccaataagaccgttgcccttggatctaatgtggagtttatgtgcaaagtctattctgatcctcagccacatatccagtggttgaaacatattgaggtgaatggctccaagatcggtcccgacaatttgccctacgtgcagatcctgaaaactgctggggtaaacacaacagacaaagagatggaggtcctgcacttgcggaacgtctcctttgaagacgctggtgagtatacgtgtttggctgggaatagcattggcctgtctcatcacagtgcttggttaacggttttggaggcattggaagaacggccagcagtcatgacctcacccttatatctggaaatcattatctattgtactggcgcatttctgatatcttgtatggtcgggagcgtcattgtttacaagatgaaatcaggtacgaagaaaagcgattttcatagccagatggccgttcataagctagcaaagtcaattccactgcggcgacaagtgactgtctcagccgattcttctgcaagcatgaactcaggagtgctcttagtgcggccgagtcgcttatcgagtagcggaacccctatgcttgccggtgtgagtgaatatgagttacctgaagatccacgatgggaactcccccgggacagattggtgctcgggaagcccctcggggagggctgctttggacaagtggtgctggccgaggccatcggcctcgacaaagataaaccgaacagagtgactaaagtggccgtgaaaatgctcaaatctgacgcaaccgagaaagatctgtctgaccttatctctgaaatggaaatgatgaaaatgattggcaaacacaagaacataatcaatctgctgggggcttgcacacaggatggtccactgtacgtcattgtggagtacgctagcaagggcaaccttagggagtatctgcaggctagaagaccacctgggttagagtactgctataaccccagccataatccagaggaacagcttagctccaaggacctggtatcatgtgcctaccaggtggcaagaggcatggaatatctggcatctaagaaatgcatccatcgggacttagccgcgcgtaacgtcctcgtgaccgaggacaatgtgatgaaaatagccgattttggccttgcccgtgatatccaccacattgattactataaaaaaacaaccaacggccggctccccgttaagtggatggctcctgaggcgcttttcgataggatctacacccaccagtcagacgtgtggtcattcggcgtgcttctctgggagatcttcaccttgggagggtccccttacccgggcgtcccagtggaggagctttttaaactattgaaggaggggcatagaatggacaaaccatccaattgcaccaatgagctgtatatgatgatgagagattgctggcacgcagtaccctctcagaggccaacctttaaacaactggtcgaagaccttgaccgtatcgtggccctgacttctaaccaggaatatctagacctgtccatgcccctggaccagtactctcctagttttcccgacacacgaagctcaacgtgctcatcaggcgaggacagcgttttcagccatgagccgttgcccgaagagccctgcttaccacggcaccctgcgcagcttgccaatggtggactgaaacggcggtag

SEQ ID NO: 117032 - DNA, 324 bp, synthetic construct
  misc_feature 1..324: note = Description of Artificial Sequence: Synthetic coding sequence
  source 1..324: mol_type = other DNA
atgtggtcttggaaatgtttactattctgggccgtgctggtgactgccaccctatgcaccgcccggccttcccctacccttcctgagcaagcccagccttggggcgcacccgtggaggtcgagagtttcctggtccatccaggggatctgcttcagctgaggtgccggttacgggacgacgtacagtcaatcaactggttgagagacggcgtgcagctcgcagagagtaaccggacccgaatcaccggcgaggaagtcgaagtgcaagatagcgtgcccgccgattccggtctgtatgcctgcgtcacttcttccccttcctag

SEQ ID NO: 117033 - DNA, 2562 bp, synthetic construct
  misc_feature 1..2562: note = Description of Artificial Sequence: Synthetic coding sequence
  source 1..2562: mol_type = other DNA
atggaggctagagtcagtctcaagaggcggatagaactaactgtggaatatccctggagatgtggcgccttgagtcctactagcaactgccgcaccgggatgtggagctggaagtgcctcctcttttgggccgtgcttgtgacagcaactttgtgcaccgccagaccaagccctaccctgcccgaacaagcgcaaccctggggggctcccgtagaggtggaatcattcctagtccaccccggggatctcctgcagttaaggtgtcgactccgagacgatgtgcagagtatcaactggctgcgggacggcgttcaactagccgagtccaacagaacccgcatcactggcgaagaagtcgaggtgcaggatagcgtgcccgcagactctggactttatgcatgtgtcacatcatcgccaagcggctcagacaccacatatttctctgttaacgtatccgatgccctgccttctagtgaagacgatgacgatgacgacgatagctcttccgaggagaaagaaaccgacaatacaaaacccaatcccgtcgctccttactggacatcacctgaaaaaatggagaaaaaactgcatgctgtgcccgcagcaaagaccgtcaagtttaaatgcccttccagtggtacccccaatccaaccctgcggtggctcaaaaacgggaaggagttcaaacccgatcaccgtatcgggggatataaggtgcgctacgcgacatggtcaattattatggacagtgtggttccgtcagacaagggaaattatacgtgcattgtggagaacgagtacgggagtatcaaccatacataccagctggacgtcgtggaaagatcccctcacaggcccatcctccaggccggcctgcccgctaacaagacagtcgcattaggctcgaacgtggaatttatgtgcaaggtctactctgaccctcagcctcacatccagtggttgaagcacatcgaggtcaatggcagtaagattggaccggacaacctcccttatgtacaaattcttaaaactgctggggtcaacacaaccgacaaggaaatggaagttctgcacctgcggaacgtttccttcgaggatgcaggcgagtacacttgcttagcaggcaattctatcggattatcccaccatagtgcctggctaacagtgttggaagctttggaagaacggccagctgtgatgacatcccctctgtacctcgagatcattatatactgcacaggagctttccttatttcttgtatggtgggctccgtcatagtatacaagatgaaaagtggaaccaagaagagcgatttccattcacagatggccgtgcataaattggccaagtccatccccttgcgccgtcaggtgacggtttctgcagattcttccgcctcaatgaatagcggtgtgctgttagtacgcccatcacggctgtcttcttccgggacgccaatgctagccggggtgtctgaatacgagttgcccgaggatcctagatgggagctgcctcgggaccgactggtcctcgggaaacccttaggcgaaggttgtttcgggcaggtagtactcgcggaggccatcggactcgacaaggataaacctaatagggtcacaaaggtggcggttaaaatgctgaagagcgacgccacagagaaggacctctcagatctgatatcagaaatggagatgatgaaaatgattggcaaacacaagaatattataaacctgctaggggcatgtacacaggatggccccctttacgttattgtggagtacgcttcaaaagggaacctgcgtgagtacttgcaagccagacgacctcctggacttgagtactgttacaacccttcccacaacccggaagagcaactgtcttcgaaggacttggtttcttgcgcatatcaggtggctcgcggtatggagtatttggcatccaagaaatgcatccatcgagaccttgctgccaggaacgtactggtgactgaggataacgtgatgaagatcgccgactttggactggctagggacattcatcacatcgattactacaagaaaactaccaatggacgcctgcctgtgaagtggatggcccctgaggcactgtttgaccgcatatatacccaccagtccgatgtctggagtttcggggtgctcctgtgggagatctttactctcggaggctccccctatcctggggtgccggttgaggaactgttcaagcttctgaaggagggtcaccggatggacaagcccagcaactgcacgaatgagctttacatgatgatgcgtgactgctggcatgcggtgcctagccagagacctacatttaaacagctggtggaagacctggacagaatcgtggctctgactagcaatcaagaatacttggacttgagcatgcccctggaccaatactctcctagctttccggacacacggagctccacatgctccagtggcgaggatagcgtcttctctcacgaaccactgccagaagagccctgtctgcctcgacatcccgcccagttggctaatggagggctgaaacggcgctag

SEQ ID NO: 117034 - DNA, 168 bp, synthetic construct
  misc_feature 1..168: note = Description of Artificial Sequence: Synthetic coding sequence
  source 1..168: mol_type = other DNA
atgtggagctggaagtgcctgctgttttgggctgtgttggtcacggccactctctgtaccgcacgaccctcgcctacacttcccgagcaagacgcccttccttcatccgaggacgacgacgacgatgatgatagcagctccgaggagaaagaaactgataatacctag

SEQ ID NO: 117035 - skipped

SEQ ID NO: 117036 - DNA, 2469 bp, synthetic construct
  misc_feature 1..2469: note = Description of Artificial Sequence: Synthetic coding sequence
  source 1..2469: mol_type = other DNA
atgtggagctggaagtgtctgctattctgggccgtgctcgtgactgctacattgtgcacagctcgcccatcgcccaccctgcctgagcaggcccagccgtggggtgccccagtcgaggtagagtcattcctggtccaccccggcgatcttctccagctccgctgccggctgcgtgacgatgtccaaagcattaactggctgagagatggtgtccagctggccgagtcaaaccggaccagaatcaccggggaagaagtggaggttcaggatagcgtccccgcggattccggtctgtatgcgtgtgtgaccagttccccaagcggctctgacactacctacttcagtgtgaatgtatctgacgcgcttccttcttccgaagatgatgacgacgacgatgatagttctagtgaagagaaggagacagacaacactaagcccaatcgcatgcctgtcgccccttattggacttctcccgaaaagatggagaaaaaattgcatgcggtgcccgccgcgaagacagtgaaatttaaatgcccctcaagcgggacaccgaatccaaccctgcggtggcttaaaaatggaaaggaattcaagccagatcacaggatcgggggctataaggtcagatatgccacatggtctatcattatggactcagttgtaccctctgataagggcaattatacatgtatcgtggaaaatgagtacgggtctataaatcatacctaccagctagacgtagtggaacggtctcctcaccgaccaattctgcaagcaggtctgcccgcaaataaaactgttgcactgggtagtaacgtggagtttatgtgcaaggtgtacagcgaccctcagccgcatattcagtggctgaagcacattgaggttaacggcagcaagataggtccagacaatttaccttacgtgcaaatcctgaaaaccgctggtgttaatacaactgacaaggagatggaagtacttcatctgagaaacgtttcttttgaggatgccggtgagtacacttgccttgccggaaactccattggactttcacaccactcagcttggctgaccgtgcttgaggcactggaggagcgtcctgctgtgatgaccagcccgctgtatctggagattatcatctattgtactggtgcttttttaatctcatgtatggtgggttccgtgatcgtctacaagatgaagagcggaacaaagaagagcgacttccatagtcagatggctgtgcacaaactcgccaaatccatacccttaaggagacaggtgacagtcagtgctgactcctctgcttcaatgaattctggcgtgctcctggtcagaccgtccaggctatccagctctgggactcccatgctggcgggcgtaagcgaatatgaactgccagaggacccacgctgggaactccccagggacagactcgtgcttggtaaaccccttggcgagggatgtttcggacaggtcgttctcgcggaagccatcggcctcgacaaggataaacctaatcgggtgaccaaagtggctgttaagatgttgaaatccgacgccacagagaaggacctttccgacttaattagtgagatggaaatgatgaagatgattggcaagcacaaaaacatcatcaatctgctaggggcttgcacccaggacggcccactctatgtcatcgtggagtatgcgtccaaaggcaacttaagggagtaccttcaggcccgcagaccacccggcttagagtattgttacaacccctcgcacaaccctgaagagcaattgtcttcgaaggatctggtgagctgtgcttaccaggtggctcggggcatggaatatctggcttccaaaaagtgcatacatcgggatctggccgcgagaaatgttctggtgactgaggataatgtgatgaagattgctgatttcgggctcgcgcgggacatacatcatatagattattacaagaagaccactaacggccgcctcccagtgaagtggatggcccctgaagcactctttgatagaatatacacccatcaatccgacgtttggagtttcggcgtactactatgggagatctttactctaggcggctcaccctacccaggagtgcccgttgaggagctcttcaaactgctgaaagaaggacaccggatggataagccaagcaattgcaccaacgagctatatatgatgatgcgggactgctggcacgccgtgcccagccagcgcccaaccttcaagcaactggtggaggatttggatagaattgttgcactcacatccaatcaggagtatcttgacctcagtatgcctctggaccagtactccccatcattccccgatactcggagctccacatgttcatcaggtgaggatagcgtgttctctcatgagccattgcccgaagagccttgtttaccacggcatcctgcccagctggcaaatggaggactcaaacgccgttag

SEQ ID NO: 117037 - DNA, 897 bp, synthetic construct
  misc_feature 1..897: note = Description of Artificial Sequence: Synthetic coding sequence
  source 1..897: mol_type = other DNA
atgtggagttggaagtgcctccttttttgggctgttttggtgaccgctacactctgcaccgctcgcccatccccaactctgccagagcaggcccagccatggggcgcaccagttgaagtggagtctttcctcgtgcacccaggtgatctgctccagctgcggtgtcgtttgcgagacgatgtgcagtcaataaattggctgcgtgacggggtgcagcttgctgagtccaatcgtaccagaataactggcgaagaagtggaggtgcaagattcagtccctgccgatagcggtctatatgcctgcgttactagcagcccatcgggctctgacacgacatacttttctgtgaatgtctcagacgccctgccttcatctgaggacgatgacgacgacgacgacagcagtagtgaagagaaagagacagacaacacaaaaccaaacaggatgcccgtggccccctattggaccagcccagaaaagatggaaaaaaaattgcatgcggtgcccgctgctaagaccgtgaaattcaagtgtccgagttcaggcacccctaacccaacactgcggtggcttaaaaatggtaaggaattcaagcccgaccacagaatcggcggatacaaggtacggtatgccacatggtcaataattatggactctgtggtgcccagcgacaaaggtaattatacgtgcatcgtggagaacgagtatgggagtatcaatcatacataccaactggatgtggtcgaaaggtctccgcaccgtcctatcctccaggcgggcctacctgccaacaaaactgtggctctggggtctaatgttgaatttatgtgtaaagtgtacagtgatccacagccacacatccaatggctgaagcacatcgaggtgaatgggtcttag

SEQ ID NO: 117038 - DNA, 438 bp, synthetic construct
  misc_feature 1..438: note = Description of Artificial Sequence: Synthetic coding sequence
  source 1..438: mol_type = other DNA
atgtggtcctggaagtgtttactcttttgggcagtactggtgacagccaccctatgtactgcccggccatcccccaccctcccagagcaggacgccctcccttcctctgaggacgacgacgatgacgatgatagcagcagtgaggaaaaagaaacggacaatacaaaaccgaatccagtggcgccgtattggacaagccctgagaagatggagaaaaaactgcacgcagtgccagcggccaagaccgtgaagttcaagtgtccaagcagtggcacccctaaccccaccctccgatggctgaagaacgggaaagagttcaagcctgaccacagaataggtggttataaagtgagatacgctacctggagcatcattatggattctgtggtgccttctgataaaggaaattatacatgtatcgttgaaaatgagtactag

SEQ ID NO: 117039 - DNA, 429 bp, synthetic construct
  misc_feature 1..429: note = Description of Artificial Sequence: Synthetic coding sequence
  source 1..429: mol_type = other DNA
atgtggagctggaagtgtttgcttttttgggccgtactggtcactgccaccctgtgtactgctcggccttcacctacacttccagaacaggatgccctgccaagcagcgaggacgacgatgacgatgacgatagctcctcagaagagaaagaaaccgataataccaagccaaacaggatgcctgtggccccctattggacaagcccagaaaagatggaaaaaaagctgcatgctgtgcctgccgctaaaaccgtcaaatttaagtgccccagttctggaacccccaatccgaccctgagatggctcaaaaacggcaaagaatttaagccagatcataggattggaggatacaaggtgcggtatgctacttggtccatcattatggacagtgtcgtaccctctgacaagggcaattatacctgcatctag

SEQ ID NO: 117040 - DNA, 258 bp, synthetic construct
  misc_feature 1..258: note = Description of Artificial Sequence: Synthetic coding sequence
  source 1..258: mol_type = other DNA
atgtggtcctggaagtgtctgttgttctgggcggtgttagtgaccgctacattgtgtacagcacgcccatctcctactctgccagagcaagatgcactgccgtcatctgaggatgatgacgacgacgacgactcgagtagcgaagaaaaggaaactgataatacgaagccaaatcctgtcgccccatattggacctccccagagaagatggagaagaaactgcatgccgtccccgccgcaaagaccgtaaagttctag

SEQ ID NO: 117041 - DNA, 2463 bp, synthetic construct
  misc_feature 1..2463: note = Description of Artificial Sequence: Synthetic coding sequence
  source 1..2463: mol_type = other DNA
atgtggtcttggaaatgtcttctgttctgggcggtgctggttacggccacactgtgcacagcaaggccaagtcctacccttcctgagcaggctcagccctggggtgcaccggtggaagttgagtcatttttagtgcacccgggagatctgctccaattgagatgccgcctccgggacgacgtccaatcaattaactggcttagagatggcgttcagctggcagaaagcaaccgtacacgaatcactggcgaagaagtggaggtgcaggattctgtgcctgctgacagcggcctgtacgcttgcgttacatctagcccatccgggagcgacactacgtacttttccgttaacgtctctgatgcactgccatcctccgaagacgatgatgatgatgatgatagcagttcagaagagaaggagactgacaacaccaagcctaacaggatgccggtggcgccgtattggaccagcccagagaagatggagaagaagctccacgctgtgcccgctgcaaaaacggtgaagtttaaatgccccagctccggcacccccaacccaaccctgcggtggctgaaaaacggcaaggaattcaaaccagaccatagaatcggaggatataaggtccgttatgcaacctggtctatcatcatggactcagtagtcccttccgacaaagggaactatacttgcattgtggagaatgaatacggcagcattaatcatacctatcagctggacgtggtggaacgctctccccatcgaccgatcctgcaagctggcctgcctgccaataaaactgttgcactcgggtccaacgttgagttcatgtgtaaggtgtacagcgatcctcagccccacatacagtggctcaaacacattgaagttaatgggagcaagattgggcccgacaatttaccctacgtgcagatcttgaagactgctggtgtgaacactacagataaggagatggaggttctgcacctgcgaaatgtgtcctttgaggatgcaggtgaatacacatgcctcgccggtaattctatcggattatcccatcactcagcatggcttaccgtcttagaggccctggaagagaggccggctgttatgactagtcctctctacctggagattattatttactgcacaggcgcttttctcatcagctgcatggtcggctccgtcattgtctacaagatgaagtctggcaccaagaagtcagatttccattcacaaatggctgtgcacaaactcgccaagtccattccactccgaagacaggtctctgctgatagtagcgcaagcatgaattcaggagtcctcctggtacgcccatcccggctgtcctcaagtggaacccccatgctggctggcgtgtcagagtacgagctgccggaagatcccaggtgggaactcccaagggatcgtctcgtactcgggaaaccccttggcgagggatgctttgggcaggtcgttcttgccgaagccatcggacttgacaaagataagcccaacagggtcacgaaggtggctgtgaagatgttaaagtctgacgcaacagaaaaggatcttagtgacctgatctctgaaatggagatgatgaaaatgatcgggaaacataagaatataataaaccttctcggagcttgcacccaggacggccccctctatgtgattgtggagtatgcctccaaggggaatctccgtgaatacctgcaggcaaggaggcctcctggcctcgaatattgttacaacccctcgcataatcctgaggaacagctcagctctaaggacttagtgtcttgtgcttatcaagtggctagggggatggagtatctggcgagtaagaagtgtatccatcgcgatttagccgccagaaacgtcttggtaaccgaggataatgtaatgaagatagctgactttgggctcgccagagacatccatcacatagattactataagaaaactaccaatggccgcctgcccgttaagtggatggctcccgaagccctctttgaccgcatctatactcaccagtccgacgtgtggagttttggggtgctgctgtgggaaatttttactctgggaggtagtccgtacccaggggttccagttgaggaactgttcaagcttctgaaggagggacatcgtatggacaaaccatccaactgcacaaacgagctgtatatgatgatgagagactgttggcatgctgtgcccagtcagcgcccaaccttcaaacagttggtggaggacttagaccgcatcgttgccctaacaagtaaccaggagtatctggatctgagtatgccccttgatcagtatagtcctagtttccccgatactaggagttctacatgctcctccggggaggacagtgtcttcagccatgagccactgcccgaagaaccctgcctcccacgccatcccgctcagctagcgaacgggggtctcaagcgtcgctag

SEQ ID NO: 117042 - DNA, 2010 bp, synthetic construct
  misc_feature 1..2010: note = Description of Artificial Sequence: Synthetic coding sequence
  source 1..2010: mol_type = other DNA
atggtttcttggggtcggtttatttgcctggtagttgttactatggccaccctgagcctcgctcgtccatcattcagtcttgtggaagacacaaccctcgaacctgaagacgctatctctagcggagacgacgaggacgacaccgatggagcagaggacttcgtcagcgaaaactcaaacaataagcgcgccccttactggactaacaccgaaaagatggagaagagactacacgcagtgccggcggccaacaccgttaagtttcggtgcccagccggaggtaaccccatgcccacgatgcggtggttaaagaacggaaaggaatttaagcaagaacatcgcataggaggctataaggtgagaaatcagcactggagcctgattatggagagcgttgtacctagtgacaaaggcaactatacctgtgtggttgagaatgagtacgggagcatcaaccacacataccacctggacgtggtggaaaggtcgccacataggccaatcctgcaggctggcttgcccgctaacgctagcacggtggtagggggagacgttgaatttgtctgtaaggtgtattccgatgcccaaccacacatccagtggatcaaacatgtcgagaaaaacgggtctaaatacggtcctgatggactgccatacctgaaagtcctgaaggctgcaggtgttaatacaaccgacaaggagatcgaagtgttgtacatccggaacgtaaccttcgaggacgcgggagaatatacatgtttagccggaaactcaataggcattagtttccatagtgcttggctcaccgtactgcccgcccccggtcgggaaaaggaaatcacagccagtccagattaccttgagatagctatctattgcatcggagtattcctcatcgcctgcatggtagtcacagtgatcttgtgtaggatgaaaaatactactaagaagccggacttctcctcacagcctgccgtacataaactgaccaagcggatccctctgagaagacaggtaagcgccgagagctcttcaagcatgaattccaacaccccgttggtgagaatcaccacaagactgtcttccacagcagatactccaatgttagcgggcgtctccgaatacgagcttcccgaggaccccaagtgggagttcccccgggataagctgaccctaggaaagccgctgggtgagggctgctttggtcaggtcgttatggcagaagctgtgggaattgataaggataaaccaaaagaggctgtcactgtggctgtgaagatgctgaaggacgatgccactgagaaagacctcagtgacttggtgagtgagatggagatgatgaaaatgatcgggaagcacaaaaacatcatcaatcttctgggggcctgtacgcaggacggtcccctctacgtgatagtcgaatacgctagtaaaggaaacttgcgggagtacctcagagcacggcggcccccagggatggaatattcatacgacattaacagggtgcctgaagagcaaatgacattcaaagacctggttagctgcacctaccagctcgcccgcgggatggagtatctggcatcccagaagtgtattcatagagatctggcggcacgaaacgtcctcgtgacagaaaacaacgtaatgaaaatcgctgacttcggcctggcgagagatattaacaacatagactattacaagaagacaacaaatggccgtctcccagtaaaatggatggcacccgaggcactgtttgaccgggtgtacacacatcagtcagatgtgtggtcattcggagtgctgatgtgggagattttcaccctcggaggcagtccctaccctggcattcccgtggaagagctgttcaagcttctcaaagagggtcatcgtatggataaacccgcgaattgtacaaacgagctgtacatgatgatgcgagattgttggcacgccgtcccctcccagaggcctactttcaaacagcttgttgaagacttagatagaatatag

SEQ ID NO: 117043 - DNA, 2460 bp, synthetic construct
  misc_feature 1..2460: note = Description of Artificial Sequence: Synthetic coding sequence
  source 1..2460: mol_type = other DNA
atggtgtcttggggtagatttatctgcctcgtggttgttacaatggccacactgagcctggcgaggccatcattcagcctcgtggaagacactacgcttgagcccgaagagcctcctacgaaatatcagatctctcaacctgaggtctacgtggccgctcccggagagtctttggaagttaggtgtctcctgaaagatgccgctgttatttcctggaccaaggatggggttcatcttggtccaaacaaccggacggttctcattggggagtatctccaaattaaaggcgcgacgcccagggacagtgggttatatgcctgtacagcttcaaggaccgtggatagcgagacatggtacttcatggtgaatgtgaccgacgccatcagttcgggcgacgatgaggacgacaccgatggcgccgaagattttgtgtctgagaattcaaacaacaagagggccccatattggaccaatacagagaagatggagaagcgactccacgccgtcccagccgccaacacagtgaaatttaggtgtcccgccggggggaatcccatgccgaccatgagatggctaaaaaatggcaaggagtttaaacaagaacaccggattggagggtataaggtccgtaaccagcattggtccctgatcatggaaagcgttgtccctagcgacaaggggaattacacgtgcgtggtagagaacgaatacggtagcataaaccacacataccatcttgatgtcgtggagagaagtccgcatagacctatcttgcaggctgggctgcctgccaacgcatcgaccgtcgtcgggggcgatgtggagtttgtgtgtaaggtttactctgacgcgcaaccccacattcagtggataaaacatgtcgaaaagaatggttccaagtatggtcctgacggcctcccatacctgaaggtccttaaggccgccggcgtcaacaccacagacaaggaaattgaagtcctctatattaggaacgtgacttttgaggacgcaggcgagtacacttgtctggccggaaactcgattggcattagcttccactctgcctggcttacagtgctgcctgcgcctggccgcgagaaagaaatcaccgcttctcccgattacctggagatcgcgatctactgcatcggagtctttcttatcgcatgcatggttgtcacagttattctctgtaggatgaagaatactacaaaaaaacccgacttttcctctcagcccgcggtacacaaactcaccaagaggatcccactccggaggcaggtatccgccgagagctcttcttccatgaacagtaacacaccgctggtcaggattaccaccaggctgtcatctacggccgatacacccatgttggctggggttagcgagtatgagctgccggaagatccgaaatgggagtttccccgagataaacttaccttaggaaaaccccttggagagggatgttttggacaggttgtgatggctgaggctgtcggaatagacaaggacaaaccgaaagaggctgtgactgtcgcagtcaaaatgctgaaagacgacgcaacagaaaaggacctgagcgatctcgtctccgaaatggaaatgatgaaaatgataggaaagcacaaaaatatcatcaacctgcttggagcttgcacccaagatgggcctctctatgtgatcgttgaatatgcgtccaaaggcaatttgcgggaatatttgcgcgcgcgaaggccaccagggatggagtattcatatgatatcaatcgcgtcccagaagagcagatgacttttaaggacctagtatcttgtacctatcagcttgcccggggaatggaatacctggccagtcagaagtgcatacaccgggacctggccgcccgaaacgtgctggtcacagagaacaacgttatgaagatcgcggatttcggcctggccagggatataaataacatcgactattataagaagacgaccaacgggcggcttcccgtaaagtggatggcccccgaggctcttttcgaccgggtctatactcaccaatcagacgtgtggtcttttggagttctgatgtgggaaattttcacccttggtggctcaccttaccctggaatacctgttgaagaattgtttaaactgctgaaagaaggacaccgcatggacaagccggcaaactgcactaatgaactctatatgatgatgcgggattgctggcacgccgtgcccagccagagacccacatttaaacagctggtggaagatctggataggattttgaccctcactaccaacgaggagtacctggatttaagccagcctctggaacaatattccccctcataccccgatacaagatctagctgctcttccggagacgacagtgtgttctctccagaccctatgccttacgaaccctgtctgccacagtatcctcacattaatggcagcgttaaaacatag

SEQ ID NO: 117044 - DNA, 2358 bp, synthetic construct
  misc_feature 1..2358: note = Description of Artificial Sequence: Synthetic coding sequence
  source 1..2358: mol_type = other DNA
atggttagttggggtcggtttatatgtctggtcgtagttacaatggctaccctctccctggcaagacccagtttctccctcgtagaagataccacgctggagcccgaagagccacccactaagtatcagataagtcaaccagaggtctacgtcgctgcccctggagaaagcctcgaagttaggtgtctgctgaaagatgcggccgtgatcagctggactaaagacggcgtccatctgggtccaaataacagaaccgtgcttatcggagagtaccttcagatcaagggggccacgccgcgcgactctggtctgtatgcttgcacggcttcaaggacagtcgacagcgagacctggtatttcatggtaaacgtcaccgatgccatcagctcgggagatgatgaagatgacacagatggcgccgaagactttgtctccgagaattctaacaacaaacgtgcaccttactggaccaataccgagaagatggaaaaaaggctccacgctgtccccgcggctaacacagtcaagtttagatgccccgccgggggtaatccaatgcctacaatgaggtggttgaagaatgggaaggagttcaagcaggagcaccgcatcggcggctacaaggtccgcaaccagcattggtccttgatcatggagtccgtggtgccatctgacaaaggcaattacacctgtgtggtagagaacgagtatgggagtatcaatcacacatatcatctggatgtggtggagcggtctccccaccgcccaattctccaggccggactgccagccaacgcttccaccgttgtcggcggggacgttgaatttgtatgtaaagtctactcggacgcccagccccacattcaatggatcaagcacgtcgagaaaaacgggagtaagtacggcccagatggcctgccataccttaaagtattgaaagcggcaggagttaatactactgataaggagatcgaagtcctgtacattcggaacgtgacctttgaggacgccggcgagtatacttgtctggctggcaattccattggtatcagcttccattctgcttggctgacagtgctaccagcaccgggtcgagagaaggagatcacagcgtctcccgactacctggaaatcgccatttattgtataggagtctttttgattgcctgcatggttgtgactgtaatcctctgtaggatgaagaacaccacgaaaaaaccggactttagctcccagcctgccgtgcataaactgaccaaaagaataccactgcggaggcaggtctcagccgagtccagctcttctatgaattccaatactcccctggtgcgaatcactacgcgcctttcctcaaccgcggacaccccaatgcttgccggcgtgtccgaatacgagctccctgaggatccgaagtgggaattccctcgggacaaattgaccctggggaaacctttgggagaagggtgtttcggccaggtggtgatggctgaggctgtgggcatcgacaaagacaaacccaaggaggctgtaaccgtagcggtgaagatgctgaaagacgacgccaccgagaaagacctgtcagacctggtgagcgagatggagatgatgaaaatgattggaaagcacaagaatatcattaacctgctgggtgcttgtacacaggacgggccactttatgttatcgtggagtacgcaagtaagggtaatcttagagagtatctgagggctcgccgccccccagggatggaatactcctacgacattaatcgggtgcccgaagaacagatgactttcaaagacctcgtttcatgcacataccagctcgcaaggggaatggaatacctggcgtcgcagaagtgtattcatagggacctggccgcccggaacgtcttggtcacagaaaacaatgtcatgaagattgccgacttcggcctggctagagatatcaacaacatcgactactacaagaagacaacgaacggacggcttccagtcaaatggatggcccccgaggctctgttcgacagagtgtacacccaccagagcgatgtgtggagttttggtgtcctcatgtgggaaatattcacgttgggaggtagtccgtaccctggcattcccgtagaagagttgtttaagctgctgaaagaaggccaccgcatggacaaacctgctaattgcaccaacgagctgtacatgatgatgcgtgactgttggcatgccgttccctctcagcgccccaccttcaagcaacttgtagaagacctcgatcgaattcttacgctgaccaccaacgaggagtatttagacctctctcagccgctggagccctatagcccctgctacccggatcctcggtag

SEQ ID NO: 117045 - DNA, 2115 bp, synthetic construct
  misc_feature 1..2115: note = Description of Artificial Sequence: Synthetic coding sequence
  source 1..2115: mol_type = other DNA
atggttagctggggacgcttcatttgcctagtggtagtgactatggccactttgagtctggctcgaccatctttcagtctggtagaggacacaacactggagcccgaaggcgctccgtactggacaaacacagaaaaaatggagaaaagactgcacgccgtgccagccgcaaacactgtgaagtttaggtgtcccgcaggaggtaacccgatgccaaccatgcggtggctgaaaaacggaaaagagttcaagcaagagcacagaatcggcggctataaggttcgtaaccagcattggagccttatcatggaatccgtcgtgccgtcggacaagggtaactacacctgcgtggtagagaatgagtatgggtccatcaaccatacctaccatctcgacgtggtggaaagatctccccatcgcccgatcctgcaggccggtctcccagctaatgcttctaccgtggttggaggtgatgtggagttcgtctgcaaggtgtacagcgatgcgcagccacatattcagtggattaaacatgtcgagaagaacggtagtaagtacggtcctgatgggctgccctacctaaaggtgctcaaagctgccggggtcaacacaaccgacaaagagattgaggtgctgtacatccgcaacgtaacctttgaggacgcaggcgagtacacctgcctagccggtaattcaatcggaatttctttccatagtgcttggctgactgtcctcccggcccccggccgcgagaaggagataacggcctcacctgattatctggagatcgctatctactgtatcggagtcttcctgatcgcttgcatggtggttaccgtgattttgtgtagaatgaaaaacacaacgaagaaaccagatttttcaagtcagccagccgtgcataagctgaccaaaagaattccactccgcaggcaggtgagcgccgaaagctcaagctctatgaactctaacactccacttgtgagaattacaacccggctttccagtacagctgacactccgatgctcgctggggttagtgagtacgagctccctgaggaccccaaatgggagttcccccgggacaaactgactcttgggaagcctttgggggagggttgtttcggtcaagtggtcatggcagaggccgtcggaattgacaaggacaagcccaaagaggcagtcacagttgccgtaaaaatgctgaaggatgacgcgactgaaaaggatctgtcggacctagtgagtgagatggaaatgatgaaaatgatcggcaagcacaaaaacattattaatctgttaggggcctgcacacaggatggaccactgtatgtcattgtcgagtacgcctccaagggcaatttgcgagaatatttacgagccagacgcccacccggcatggaatattcatacgacattaaccgggtccccgaggaacagatgacttttaaagacctggtaagctgcacataccagcttgcccggggcatggagtatcttgcgagccagaagtgtatccatcgcgatttggccgctcgtaatgtgttggttaccgaaaataatgtgatgaagatcgctgattttggattggctcgggatatcaataacatcgactattacaaaaagacaacgaatggacgtctgcccgtaaagtggatggcaccagaagccctttttgatagagtctacactcaccagtcggatgtgtggagttttggcgtccttatgtgggagatatttaccttgggaggcagtccttaccctggcatcccagtggaggagctgtttaaattgttgaaagaggggcaccgcatggataaacctgctaactgcactaatgaactgtacatgatgatgagagactgttggcacgcagtgccctctcagaggccaacatttaagcagctcgtggaagacttggacaggatactgaccctcaccactaatgaggagtacctcgatctttctcagcctctggagcagtacagtcctagttatcccgacactcgtagcagctgttcaagcggcgacgacagtgtattcagccctgaccccatgccatacgagccctgtttgccccagtaccctcatattaacggcagtgtgaagacgtag

SEQ ID NO: 117046 - DNA, 2124 bp, synthetic construct
  misc_feature 1..2124: note = Description of Artificial Sequence: Synthetic coding sequence
  source 1..2124: mol_type = other DNA
atggtatcttggggacggttcatctgcctcgtcgtggttacaatggcgaccctatccctcgctcgaccttccttctcccttgtggaagatacgaccttagagccggaggacgccatctcgtctggagacgacgaagatgacaccgacggagcagaggacttcgtgtctgagaatagcaacaacaagagggctccgtattggaccaatacggaaaagatggaaaaaaggctccacgcggtccccgccgcaaataccgtgaaatttaggtgccccgctggcggtaatccaatgcccactatgaggtggctgaaaaatggaaaggaatttaaacaggagcaccggatcggtggatataaggtgagaaaccagcactggagcctgatcatggagtcggtcgttccctctgataaaggtaattatacatgtgtggttgaaaacgaatacggcagtattaaccatacttatcaccttgatgtagttgaaaggtctccacaccggccaatattgcaagccggtttaccggccaacgcgtcaaccgtcgtcggtggtgacgtggagttcgtttgtaaggtctattccgacgcgcagcctcacatccagtggattaaacacgtcgagaaaaatggttcaaaatatggaccagatggactcccgtatcttaaagtcctgaaagccgccggagtaaacaccaccgacaaggagatagaggttctctacatccgcaatgtgacttttgaggacgcaggggagtatacatgtttagcgggtaacagcataggaatctcctttcactccgcatggctcactgtgttacctgcccctggaagagagaaggagatcactgccagtcctgactacttagagattgctatctactgtataggggtctttttgatcgcatgcatggtagtaactgtgatcttgtgtaggatgaaaaacactacgaaaaaaccagacttttccagtcagcctgccgtgcacaagctcaccaaaaggattccactgcgtcgccaggtgacagtgtcagctgaaagttcctcaagtatgaactcaaacacgccgcttgttaggatcacaacacggctgtctagtacagcggacacccctatgttagcaggcgtcagcgagtacgaattacccgaggaccccaagtgggaattccctagagataaactgaccctgggaaaacctctcggggaagggtgttttggacaggtggttatggcggaagctgtgggtattgacaaagataaaccaaaggaagctgttacggtcgcagtgaaaatgctaaaagacgacgcgactgagaaggatttgtctgatttagtgtccgaaatggaaatgatgaaaatgatcggaaaacacaaaaatattataaatctcctgggggcttgcacccaggacggaccactctatgtgatcgtagagtacgcttctaaaggtaatttacgtgagtatcttagagcgcgcaggccccctggtatggagtacagctacgacattaacagggtgccggaggaacagatgaccttcaaagatctggtgtcatgcacatatcaacttgcaagggggatggaatatctggcgtctcagaaatgtatacacagggaccttgccgctagaaacgtgctggtgacagaaaacaacgtcatgaaaatcgctgatttcggccttgctagagatataaataacatcgattactataagaaaactaccaacggacggcttcctgtgaaatggatggcacccgaggccctttttgaccgtgtctatacccaccaatctgatgtgtggagcttcggcgtgcttatgtgggagatcttcaccctgggcggttctccataccccggtatacccgtggaagagctctttaagctgctaaaggagggccaccggatggacaagcctgctaactgtacaaacgaactctacatgatgatgagggattgctggcacgccgtcccaagccagagacctacttttaaacagctggttgaagacctggatcgcattcttactctgaccaccaacgaagaagagaagaaggtgagtggggctgtcgattgccacaaaccaccctgcaacccatcccacctgccatgtgtgttggctgtggaccaatag

SEQ ID NO: 117047 - DNA, 2466 bp, synthetic construct
  misc_feature 1..2466: note = Description of Artificial Sequence: Synthetic coding sequence
  source 1..2466: mol_type = other DNA
atggtgtcctgggggaggttcatctgcctggtagtagtgaccatggcaactctgagccttgccagaccatcattctccctagtagaggacactaccttggagcctgaggaaccacctaccaaatatcagatttcgcaacccgaagtctatgttgcagctccaggagaaagcttggaggtccgatgtttgcttaaggacgcagccgtgattagctggaccaaggacggtgtgcatctcggtccaaacaaccgcacagtattaattggcgagtacctgcaaataaagggagccacaccccgagacagcggcctgtacgcatgcactgcgtccagaactgttgacagcgagacctggtacttcatggtgaacgtgacggacgcaatcagttcaggtgatgatgaagacgacactgatggcgccgaagactttgttagcgaaaatagcaacaacaaaagggccccatattggactaatacagagaagatggaaaagagacttcacgctgtgcccgcagccaataccgtcaagtttcgttgcccagcagggggtaaccccatgcctactatgcgctggctcaaaaatggaaaagagttcaagcaggagcataggataggtggctacaaggtgcgcaaccagcactggtctctgataatggagagcgtggtaccctctgataagggcaactacacttgtgtcgtcgaaaatgagtatgggagtatcaatcacacatatcatctagatgtggttgagcgtagtccgcatcgccccatccttcaagccgggctcccagcaaatgcatctacagtggtggggggtgacgtcgagttcgtgtgtaaggtgtattcagacgcccagccacacatccagtggatcaaacatgtggagaagaacggcagtaagtacggaccagatgggctcccgtacctcaaggtgctgaaggccgctggggtcaacacaacagacaaagagatagaagtactgtatattagaaatgtcacatttgaagacgcaggcgagtacacctgcctggccggcaacagcattggaatctcgttccactctgcgtggctcaccgtccttcccgctccaggccgggagaaggaaattaccgcttctcccgactatctcgaaatcgccatatattgtattggtgtgttcctgatcgcctgcatggtggtgacagtcatcctgtgcagaatgaagaataccaccaaaaaaccagatttcagcagccagcccgcagttcacaagcttaccaagcggatacctttgcgccgccaagtgaccgtttcagctgaatccagcagctccatgaactctaatacaccattagtgcgaataactacaagactctcttccactgcagatacacccatgttagcgggcgtctcggaatacgagctgccggaggatcctaagtgggagttcccacgcgataaactgacgttaggtaagccactcggggagggatgcttcggtcaggtggtgatggctgaggctgtcggcatcgacaaagacaagcccaaagaggccgtgacagtggccgtaaagatgctcaaagatgatgccactgagaaggacctgagtgaccttgtctcggagatggagatgatgaagatgattgggaaacacaaaaatatcatcaatcttctgggagcgtgtacacaggacggacccctgtacgtaatagtggagtacgccagcaaaggcaacctgcgggagtaccttcgtgcccggaggcctcccggcatggagtattcgtacgatatcaacagggtgcctgaggagcaaatgacttttaaagacctcgtctcctgtacttaccagctggccaggggtatggagtacctcgcctcccaaaaatgtatacacagggacctggcggcgagaaatgtgctggtcacagagaataacgttatgaaaattgcggactttggactggctcgggatattaataacattgattattacaaaaagacaacaaacggaaggcttcccgtaaagtggatggctcctgaggcactgttcgaccgggtgtacacccaccagtccgatgtgtggtcgtttggggttctgatgtgggagatcttcaccctgggcggttccccctatcccggaattcctgtggaggagctgttcaaactactaaaagaaggacacagaatggacaagccagccaattgcaccaatgagctgtatatgatgatgcgcgactgttggcacgctgttccatcccagagaccgacgtttaaacaattggtggaagacctggaccggatcctgactctcacaaccaatgaagagtacctggatctgtctcagccgcttgagcagtattctccaagctaccctgatacccggagtagctgttcttcaggtgatgactccgtcttttctccagaccccatgccctacgagccatgtctgcctcaatacccccatatcaatggctcagtcaagacttag

SEQ ID NO: 117048 - DNA, 765 bp, synthetic construct
  misc_feature 1..765: note = Description of Artificial Sequence: Synthetic coding sequence
  source 1..765: mol_type = other DNA
atggtatcgtggggccgttttatctgcctcgtggtcgttacaatggcaacattatctttggctagaccttcctttagtctggttgaggacactacactggaacccgaggagccacccacaaaatatcagattagccagcccgaggtgtatgtagccgcgcccggagaatctctggaggtgcgttgtctgctcaaggatgccgctgtgatatcttggaccaaagacggcgtgcacttgggccctaacaaccggacagtgcttataggagagtatctgcagatcaaaggtgccacccctagagactccggcctgtatgcatgcacagcctctcggaccgtcgactcagaaacatggtattttatggttaacgtaacagacgcgataagctctggagacgacgaagacgacacagacggcgccgaagatttcgtttccgaaaactccaacaataagagagctccctactggacaaataccgaaaaaatggagaaacgtctacacgccgtcccggctgccaatacagtcaagttcaggtgccctgctggggggaatccaatgcccacaatgcgttggctgaagaatggaaaggagttcaagcaggaacaccgtataggcgggtacaaagttagaaaccaacattggtccttgataatggagtccgtggtgccctccgataagggtaattacacctgcgtggtcgagaatgagtacggttctatcaaccacacctatcacctggatgtggtggggtcacaaggcctttag

SEQ ID NO: 117049 - DNA, 2043 bp, synthetic construct
  misc_feature 1..2043: note = Description of Artificial Sequence: Synthetic coding sequence
  source 1..2043: mol_type = other DNA
atggtgagttggggccgatttatatgcctcgtggtagtcacaatggctaccctgagtttggcaagaccatctttcagcctggtggaggataccacactggaacccgaggatgctatatcatctggtgacgacgaggatgataccgacggtgctgaagatttcgtctcggaaaatagtaataacaaacgcgccccttattggacaaatactgagaagatggaaaagcgcctccacgcagtccctgctgctaacacagtgaaattccgatgtcctgcaggggggaatcccatgccgaccatgaggtggctgaaaaatggtaaggaattcaaacaagagcaccgcatcggcgggtacaaggtgcgcaaccaacactggagccttataatggagagtgtagtccccagtgacaagggcaattatacctgcgtagtggaaaatgagtacggcagcattaaccacacttatcacctggatgtcgtggagcggtccccgcaccgccctattctgcaagctggacttcctgccaatgcttctaccgtggtggggggtgacgttgagtttgtatgtaaggtgtactccgatgcacagccccacatacaatggatcaaacacgtggaaaaaaacggtagcaagtatggaccagacggactaccttacctcaaggtcctgaagcacagtggcattaattcttccaacgctgaagttcttgccctgttcaacgtgaccgaggcagacgcaggcgaatatatatgcaaagtatcgaactatattggccaagccaatcagagcgcttggttgaccgtgctccccaagcagcaggcacctggacgagaaaaggaaatcacggcctctcccgattatctcgaaatagctatttactgtatcggtgtctttcttattgcttgcatggtggtgactgtgatcctgtgcaggatgaaaaacaccactaaaaaaccagacttttctagtcaacctgcagttcataagttgacaaagcggatccctctaagaaggcaagtcaccgtctccgccgagagtagctcttccatgaatagtaatactcccctggtccgcatcactaccaggctgagttccacggctgacactccaatgttagcgggagtaagtgaatacgagctgccggaggaccccaaatgggagttcccaagagacaaactgactttaggcaagccactaggtgagggctgtttcggccaggtcgttatggctgaggccgtggggatcgataaagacaagcccaaagaagcggttactgtcgctgtcaagatgctgaaggatgatgctactgaaaaagacttgtcagatctggtttcagagatggagatgatgaagatgatcggaaaacacaaaaatatcataaatttgttgggcgcctgtactcaggatggtccattgtatgtgattgttgagtacgccagtaagggtaacctgagggaatacctgagggccagacgtcctcccggcatggagtacagctatgatatcaaccgcgtgccagaggagcagatgacctttaaagacctagtttcttgcacgtaccagctcgccagagggatggagtatcttgcgtcccaaaaatgtatccatcgggatcttgccgcacgaaacgtgttggtcactgaaaataacgtgatgaagattgccgattttgggctggcgcgtgacatcaacaacatcgattattacaagaagacaaccaatgggagactccccgttaagtggatggccccagaggccctgttcgaccgggtgtatactcaccagagtgatgtctggagttttggcgttctgatgtgggagatcttcacactcggtggcagcccttatccgggaatcccagtggaggaactgtttaagctgttgaaagagggccatagaatggacaagccggcgaactgtaccaacgagctgtatatgatgatgcgggactgctggcacgctgtgccctctcaacgccctacttttaaacagctggttgaagacctcgaccggattctgacattgaccacgaacgagatctag

SEQ ID NO: 117050 - DNA, 2310 bp, synthetic construct
  misc_feature 1..2310: note = Description of Artificial Sequence: Synthetic coding sequence
  source 1..2310: mol_type = other DNA
atggtttcgtggggacggttcatttgcctcgtagtcgttaccatggccaccctctctctagccaggccgtcattcagtctcgtggaggataccacactcgaaccagaggagccacccaccaaataccaaataagtcagccagaggtgtatgtcgccgcccccggtgaatcactggaggtgaggtgtctgctgaaggacgctgcagtaatcagttggactaaggatggcgttcatttagggcccaataaccgcacagtactgatcggagaataccttcagattaagggtgccacgccaagggatagcggtctctacgcctgcactgccagcaggactgtagatagcgagacatggtattttatggtgaatgtgaccgacgccatctcctctggcgacgacgaagacgatacagatggcgcagaggactttgtgtccgagaacagcaacaacaagagagcaccttactggactaacaccgagaagatggagaagcggctgcacgctgtcccagccgctaataccgtgaagtttaggtgtccagctggaggcaatcccatgccaacaatgcgatggctgaagaacgggaaggaatttaagcaggaacacaggataggtggctacaaagttcggaaccaacactggtcactgatcatggagagcgtagttccaagcgataaagggaattacacatgtgtagtggaaaacgaatacggctccatcaatcacacttaccacctggacgtggtcgaaagatcaccacacaggccaatcctccaggccgggctgccagctaatgcttcaactgtggttggcggggacgtggagtttgtgtgtaaggtgtatagtgacgctcaaccacacattcagtggattaagcacgtagagaaaaacggctctaagtacggacccgatggcctcccctatttaaaagtgcttaaacactccggaattaactcaagtaatgccgaagttcttgcccttttcaacgttaccgaagctgatgccggggaatacatttgtaaggtcagcaattacataggacaagcgaaccaatctgcctggttgactgtgttacccaagcagcaggcgcctggacgagaaaaagagattaccgcatctccggattacctggaaatcgcaatttactgcatcggcgtctttctcatagcctgcatggtagtgaccgtcattctgtgtagaatgaagaacacaaccaagaagcctgacttctcttcccaacctgctgtgcataagctgaccaagcgcattcctttgcgaaggcaggtgacggtgtctgcagaaagcagcagctcaatgaattcaaacacacccctggtccgaattacaacaagattgagcagcaccgctgatacccctatgttagcaggagtgtctgagtatgagctgccagaggacccaaaatgggagtttccaagagacaagttgaccttaggaaagcctctgggtgaagggtgcttcggtcaggtcgtcatggcggaagccgtagggatcgacaaagataagcctaaagaggctgtgactgtggccgtcaagatgctcaaagatgatgcgacggaaaaggatctcagcgatttggtttctgaaatggagatgatgaagatgataggtaaacacaagaatatcattaatcttctgggggcttgcacccaggacggtcctctctatgtgatagtggagtacgccagtaagggcaacctgagagaatacctgcgggcccgtcgccccccaggtatggaatatagttatgacattaaccgcgttcccgaagaacaaatgacattcaaagacctggtgagttgtacataccagcttgcccgcgggatggagtacctggcatcccagaaatgcatccacagagacctcgcagcacgtaacgttctggtaaccgagaataacgttatgaagatcgccgacttcggcctggccagggatataaacaatatcgactactataagaaaaccactaacggcagactgccagtgaagtggatggcccctgaggcccttttcgatcgtgtctatactcatcaaagcgacgtgtggtccttcggggttttaatgtgggagatctttactctcggaggcagcccttacccaggaattcccgtggaagagctctttaagctgttaaaagagggacaccgaatggataagcccgcaaattgcaccaacgagctctacatgatgatgcgagattgctggcacgcggtgccttcacagagacctaccttcaagcagcttgttgaagacctggatcggatccttaccctgacaacaaatgagatctag

SEQ ID NO: 117051 - DNA, 2307 bp, synthetic construct
  misc_feature 1..2307: note = Description of Artificial Sequence: Synthetic coding sequence
  source 1..2307: mol_type = other DNA
atggtgagctggggccgttttatatgcctcgtagtggtcactatggccaccctgagcttggctcgcccttccttttcgctggtggaagataccacattagaacccgaggaaccgccgacaaagtatcagatatcacagcccgaggtgtatgtcgccgccccaggcgaatccctcgaagtacgctgtctcctgaaggacgcagctgtcataagctggaccaaagatggggtgcacttaggtcctaacaacaggaccgtgttaatcggagagtatctgcagattaaaggtgcaacacccagagatagtggactgtatgcctgtacagccagccgaacggttgattccgagacttggtatttcatggtaaacgtgaccgacgctatctcttcgggggacgacgaggatgacaccgacggcgctgaagacttcgtttctgagaacagcaataacaaaagagcgccctattggactaatactgagaagatggagaaacgattgcacgccgtcccggctgcaaacacagtgaagttccgttgccctgcaggcgggaatcctatgcctaccatgagatggcttaaaaacgggaaggaattcaaacaggagcatcggattgggggatataaagtacgaaaccagcactggagtctcattatggagtccgtggtcccctctgataagggaaattacacctgcgttgtagagaatgagtacggaagcattaatcacacataccacctcgacgtcgtggagaggtctccccaccgcccaatcctgcaagctggattgccagctaatgcttcaaccgtggtcggtggagacgttgaatttgtctgcaaggtttatagcgatgcacagcctcacattcagtggattaagcacgtggaaaaaaacgggagtaaatacggccccgacggcctgccatatttaaaagtgctgaaacatagcggcattaattctagtaatgccgaagtcctggcactgtttaacgtaaccgaggccgacgccggagagtatatttgcaaggtcagcaactatatagggcaagctaaccaaagcgcatggttgacagtcctccctaaacaacaggctcccggtagggagaaagaaattaccgccagtcctgattacctagaaattgctatttattgtattggtgtgttcctgatcgcttgtatggttgttactgtgatcctctgccgcatgaaaaatacgacgaagaagcctgattttagcagccaaccagctgtgcacaagttgaccaagcgaatacctcttcgacgccaggtgaccgtatctgcggagtcctcatcctccatgaatagcaacacaccgctggtgcgaattacgacacgcttatcatcgactgccgatacccctatgctcgcaggggtgagcgaatatgaattgcccgaagacccgaaatgggagtttccccgggataagctgacactgggcaaaccacttggggagggctgctttgggcaggtggtcatggctgaggcggttggcattgataaagataaacctaaagaggcggttactgtcgcagtgaaaatgctgaaagacgatgcaactgagaaggacttgagcgatctggtgtccgagatggagatgatgaaaatgatcggaaagcacaaaaacattatcaatctgttgggggcatgtacccaggacgggcctctgtatgtcatcgtcgaatacgcttcaaagggtaacctgcgagagtatttgcgcgctcgacgccctcctgggatggagtactcttatgatatcaatcgcgtgcctgaggagcagatgaccttcaaggacctggttagctgtacttatcaacttgcgcgagggatggaatatctggcaagtcagaagtgtatacatcgggacttggcagcaagaaatgtactggtaaccgagaataacgttatgaagattgcagatttcggcctggccagggacatcaacaacatcgactactacaagaagacaacaaatggccgcctgcctgttaaatggatggcacccgaggccctcttcgacagggtttacacacatcaaagtgatgtgtggagtttcggcgtactgatgtgggagatttttactctggggggctcaccttacccggggataccagtggaggagctctttaaattgctaaaagaaggccaccgaatggataagcccgctaactgtactaacgagctatatatgatgatgagagactgttggcatgcggtgccctcacaacgccctacatttaaacagttggttgaagatctagatcggatcctcacgctaacgaccaatgagtag

SEQ ID NO: 117052 - DNA, 2124 bp, synthetic construct
  misc_feature 1..2124: note = Description of Artificial Sequence: Synthetic coding sequence
  source 1..2124: mol_type = other DNA
atggtatcttggggacgcttcatctgtctggttgttgttactatggcgacgctatccctggccaggccaagcttcagcttggtggaggacactaccctggaacccgagggcgccccttactggacaaacactgaaaagatggagaaacggttgcacgccgtccctgcagccaatactgttaagttcaggtgtcccgcaggagggaatccgatgcccacaatgcggtggctcaaaaacggtaaggagttcaagcaagagcaccgaatcggcggatacaaggtgcgcaatcagcattggtccctaatcatggagtcagtggtcccaagcgataagggcaactatacctgtgtggtcgagaatgagtacggatccattaaccatacttaccaccttgacgtagttgaaaggtccccccaccgccccattctgcaggccgggttgcccgccaacgcttccaccgtcgtcgggggcgacgtagagttcgtatgcaaagtgtacagcgatgcacagccccatatccagtggatcaaacacgtggagaagaatggaagcaaatacggccctgatggcctgccatacctgaaggtactaaagcacagcggcattaactccagcaacgcggaagtactcgcactctttaatgtcactgaggccgacgcaggagaatatatctgcaaggtaagcaactacatcggacaggcaaaccagtccgcctggctcacagtgctgcccaagcagcaagcgcccgggcgggagaaggagatcacagctagtccagattatctggaaattgctatttactgcattggcgtctttctgattgcttgcatggtcgtgacagtcatactgtgccgcatgaaaaataccacaaagaagccagacttctcaagtcagccagcagttcacaagctcaccaaaaggattcccttgaggagacaggtcactgtctctgccgaatccagttcttctatgaattctaatacaccccttgtcaggatcactacaagactaagttccactgcagacacccccatgctggctggtgtctctgaatatgagctgcctgaagatcccaagtgggaatttcctcgagataaacttaccttgggtaagcccctaggagaaggatgcttcggccaggttgtaatggccgaggccgttggaattgataaagacaaaccgaaggaggccgtgaccgttgccgtgaaaatgttgaaggacgacgctacggagaaggatctctcagatctggtgtcggagatggaaatgatgaagatgatcggcaagcacaagaacatcataaatctgttgggagcctgtacacaggatggccccctatacgtgatcgtggaatatgcttcaaaagggaacttacgagagtaccttagggcaaggcggccgcccggcatggagtattcatacgacataaatagagtgcccgaggaacagatgacctttaaggatctcgtctcatgtacataccaactcgcaagagggatggagtaccttgcttctcaaaagtgtatccatcgcgatctggccgccaggaatgtactcgttacggagaataacgtcatgaaaatcgccgatttcgggctcgcaagagacatcaacaacattgattactataaaaagactaccaatggacgcctcccagtcaaatggatggctcccgaagcgctgtttgaccgtgtgtatacacaccagtcagacgtctggtcatttggggtgctgatgtgggaaattttcactctcggcggatctccatatcccggcatcccagtggaagagctgtttaagctgcttaaagagggacaccgaatggataagcctgctaactgcacgaacgaactgtacatgatgatgcgagactgttggcacgccgtgccaagccagagacccactttcaagcagttggttgaagacctagaccgcattttgaccctgacaactaacgaggagtatttagatctaagtcaacctttggaacagtattctccttcctaccccgacactaggtcgtcctgctcaagcggagacgactcggtgttctcccccgacccaatgccctatgagccctgcctgccccagtatccgcacatcaacgggagtgtgaagacctag

SEQ ID NO: 117053 - DNA, 2118 bp, synthetic construct
  misc_feature 1..2118: note = Description of Artificial Sequence: Synthetic coding sequence
  source 1..2118: mol_type = other DNA
atggtttcttggggaaggttcatttgtctggtcgtggttacaatggctacactgtctttggcacgaccttccttctctctcgtggaggataccactctggagcctgaagagcctcctacaaagtatcagatttctcagcctgaggtctacgtggccgcccctggcgagtctctcgaggtcaggtgcctcctgaaggacgccgccgtgatctcatggactaaggatggtgttcacttaggccctaataacagaaccgtcttgatcggggagtacctgcaaatcaagggggccacaccccgcgactccggcctctacgcttgtacagcgtcgaggacagtcgacagcgaaacctggtacttcatggttaacgtcacggatgcaatatcgagcggcgatgatgaggatgataccgacggggcagaagactttgtgtctgaaaattccaacaacaaacgggccccttactggaccaacactgaaaaaatggaaaaacgtctacacgcagtgccggcggccaacactgtgaagttcaggtgccccgccggtgggaatcctatgcctacaatgagatggctaaaaaacggcaaggaattcaagcaggaacatcgtattggggggtataaggtaaggaaccagcattggagcctgatcatggaaagtgttgtgccatctgataaggggaactacacatgcgttgtggagaatgaatacggctccatcaaccatacataccacttggatgtagtggaacggagcccacatcggccaatcctgcaggcaggtttgcctgctaacgcgtctacagttgtgggtggcgatgtggaatttgtgtgcaaggtttatagcgacgcgcagcctcatatccagtggatcaagcatgtagagaagaatggtagtaagtatggaccagatggcctgccatacctcaaggtattgaaggttagtgccgagagctcgtcctccatgaacagtaatacacctcttgtgaggataacaaccaggctgagttctacagcagatactccaatgctcgcaggcgtgagcgagtacgagctgccggaggacccaaaatgggaattcccgcgcgacaagctgactctcgggaagccactgggggagggatgtttcggccaggtggtaatggccgaagccgtgggcatagataaggacaaaccaaaagaagctgtcactgttgccgtcaagatgcttaaggatgatgcaaccgagaaagacctgagcgacctcgtttctgaaatggaaatgatgaagatgatcgggaagcataagaatattatcaacctgctaggggcgtgcacccaggacggacccctttatgttatcgtcgaatacgcctcgaaggggaatctccgcgagtatctccgggcccgcagaccacccggcatggagtactcctatgatattaatcgggtacctgaagagcagatgactttcaaagacctcgtctcatgcacatatcagctggcacgaggtatggaatacttagcgagccagaaatgtatccatagagatctggcggcccggaacgtgcttgtcactgaaaacaatgtgatgaagatcgcagacttcggccttgccagggatatcaacaacatcgattactacaaaaagaccacaaatggaaggctaccagtaaagtggatggcacccgaagccttgtttgatagggtctatacccatcagtccgatgtctggagtttcggtgtcctgatgtgggaaatcttcacattaggcggcagcccctatccggggattcccgtggaagagctgtttaaattgttaaaggagggccatcgaatggataaacctgccaactgcacaaatgagctttatatgatgatgcgcgattgctggcatgcagtacctagccagaggccaactttcaaacagctggtggaagatttggatcgcatacttactcttaccactaatgaggagtacctggacctgtcacagccactggagcagtactcaccaagctatcccgatacccggagctcatgctcaagcggcgacgacagcgtcttctccccggatcctatgccttacgagccttgtctgccccagtatccgcatatcaacggctctgtgaagacctag

SEQ ID NO: 117054 - DNA, 2130 bp, synthetic construct
  misc_feature 1..2130: note = Description of Artificial Sequence: Synthetic coding sequence
  source 1..2130: mol_type = other DNA
atggtctcatggggacgtttcatctgcctcgtcgtagtcacaatggcaacgttatctttggccaggcctagcttttccctagttgaagacaccaccctggagccggaggagcctcccactaaatatcagattagtcagccagaagtgtacgtggcagcccctggagaaagcttggaagtccgatgtttgttaaaagatgccgctgtaatctcatggacaaaggatggggtgcatcttggccctaacaaccggacagtcctcattggggaatacctgcaaattaagggcgccactccccgggattctggcttatacgcttgtactgctagccggacagtggactctgaaacctggtactttatggtgaacgtcactgatgccataagctctggcgacgatgaggacgacactgatggtgccgaagactttgttagcgagaattccaataataaacgcgctccttactggaccaacaccgaaaagatggagaagagactccatgctgtccccgcggccaatacagtaaagttccgttgcccagctgggggaaacccaatgccgaccatgcggtggctgaaaaacggaaaagagtttaagcaggagcacagaataggaggatacaaggtgcgaaaccagcattggtccctgattatggaaagcgtggtgcctagtgataaggggaattacacttgtgtcgtcgagaatgaatatggatccatcaaccacacgtatcatctggatgtggtggcccccgggcgggaaaaggagataacggcctcaccagactatctggaaatagccatttactgtataggagtattccttattgcctgtatggtagtgaccgtcatcctgtgccggatgaagaacaccacaaagaagccagatttttcctcgcagcccgcggttcataaacttaccaaacggatcccccttcggcgtcaagtgacggtatccgctgaatcctcaagcagcatgaatagcaacacaccactggtgcgcatcactacccgcctgtccagcaccgccgataccccaatgctagccggggtgagcgagtacgagttgccagaagaccctaagtgggaatttcccagagacaaattaaccctgggtaaacccctcggggagggctgttttggacaagtggttatggccgaagccgtggggatcgacaaagataagcctaaagaagctgtgactgtagccgtgaaaatgctgaaagacgacgcaacagagaaggatttatctgatctcgtgagtgagatggagatgatgaagatgataggaaagcataaaaatatcataaacctgctgggtgcctgcacgcaagacggccccctgtatgtcattgtggaatatgcgtccaagggtaacctgagggaatacctccgggcccggagaccccctggcatggaatattcctacgatatcaacagggtgcctgaagaacagatgacgttcaaagatctggtgagttgcacgtatcaactcgcgagggggatggaatacttagcgtcccaaaagtgcatccatagggatctcgccgccagaaacgtgctggtgacagaaaataacgtgatgaaaatcgccgactttgggttggcccgggacattaacaatatagactactataaaaagaccaccaacggacggctaccagtgaagtggatggctcccgaagcactctttgatagggtttacactcatcagagcgacgtctggtcctttggcgttctcatgtgggaaattttcaccctgggcggatcaccatatcctggcataccagtggaagagctgtttaagctattgaaagaaggtcatcggatggataagccagcgaactgtactaatgagctatacatgatgatgcgcgactgctggcacgcggtgccatcccaaagaccaacctttaagcaactggtggaggacctagacaggattctcacactcacaaccaacgaggagtacctcgacctaagtcagccgctggagcaatatagcccatcctatcccgacacgcggagcagctgctcttccggagacgattctgtgttctctccggacccaatgccttacgaaccctgcctccctcaatacccacacatcaatggttctgtcaagacctag

SEQ ID NO: 117055 - DNA, 2469 bp, synthetic construct
  misc_feature 1..2469: note = Description of Artificial Sequence: Synthetic coding sequence
  source 1..2469: mol_type = other DNA
atggtatcatggggcaggtttatatgcctcgtggtcgtgaccatggctacccttagtctggctagaccaagcttctccctggtcgaggacaccactctggagccagaagagccccctacaaagtaccagatctcccagccagaagtctacgtcgcggcgcccggggagagtctggaggttcggtgtcttctgaaagatgctgccgtgatatcttggacaaaggacggggtccacttgggacctaacaaccgcaccgtgctaatcggcgagtatctgcaaatcaaaggggcaacaccgagggattcgggactttatgcctgcacggcttctaggaccgtcgattctgagacctggtattttatggttaacgtgactgatgctattagtagcggagatgatgaggacgatactgatggcgccgaggacttcgtatccgagaatagcaacaacaagcgggcgccttattggactaacactgagaagatggaaaagaggctccacgctgtgccagcggcaaacacggttaagttccgctgtcccgctggagggaaccctatgcccaccatgaggtggctgaaaaacggaaaggagttcaagcaggaacacaggattggcggctacaaggttcgcaaccagcattggagcctgatcatggaatccgtggtgccctcagacaaggggaactacacatgcgtggtggagaatgagtatggcagcatcaaccatacatatcacctggacgtcgttgaaaggtccccccatagaccaatactgcaggctgggctcccagcaaacgccagcaccgtggtaggtggagatgttgagttcgtttgtaaggtctatagtgatgcacagccacacatacagtggataaagcacgttgaaaagaatggtagtaaatacggaccagatgggttgccctatctgaaagtgttgaaagtgaccaaagcggcgggcgtgaacacaaccgacaaagagatcgaagtgctttacatccgtaacgtaacctttgaagacgccggtgagtacacgtgtttggccggtaactctattgggattagcttccactcggcctggctgacagtgctgccagcgcctggcagggagaaggaaataactgctagcccagactatttagagattgccatctactgcattggggtgtttctaatcgcctgcatggtagtcactgttattctatgcagaatgaagaataccacaaagaagcctgacttctcctcacagcctgccgtgcacaagttaaccaaacgtatcccattgcgccggcaggtgagcgctgagtccagcagttcaatgaactcgaacacgcccctcgtaagaattaccactcggctcagctccactgccgacacccctatgcttgctggggttagcgagtatgagctgccagaggaccccaagtgggaatttccaagagacaaacttaccctgggcaaacctctcggggagggttgcttcggccaagtagtgatggctgaagcagtcggaattgacaaggataagcccaaggaagccgtcactgtcgcagtgaagatgctgaaagatgatgccaccgagaaggatctctctgatttggtgagtgagatggaaatgatgaagatgatcggtaaacacaaaaacattattaatttgttgggcgcatgcacacaggatggaccactttacgttatcgttgagtatgcgagtaagggtaatctccgggagtatttaagggccaggcgaccacccggcatggagtatagctacgatattaatcgggtgccagaggaacagatgacatttaaagatctggtctcctgtacttaccaactcgccaggggtatggagtaccttgcctcccaaaaatgcatacatcgggatctcgctgctaggaacgtccttgttactgaaaacaacgtgatgaagattgccgattttgggttagccagggatattaataacatcgattactataaaaagactactaacgggcggcttcccgtcaagtggatggccccggaggctctgttcgaccgtgtgtacacccaccagtctgatgtgtggtcctttggtgtgctgatgtgggaaatctttactctgggtggatctccctatcctgggataccggtcgaagagctgttcaagctgctcaaagagggccacagaatggacaaacccgcgaactgcactaacgaactgtacatgatgatgcgagactgttggcatgcggtgccaagccagcgtccaaccttcaaacagctggtcgaggatctggatcgtatcctgacgctcactacaaacgaagaatatttagacctgagccagccattggagcagtattctccttcataccctgacacgagaagcagctgctcctccggggatgactctgtatttagccccgaccctatgccttacgaaccatgtttaccacagtacccccatatcaacggatcggttaagacatag

SEQ ID NO: 117056 - DNA, 2469 bp, synthetic construct
  misc_feature 1..2469: note = Description of Artificial Sequence: Synthetic coding sequence
  source 1..2469: mol_type = other DNA
atggtctcctggggtcgattcatctgcttggtggtcgttactatggcaactctaagtttggctcgaccaagtttctctttggtcgaagataccacactggagcccgaggaaccgcccactaagtaccagatttctcagcctgaagtatacgtcgccgctcctggggagtctttggaagtacgctgtctcttaaaggacgcggccgtaatcagctggacaaaggacggagttcaccttgggcctaacaataggaccgtcctaattggtgagtaccttcaaataaagggtgctacaccaagggacagcggtttgtatgcctgcacagctagccgaaccgtggacagtgaaacttggtactttatggtgaatgttactgacgctatatcctctggcgacgacgaggatgacactgacggcgctgaggatttcgtcagcgaaaactcaaacaataagagggccccttattggactaatacagaaaagatggagaaacgcctacatgctgtgccagctgccaataccgtcaaattccggtgccccgccggcgggaatcctatgcctactatgaggtggttgaagaatggcaaggagtttaagcaggagcatcggattggcggatacaaggtgcggaaccagcactggtcactcatcatggagtccgttgttccgagcgacaagggcaattatacatgtgtcgttgagaatgaatatgggtccatcaaccatacatatcacctggacgtggtggagcgatcacctcatcggcccattctgcaggcaggcctgcctgcgaatgccagcaccgttgtcggcggggacgtcgagttcgtttgcaaagtgtattccgacgcccagccacatatccaatggattaagcacgtggagaaaaacgggtctaagtacggtccagacggtctaccatacctgaaagttttaaagcattctggcatcaattccagcaacgctgaggtgttagctttgttcaatgtgaccgaggctgacgcaggtgaatatatatgtaaggtgtcaaattatatcggtcaggccaatcagtcagcatggctcaccgtgttgccaaaacagcaagccccagggagggagaaggagatcacggcatctcctgactacctcgagatagctatctattgcattggggtctttctgatcgcctgcatggtcgtaacagtaattctttgtcgtatgaagaataccactaaaaaaccagacttctcctcacaaccagccgtgcataagctgactaaacgcatccctctgcggcgccaggttacagtttcagccgaaagtagttcctccatgaatagcaacacacctttggtgagaatcactacacgcctaagctcgaccgccgacacaccaatgttagccggcgtaagcgagtacgaactgcctgaagaccctaagtgggagttcccacgggacaaactgacactgggaaagcctcttggcgaaggctgctttggacaggtggtgatggctgaggctgttggcattgataaagacaagccaaaagaagcagtgactgtggcagtgaaaatgctgaaggatgacgcgaccgaaaaggatctttccgatttggtcagtgagatggagatgatgaaaatgatagggaaacacaaaaatataatcaatcttttaggcgcttgcacccaggacggccctttatatgtgatcgtcgaatatgcatctaagggtaatctcagggaatacttaagagcccggcgccctccaggtatggagtattcatatgacattaatagagtgcctgaggagcagatgacgttcaaggacctcgtgagctgcacctatcagctcgcacgcggcatggagtatctggcgtcccagaagtgtatccaccgtgacctggcagctcgcaatgtgttagtcaccgagaataatgtaatgaagatcgccgatttcggcctggctcgtgacatcaataatatcgactactataagaagactaccaatggccgcttacccgtgaaatggatggccccagaggccctattcgatcgcgtatatacacatcagtctgatgtgtggagcttcggagtgctgatgtgggaaatctttacgctagggggcagtccgtatcctgggatccccgttgaggagctctttaagttgcttaaggagggccatagaatggataaaccggctaactgtactaacgagttgtacatgatgatgagggattgttggcatgctgtaccttcacagcgccccacattcaagcagctagttgaagatctggacaggatcctaactttgacaactaacgaggaatatctagatctgtctcagcctctcgaacagtattccccaagctatcctgatacaagatcttcctgctccagcggggacgattcggtattctcgcccgatcccatgccctacgagccttgtctgccccagtacccacatataaatgggagcgtgaagacatag

SEQ ID NO: 117057 - DNA, 1515 bp, synthetic construct
  misc_feature 1..1515: note = Description of Artificial Sequence: Synthetic coding sequence
  source 1..1515: mol_type = other DNA
atgacaccctcaccactcctgctgctgctgctaccaccacttctgctcggtgcctttccacccgctgcggctgccaggggaccccccaagatggccgacaaggtggtccctaggcaggtggcccgtctcgggaggactgtgcggctccagtgtcccgtggaaggggaccctcctccgctcacgatgtggaccaaagatgggaggactatccacagtgggtggtcaaggttccgtgtgctcccccagggtctgaaagtgaaacaggtggagagagaagacgccggtgtgtacgtgtgtaaagccactaatggcttcgggtccctttccgtcaattatactctcgttgttctggacgatatatcacctgggaaggaaagcctggggcccgattctagtagcggggggcaggaggatcctgctagtcaacaatgggctcggccacggttcactcagccatccaaaatgcggcgccgtgtcattgcgcgccctgtcggatcctccgtcaggctgaaatgcgtggcttcaggtcacccacgcccagatatcacttggatgaaagacgaccaagccttgacccgccccgaagcagcagaacctaggaagaagaaatggactctgtctctcaaaaacctacggccggaagattccggtaaatatacttgtagggtatctaatagagccggagccataaatgctacttataaggtcgacgtcatccagcgaacaaggtctaaacctgtgttgaccgggacgcatcccgtcaacaccaccgtcgacttcggtggaacgacctcatttcagtgcaaagtgcggtccgatgtgaaacccgtgatacagtggctcaaacgagtggagtatggtgcagaggggaggcacaatagcaccattgatgtggggggtcagaagttcgtcgttttgccgactggagacgtatggtctaggcctgacggcagttacttgaataaacttttgataaccagggctaggcaagatgatgccgggatgtatatatgtctgggcgcaaataccatggggtacagcttccgcagtgcttttcttactgttttgcctgatccaaagccccctggcccgccagtggctagcagcagttcggctaccagcctgccctggcctgttgtaattggcatcccagcaggagccgtattcattttggggaccttactgctgtggctgtgccaagcccagaagaagccgtgcaccccagcccccgcccctccactccccgggcatcgacctcccggcacggcgcgcgaccggagcggagacaaggatctcccatccttggccgccctgtccgcaggtccgggggtggggttgtgtgaggagcacgggtctcctgcggccccccagcatctgctgggccccggcccagtggcagggccaaagctgtaccccaaattgtatactgatatccacacccatacacatactcactctcatactcattcgcacgttgagggaaaggttcatcagcacatccactatcaatgctag

SEQ ID NO: 117058 - DNA, 1515 bp, synthetic construct
  misc_feature 1..1515: note = Description of Artificial Sequence: Synthetic coding sequence
  source 1..1515: mol_type = other DNA
atgactccatcacctctgctccttctactgttaccccctctgctgctcggagcgtttccacccgcagccgccgcaaggggcccccccaagatggcagacaaggttgtgcctcgccaggtagcgcgcctgggccggacagtgaggctccagtgccccgtggagggtgaccccccgccactcacgatgtggacaaaggatggacggaccattcacagcggatggtctaggttccgggtgctgcctcagggccttaaagttaagcaggtggagagggaagacgccggcgtgtacgtctgtaaggctacgaatggctttggcagtctgagcgtcaattacactcttgtggttcttgacgatatttctccgggaaaggagagtctgggccctgactcctcgagcggcggccaggaggatccggcgagtcagcagtgggccaggcctaggtttactcagccctccaagatgaggagaagggtcattgcacgccccgtaggatcctctgtgcgcttaaaatgtgtagctagtggacacccgcgacccgacatcacgtggatgaaggatgaccaggctttgacccgcccagaggctgcagaacctagaaagaagaaatggacactctccctgaagaatttacgaccggaggactcaggaaaatacacttgccgagtgtccaatcgtgctggggctataaacgcaacttacaaggtagacgtgatacagagaacacgaagtaaacccgttctgaccggaactcacccggtgaatacaaccgttgattttgggggtacaacctcgttccagtgcaaagtgaggtcagacgtgaagcctgtgatccagtggctcaagagggttgagtacggcgcggagggccggcacaactccactattgatgttggtggtcagaaattcgttgtgttgcctactggggacgtttggtcaaggccagacggttcctatttgaataaactccttattacacgcgcgcggcaagatgacgccgggatgtacatctgcttaggcgctaacacaatgggttactccttccgaagcgcctttcttactgtcctcccggaccctaaacccccaggccccccggtggctagctcctcatcagcgacctccctgccatggcccgtggtgattgggatccccgcaggggcagtgtttatactcggtactctcctgctttggctctgccaggcacaaaagaagccttgcacaccagctcctgcaccacccctgcctggccatcggcctccaggcaccgctagagacagaagtggcgacaaagacctcccgtccttggctgctctttccgcgggccctggcgtgggcctctgcgaggagcatggatcgccggcggccccccagcacctgctgggaccaggaccagttgccggaccaaaactttatccaaagctttatacggacatccacacccatacccacactcattctcacacccacagccatgtggaagggaaagtccaccagcacatccactatcaatgttag

SEQ ID NO: 117059 - DNA, 1515 bp, synthetic construct
  misc_feature 1..1515: note = Description of Artificial Sequence: Synthetic coding sequence
  source 1..1515: mol_type = other DNA
atgacaccgtcacccctgctgctgctcttgttgcccccattattgctgggtgcttttccccctgccgccgccgccagagggccgccaaagatggctgataaagtcgtgccccgccaggtggctagactgggacgcacggtacggctgcagtgtcccgtggagggcgacccgcctcccctaaccatgtggacgaaggacggacgaacaatccatagcgggtggtcccggtttagagtgctgcctcagggactcaaagtcaagcaagtagagcgagaggatgccggtgtctatgtctgcaaggcaactaacgggtttggaagtctctccgtgaattacacactggtcgtcctggacgacatttctcctggtaaagaatctctcgggcctgactcgtctagcggagggcaggaggacccggcatcgcaacaatgggcccgaccccggttcacacagccttctaagatgcgacgtcgagtgattgctcgccccgtcggctccagtgtgcgcttgaagtgtgtcgccagcggtcacccacgtcccgacatcacctggatgaaggatgaccaggctcttacgaggcccgaggccgcggaacccagaaaaaagaagtggacactctcactgaagaacctgagaccggaagactccggaaagtacacctgtagggtatccaacagggccggagccatcaacgcaacttacaaagttgacgtcattcagagaacacggtccaagcccgtgctcaccgggacccacccagtgaacacaactgtggacttcggcggcacaacttccttccagtgcaaggtgcggagcgatgttaaacctgtcatccagtggctgaaaagagttgaatacggtgccgagggccggcataactcaaccatcgatgtgggcggccagaaattcgtcgttttacccactggagacgtctggtccaggccagacggcagctatttaaataaattgctgatcaccagagctagacaggacgacgcaggcatgtatatatgcctcggtgccaacacaatgggctattcctttcgttcagcctttttgactgtgcttcctgaccctaaaccccccggacctccagtcgcaagttcttcatctgccacatcactaccatggccagtcgtcatcggcatcccggccggtgccgtgttcatcctgggcacattgctactgtggctgtgccaagcacagaaaaagccatgcacccccgcccccgcaccgccattgcctggacatagaccgccagggactgcccgggatcgctctggcgacaaggatctgccctctctggccgcactctctgctgggcccggagtcggcctttgtgaggagcatggcagcccggcagcacctcagcacctcctgggaccgggaccagtcgcgggtccgaaactgtaccctaaactgtacacagacatccacactcatacccacacacattctcacacccactcccatgtcgaaggcaaggtgcaccagcatatccactaccagtgttag

SEQ ID NO: 117060 - DNA, 459 bp, synthetic construct
  misc_feature 1..459: note = Description of Artificial Sequence: Synthetic coding sequence
  source 1..459: mol_type = other DNA
atgactccctcgcctttgctcctgttattactccccccgctcctgctaggagccttccccccagcggcagccgccaggggaccccctaaaatggcagacaaggtcgtgccccgacaggtggcccgccttggacggacagttagacttcagtgtcctgtggaaggagacccacctcctctcacgatgtggacaaaggacgggagaacaatacacagcggttggagcagatttcgggtcctgcctcaaggactgaaagtgaagcaagttgagagagaggacgccggtgtctacgtgtgtaaggccactaacggtttcggtagcctgtcagtcaactacacattggtagtgctggacgacattagtcctgggaaggagtcattggggccagactcctcgtccggaggccaggaagacccggcaagccaacagtgggctaggcctagattcactcagccttag

SEQ ID NO: 117061 - DNA, 1515 bp, synthetic construct
  misc_feature 1..1515: note = Description of Artificial Sequence: Synthetic coding sequence
  source 1..1515: mol_type = other DNA
atgaccccttccccactgttacttctgctcctaccaccactcctcttgggagccttcccccctgctgctgctgcgaggggccccccgaagatggcagataaagtggtgcctcgccaggtggctaggctggggcgcactgtgagactgcaatgtccagtcgagggcgatccaccacctctgacgatgtggactaaagacgggagaaccattcatagcgggtggtccaggttcagagtgttgccccagggcctgaaagtgaagcaggtggagcgcgaggacgctggtgtctacgtatgcaaagcaacaaacggcttcggaagcctttctgtgaactacacattagtcgtgttggacgatatttccccaggcaaggagtcactgggcccagacagttcaagcggtggccaagaggatcctgctagccagcaatgggctcggccccggtttacccaaccaagcaagatgagacggcgtgttatcgcgcggccagtggggtcgtcggtgcgcttgaagtgcgtcgccagtgggcaccctaggcctgatattacttggatgaaggacgatcaagcgctgaccagaccagaggctgctgagccaaggaaaaagaaatggaccctctcgctgaaaaatcttcgccctgaggattctggcaagtacacctgtcgggtatctaaccgggccggcgcaatcaacgccacttataaagtggatgtcattcagcgcaccagatcaaagcccgtactaactgggacccacccggtgaacacaactgtcgattttggcgggactacctccttccagtgcaaggtacgatcagacgtgaagcccgtgattcagtggctgaagcgagtcgaatacggagccgagggaaggcataattctaccattgatgttggcggacagaaatttgtggtgctgccaactggggacgtgtggtcacgccccgatggttcatatttaaacaaactgctgatcacccgtgcccgccaggatgatgcaggaatgtatatctgtcttggtgccaatacaatgggctactcgttccgctccgccttcctcaccgtcctgcccgatcctaagcctccagggcccccggtcgccagcagcagttcagccacaagtttaccatggcccgtggtgatcggcattccagcaggcgcggtctttatcttggggactctcttgctctggctgtgtcaggcacagaagaagccatgtacccccgcgccagccccaccacttccaggccaccgtcctccagggacggctagagaccggtcgggcgataaagatctgcccagcctggcggcactgtccgctgggccaggcgtcgggctctgcgaggagcacgggtccccagctgcaccacagcacttgctgggccctgggcctgtagccgggcctaaactctatccaaagctgtacaccgatatccacacacacacccatacccactctcatactcactcccacgtggagggaaaagtccatcaacacattcactatcagtgttag

SEQ ID NO: 117062 - DNA, 243 bp, synthetic construct
  misc_feature 1..243: note = Description of Artificial Sequence: Synthetic coding sequence
  source 1..243: mol_type = other DNA
atgacgccatcccctctcctgcttcttctactgccacccctgctcctaggggcattccctccggctgccgctgccaggggcccaccaaagatggccgataaagtggttccacggcaggtcgcccgtttgggaagaacagtgaggcttcaatgccctgtagaaggcgatcctcctcctctgacgatgtggactaaagacgggagaacaatccattcaggctggtccagattccgagtgttatag

SEQ ID NO: 117063 - DNA, 1326 bp, synthetic construct
  misc_feature 1..1326: note = Description of Artificial Sequence: Synthetic coding sequence
  source 1..1326: mol_type = other DNA
atggccgacaaagtggtcccacgccaggtcgctcggcttggaagaacagttcgcctgcagtgcccagtggagggagaccctcccccacttactatgtggacaaaggatggccgcactatccatagcggctggagtcggttcagggttctgccgcaaggcctgaaagtgaagcaggtggagcgggaggacgcgggggtgtatgtatgcaaagctaccaatggttttggctctttgtccgtcaattatactctggtggtcctggatgacatcagccccggaaaggaatccctggggcctgacagtagcagcggtggacaggaggatcctgcctcccagcaatgggcacggcctagatttacccagcccagcaagatgagaagacgcgtaattgcccgtcctgtgggtagctctgtccggcttaaatgcgtggcctctggacacccaagacccgatattacatggatgaaggatgatcaggccctgacccggcccgaggctgctgagccccgcaaaaaaaagtggacactgtcactgaaaaacctccgccctgaagactcagggaaatatacctgccgagtgtccaacagagcaggcgctattaatgcaacatataaggtggatgttatccagcgaacccggagcaaaccagtcttgaccggcacacaccctgtcaatacaacagtggactttggcggaacgacttccttccagtgtaaagttaggagcgatgtcaaaccagtaatccagtggctaaaacgggtggaatacggggccgagggtaggcataattccacaatcgatgtcggcgggcagaagttcgtcgttttgccgaccggggacgtgtggtcacgaccggacgggtcttacttgaataagctcctgatcactagagcccgacaggatgatgctggcatgtatatatgtctaggcgcaaacaccatgggctattcattccgatcagcgtttctaacagtcctgcctgaccccaagccccctggcccccctgtggcctccagctcatccgcgaccagcctaccttggcctgtggtcatcggcatacccgctggtgcagtatttatattaggcacgctcttgttgtggctgtgtcaggcccaaaaaaagccatgtacccccgccccagccccccccctgccagggcaccggccaccagggacggctcgcgaccggagcggcgacaaggatcttcccagcctggcggcactgtcagctggtcctggcgtgggactatgcgaggagcacggttcgccagctgccccccagcatcctacagtcgttgtggctccagacctgtgcaacttcatgtag

SEQ ID NO: 117064 - DNA, 1131 bp, synthetic construct
  misc_feature 1..1131: note = Description of Artificial Sequence: Synthetic coding sequence
  source 1..1131: mol_type = other DNA
atgcagtggacatcattactcttgctggcgggcttgttctcacttagtcaggctcagtatgaagacgacccacactggtggttccactatctccggtcccaacagagcacgtattatgacccatatgacccgtacccatatgagacatacgagccttatccctacggcgtagatgaaggtcccgcctatacctatggaagtccatcccccccggatccccgagactgtccacaggagtgtgattgtccaccgaatttcccaaccgcgatgtactgtgataaccgaaatctcaagtatctccctttcgttccttctaggatgaaatatgtttactttcaaaataatcaaataacgtcgatacaggaaggggtgttcgacaatgctacaggactgttgtggattgcacttcatggaaaccaaatcaccagcgataaggtgggacgcaaagtgttctcaaagctgcgccacctagaaagactgtatttagaccataataatcttacccggatgccaggccctctgccacggagcctccgggagctgcatttagatcataatcagatctcacgggtccccaataacgctttggaaggcttggaaaatctgactgccctgtacctccaacataacgagattcaggaggtcgggagctccatgagaggactgagatctctgattctgctggacctttcctataaccacttgcgaaaggtcccggatggtctgcctagcgctctcgagcagctgtacatggaacataacaatgtgtataccgtgcccgatagctactttcgcggcgcgcccaaactgctatacgtgagattaagtcacaacagcctgaccaacaacggtttggcttccaacactttcaacagtagttccttgctggagctggacttatcctacaaccagctccagaaaatacctcctgtgaatacgaatctcgagaatctttatctccaggggaacagaataaacgaattcagtatctcttcattttgtaccgtcgtggacgtagtgaatttcagcaagctccaggtgctccgcctggacggaaacgagatcaagcggtccgcaatgcccgcggatgcccccctgtgtttgcggctcgctagtctgattgaaatctag

SEQ ID NO: 117065 - DNA, 1092 bp, synthetic construct
  misc_feature 1..1092: note = Description of Artificial Sequence: Synthetic coding sequence
  source 1..1092: mol_type = other DNA
atgcagtggacctctctgctgctgctggccgggctgttctccctgagtcaggctcagtatgaggatgatccacactggtggtttcattacctcagaagccagcagtctacttattacgacccatatgacccctacccatacgagacgtatgagccgtatccttacggagtggatgagggacctgcatatacttacggctcgccatctccccccgatcctcgcgactgtccccaggagtgtgattgcccccccaatttcccccctttcgtcccgagcaggatgaaatacgtgtacttccaaaacaaccagattacatctatccaggagggggtatttgacaatgcaaccgggctgctttggattgccctccacggtaaccagattacgagcgataaggtgggaaggaaggtgttctctaagttgcgacacttagagcgtctatacctggaccacaataacctaactagaatgcccggtcccctcccgagaagccttagagagctgcacctggaccataaccagattagtagagtcccgaacaacgcgctagaaggcctggagaatctgactgccctgtatctgcagcacaacgaaatccaggaggtgggaagttccatgcgaggcctgagatccttaattttactcgatttgagctacaaccacctgcgaaaggtgcctgacgggttaccatcagccctcgagcagctctacatggagcacaataacgtgtacacagttcctgattcttactttcggggcgcgcccaaactcctctatgttagactttcacataattcacttaccaataatggtctggccagtaataccttcaactcttcctctcttttggagctggatctgtcttataatcaactgcagaagattcctccagttaacactaacctggagaacctctacttgcaggggaaccgaataaacgagtttagtatatcctccttctgcacagtcgtcgacgtagtgaattttagtaagcttcaggtactcaggctggacggtaatgaaattaaaaggtcggccatgccggccgatgcaccactgtgtttacgcctcgcttccctcatcgagatctag

SEQ ID NO: 117066 - DNA, 594 bp, synthetic construct
  misc_feature 1..594: note = Description of Artificial Sequence: Synthetic coding sequence
  source 1..594: mol_type = other DNA
atgaagatgaccctgatcgggggcagtaccacttccgccgctagttcgccgccgacgacaatccccatgactctcacccgtatgcgaccgactagcctgactcccatgggctggatgaaaggccagccgactcccacagcactacacccgctgcagattcctgcaacagcaccccgttctgccaccgcccatcctacttcaacagctatgtattgcgataaccgcaacctgaaatacctgccattcgtcccctctagaatgaagtatgtgtacttccaaaacaatcagattactagcatccaagagggagtttttgacaacgcaactggcttgctgtggatcgccctacatggaaaccagatcacatctgacaaagttgggagaaaggtgttctcgaaactcaggcacctggaacgtctttacttggatcataacaaccttacccgtatgcccggaccccttccacgatccctgagggagctgcatctggatcacaaccagatctcccgtgtgcccaacaatgcactggagggaagaacctccagaccatgtacgagcaatacgatgcggagcagaaagtgggctgtgccctag

SEQ ID NO: 117067 - DNA, 2025 bp, synthetic construct
  misc_feature 1..2025: note = Description of Artificial Sequence: Synthetic coding sequence
  source 1..2025: mol_type = other DNA
atggtggtcgcccacccaacagcaaccgccacaactacaccgacagccacagtaacagccaccgttgttatgacgaccgcaaccatggatctgagagactggttattcctgtgctatggcttgattgctttcctgacggaagtgatcgatagtacgacttgcccgagtgtctgccgttgtgataacggcttcatctactgtaatgaccgagggctgacatctattcccgccgacatacctgatgacgccacaactctatatctacagaacaaccaaatcaataacgctggcattccacaggatctgaagaccaaagtaaatgtgcaggttatctacctgtatgagaacgacctcgatgagttcccaattaacctgcctcgaagtttgagagagctccacctgcaagataacaatgttagaaccattgccagagactccctggcacgaataccgctattggaaaagctgcatctggacgataactctgtgtctacagtcagtatcgaggaggacgccttcgccgactcaaagcagctgaaactacttttcctgagccgcaaccacctgagttctattccttcaggcctgccgcataccctggaggaactgcgcctggacgataacagaatcagcacgatccctctgcacgcattcaagggcttgaactctctgaggagacttgtgctggacgggaacctattagccaatcagcgcatcgcagacgacacgttttcaaggttacaaaacctcacagaactgagcctggtgaggaactctctggctgccccgcccctgaaccttccaagcgctcacctccagaaactttacttgcaggataacgccataagccacattccttacaatacactggccaaaatgcgggaactcgagaggttagatctgtctaataacaatttaactaccttaccgcggggactcttcgacgacctggggaacctggcacagttgctgttgcgcaacaacccgtggttctgtggatgcaatcttatgtggttgcgcgattgggtaaaagctcgtgccgcggtggttaacgtgagggggctgatgtgccagggccccgaaaaggtccgcgggatggcgatcaaagacatcacatccgaaatggacgagtgcttcgagactggccctcagggaggggtcgccaacgccgcagcgaagaccactgcctctaatcacgcaagtgccacgactccccaaggctctttgttcaccttgaaagctaaacggccagggctccgactcccagatagtaacattgactatcccatggcgaccggtgacggtgccaaaaccctggcaattcatgtgaaagctctgacggccgattcaatacgtatcacttggaaggcgacgcttcccgcatccagctttagactgagctggcttagactgggccactctccagcggtcggatcaataactgaaacactggtgcagggggacaaaacagagtacctcttgacagctctagagcccaagtctacctacatcatctgtatggtaaccatggaaacaagcaatgcatacgtggccgacgagacacctgtctgcgccaaggcagagacggcggactcctacggccccactacaaccctcaatcaggaacaaaatgctggccctatggcaagcttgccgttggcggggataattggcggggcagtggcgctagtgtttctgttcctggtgttgggtgcgatctgctggtacgtccaccaggccggcgagttgctaactcgcgagcgtgcatacaacagaggttcgcgaaagaaggatgactacatggaatccggaacaaagaaggacaactctatattggagattcgcggtccaggactgcagatgctgcctattaacccgtatcgagccaaagaggagtatgtcgtccacacgatctttccatctaacggtagtagcttatgcaaggctacacacacaataggatacggtaccactagaggctatcgggacgggggaattccggatatagactacagctatacctag

SEQ ID NO: 117068 - DNA, 1983 bp, synthetic construct
  misc_feature 1..1983: note = Description of Artificial Sequence: Synthetic coding sequence
  source 1..1983: mol_type = other DNA
atgggcctgcagactacgaagtggccctctcatggggcctttttcctcaagagctggctcatcatctctctcgggctgtactctcaggtttctaagctgctggcctgtccttcagtatgcagatgcgatcgaaattttgtctactgcaacgaacggtctctaacttccgtgcccctcggcatcccagaaggcgtgacagtgctgtatctacataataaccagattaataacgccggatttcctgcggagctgcacaatgtgcagagtgttcacaccgtatacctctacggtaaccagctcgacgagtttcctatgaacctgccaaaaaacgtaagggtgctccacctacaggagaataacatccagaccattagtcgcgccgctctggctcagttgttgaaattagaggagttacatctggacgacaacagcatcagcactgtaggggtagaggatggggcctttcgagaggcgatctcgctcaaactgctgtttctcagtaagaatcatctgtcttctgttcccgtgggactgcccgttgatctgcaggaactaagggtggacgagaacagaattgctgtcatctccgacatggcttttcagaacctcacatctcttgagcgcctgatcgtggacggcaaccttctgacgaataagggcattgcagagggcaccttctctcatctgactaagctgaaagaattctcgattgttcggaactcactgagccatcctccaccggacctgccgggcacacatctcatacgactatatctccaggataaccaaatcaatcatattcctctgacagctttcagtaatctgagaaaacttgagaggttggatatctctaacaatcagttgcgtatgttgacgcagggggtatttgacaacctatccaatctgaagcagttgaccgccagaaataacccttggttctgcgactgtagcatcaagtgggtgacagagtggctgaaatacatacccagcagcttaaatgtgaggggattcatgtgccaggggcccgagcaggttcgaggaatggctgtgagggagttgaatatgaacctcttgagctgtcccaccacgacccctggcctcccactcttcacaccagcaccatcaaccgctagtccaaccactcagccaccaacattatcgatcccaaacccttcaagaagttacactcctccgacccccacaacatcgaaattgcccacaatccctgactgggacggtagggagcgcgtgacccccccgatctcagagagaattcagctttcaatacattttgtaaatgatacatccatccaagtgtcctggctcagcctgtttacagtgatggcctacaagctgacctgggtgaaaatgggacactctctggtgggggggatcgtgcaggagaggatcgttagtggagaaaaacagcatctcagcctggtaaacttggagcctaggtcaacttaccggatttgtctagtgccattagatgccttcaattatcgggcagtcgaggataccatctgctctgaagctactacccacgcctcgtaccttaataatggaagtaataccgcatcaagtcacgagcagactacaagtcacagcatgggctcacctttcctcctggctgggctgattgggggggcagtgatatttgtgctcgtggtcctactttctgtgttttgctggcacatgcacaagaaaggacggtacacgtctcagaaatggaaatacaatcgtgggcggcgtaaagatgattactgcgaagccggtaccaagaaagataactccattctggagatgacagagacgtcgtttcagatcgtctctcttaataacgatcagcttctaaagggagattttagactccaaccaatatatactcctaacggtggaataaactacacagactgccacatccctaacaacatgagatactgtaattcgtccgtacctgaccttgaacactgccatacatag

SEQ ID NO: 117069 - DNA, 942 bp, synthetic construct
  misc_feature 1..942: note = Description of Artificial Sequence: Synthetic coding sequence
  source 1..942: mol_type = other DNA
atggccgtccgcgagttgaacatgaaccttctctcttgcccaactacaaccccggggcttcccctgtttactccggctccatcaactgcgtcccccacgacccagccacctacattgtctatacctaaccccagcaggtcctacacccctccaactcctacaacttcaaaattgcctacaatccccgattgggacggtagagagagggtgacccctcccattagcgagcggatccagttaagtattcactttgtgaacgacacaagcatacaggtatcatggttatccctgttcacagtcatggcctacaagctgacttgggttaagatggggcatagtcttgtgggaggaatcgtgcaggaaagaattgtgtctggcgaaaaacaacacctgtcactcgtgaatctggagccaagaagcacctatcgcatttgtctcgttccacttgacgcctttaattacagagcggtggaggacaccatctgcagcgaggccacaacacatgcttcttatttgaataacgggtccaacacggcttctagccatgagcagaccacctcccattcgatggggtcgccatttctcctagccggattaatcggaggcgccgttatcttcgtgcttgtggtcctattgagtgtgttttgttggcacatgcataaaaaaggcagatacacatcgcagaaatggaagtataacagaggtcgccgaaaggatgactattgcgaggccggcaccaagaaagataactccatcctggaaatgactgaaaccagcttccaaattgtcagcctcaataacgaccagcttctaaaaggcgatttccgactccagccaatttacacccccaatggcggcataaactataccgattgtcacatccccaataacatgcgctactgtaactctagcgtgccagacctggaacactgccatacatag

SEQ ID NO: 117070 - DNA, 1983 bp, synthetic construct
  misc_feature 1..1983: note = Description of Artificial Sequence: Synthetic coding sequence
  source 1..1983: mol_type = other DNA
atgggtctccagacaacaaagtggccctctcacggggctttttttctgaagtcatggttaattatctcactagggctgtattcccaagtaagcaagttactggcttgcccatcagtgtgtcggtgtgaccgcaactttgtgtattgcaatgagcgatcacttacatccgtcccacttggcatcccggagggcgtcacagtgttatacctccataataatcagattaacaatgccggtttccctgcggagctacacaatgtgcagagtgttcatactgtttacttatacgggaatcagctggacgaattccccatgaatctgccgaaaaacgtccgggtactgcacctgcaggaaaacaacatccagaccatctcacgtgctgccttagctcagctgctaaaactagaggaacttcatttagacgacaacagcatatctacggtcggtgtggaggacggtgcctttagggaagctatatcactcaagttgttgttcctgagcaagaaccacctgagcagtgttccagtgggactgcccgttgatttgcaggagttgcgggtggacgaaaatagaatcgctgtgatcagcgacatggctttccagaatctgaccagtctcgagcggctcatcgtggatggcaacctactgaccaataaagggatcgcagagggtacgttttctcatttaaccaagctaaaagagttctctatcgtgcggaacagtctttcccacccgccaccagatctacctggaacacaccttataagactgtatcttcaagataaccaaattaaccatatacccctaaccgctttctccaacttgagaaagctcgaacgccttgacattagtaacaatcagctccgaatgcttacgcaaggagtgtttgacaacctcagcaatctgaagcagcttactgcccgaaacaatccgtggttttgtgattgtagcatcaaatgggtcaccgagtggctgaaatacataccaagctcactgaacgtcaggggattcatgtgccaaggccctgagcaagtccggggcatggccgttcgagaactgaatatgaacctcctgagttgccccaccaccacgccaggcctcccgcttttcacccccgccccctcgactgcatcccctactacccaaccacccacgttgtcaatccccaatccttcacggagctatactccaccaactcctaccacttccaagctaccaactatacctgactgggacggtagggagagagtcactccaccgatatcagagcgcatccagctttccattcacttcgttaacgatacatccattcaggtgtcctggttgtctctcttcaccgtgatggcatataagctaacttgggtaaagatgggccatagtctcgtgggaggcatcgttcaggagaggatagtctccggtgaaaaacagcacttgagtctggtcaatctcgaaccccgctcaacttatcgaatttgtttagtgcctttagacgcctttaattatagagctgtcgaggatacgatctgctcggaggcaactactcatgctagctatttgaataacggatccaatacagcatcttcacatgagcagacgaccagccactcaatgggttcccccttcctactggctggactcatcggaggggcagtgatcttcgtcctcgtggtgttgttgtctgtgttttgctggcacatgcacaagaaggggaggtacaccagccagaaatggaaatataacaggggccggaggaaagatgactattgcgaagccgggacaaaaaaagacaatagtattttagaaatgacggagacttcatttcagatcgtctccttgaacaatgaccagctgctcaagggggactttaggctccaaccaatttacacccccaatggtggaattaactatactgactgccacatccccaataatatgaggtactgtaattcttccgtgcctgatctggaacactgccacacgtag

SEQ ID NO: 117071 - DNA, 1950 bp, synthetic construct
  misc_feature 1..1950: note = Description of Artificial Sequence: Synthetic coding sequence
  source 1..1950: mol_type = other DNA
atgatctcagctgcctggtctattttcctaattggaaccaaaatcggattgttcttacaagtcgcccccctaagtgtcatggccaagtcttgccccagtgtgtgtcgctgcgacgctggatttatctattgcaatgaccggtttttaacctccatcccaacagggatcccagaggatgcaaccaccctttacttgcaaaataatcagattaacaacgcaggcatcccatctgacctcaaaaatctgcttaaggtggagagaatttatctttaccataatagtcttgatgagttccctaccaacctacccaagtacgtgaaagagctgcatctccaggagaataacattcgtactattacctacgactctctgagcaaaattccctacctagaagagctgcaccttgacgacaacagcgtgagcgccgtgtccattgaagaaggagctttcagggacagcaactatctccggcttctgttcttatctaggaaccatctgagcaccattccatggggcctcccaaggaccatcgaggagctcagactcgatgataacaggatcagcaccatcagctccccaagccttcaggggttgaccagcctgaagcgactggttcttgacggcaacctgctaaataaccatggcctgggcgacaaagtcttttttaatctcgttaatctcaccgagctgtcgctggtgcgcaattcattaacggcagcccccgttaatcttcctggcacgaacttgagaaaactttacctgcaggacaaccacatcaatcgcgtgccccccaacgcttttagctaccttcgccagttatataggctggatatgtcaaataacaacctatcaaacctgccccaagggatttttgacgatctcgataacattacgcaactgattctccggaacaacccttggtactgtgggtgtaagatgaaatgggtcagggattggttgcagtcacttcccgtgaaagtcaacgttcggggcctcatgtgtcaagcgcctgagaaagtgcgcgggatggccatcaaggacctgaacgctgaactgtttgactgcaaggattcaggtatcgtgagtactatccagatcaccacagcgattcctaacacagtttacccagcccaagggcagtggccggcacccgtaacaaagcagccagatatcaaaaacccgaagctgactaaagaccaccagaccaccggaagcccctctagaaagaccatcacgattactgtgaagagcgtgacgagtgatacgatccatatttcatggaaattagcgttgcccatgaccgctctccgcttgagttggctgaagttggggcatagtcctgcgtttggatccatcacggagactatagttaccggcgagcgcagtgagtacctggttactgccctagagcccgacagcccgtataaggtctgcatggttccgatggagacgagcaatctgtatctcttcgatgagactccagtatgcatcgaaacggagactgcaccactgagaatgtacaatcctacgactaccctgaatagagaacaggagaaggagccttacaagaatcccaacctccccctggcggctatcatcggcggagcagtggccctggtgactatcgccctgctcgccctggtctgctggtatgtgcaccgcaacgggtcgttgttctcgagaaattgtgcttacagtaagggacgcagaagaaaagacgattacgccgaagccgggaccaaaaaggacaattcaatattggaaatccgcgagacatccttccagatgttaccaatatccaatgagccaatctcaaaggaagaatttgttatacacactattttccccccaaatggtatgaacctctacaaaaacaaccacagcgagtccagcagcaatcgtagttatagggactccggtattcccgacagtgaccattcgcatagttag

SEQ ID NO: 117072 - DNA, 1950 bp, synthetic construct
  misc_feature 1..1950: note = Description of Artificial Sequence: Synthetic coding sequence
  source 1..1950: mol_type = other DNA
atgatttcagctgcctggagtatttttcttatcggtacaaaaattggtttgtttttgcaggtggctcccctgtctgtgatggcaaagtcatgtccctctgtctgtagatgtgatgccggcttcatctactgcaacgatcggttcttgactagtatccctacaggcatccctgaggacgctacaaccctgtatctgcagaataaccagatcaacaatgccggaattccatccgacctgaagaacctgctgaaggtagagcgcatttacctttaccacaactcactcgacgagttccctactaacctccctaagtacgtgaaagagctccatcttcaagaaaacaatatcaggaccattacctatgattctttatccaagatcccgtacttggaagaactgcaccttgacgataacagcgtgagcgctgtgagcatagaagagggtgcgttcagggatagcaactacttgagactcctgttcctttcccggaatcatctttctactattccatggggactgcctcgcactatcgaggaattaaggctcgacgacaatcgcatctccactatttcttccccttctcttcagggcctcacatctcttaaacgcctggtactggacggcaatttgctcaacaatcacggattgggggataaagtgttctttaaccttgtcaacttgacagaactgtccctggtgcggaattcgcttacagccgctcctgtaaacctgcccggaactaacctcaggaagctctatctgcaggacaatcatattaaccgcgtgcctcctaatgctttcagttatctgcggcaactttaccgattggatatgagcaacaataatctatccaatctgccgcaagggatcttcgatgacctcgataatattacacagttaattctccgcaacaacccttggtactgtggctgtaagatgaagtgggtacgggattggcttcagtccctgcccgtgaaagtaaacgttcgcgggctgatgtgccaagccccagagaaagtgaggggcatggccatcaaggacttaaacgccgagctcttcgactgcaaggactcaggtattgtgagtacaatccaaatcactacagctattcctaacactgtctaccccgcacagggacagtggccagctccggtgaccaagcagcctgacattaagaaccctaagctcacaaaggatcaccagaccacaggtagtccctcccgcaaaacaatcactattaccgttaagagtgtcacaagcgataccattcacatctcatggaagctcgccctccccatgactgctctccggttaagctggttgaagctaggtcacagcccagctttcgggagtataaccgaaacgattgtgacaggcgaaaggtccgagtatcttgtgaccgcgctggaaccagactccccctataaggtttgtatggtgcctatggaaacctccaatctgtacctgtttgatgagacacctgtttgcatcgagacagaaactgcacctcttcgaatgtataaccctacgacaacgttaaatcgggagcaggaaaaggagccctacaaaaaccccaacctacctctggccgctataattgggggggcggtggctctggtgaccatagccctcttggctctagtctgttggtacgttcaccggaacggctccctgttttctcggaattgcgcgtattccaaggggcggagaagaaaagacgattacgccgaagcaggaactaagaaggacaactctattctggagatccgcgaaacaagctttcagatgctaccaatttccaatgagcccatttcaaaagaggaatttgtcatacatacaatctttccacctaacgggatgaatctctacaaaaacaatcactctgaatcgtccagtaatcgctcttatagagactcgggtattccagactccgaccattctcacagttag

SEQ ID NO: 117073 - DNA, 1884 bp, synthetic construct
  misc_feature 1..1884: note = Description of Artificial Sequence: Synthetic coding sequence
  source 1..1884: mol_type = other DNA
atgattagtgctgcctggtccatatttctcatcgggaccaaaatcggtcttttccttcaagttgcccccctgtccgtgatggccaaatcatgtccctccgtgtgccggtgtgatgctggattcatctattgtaacgataggtttttgacaagtattccaactggcatacctgaggacgccaccacactgtatctacaaaacaaccagattaataacgccggtatcccctccgacttgaaaaatctattgaaagtggagcggatttatctgtaccataattccctggacgagtttcctacaaatctccctaaatacgtgaaggagctccatctgcaagagaacaatattcgtaccattacatacgattcactgtctaagatcccctatttagaagagctgcatttagatgacaactccgtatccgctgtcagtattgaggaaggggcctttagggactcaaactatctgcggctgttgttcctctctcgaaaccacctgtcgaccatcccatggggactgccccgcacaatcgaggagctgcgacttgatgacaatagaatctccacaatttcgagcccaagtctccagggtctcacctccctgaagcgtcttgtgctggacgggaacctgttgaataaccatggcttgggcgataaagtcttcttcaacttggtaaatctaactgagctctcgttggttcgcaattccctgacagctgctccagtcaatctgccgggtacaaaccttagaaaactgtacctccaggacaaccacatcaacagggtccctccgaatgctttcagctatcttcggcaattatacagacttgatatgtcaaacaataacctgtcaaatcttccccaggggatttttgacgacttggataatatcacccaattaatactgcggaacaacccatggtattgcggttgcaaaatgaagtgggttcgagattggttgcagagcctgcctgtgaaggttaatgtgagggggctgatgtgtcaggctccggagaaggtgcgcggcatggccattaaggacctgaacgccgaacttttcgactgcaaggatagtggaatcgtaagcaccattcaaattaccactgccattccgaataccgtgtacccagcacagggccagtggcctgcacctgtcactaagcagcccgatattaagaatccgaagctgactaaagatcaccaaaccaccggtagcccctctagaaaaaccattaccatcactgtgaagagtgtcacgagcgataccatccacatatcttggaaattggccttgcccatgaccgccctgaggctctcgtggctgaagctgggccacagcccagccttcggcagcatcactgaaaccatcgtgacaggggaacgtagcgaatacctggtcaccgccctggagccagatagcccctacaaagtgtgcatggtgcctatggaaacttcaaatctttacttgttcgatgagacaccggtgtgcatcgagacggagacagccccactgaggatgtataatcctaccacaacactgaacagagagcaggaaaaggagccctataagaaccccaacctgccgctggccgctattattgggggagccgtcgctcttgtcacaattgccttgctcgccttggtctgctggtacgtgcatcgcaacggctcgttgttctcccggaactgtgcatacagtaagggacgaaggcgtaaggatgattacgcagaggcaggtactaaaaaagataattcgatcctggaaataagagagacttcctttcaaatgcttcccatctccaatgaacccatctctaaagaggagtttgtcatacacaccatttttccccccaacggaatgaacctgtataaacaatcccagtag

SEQ ID NO: 117074 - DNA, 402 bp, synthetic construct
  misc_feature 1..402: note = Description of Artificial Sequence: Synthetic coding sequence
  source 1..402: mol_type = other DNA
atgccaccctcgaagcctcatccaccggtggttgggaaggtcacccatcactcaattgagctttactgggatcttgaaaagaaagcaaaaagacagggccctcaggaacaatggtttcgcttctccatcgaggaagaggatcccaaaatgcacacatacggcataatatatacaggctatgcaacaaaacacgtcgtggaaggactggagcctagaacattgtatcgctttcgccttaaggtgacttcaccttctggagaatgcgagtattctcctttagtctctgtctccaccaccagttccatatggctgggcggggagccaatttctagcgagcaccttcaccgcgctgtgtcagttaacgacgaggatctgctcgtacgcatcctgcagggagggtag

SEQ ID NO: 117075 - DNA, 849 bp, synthetic construct
  misc_feature 1..849: note = Description of Artificial Sequence: Synthetic coding sequence
  source 1..849: mol_type = other DNA
atgccaccttccaaacctcatcctcccgtagtcggtaaggtcacacaccattccattgagctttattgggatctcgagaagaaggcgaagagacaaggtccccaggagcagtggtttcggtttagtatcgaggaagaggaccctaaaatgcacacatacggcatcatctatacaggttatgcaaccaagcacgtagtcgaaggtttagagccccgtactctctaccgatttcgcctgaaagtgacatccccttcgggcgaatgcgaatactcccccctcgtgagcgttagtacaactagctccatttggttgggcggcgagccaatcagctcagaacatcttcacagggctgttagcgtaaacgacgaagatcttctagtgcgcatccttcagggcggacgcgtgaaggtggacgttcccaacaaattcggatttactgcattaatggtggcagcccagaaagggtacacctcactgatgttagcttgctatgctggacacttagacgtggttaaatacttgcgccgccacggagccagttggcaggctcgtgatctagggggctgcaccgccctgcactgggctgcagacggcggtcactgctctgtcatcgaatggatgattaaggacgggtgtgaggtcgatgtggtggacaccgggtcaggctggacaccgctcatgcgggttagcgctgtgagcggcaaccaacgggtcgcctctctgctcatcgacgcgggagctaacgtcaatgtgaaggacaggaacgggaagactcccctgatgagcgtcgtgtcgctccttgaggagcgcaaaaaaaaacagagacccaaaaaaagctgtgtgtgctag

SEQ ID NO: 117076 - DNA, 1116 bp, synthetic construct
  misc_feature 1..1116: note = Description of Artificial Sequence: Synthetic coding sequence
  source 1..1116: mol_type = other DNA
ctccagaaacagaaaatcatgccaccgtcaaagccacacccccctgtggtgggcaaggtcacacaccattctatcgagctgtattgggacctggagaaaaaagcgaaaaggcaggggccccaggagcaatggtttagattctccattgaggaagaggaccccaagatgcacacttatggaatcatctacactggctacgctactaagcatgtggtggagggcctggagcctagaactctatacaggtttcggctgaaggttacgtccccatccggagaatgtgagtacagtcctctcgtgtctgtatcaacaacccgaccgagcctctcgaagtcgttggtcaaaatccgcatggttacttccgtgctgcacggacctcccactgaaaatacaggcgagccaatcagctcagagcacctgcatcgagccgtttccgtgaacgatgaggatctgctcgtgaggatcctacaaggcggaagagtgaaggtggacgtcccaaacaagttcggtttcaccgcacttatggtagctgcccaaaagggctacaccagattggtcaagatactggtgtcaaacgggacggatgtaaatctcaaaaacggctcaggtaaagactccttgatgctcgcttgttacgcagggcacctggacgtcgtcaagtatttgaggcggcacggagcgagttggcaagcgagagacctgggagggtgcactgccctacactgggctgccgatggaggtcactgttcggttatcgaatggatgataaaggacggttgtgaagtcgacgtggtggacaccggaagcggatggacacctctgatgagggtcagtgccgtatccggcaaccagcgggtagcctctctccttattgacgccggggccaatgtaaatgtaaaagaccgtaatggcaaaactcctttgatggtggccgtgctgaacaatcacgaagagctcgtgcagctattactggataaaggcgcagacgctagtgtaaagaatgagtttggaaagggcgtgttggagatggcccgtgtctttgacagacagagcgtcgtgagtttactagaggagagaaagaaaaagcagcgtccaaagaagtcatgcgtatgctag

SEQ ID NO: 117077 - DNA, 1038 bp, synthetic construct
  misc_feature 1..1038: note = Description of Artificial Sequence: Synthetic coding sequence
  source 1..1038: mol_type = other DNA
atggaaccgcaaaaaattatgccaccatctaaaccccacccgcccgtggtagggaaggtaacccaccactctatcgagctgtactgggacctggaaaaaaaagctaaaagacaaggcccccaagagcaatggttccgcttcagtattgaggaggaggatcctaaaatgcacacctatggtataatctatacgggatatgccactaaacatgtggtcgaagggctcgaacccaggaccctctacagattccgactgaaagtgacgtcaccttcaggggaatgcgaatattccccactcgtgtccgtaagcacgactagagagcccatctcttcagagcatctgcaccgcgccgtgagcgtgaatgatgaagatttgctcgtgagaatcctgcagggaggacgggtgaaagtggatgtgcctaacaaattcgggttcaccgctctcatggtggctgcccagaagggatataccaggctcgtgaaaattctggttagtaatggaaccgacgtgaacctgaaaaacggctccggaaaagattctctaatgctggcgtgttacgccggacacctggatgttgttaagtatctacgtcgacatggcgcttcctggcaagctcgcgacctgggaggttgcaccgctctgcattgggctgctgacgggggccactgttccgtgattgagtggatgattaaggacgggtgcgaggtcgacgttgttgacacaggaagcgggtggacaccactgatgcgggtctcagcggtgtccgggaatcaaagggtagcgagcctgttaattgatgcaggggccaacgttaatgtgaaagaccggaacggcaaaactcctttgatggtggcggtcctgaacaaccatgaggagctggtgcagctcctgctagacaaaggggcggacgcttctgtaaagaacgaattcggcaaaggcgtgctggagatggctagggtgttcgaccgtcagtcggtggtgtcattgctcgaggagaggaaaaagaaacaaagacccaagaaatcctgcgtgtgttag

SEQ ID NO: 117078 - DNA, 1020 bp, synthetic construct
  misc_feature 1..1020: note = Description of Artificial Sequence: Synthetic coding sequence
  source 1..1020: mol_type = other DNA
atgcccccaagcaagcctcatccccccgtagtgggaaaagtgacccatcacagtattgaactatattgggatctggagaagaaggctaaacggcagggcccccaggaacaatggttccgtttctctatcgaagaagaagatcctaaaatgcacacttacggtatcatttacactggttatgctacaaagcacgtggtggagggcctggagcccaggaccctgtatcggtttcgattgaaagtgacctctccgtcaggcgagtgtgagtatagccccctggtgtctgtttcaaccacacgggagccgattagcagcgaacacctgcatagggccgtgagtgttaatgatgaggacctcttagtccgtattcttcagggggggagggtcaaagtcgatgtcccaaataagtttgggtttacagccttaatggtggccgcccagaaaggatatacgcgactggtgaagattttggtgagcaacggtacagacgtcaatcttaagaacggctccggtaaagacagtctgatgctcgcatgctacgcagggcacctggacgttgttaagtacctgcggagacatggggcctcttggcaggctcgagacctcggaggctgtacagccctacactgggctgctgacggggggcactgctccgtcattgagtggatgatcaaagacggctgcgaggtcgatgtggtcgacacaggatctggctggactcccctgatgcgtgtgtccgcagtgagcgggaatcagagggttgcctccttactgattgatgcaggagcgaacgtgaacgtcaaggatagaaacgggaagacacccctgatggttgcagtgctgaataaccacgaggaactcgtgcaactcctcctcgataaaggcgctgacgcctcagttaagaacgagtttggaaaaggagtgctggagatggctcgggtctttgatagacaatctgtcgtgagcctgcttgaagagcgtaagaagaagcagcgaccaaaaaaatcttgtgtttgctag

SEQ ID NO: 117079 - DNA, 375 bp, synthetic construct
  misc_feature 1..375: note = Description of Artificial Sequence: Synthetic coding sequence
  source 1..375: mol_type = other DNA
atgcccccttcgaaacctcatccgcccgtggtcggaaaagtgacccaccattccatagaactgtactgggacctggagaagaaagccaagcgtcagggccctcaagagcagtggtttagattcagcattgaggaggaggatcctaagatgcacacatacggaatcatatacaccgggtacgctactaagcatgtggttgaaggattggagcctagaacgctctatcgatttcgtctaaaagtgaccagcccatccggggagtgtgagtactccccccttgtttctgtgtcgaccactagagaaccaatcagcagcgaacacctgcatagagccgtgtccgtgaacgatgaggaccttctggttaggatactttag

SEQ ID NO: 117080 - DNA, 402 bp, synthetic construct
  misc_feature 1..402: note = Description of Artificial Sequence: Synthetic coding sequence
  source 1..402: mol_type = other DNA
atgccgcctagcaagccacatccccccgtggttggcaaagtaacccaccactcaatcgaactttattgggatctcgaaaagaaagccaaaagacagggcccccaggagcaatggttcaggttttcaattgaggaggaggatccaaagatgcacacttatggaatcatatacacaggatacgctacaaagcacgtagtggaaggactcgaacctcggaccctgtaccggtttagacttaaggtgacaagcccatcaggagaatgcgaatatagtcctctggtatcagtatcaacaaccagttccatatggttggggggggaacccattagcagcgagcatttgcatcgggcagtctcagttaatgatgaggacctcctggtacggattctgcagggcggctag

SEQ ID NO: 117081 - DNA, 441 bp, synthetic construct
  misc_feature 1..441: note = Description of Artificial Sequence: Synthetic coding sequence
  source 1..441: mol_type = other DNA
atgcctccttctaagccccaccctccagtcgtggggaaggtgacccaccattccatcgaactgtattgggacctggagaaaaaggccaagcggcaaggcccccaagagcagtggtttcggttttcgatcgaggaggaggatcccaagatgcatacctacggaatcatatataccggatacgctacaaaacatgtcgtggaaggcttggaacctagaaccttgtatagattccgtcttaaggtgacatctcctagtggggagtgtgagtacagccccttggtgtcagtgagcaccacgtcagagtattctgatcgcccccacagccctttgtccagatcaatggagatgaccagcaacctggaaaagatcttctgcctgtcattcgggttaaccaggagcagaaacgatacaattttcaaacattgcaacaacatatgttag

SEQ ID NO: 117082 - DNA, 600 bp, synthetic construct
  misc_feature 1..600: note = Description of Artificial Sequence: Synthetic coding sequence
  source 1..600: mol_type = other DNA
taagaacctattagcagtgaacacctgcacagggcagtgagtgtcaacgacgaggacctcttggtacgcatccttcagggggggcgcgtaaaggttgatgtgccaaacaagtttggcttcacagcactcatggtggctgctcagaagggctatacccggctggtcaaaatactggtgagcaatggaacagacgtgaaccttaagaacggtagcggcaaggatagtctgatgttggcctgctatgctggccatctggacgtagtcaaatacctgaggcggcacggcgcttcatggcaggcacgggatcttggagggtgcactgctcttcactgggccgccgatggtgggcattgctctgtcattgagtggatgatcaaagatggttgcgaagttgacgtggtagacactggctccggctggacccccctcatgcgcgtttccgccgtttcagggaaccagcgggttgcctctctcttgattgatgctggcgctaacgttaatgtgaaagataggaacgggaaaactcccctgatgagcgtcgtgagtcttctcgaggagagaaagaaaaagcaacggccaaagaagagctgcgtctgctag

SEQ ID NO: 117083 - DNA, 735 bp, synthetic construct
  misc_feature 1..735: note = Description of Artificial Sequence: Synthetic coding sequence
  source 1..735: mol_type = other DNA
atggaagtaaccggagtgagcgccccgaccgtgacagtgttcataagtagttctttgaacaccttccgaagcgagaaaaggtacagccgttccttgacaatcgccgagtttaagtgcaagttagaactgctcgtcggctcccccgcctcttgtatggagctggaactgtacggtgttgatgataagttctattcaaagcttgaccaggaggatgcgctactaggtagttacccagtggatgacgggtgtcgcatccatgtgatcgatcactccggcgctcggctcggtgaatacgaagacgtgtccagagtcgagaagtacacaatttcgcaggaggcctatgaccagcgtcaggacaccgtaagaagtttcctgaaacgttctaagctgggacggtacaacgaagaggagcgggctcagcaggaagccgaagcagcacagaggttggctgaggagaaggctcaggcctccagcattcctgtgggctcaaggtgtgaggtccgagcagccggtcagtcaccacgccgcggcacagtgatgtacgtagggctgacagacttcaaaccaggatactggatcggggtccgttatgatgagcccttgggtaaaaatgatggatccgtgaacggaaagaggtacttcgaatgccaggcgaagtatggcgcattcgtcaagcctgccgtggttactgtgggggactttcccgaggaagactacgggctggacgagatctag

SEQ ID NO: 117084 - DNA, 1497 bp, synthetic construct
  misc_feature 1..1497: note = Description of Artificial Sequence: Synthetic coding sequence
  source 1..1497: mol_type = other DNA
atggactcccaaaaggaggcacttcagagaatcattagcactttggcaaataaaaatgacgaaatccagaactttatcgatacactgcaccacactcttaagggcgtgcaggaaaattcttccaatatcctatctgaattggacgaggagtttgacagcctgtactccattctcgacgaagtcaaggaatccatgattaactgtatcaagcaggaacaggccaggaaatcccaggagctgcaaagccaaatcagtcagtgcaataacgcactggaaaactctgaggagctactggaattcgccacccgcagtttggatatcaaggagcctgaggagttctccaaggccgcccgacagattaaggaccgggtgacgatggcctctgccttcagactgtctcttaagccgaaagtgtctgataatatgactcacctgatggtggacttctcccaggagagacagatgctacagaccctgaagttccttccagtaccgaaggctcctgagattgatcctgtggagtgtctggtggccgataatagtgtgaccgtggcgtggcgaatgcctgaagaagacaacaaaattgaccattttatccttgagcatagaaagacaaatttcgatggcttaccgcgcgttaaagacgagcgctgttgggaaatcatcgataatatcaaaggcaccgagtatacgctgagcggcttaaagttcgacagcaaatatatgaattttagagtgcgggcctgtaacaaagctgtggccggggaatacagcgaccccgttaccttagagacaaaggcactgaacttcaatctcgataatagtagctctcatctgaatctaaaagtcgaagacacctgcgtagaatgggatcctactggtggcaaaggacaggaaagtaagatcaaagggaaggagaataagggcagatcaggaacaccttcaccaaagcggacttcagtgggttctcgcccccccgccgtgcgcggatcaagagatcggttcaccggagagagctatacagtgctcggtgatactgctattgaaagcgggcagcactactgggaagtaaaggcacagaaggactgtaagagttactccgtgggagtcgcctacaagacgctgggaaaatttgatcaactgggtaagactaacacttcatggtgcatacacgtgaataattggctccagaatacattcgcagcaaagcacaataacaaagtgaaagcactagacgtgactgtccccgagaaaatcggggtattctgtgatttcgatggaggacaactctctttctatgatgccaattctaagcagctcctctatagtttcaagactaagttcacacagcctgtccttccggggtttatggtgtggtgcggcggcctcagtctgtccaccggaatgcaggtgccatctgcggtgcggaccctccagaagtctgagaacggcatgacagggagcgcctcctctctaaacaatgtcgtcacccagtag

SEQ ID NO: 117085 - DNA, 438 bp, synthetic construct
  misc_feature 1..438: note = Description of Artificial Sequence: Synthetic coding sequence
  source 1..438: mol_type = other DNA
atggactcccaaaaggaagctttacagagaattatctctaccctcgctaataaaaacgacgagatccagaacttcattgacacactgcaccacacactgaagggggtacaggaaaacagtagcaatatcctgtcggaactcgacgaggagtttgacagcctctattccatcctggatgaggtgaaggagagcatgataaattgcattaagcaggaacaggctagaaaatcacaggagctccagagtcagatatcccagtgcaataacgctctcgagaattcagaggagctgctggaattcgctacaagatctcttgacataaaggaacccgaggaattcagcaaggtgcacaagaattgcatcaacacgcttaataaggggagttgcatcttcaagaaggcgtttctcttttttttctcattcggctttctctattag

SEQ ID NO: 117086 - DNA, 1593 bp, synthetic construct
  misc_feature 1..1593: note = Description of Artificial Sequence: Synthetic coding sequence
  source 1..1593: mol_type = other DNA
atggactcccagaaatactgcttcaaagaaaacgaaaacgtgactgtggataaagcttgcttcctgatctccaacataacgatcggacccgaatctatcaacctccaacaagaagcgctgcaaagaataatcagcacattagccaataagaatgatgaaatccagaactttatcgatacactgcaccacaccttgaagggagtccaagaaaattccagcaacattctgagcgaactcgacgaggagttcgattccctctactccatccttgacgaggtcaaggaaagcatgatcaattgcatcaagcaggagcaggcccgaaaatctcaggagcttcagtcccagattagccaatgtaataatgctctggagaatagcgaggaactactcgagttcgccaccagaagtctcgacataaaggaaccggaagagttctccaaggccgccaggcagattaaagacagagtcacgatggcctctgcctttcggctatcactgaaacctaaggtgagcgacaatatgacacatctgatggtggacttttcacaggagcggcagatgctgcagacgttaaagttcctccccgtaccaaaggcgcctgaaattgaccccgttgagtgcctggtggcagacaactctgtgaccgtcgcttggaggatgccggaagaagataacaaaattgaccattttatcctggaacatcggaaaaccaattttgacgggctgccccgagtcaaagacgaaaggtgctgggagatcattgataatatcaagggcacagagtacacacttagcggcttgaagttcgactctaagtatatgaacttcagagtacgtgcctgtaacaaggctgtggccggagagtacagtgacccagtcacgctggagacaaaagccctgaatttcaacttggataatagtagctcccacctgaacctgaaggtggaggacacttgcgttgagtgggacccgaccggaggcaagggccaagagtctaaaattaaaggcaaggagaacaaagggcgctccggaaccccatctcctaaacgcacatccgtgggttcccgacctcccgctgtacgcgggtcccgtgatcggttcacaggcgaatcgtatactgtactcggagacaccgcaatcgaaagcggccaacattactgggaggtgaaggcgcagaaagattgcaagagttattccgtaggggtggcttacaaaacactgggaaaattcgatcagcttggaaaaactaacaccagttggtgtattcacgtgaataactggctgcagaacacattcgctgccaagcataacaataaggtgaaggcattagatgtgaccgtgcccgagaaaattggggtgttctgtgacttcgatgggggtcagctgtctttttatgacgccaatagtaagcagctgctgtattcattcaagacaaaatttactcagcccgtgctgcccggctttatggtttggtgcggggggctaagtctgtccactggaatgcaggtgcctagtgcagttcggaccctacaaaagtcggagaatggaatgacaggctcagccagctctctgaacaatgtggttacacaatag

SEQ ID NO: 117087 - DNA, 1152 bp, synthetic construct
  misc_feature 1..1152: note = Description of Artificial Sequence: Synthetic coding sequence
  source 1..1152: mol_type = other DNA
atggcaagcgcatttagactcagcctcaagcccaaggtgtcagataacatgacgcacctgatggtggacttttcccaagaaagacagatgctgcaaaccttgaagttcctccctgttcctaaggccccagaaatcgatcctgtcgagtgccttgtagctgataactcagtcactgtggcttggcggatgccagaggaggacaacaaaattgatcacttcatcctggagcaccgcaagacgaactttgatggccttccacgagtgaaggatgagcgctgctgggagatcatcgataacattaaaggcaccgaatatacactgagtgggctgaaattcgattctaagtatatgaactttcgtgtgagggcctgtaataaggcagtggccggtgaatactccgaccctgtcacgctggaaacaaaagccctgaatttcaacttagataattcctcatctcatttgaacctcaaggtggaggatacttgtgtcgaatgggatccaaccgggggaaagggacaggaatcaaagatcaaagggaaggagaacaaggggagtgtacatgtgacaagcctgaagaaacatactagcggtacgccatctccgaaacgaacaagcgtcggcagccgcccccctgcggttcgagggtcccgggataggttcaccggggagtcgtacaccgtcttaggggataccgccattgagagcgggcaacattattgggaggtcaaagctcaaaaggattgcaaatcatacagcgtgggagtcgcttacaaaacattagggaagtttgaccagctgggcaagacaaatacctcatggtgtattcatgtaaacaattggctgcagaacacctttgccgctaagcacaataataaggtcaaagccttagacgtaaccgttccagagaaaatcggtgtgttctgtgatttcgacgggggtcaactgtcattctacgatgccaactccaaacagctgctctacagctttaagacaaaatttacacagcccgtgctccccggttttatggtatggtgcggtggcctgtcactgagtacagggatgcaggtcccgagtgccgtgaggacacttcaaaagagtgagaacggcatgacaggcagtgccagttctcttaataacgtagtcacacagtag

SEQ ID NO: 117088 - DNA, 5685 bp, synthetic construct
  misc_feature 1..5685: note = Description of Artificial Sequence: Synthetic coding sequence
  source 1..5685: mol_type = other DNA
atggcacctgaggctggcgccaccctgcgtgcccccagacgcctgtcttgggccgccttgctacttttggctgcattattacccgtcgcgagctccgccgccgcttccgtggatcaccctctcaaacctagacacgtcaaattactgtctaccaaaatgggccttaaggtcacctgggacccaccaaaagatgctacgagtaggcctgtggaacactacaatatagcctatggcaaatcactgaaatcactgaaatatattaaggttaacgccgaaacttacagcttcctgattgaagatgttgaaccaggagtggtatatttcgttctgctcacagcagagaatcactccggtgtgtctagacccgtgtacagggctgagagccctccaggcggcgaatggatagagattgatggctttcccatcaaagggccagggccatttaatgagaccgtcaccgaaaaggaagtccctaataagcctctgcgcgtcagggtgcgcagttcagacgaccgtctgtcagtggcctggaaggccccaagactgagtggcgcaaagtcaccaaggcgaagcagaggctttcttttaggatacggcgaaagcggccgcaaaatgaattacgtgcctctgactagggatgagcggacacatgagattaaaaagttagctagtgagtctgtgtatgtggtgagcttgcaatccatgaattcacagggaaggagccagccagtgtaccgagccgcccttactaaacgtaagatctccgaggaggatgagttggatgtgccagacgatattagcgttcgagtcatgtcctcacaatctgtcttagtgtcctgggtggacccagtactggagaaacaaaaaaaagttgtggcatctcgtcagtatactgtgaggtatagggagaagggcgagctggcccgatgggactataagcagatcgcaaataggcgggtgcttattgagaacctgatccccgataccgtatacgagttcgctgtgcggatttcacagggtgaaagggatggtaaatggtcaacctcagtctttcagaggactccagaatcagcaccaactaccgcacctgagaacctcaatgtttggcccgtgaacggcaaacccacagtcgttgcggctagctgggacgcccttccagaaacggaaggcaaagtcaaagagtacattttaagttatgcacccgcactgaagcctttcggtgctaaatcactgacatatcctggggacacaacttctgccctggtcgatggtctgcaacccggcgaaaggtacctgttcaaaatcagggcgaccaatcgtcggggccttgggccacactctaaagcatttattgtggctatgcctactacaagcaaggctgatgtagagcagaacacggaagataatggcaagccggagaagcccgaaccttcaagccctagcccccgcgccccagcctcctcccagcacccgagtgtaccagcatctccccaggggcggaacgctaaggacctcctgcttgacctaaaaaataaaattcttgctaatggtggggcccccagaaagccacagcttagagcgaaaaaagcagaagagctcgatctccaatctaccgagattacaggagaagaagagctgggttcccgcgaggatagccccatgtcaccgtctgacacccaggatcaaaagagaacactacgcccgccttcgcgccatggtcattcggtggttgccccaggccgcaccgccgttagagcccggatgccggccctccccagaagagagggagtggacaagccgggcttctcactagctacccagccacgtccgggagctccaccatcagcctcagcttctcccgcccaccacgctagcacacagggcaccagtcatagaccatccctgcccgcttcattgaacgacaacgacctggttgatagtgacgaggatgagagagctgtgggctctctacaccctaagggggcattcgcacagcctcggcctgctctgtccccaagcaggcagtcaccttcatctgtgctgcgggataggagttccgtccatcccggtgccaagccagcgtcccctgcccgccgcacccctcattctggcgccgcagaagaggattcctccgcctcagcgcctccaagcaggctcagtcctccacacggggggtcatctagattactaccgacacagcctcacctcagcagcccattgagtaagggcggtaaggacggagaagacgcccccgccacgaattctaatgccccttcacggagcactatgtccagcagtgtgtcttcccacctgagttcacgaacccaggtgagcgagggggcagaggcatctgacggagagagccatggcgacggtgaccgcgaggacggcggacgccaggctgaagccaccgctcagaccttgagagcaaggcctgccagcgggcacttccatctgctgagacacaaaccttttgccgctaatgggcggagccctagcaggttcagcatcggtcgggggccacgattacaaccttcttcctcaccccaaagcacggtaccctcaagggcccatcctagggtgccctcacactcagactctcatccgaagctgtcatcaggaatccacggagatgaggaagacgagaagcccttgcccgctactgtcgtcaatgaccacgtgccatcctcctcaagacagcccattagcaggggttgggaagacctgcgcaggagcccacagaggggtgccagcctccatagaaaggaacctattccagaaaatccaaagagcaccggggccgacacccaccctcaaggtaagtattcttccttagctagcaaggctcaggacgtgcaacaatccacagacgccgacacagaaggtcattcgccaaaagcgcagcctgggtcaacagataggcatgcgtctccggcaaggccccccgctgctagaagccaacagcacccttcagttcctagacgaatgaccccaggtcgagcgccccaacagcagcccccaccccctgttgcaacctcccagcatcatcctgggccccaaagccgtgacgccgggaggtcaccttctcagccgagactgtccctgacgcaggctggtagaccgaggcccacctcacaaggtcgcagccattctagttccgatccatatactgcatcctcaagaggcatgctgcctaccgcgctgcagaaccaagatgaggatgcccagggcagctatgacgatgacagtaccgaggtagaggcccaggacgtgagggcccccgcacacgccgcaagggcgaaagaggccgccgccagcttgcctaagcatcaacaggtggagtctcctacaggggctggagctggtggtgaccacagaagccagagaggacatgctgcatctcctgcgcggcccagccggcctggaggcccgcagtcccgggctcgggtgcccagtcgcgcagcgccaggaaaatccgagccgccgtccaagagacctcttagttctaagtcacagcagagtgtgagtgccgaggacgacgaagaggaggacgccggttttttcaagggagggaaagaggacttactcagcagctcagttcctaaatggccatcaagtagtacaccacgaggcggaaaagacgccgacgggtccctcgctaaggaagagcgggaacctgccatcgccctcgctccccgcggggggagcctggcgccggtaaagcggcccctgcccccacctcccggcagttccccacgcgcctctcacgtgccttctagactgccgccaagatcagctgctactgtgtctccagtggcgggaacacacccttggccacagtacaccactagagctcccccagggcacttctctacgacccctatgcttagtttaagacaacgtatgatgcatgcacggtttcgaaatcccctgtcacgacaaccagccagaccctcttacaggcaagggtacaatggccggccaaacgtcgaaggaaaggtgttacctggaagtaatgggaagccaaatgggcagagaattattaacggaccacaaggtaccaagtgggtcgtagatctggacagaggactggttctgaatgctgaggggcgttatcttcaagactcccacgggaatcctctacgtattaaattgggtggagatggccggacgattgtggacctcgaggggactccagtcgtgtcccccgacgggcttcccctgtttggacagggtcggcacggcacccccctcgcaaatgcacaggacaaacctatcctgtccctgggaggaaaaccactggttggtctcgaagtcataaagaagaccacccacccccccactactacaatgcagcccaccactacaaccactccacttcctaccacaacaacaccaagacccaccaccgctacgactcgtcgaacaaccaccacccggcgcacgactacacggaggccaaccactaccgtacgaactacaacccgtaccacaacaactaccactcctaccccgaccactcctatcccaacctgccctcccggaacattggaaaggcatgacgacgacgggaatcttatcatgtcctcaaacgggatcccggagtgctatgcggaagaagatgaatttagtggactggagacagataccgccgtgcctaccgaagaagcttatgtaatttacgacgaagattatgagtttgaaacctcaagaccaccaacaaccactgagcccagcactacagcaacaactccccgggtcatccccgaggagggcgcaatttccagtttcccagaagaggagttcgatttagccggtagaaagagatttgtcgcaccctacgtgacttatctcaacaaggatccctctgccccatgttccttgacggacgcactcgatcatttccaagttgacagtcttgacgaaattatccccaatgatctgaagaaatccgaccttccaccccagcacgccccaaggaacattaccgtggtcgcggtcgaggggtgtcactcctttgtgattgtggattgggacaaggccacccctggtgacgttgtaactggttacctggtgtattccgctagctacgaagacttcataagaaacaagtggtccactcaggcttcatcagtgacacacctccctatagaaaacctgaagccaaatacccggtactactttaaggtccaggctcaaaacccccacggatacggccctataagcccatcagtatcctttgtcacagaatcagacaacccactcctggtggtgaggcctccagggggggagccaatctggatcccttttgcttttaaacacgatccaagttatacggactgccacggtcgtcagtacgttaagcgaacctggtatcggaaatttgtcggtgtcgtgctgtgtaattccctgcggtataaaatctacctgagtgataacctgaaggatacattctacagtattggagactcctgggggcgtggagaagatcactgccaatttgtcgactcacacttagatggtcggacagggccccaaagctacgtggaagcattaccaacaattcagggctattacagacagtaccggcaggaacccgtccggttcggcaacataggcttcggaacaccttactactacgtgggctggtatgagtgtggtgtgagtattccaggaaagtggtag

SEQ ID NO: 117089 - DNA, 5496 bp, synthetic construct
  misc_feature 1..5496: note = Description of Artificial Sequence: Synthetic coding sequence
  source 1..5496: mol_type = other DNA
atggcccctgaggctggtgctaccctgcgggcacctaggaggttgagctgggccgcacttctcctcctggctgcattgttgcccgtcgcaagttccgccgctgcaagtgtggatcaccccctcaaacctagacatgtgaagctgctgtccactaagatgggattgaaagttacttgggatccccccaaagatgccacctccaggcctgtggaacactataacatcgcatacggcaagagtcttaagtcgcttaaatacatcaaggtgaatgccgagacatatagtttcctgatcgaggacgtagagcccggcgtagtgtatttcgtgcttctgacggcagagaatcactctggggtgagtaggccagtgtatcgcgccgagtcaccacctggcggggagtggattgagattgatggtttccccatcaagggtcccggaccttttaatgaaacggtcacagagaaggaggtgccaaataagccactccgcgtcagagtacgcagcagcgatgaccggttatctgtggcctggaaggcaccccgcctctccggcgctaaatcacctcgaaggagccgaggcttcctcttgggatacggtgagagcggcagaaaaatgaactatgtgcccctcaccagggatgagaggacgcacgagattaagaaattggcaagtgagagcgtttacgtggtgtcactccagtccatgaatagtcagggcagaagtcaaccagtctatagagccgcactgactaagcggaagataagtgaggaggatgaacttgacgtgcccgacgacatctcagtcagagtgatgtccagccagtcggtgctggtttcatgggtggaccccgtgctagaaaagcagaagaaagtggtcgccagtagacagtacactgtgagatatcgcgagaagggcgagctagctaggtgggattataagcagattgctaacaggcgtgtcctaattgagaatctcatccccgacacggtatacgaattcgccgtgaggatctcccaaggggaaagagacggaaagtggagtaccagcgtctttcagagaacacccgagtctgcacccaccacggcccctgaaaaccttaacgtttggcctgtgaacgggaaaccaacagtggtggctgcctcctgggacgccctgcctgagacagagggaaaagtgaaggcctcaaaggcggatgtcgaacagaacaccgaggataatgggaagccagagaaacccgagccctccagcccatccccccgcgcccccgcaagttcacaacatccaagtgtgcctgcctctcctcaggggcggaatgctaaggacctgctgctggatctcaagaataagatactcgccaatggtggagcccccagaaaaccccagctgagggctaagaaagccgaggagctcgacctgcagtccaccgaaatcacaggcgaggaggagctggggtcccgcgaggatagccccatgagccccagtgacacccaggatcagaaaagaacacttaggccgccttctagacatggtcactcggtggtggccccgggccggaccgcggttagggctcgcatgcccgcgctgcccagacgtgagggggtggacaaacctggattctcactggctactcagccgaggcctggagcccccccctcagccagcgcctcgcctgctcaccatgctagtacccagggaacttcccaccggccgagtctccccgcatccctaaacgacaacgatctcgtcgactcagatgaggatgagcgtgccgtggggtcacttcatccaaagggtgctttcgcacaacctcggcccgcactgagccccagtaggcaatccccaagttctgtccttagagatcgttccagcgtgcaccctggagcaaaacccgccagcccggccaggaggacgccccattccggcgccgccgaggaggacagctctgcatctgctcccccttctcggctgtcccccccacacggcgggagtagcaggttactgcctacacaaccccacctgagcagccccctgagcaagggaggaaaggatggggaagatgcaccagccaccaattctaatgccccgtcgagatcaacaatgtcatcttcagtgtcgtctcatctctcctcaagaactcaagtatccgagggagctgaggccagtgatggggagagccacggagacggcgaccgggaggacggcgggagacaggcagaagctacggcccagactctgcgggctcggcccgccagcggccactttcatcttctgaggcacaagccattcgccgccaacggccggtcgcccagccgctttagtatcgggcgggggccaaggctgcagccaagttcaagcccccagtctactgtaccgagcagggctcacccccgagtccccagccactcagatagccacccgaaactttctagcggaatccacggagacgaggaggacgagaagccgctcccagcgacggtggtgaacgatcatgtgccttcatcctcccggcagccgatttcccgcgggtgggaagacctgaggcgctcccctcaacggggcgcgtccttgcaccgtaaggagcccatccccgagaatcctaaatcaactggcgctgatacacatcctcagggtaagtatagttcactagcctctaaggcgcaggacgtacagcaaagcaccgatgctgacaccgaaggccacagtccaaaggctcagcctggatctactgaccgtcatgcaagtcccgctcggcctccagctgcgcgcagccaacagcacccatcagtgccccggagaatgactcccggaagggctcctcagcaacaacccccaccccccgtcgctacctctcagcatcatcccgggccccagagccgggacgcagggcgatccccaagtcagccccgactgtctctgactcaggctggccgacctcggcccacatcccagggacgctcccacagttcttccgatccttacactgcgtccagcagaggcatgctcccaacagctctccagaatcaggacgaagacgcccaggggtcctatgacgatgacagcacagaagtcgaagctcaagacgtcagagccccagctcacgccgctcgggctaaggaagctgctgctagcttgccaaagcatcaacaggtggaatccccaactggtgcaggtgccggaggagaccatcggagccagcggggacatgccgcatcccctgcacggccgtctcggcccggcggaccgcagtcccgggcacgcgttccctcccgcgccgcccccggtaagtcggaaccaccatccaaacggcctctgtcaagtaaaagtcagcagtccgtctctgctgaagacgacgaggaagaagatgctggattttttaaggggggtaaagaggatctgctaagcagctcagtgcctaagtggccaagtagcagtacacctagggggggcaaggacgcagacggctctctcgctaaagaagaaagagagccggctatagccctggccccccgggggggcagcctggccccagtgaagaggcctctccctcccccccccggcagtagtccacgagcctctcatgttccaagtaggctgcctccacgttccgccgcaacagtgtctccagtggccggcacacatccttggcctcaatatactacgcgggctcccccaggtcactttagtacaacgccaatgctttcgctccgccagagaatgatgcatgcacgatttagaaatcccctgagccgccagccagctcgtcctagctaccgccagggctataacggcaggcccaacgtcgaggggaaagttcttcctggatccaatggcaagcccaacggtcagcggatcatcaacggtcctcaaggcaccaaatgggtcgttgatcttgaccggggcctggtgttaaatgctgaaggccgatatttacaggactcccacgggaatccattgcgtatcaaactcggaggcgatggcaggacaattgtggacctcgagggcaccccagtggtgtcccctgatggcctgcctctgttcgggcagggacgacacggaacaccgctggctaacgcccaggataagcctatcctgtcccttggcgggaagccgctggtgggtcttgaagtcattaaaaaaaccacgcatcccccgacgaccacgatgcagccaacgaccactacaacgcccctgcctacaactaccacccccagaccaaccacagctaccaccaggcgcactacaaccacacgcagaacgaccactcggcggcccactaccactgttcgcactactacacggaccacaaccaccacgactcctacacctaccacccctatccctacgtgcccacctggaaccctggaaagacatgatgacgatggaaatctcatcatgtcgagtaacggtatccctgaatgctacgctgaagaagacgaattctctgggcttgagactgatacggcagtccctaccgaagaggcttacgttatttatgacgaggattatgagttcgagaccagccggcctcccactaccacagagccctctaccacagccactacacccagagtcatcccagaggagggcgccatttcctcgtttcccgaggaagagtttgatctggctggccgcaagaggttcgtggcaccttacgtgacctatctgaataaggacccttccgctccttgttcactgactgacgcactggaccacttccaagttgatagcctcgacgagattattccaaacgacctgaaaaagtctgatctgcccccacagcatgctccaaggaacatcaccgtggtcgccgtagaaggttgccactcgttcgtaatcgtagattgggacaaggcgacacccggagatgtagtgacgggatacttagtgtattctgcctcttatgaagacttcattagaaacaagtggagtacccaagccagcagcgttacccacctgccaattgaaaacctcaagcctaataccaggtactacttcaaggtacaggcgcaaaacccccacggctatggtccaatttcaccctccgtttcattcgtaacagaaagcgataacccacttctggtggtgcgccctccaggtggcgaaccgatctggatcccctttgcctttaaacatgacccatcttacaccgactgccacggccggcaatatgtgaagagaacttggtacagaaagtttgtgggagtcgtactctgtaacagtctgcgctataaaatatatctgtccgacaatcttaaagacacattttattccatcggcgatagctggggtcggggggaagatcattgccagttcgtggattctcatctcgacggccgcacagggccgcaatcatacgtggaggcactgccgaccattcagggctactacaggcagtatagacaagaaccagttaggttcggaaatattggtttcggaacgccctattactacgtgggatggtatgagtgcggtgtgagcatccccggcaagtggtag

SEQ ID NO: 117090 - DNA, 3615 bp, synthetic construct
  misc_feature 1..3615: note = Description of Artificial Sequence: Synthetic coding sequence
  source 1..3615: mol_type = other DNA
atgtacgtaaccatgatgatgaccgatcagatcccacttgagctcccgccccttctgaatggagaggtggccatgatgcctcacttggtcaacggcgacgcagcacagcaggtgatattggtacaagtgaatcccggcgaaaccttcaccatacgagccgaggatggaactttgcagtgcatacaggggcctgccgaggtcccgatgatgagtccgaatggctctattcctccaatccatgtgcctcctggctatatctcccaagtgatagaggactccacgggcgtgcggcgggtagtcgtgacaccccaatcacctgagtgttatcctcccagctatccatccgcaatgtcaccgacacatcatctacctccttatctgacacaccaccctcacttcatacataactcacatacagcctactatccaccagtgaccggaccgggggatatgccccctcaattttttccccagcatcatcttccacacaccatttatggggagcaggaaatcattccattctacggaatgagcacctacattactagagaggatcaatattccaaacctccacataaaaaattgaaagatcgccaaatcgatcgtcagaaccggcttaatagccctccatcctccatatataaaagcagctgtacgaccgtgtacaatgggtacgggaagggccacagtggcggctcaggcggcggcggttccggatcagggccgggaataaagaagactgagcggagggcacgatctagccctaaatcgaacgactccgacttgcaggagtacgagctcgaagtaaagcgcgtgcaggacattttgagcggtatagagaagcctcaggtcagtaatattcaagcccgggcggttgtgctttcctgggcccctccagtaggcctttcatgtggaccacacagtggtttgtcgttcccatacagctatgaagtggctctgtcagataaggggagagacgggaaatacaaaataatttacagcggggaggaattagaatgcaatctcaaggacctaagacccgcaaccgattaccatgtacgagtgtatgccatgtacaactcagtcaagggatcttgcagtgagcctgttagctttacgacccatagctgcgctcccgaatgcccctttcctccaaagctggctcacaggagtaagtcatctttgaccctgcagtggaaagctccgattgacaatggaagcaaaattacaaactacttgctggaatgggatgaggggaagcgcaatagtggcttcagacagtgtttctttggctcgcagaagcattgcaagcttacaaaactctgccctgctatgggctacacttttaggttggctgctaggaatgatattggcacctctggttattctcaagaggtggtgtgttatacactgggaaacattccacagatgccatctgcacctaggcttgttagggcggggattacgtgggttacactgcaatggagtaagcctgagggttgttctcctgaagaagtaattacttacacccttgagatacaggaagacgagaacgataatctttttcatccgaagtacacgggtgaagacttgacctgcacagtgaaaaacctaaagcggagtacccagtacaagttccgcctgactgcttcaaacaccgaagggaaatcgtgtccttcagaagtcctggtctgcacgacctcacccgaccggccggggccccctactagacctttggtgaaaggtccggtcaccagtcacggtttcagcgttaagtgggacccaccgaaagacaacggtggatctgaaattctgaaatatctgttggaaataacagacggtaactccgaggccaaccaatgggaggtcgcctatagtggaagtgctacggagtacacgttcacacacctgaaaccaggaaccttgtacaagctccgcgcctgttgcatcagcacgggtggccacagtcagtgttctgaaagccttccagtccggaccctgagcattgccccagggcagtgccgtcccccgagagtactgggacgacctaagcataaagaagtccacttggaatgggacgtacctgcaagcgaatcgggctgcgaggtgagcgagtattctgtcgagatgactgagcctgaggacgtggctagcgaggtgtaccatgggcccgaactcgagtgtaccgtgggcaacctgttgcctggcacggtgtacaggttccgcgtgagggccctgaacgatggggggtatggtccttatagtgacgtgagtgaaattaccacagcagcagggcctcctggccagtgcaaggctccatgtatctcttgtactcccgatgggtgtgtgctggtgggatgggagtcaccagatagttcgggagcggatatctccgagtatcggctcgagtggggggaggacgaagaatccttagaattgatttatcacgggactgataccagatttgagattcgggacctgctgccagcagcacagtattgttgtagactgcaggctttcaaccaggccggtgcaggaccatacagcgaactggtcctttgccagacgcccgccagtgcccccgatccagtgtctaccttatgtgtgctggaggaggagccactcgatgcctatcctgacagcccaagcgcatgtctcgtgctgaactgggaagaaccttgcaataatggtagcgagatccttgcatatactatcgatctgggcgacaccagcataaccgtgggaaacactacaatgcatgtgatgaaagacctcctgccagagacaacctataggatccgaattcaggcgataaatgagatcggcgcaggtccattctcacaatttattaaagccaagacccgcccactgccacccctaccaccgcgcttggagtgtgcggccgccggaccccagtctcttaaactgaaatggggcgacagcaactctaagacgcatgctgccgaggatatagtgtatactcttcaattggaagacaggaacaagaggttcatctcaatataccgcggcccatctcacacatacaaggtacagagacttactgagtttacatgctactcttttcgaatacaagccgcatcagaggctggagaaggtccgtttagcgaaacttatacattcagtacaaccaaatccgtgcctccaacaattaaggcccctagggtcactcagctcgaggggaattcatgcgaaattctgtgggaaaccgttccttcaatgaagggggaccctgtgaattacatactgcaagttcttgtcgggagagagtcagaatataagcaggtttacaagggcgaggaagctacttttcagatttctggacttcagacaaacacagattaccgatttagggtgtgcgcttgccgacgctgtctcgatacttcccaggagcttagcggagctttcagcccatccgcagctttcgttttgcagcggtcagaggtgatgcttaccggggacatgggatcactggatgatcccaagatgaagagcatgatgcctacggatgagcaatttgctgccatcattgtgctggggttcgccacactgagcattctgtttgcttttatcttgcaatacttcttaatgaagtag

SEQ ID NO: 117091 - DNA, 216 bp, synthetic construct
  misc_feature 1..216: note = Description of Artificial Sequence: Synthetic coding sequence
  source 1..216: mol_type = other DNA
atgtatgtcactatgatgatgactgaccagattccgttagagctccctcccttgttgaacggtgaggtggcaatgatgccacatctcgttaacggggacgcagcccagcaggtcatacttgtccaggtaaatccgggcgaaacgttcacaataagggccgaagacgggactcttcaatgcattcaggaggtgaatgtgaaacgccattgcctctag

SEQ ID NO: 117092 - DNA, 3615 bp, synthetic construct
  misc_feature 1..3615: note = Description of Artificial Sequence: Synthetic coding sequence
  source 1..3615: mol_type = other DNA
atgtacgtgactatgatgatgacggatcaaattccactcgagcttcctcctctgctgaatggggaagtcgctatgatgccccacctggtaaacggcgatgccgctcaacaggttattctggtccaggttaatcccggagaaacctttaccatcagagcggaggatgggacattgcagtgcatccagggacctgcagaagtgcctatgatgtcaccaaatgggtcgatacccccgattcacgtgccccccggctacatctcccaggtgattgaggattctactggtgtgagacgggttgtagtgacaccccagagcccggaatgctaccctccgtcttaccctagcgctatgtcgcccacccatcacctgcccccttatttaacccaccacccccatttcatccataacagtcacacggcctactatcctcctgtgacagggccaggcgacatgccccctcaattttttccacagcatcacctgccacatacaatctatggagaacaagagattatcccattttacggtatgagtacctacatcacacgggaggatcagtactctaagccacctcataagaaactgaaggaccgtcagattgatcggcaaaatagactgaacagccctccatcatcaatctacaaaagctcatgtactacagtgtataacgggtatggcaagggccactcagggggaagcggcggtgggggcagcggcagtgggccagggatcaagaaaaccgagagacgcgctaggtcaagtccaaaaagtaacgatagcgacttacaggagtatgagctggaggtcaagagggtgcaggatattctgagtggcatagaaaagcctcaagtttcgaatatccaagcccgagcagtcgtcttgagctgggctccacctgtgggattatcatgcggtcctcactccggactctccttcccatactcttatgaagtggctctttcggataagggtagggacgggaagtacaagatcatttactctggggaagagttggaatgcaacctcaaagatttgcgccccgcaaccgactatcatgtgagggtttatgctatgtacaatagcgtgaagggatcttgctccgaacccgtaagcttcacgacgcactcatgcgccccggagtgtccctttccccctaaactcgctcatcgatccaaatcaagcctaaccttgcagtggaaagcacccatcgataacgggtccaaaattacaaattatctgctggagtgggacgaagggaaaagaaacagcgggttccggcagtgtttctttggctctcagaaacattgcaagttgaccaagctatgccctgctatgggctatacttttaggctggcagcccgcaacgacatcggaaccagcggatattcacaagaggtggtatgttacacattggggaacatccctcagatgccttcggctcctcggctagttcgcgcagggatcacatgggtgacacttcagtggtctaagccagagggctgtagcccggaagaggtcattacctacactctcgagatacaggaggatgagaatgataacctgtttcatcccaagtacactggggaggatctgacgtgtactgtcaaaaatctcaagcgttccacacagtacaagttcaggctcacagcatctaataccgagggaaaatcatgtccaagcgaagtgctagtgtgcacaacgtcccccgacagacccggtcctcctaccaggccgttggttaaaggcccggtgacaagtcacggttttagtgtcaaatgggacccccccaaagacaatggcggatccgagatccttaagtaccttctagagattacggatgggaacagtgaagccaaccagtgggaggtggcatactcgggctcggctacagaatatacctttacccacttgaaacctggcacattgtataagttgagagcatgttgtatctctacaggcgggcatagtcagtgtagtgagagcctccctgtcagaacgcttagcatagctcccggacagtgtcggcccccccgagtgctgggacggccgaaacacaaggaggtgcatctcgagtgggatgtgcctgcatcagaatccggttgtgaagtcagtgagtactccgtcgagatgacagagcctgaggatgtcgcctccgaagtatatcatgggccggaactggaatgtacggtcggcaacctgctccccggtactgtgtatcgcttccgcgtgcgggctctgaatgacggaggctatggcccgtatagtgacgtgtccgaaatcacgaccgctgccgggcctcccggacagtgcaaagcaccctgtatctcatgtacacccgacggatgcgtcctagtcggttgggagagccctgactctagtggggccgacatctccgagtataggctcgagtggggagaggatgaagaaagtctggagctcatttatcatggtacagacaccaggtttgaaatccgcgacctgctgccagcagctcagtattgttgcagacttcaggcgttcaatcaggccggagccgggccatatagcgagctcgttctgtgtcagacacctgccagcgcgcccgaccctgtgagtacactgtgcgtcctggaggaggaacctcttgacgcttaccctgactcgccttctgcgtgcctggtgctgaattgggaggaaccctgtaataatgggagcgaaatcctggcatataccattgatctgggcgataccagcatcaccgtgggaaacacaactatgcatgtaatgaaggacctgcttcccgaaaccacgtaccggataaggatccaggccataaatgagatcggagcagggcccttctctcagttcattaaagcgaagacaagaccactgccccctctccctccccgattggaatgcgctgctgccggccctcagtcactcaaattgaagtggggggactctaactcaaaaactcacgcggctgaggatattgtgtatacgttgcagctcgaagaccgcaacaaacgctttatcagtatctataggggaccatctcacacctataaagtccagcggcttaccgagttcacatgctattctttcaggattcaggcagcgtctgaggctggagagggcccattctctgaaacgtacacattcagtaccacaaaaagcgttccacccactatcaaagcgccaagagtgacgcagcttgagggtaacagctgtgagatactgtgggagacagtaccttcaatgaagggcgatccagtcaactacatcctgcaggtgttggtgggtcgggagagtgagtacaaacaggtctataagggggaagaggcaacgttccagatatcgggactccagactaataccgactaccgatttcgagtgtgcgcttgtcggcggtgtctcgatacaagtcaggagctctcaggagcattctcaccctctgcagcctttgtactccagcgctcagaggtaatgcttaccggagatatgggctccttggatgaccccaaaatgaagtctatgatgccaactgatgaacaattcgccgcaattatcgtgcttggattcgccaccctgtcaatcttgtttgcctttatactgcagtattttctcatgaaatag

SEQ ID NO: 117093 - DNA, 3615 bp, synthetic construct
  misc_feature 1..3615: note = Description of Artificial Sequence: Synthetic coding sequence
  source 1..3615: mol_type = other DNA
atgtatgtgaccatgatgatgaccgaccaaatacctcttgaactcccaccgctcttgaacggcgaagtcgcgatgatgcctcatctggttaatggcgacgccgcccagcaggtgatcctcgtgcaagttaatccaggggagacgttcaccatccgggctgaggatggaacactccagtgtatccagggccccgcggaagtgcctatgatgagcccgaacgggagtatcccccctatccacgtgcccccgggatatattagccaggttatcgaggattcgacaggcgtgcggcgcgtggtggtaacgccccaatctccagagtgttatccaccttcctacccatctgccatgagtcctacgcatcacctgcccccatatcttactcaccaccctcatttcatacacaacagtcatacggcttactatccaccagtgaccggtccaggcgacatgcctcctcagttcttccctcagcaccaccttcctcataccatttatggagagcaggaaataattcccttctatggcatgtccacctacattacaagggaggatcagtactctaagcccccccataaaaaactgaaggatagacaaatcgataggcaaaatcgtcttaactcaccccccagctccatctacaaaagctcctgtaccactgtttataatggctatggtaaaggacattcaggagggagcggcggtggtggtagcgggtctggtcctggaataaagaagaccgaacgcagagcaagaagtagtcccaagtccaacgactcggacctgcaggagtacgaactcgaggtgaagcgggtgcaagatattctgagcggtattgagaaacctcaggttagcaacattcaggctcgagcagttgtgctctcttgggcccctcctgtgggtctgagctgcggcccccactcgggactgtcatttccttacagctacgaagtggcactatccgataaaggcagggacgggaagtataaaatcatctattccggggaagagctcgagtgtaacttaaaggatctgagacccgctacggactaccacgtgagagtctatgccatgtacaactctgtgaaagggtcctgcagcgagcccgtctcatttaccactcacagctgtgctccagagtgccccttcccccccaaattagcccatagaagcaaatcttcactgactctgcagtggaaagctcctatagacaacggcagcaagatcacgaactacctcttggagtgggacgaggggaagcgaaactcaggatttaggcagtgtttttttgggtctcagaaacattgtaaacttactaaactgtgtccagccatgggatataccttccggctcgccgctcgtaacgacatcgggacctctggttatagccaggaagtcgtgtgttacactctggggaacatccctcagatgccttccgctccacgccttgtgcgcgctggtataacctgggtgaccttgcagtggagtaaacccgaagggtgcagtcctgaggaagtgattacatataccctcgagattcaggaagacgagaacgataatctttttcatcccaaatacaccggtgaagacctgacttgtacagtgaagaaccttaaacgatctacacagtataagtttagattgaccgctagtaacactgaaggcaaaagctgcccttctgaagttctcgtgtgtaccacaagtcctgaccgtcctggcccaccaacacggcctttggtcaaggggcccgtgactagccatgggttctccgttaaatgggacccccctaaggacaacggtggcagcgaaatactgaagtacctgctggagataaccgacggaaactctgaagctaaccagtgggaggtggcgtatagcggctcagcgacggagtacacgtttacccatttaaagcctggaacgctgtacaagcttagggcttgttgtatctcaacaggtgggcatagccagtgctcagagtctctccccgtacggaccctctctatcgccccggggcagtgtcggcctccaagagttctaggacgacctaaacacaaagaagtgcacctggagtgggacgtgcccgcaagtgaatccggatgtgaggtgtccgaatacagcgttgaaatgaccgaacctgaggatgtcgcctccgaagtatatcatggacctgagctggagtgtaccgtgggcaaccttttgcctggtaccgtgtatcggtttcgagtcagggcgctcaacgacggaggatatggcccttacagtgatgtctcggaaatcaccactgctgcagggccccccggacagtgcaaagcgccatgtatttcgtgtacaccagatggctgtgtcctggtgggctgggaatcccctgactcgagtggggctgatattagcgagtaccggctggagtggggcgaagatgaagagagtctagagttaatttaccatggcacagacaccaggttcgagatccgggacttgttgccggccgcgcaatattgttgccgcctccaggccttcaaccaagctggagcgggaccctacagtgagctggttctctgccagacacccgccagcgctccggacccggtgagcaccctgtgtgtccttgaagaggagcccctggacgcctaccctgattcccctagcgcttgccttgtacttaactgggaggaaccctgcaataacggcagcgagatccttgcctatactatagacctgggggacacctccatcactgtcggtaacaccactatgcatgtcatgaaggacctcctacccgagaccacgtatagaatccggattcaggcgattaacgagattggcgctgggccgttctctcagttcatcaaggctaagactcgacccctgccccccctgccaccacgccttgagtgcgctgctgctgggccacagagcctgaagttgaaatggggcgattcaaactccaagacccatgccgccgaggatatagtatacactctgcaattagaggatcggaataaacggtttattagcatttacaggggtccaagccatacatataaggtgcagaggctgactgaatttacctgctattccttcagaatccaggcagcttctgaagcgggggaggggcccttttccgaaacatatacattttccacaactaaatcagtgccccccaccattaaggcacctagagtcactcagcttgaggggaacagttgcgagattctgtgggaaaccgttcctagcatgaaaggcgatcctgtgaactacatcctgcaggttttggtggggcgagaaagcgagtataaacaagtgtataagggggaggaagccactttccagatctctggactccagaccaatacggactacaggttcagggtttgcgcgtgccggcgatgtctcgataccagccaagaactgtcaggagcattcagtcccagcgctgcctttgtattgcagcgaagtgaagtgatgctcaccggcgatatggggtcccttgatgatcccaaaatgaaatcgatgatgcctaccgacgaacagttcgctgcaatcattgtcctggggttcgccactttgtctatcctatttgcgttcatattgcagtatttcttaatgaagtag

SEQ ID NO: 117094 - DNA, 627 bp, synthetic construct
  misc_feature 1..627: note = Description of Artificial Sequence: Synthetic coding sequence
  source 1..627: mol_type = other DNA
atgttcaccaaggaaaaaatttggtctgaggtgatcctggtgcaggtgaatccaggggaaaccttcactattcgcgccgaggacggcaccctccagtgtatacaggggcccgccgaggttccaatgatgagccccaacgggtctatcccaccaattcatgtcccgcccggatatatcagccaggtgatcgaggactccacaggcgtaaggcgggttgttgtgacacctcagtcccccgaatgctatcctccttcttatccatctgcgatgtcccccactcatcatctacccccttacctgacccatcacccacacttcattcacaactcgcatacagcgtattatccacccgttacaggcccaggtgacatgcctccccagttcttcccacaacaccacctccctcataccatttacggagagcaggagattatccccttttacggcatgagtacttatatcacaagagaggaccagtatagcaagccgccgcacaaaaagctcaaggatcgccagatcgaccgacagaatagattaaattcccctcccagcagcatatataaaagttcttgtactactgtctacaacggatatggcaagggccacagcgggggctctggaggatag

SEQ ID NO: 117095 - DNA, 705 bp, synthetic construct
  misc_feature 1..705: note = Description of Artificial Sequence: Synthetic coding sequence
  source 1..705: mol_type = other DNA
atgccctccggctgtcactcctctccacctagtggactgaggggggatatggccagtctggtgccacttagtccctatttatccccgactgtgcttctactcgttagctgcgatctgggattcgtgcgagccgatcgcccaccatctcctgtgaatgtgacagttactcacctacgggcaaattctgccaccgtaagttgggacgttcccgaaggcaatatagtcatcggttattccatatctcagcaacgccagaatggtccagggcagagggtcattcgggaggtgaacaccactaccagggcttgcgccctttgggggcttgccgaggactcggactataccgtgcaagtgcggagtattggcctgagaggagagtcacctcccggcccaagggtccatttcagaacactgaaaggctcagatagactccctagcaattcctcctcacccggagatattaccgttgaggggctggatggtgagcggcctttgcagaccggcgaggtcgtaattattgtggttgtcttactaatgtgggccgccgtgatcggtctgttttgccgacagtatgacataatcaaagataatgatagcaataataatcctaaagagaagggtaagggaccagagcaaagtccacagggacgtccagtaggcacacgccagaagaagagtccctcaattaatacaatagacgtctag

SEQ ID NO: 117096 - DNA, 2478 bp, synthetic construct
  misc_feature 1..2478: note = Description of Artificial Sequence: Synthetic coding sequence
  source 1..2478: mol_type = other DNA
atggttggcaagtcccagcagacggatgtaatagaaaaaaaaaagcacatggcaattcctaaaagcagctcccctaaggccacacatcggatcgggaatacgtcgggttccaaggggagctatagtgcaaaagcatatgagtcaattcgggtgtcaagtgagcttcagcagacatggaccaagaggaagcacgggcaggaaatgacatcgaagtccctccaaactgacaccattgtagaggaaaaaaaggaggttaagctggtagaggagacagtcgtgccagaggagaagtcggccgatgtcagagaggcagctattgagctccctgaatccgtccaggacgtcgagattccgcccaacatacctagcgtgcagctgaagatggacagaagccaacaaacaagtagaaccggatactggaccatgatgaatatccctccagtcgagaaagtggataaagagcagcagacatacttctccgagtcagagattgtggtgatttcgaggcctgatagcagttcaaccaagtctaaggaagacgcgctcaagcataagtcctcaggtaagatctttgcctccgagcatcctgagttccagccggctaccaatagcaatgaggaaatcggacaaaaaaatatctcccggacttcatttacacaggagactaaaaagggccccccagtcttattagaagacgaactcagggaagaggtcacggtccccgtcgtacaggaggggtccgcagtcaagaaggtagcgtccgcagaaatcgaacccccttccacagagaaatttccagcgaagatccagcctcccctggtggaagaggcgacggctaaagcggagccacgccctgccgaggaaacacacgtccaggttcagccgagcactgaagagacacctgacgccgaagcagctacggcggttgccgagaacagtgtcaaagtgcagccccccccagccgaggaggcaccactagtggaattccccgccgaaatccagcctccttctgctgaggaaagcccttctgtcgagcttcttgccgagatcctcccccccagcgcagaggaatctccatcagaggagcccccagctgaaattttaccgcctcccgcagaaaaatcgccctccgtggagttactgggtgaaatccggagcccgtctgcccagaaagcaccaatcgaggtacaacccttacctgccgagggagccctcgaagaggcccctgccaaggtggagccccctactgttgaggagaccctggctgatgttcagccgttgctgcccgaagaggctccaagagaagaggcacgcgaactccagctgagcactgcaatggagacccctgcggaggaggcaccaacagagttccagtccccactgcctaaagagaccacagcagaggaagcatcagcagaaatccaactgctagccgcaacagagccacccgccgatgaaaccccggccgaagccagatctcctctgtctgaagagacatctgccgaggaagctcacgctgaagtgcagagtcctttggcagaggaaaccaccgcagaggaggcttccgcggagatccagttgctggcggccattgaggctcccgctgacgaaacacccgccgaagcccagagccccttatccgaggagacttcagctgaggaagctccagctgaagtgcaatcaccaagtgctaagggggtatcaatcgaggaggctcccctggaactccagccaccttccggcgaagaaacaacagccgaggaagccagtgctgcaattcaattgctagccgctacagaggcttctgctgaggaggcaccggcagaggtgcaacctccacctgccgaagaagctccagctgaggttcaacctccgccagcagaagaggcccctgcagaggttcagcctccccccgccgaagaagctccagccgaggtccagcctccccccgcagaagaagctcctgccgaagttcagccaccaccagcagaggaggccccagctgaggtgcagcctcctcccgccgaggaggcgcccgccgaggtgcagtctctccctgctgaagaaacacctattgaggaaacactcgccgccgtacattcacccccagcggacgatgtgcccgctgaggaggcctccgtcgacaagcactcgccgccggcagacttgctgttgaccgaggagtttccaattggtgaggccagtgcggaggtttctccgcctccgagtgaacagacacccgaggacgaggccctggtggagaacgttagtactgagtttcagagcccccaggtcgcaggtatccctgccgtgaagctggggtccgtagtgcttgaaggcgaggcgaaatttgaggaggtgagtaaaatcaactcggttctaaaggacctcagcaacaccaatgacggacaggcgccgacactggagatcgagtcagtctttcacatcgagctcaaacagaggccaccagaactatag

SEQ ID NO: 117097 - DNA, 2157 bp, synthetic construct
  misc_feature 1..2157: note = Description of Artificial Sequence: Synthetic coding sequence
  source 1..2157: mol_type = other DNA
atggtgggcaagagtcagcagactgatgtcattgagaagaaaaagcacatggcaattcccaaatcctcttcccccaaggctacccatcgcattgggaataccagcgggagcaagggtagttacagtgccaaagcctacgagtcaatcagggtctcgtccgaactgcagcaaacatggaccaaaaggaagcacggacaggagatgaccagcaagagcttgcagactgacaccatcgttgaggaaaagaaagaagttaagctggtggaagagacagtagtcccagaagagaaatccgccgacgtacgagaagctgccatcgagcttccggaatctgtccaagacgtcgaaatcccacctaacatcccaagcgtgcagttaaaaatggaccgctcgcagcagacttcccgcactggctactggactatgatgaatatcccacctgtggaaaaagttgataaagagcagcagacttatttttcggaatccgagatcgtcgtcatttccagaccggattccagttccactaaaagtaaggaggacgcactgaaacataagagtagtgggaaaatttttgcgagtgagcaccctgagttccagccagcgactaacagtaacgaggagatcggccagaagaacatatcccggacctcattcacacaggaaacgaaaaagggaccccctgtcctgctcgaggacgagctgcgcgaagaggtaaccgtgcccgtagtccaggaggggagtgcagttaagaaggtcgcatcagccgaaattgagcccccatctaccgagaaattcccagccaagatccaaccccctcttgtagaggaggccacggccaaggcggaaccacgcccagccgaagaaacccacgtgcaagtgcagccctcgactgaggaaacgcccgacgcggaggctgctactgcagtggcggaaaatagtgtgaaggtgcagcctcctccagctgaagaggctccactggtagagttccccgccgagatccagcctccgtccgcagaggagagccccagcgtggaattactggccgagatcctgcctccatctgcagaagaatccccatccgaagaacctccagctgagattctgccaccacccgctgaaaagtccccatctgtggagttgctgggggaaattcgcagcccctccgcacagaaggcccctatcgaggtgcagcccctgccagctgagggggctctggaagaagcacccgcaaaagtggagcctcccacggttgaagaaacactcgcagatgtccaacccttgctgccagaggaggcacctcgagaagaagctagggaactccagcttagcacggccatggaaaccccggcagaggaggctccaactgagttccagtcaccgctccccaaggagacaacagccgaagaggcaagcgccgagatccaactgctagcagcgacagagacctcagccgaggaggccccggcagaagtgcagtcaccctcggccgaggaagctcctgccgaggtacagccccccccagccgaagaagccccagccgaggtacagccacctcctgcagaggaggcccctgccgaagtgcagcctccgccagctgaggaagctcccgccgaggtgcagcccccaccagctgaggaagcacccgcagaggtgcaaccaccccctgctgaggaggcccctgccgaagtgcaaccccctcccgccgaggaggcaccagctgaggtgcaatcattgccagccgaggaaacccctatcgaagaaaccctggctgccgttcattccccccccgctgacgacgtgcccgccgaggaggcctcagtcgacaagcactcccccccagctgacctgctgctgaccgaggagttccctatcggggaagctagtgccgaagtgtcccctccaccttctgagcagactccagaggacgaggcattggtggagaacgttagtactgagttccagtccccacaggttgccgggatccccgccgtcaagctggggtcagttgtgcttgaaggagaggccaaatttgaagaagtgtcaaaaattaactctgtgctgaaggacctgtccaacacaaacgacggacaagcaccgacacttgagattgagtcggtgttccatatagagctgaaacaacggccgcccgaactgtag

SEQ ID NO: 117098 - DNA, 2052 bp, synthetic construct
  misc_feature 1..2052: note = Description of Artificial Sequence: Synthetic coding sequence
  source 1..2052: mol_type = other DNA
atggagcgcgccgccccttccagacgggtgccattgcccttactcttacttggaggcctggccttgctggctgccggagtcgacgccgacgtgctgctggaggcctgttgtgcagacggtcaccggatggcgacgcaccagaaggactgctcattgccctatgccaccgagtctaaagagtgccggatggtacaggagcagtgctgccatagccagctggaggagctccactgtgccacagggatatccctcgccaacgagcaggataggtgcgccacgccacacggcgacaatgcaagcctggaggcaacctttgtaaaacggtgttgtcactgctgcctgctcggtcgggctgcacaggcgcaggggcagagttgtgaatacagcctgatggtaggatatcagtgcggccaggtgtttcaggcctgctgcgtgaaatcccaagaaacgggtgatcttgacgtcggaggcctgcaagaaactgacaagatcatcgaagtggaggaggagcaggaggacccctaccttaatgaccggtgtcgagggggcggtccttgcaaacagcagtgcagagacacaggcgatgaggtggtgtgttcatgtttcgtagggtaccaactactgtccgatggtgtgtcatgtgaagacgtgaacgagtgcataacaggcagtcacagctgcagactcggggaaagctgcattaacacagtcggctcattcaggtgccagagagatagctcctgtggcaccgggtatgagctgacggaggacaacagctgtaaagacatcgacgagtgcgagagtgggattcacaactgtctccctgattttatttgccagaataccctgggctccttcaggtgtagacctaaactgcagtgtaagtctgggttcatccaagatgctttaggcaattgcatagatatcaatgagtgcttgagtattagtgctccctgccccatcggacatacatgtattaatacagaaggctcatacacatgtcagaagaacgtgcctaattgtgggcggggctatcatctgaatgaggaggggacccgctgcgtggacgtcgatgagtgtgcccccccagcggaaccatgcggaaaaggccaccgttgcgtcaactcaccagggtctttccggtgcgagtgcaaaacaggctattactttgacggtatatcccgaatgtgcgttgatgtgaacgaatgccagaggtatcctgggcggttgtgcggacataaatgcgagaatacactggggagctacctctgctcgtgcagcgtgggttttcggttatctgtcgacggtcgatcctgtgaagatattaacgaatgctccagttccccatgttctcaggaatgtgccaacgtgtatggtagctaccagtgttattgccggcgcggctaccagctgagtgatgtggacggtgttacatgcgaggacatcgacgagtgcgcactccctacaggcggccacatttgcagctaccgttgtatcaatatccccggctcctttcagtgcagctgtccgagcagcggctaccgtctggcaccaaatgggcgtaactgtcaggacatcgacgagtgtgttacgggcattcataattgctccataaacgaaacctgtttcaatatacaaggggggtttcggtgtcttgcgttcgaatgccccgagaactataggaggtcagcagcgacaaggtgcgagaggctgccctgccacgaaaacagggagtgttcgaagctgccactcagaatcacctattatcacctcagcttccccacaaatatacaggcccctgcagtcgtgtttagaatgggaccctcatctgccgttccaggcgattctatgcagttggcgatcacgggaggcaatgaagaggggttctttacaacacgcaaggtcagtccccatagcggggtggtggcattgaccaaacctgtgcctgaaccgcgggacctgctgctgactgtgaaaatggatctgagtcgccacggtactgtgagttcctttgtggccaagttgtttatctttgtgagcgctgaactgtag

SEQ ID NO: 117099 - DNA, 2112 bp, synthetic construct
  misc_feature 1..2112: note = Description of Artificial Sequence: Synthetic coding sequence
  source 1..2112: mol_type = other DNA
atggagagagccgctccttccaggcgcgttcccttacccctgctcttgttgggcggcctggccctactggccgctggcgtggatgctgatgtactattggaagcctgttgtgcagatggccatcgcatggccacccaccagaaagattgctctctgccatacgctacggagtcaaaggaatgtaggatggtacaggagcagtgttgtcactcgcagctcgaagaactgcactgtgccactggcatttccttggccaatgagcaggacagatgtgcgacacctcacggtgacaatgccagccttgaggcaaccttcgtcaaaaggtgctgccattgctgtttgttgggacgcgctgcccaggcccaaggtcaatcctgtgagtactcattgatggttgggtaccagtgtgggcaggtgttccaggcttgttgcgtcaaatcccaggagacgggggatctcgatgtgggaggcctgcaggaaaccgacaagatcattgaagttgaggaggagcaggaagatccatatttgaatgatcggtgcaggggagggggaccgtgtaagcagcagtgccgggacacaggcgacgaggtggtttgctcttgtttcgttgggtatcagctgctgagcgacggcgtgagctgtgaggacgtgaatgaatgcatcacagggtctcactcttgtcgacttggggagagttgcattaacactgtcggcagtttccgttgccagcgggattcatcatgcggcacaggttatgagctcacagaagacaacagctgcaaggatatagatgagtgcgaatctggcatacacaattgcctccctgattttatttgccagaacacattgggcagcttccggtgccgtccaaagttgcagtgcaagtccggatttattcaagatgccctcggaaattgcatcgacattaacgagtgtctctctataagcgcaccatgccccattggacacacatgtatcaatactgaggggtcttacacatgtcagaaaaacgtgcccaattgtggccgcggttaccatctgaatgaggagggaactcgctgcgtggatgtcgatgagtgtgctccacctgcagagccctgcggcaaaggccacaggtgtgtgaactctccaggttcgttcagatgtgaatgcaagacaggctattactttgatgggatctccagaatgtgcgttgacgtgaacgagtgtcaaagatatcccggccgattgtgtggccataagtgtgaaaacactcttgggtcttacctatgctcctgtagcgtaggtttcaggttaagtgtggacggtcgtagttgtgaggacattaacgagtgtagctctagcccttgctctcaagagtgtgccaatgtgtatggaagctaccagtgctattgcagacggggctaccaactttccgatgtggatggggtgacctgtgaagacattgatgagtgtgctctgccaaccggaggtcacatttgcagctataggtgcatcaacatcccaggaagctttcaatgttcctgtccttcctcaggctaccgccttgctccgaatggccggaattgtcaggacatcgacgagtgcgtgactggaatccataactgtagtatcaatgaaacctgctttaatatccagggagggttcagatgtctggccttcgagtgtcctgaaaactatcggcgctcagctgcaacactgcaacaggagaagacagatactgtaagatgcatcaagagctgcagaccaaacgatgtaacctgcgtctttgaccccgtgcacaccattagtcataccgtcatttcattacctacgtttagggaatttaccaggcctgaagagataatattcctccgggcaattactccaccccatcccgcgtctcaggcgaatatcatcttcgacattacagaaggaaacctccgtgacagctttgatattatcaagcgttatatggatggcatgactgtgggcgtggtgagacaagtcagacccatagtcggaccttttcacgctgtgctgaaattggagatgaactatgtagtcggaggggtggtgagccaccgtaatgtagtgaacgtgcacatcttcgtgtctgaatactggttctag

SEQ ID NO: 117100 - DNA, 1701 bp, synthetic construct
  misc_feature 1..1701: note = Description of Artificial Sequence: Synthetic coding sequence
  source 1..1701: mol_type = other DNA
atggaaagagcagctccatccaggagggtgcctctccctcttcttttgctaggggggctcgccctcttggcggctggagtagatgcagatgtactactagaggcatgttgcgccgatggccatagaatggctacccaccagaaagattgcagcctgccatatgcgaccgagagcaaggaatgcaggatggtccaggagcaatgctgtcatagccagctggaggagctgcattgtgccaccggcatcagcttagcaaatgaacaggatagatgcgctacgcctcacggtgacaatgcctctctcgaggccacttttgtgaaacggtgttgccattgttgcctactgggtagggctgcccaagcacaggggcaaagctgtgaatactcactgatggtgggttaccaatgtgggcaggtctttcaagcctgctgcgttaagagccaagagaccggagacctcgacgtcgggggcctccaggaaactgacaagatcatagaggttgaggaggagcaggaggatccttacctgaacgacaggtgtcggggtggtggaccttgtaagcaacagtgtcgggatactggggacgaagtcgtatgttcatgttttgtgggctatcagttgctgtccgatggcgtatcttgtgaggacgtcaacgaatgtattacaggcagccactcttgcaggctgggagaatcttgcatcaataccgtaggaagctttcggtgtcagcgagattccagctgcggcacaggatatgaattgactgaagacaattcctgcaaggacatcgatgaatgcgaatctggcatacacaattgcctgcctgacttcatttgccagaatactctgggctctttccgctgtcggccaaagctgcagtgcaagagcggcttcattcaggatgccctcggaaactgcatcgacatcaacgagtgtctgtccattagtgcaccctgccccatcgggcatacctgtataaacacagaggggagttacacctgccaaaagaacgtgccgaattgcggccgcggctatcacttgaacgaagagggtacccggtgcgttgacgttgatgagtgtgccccaccagcagaaccatgcggtaaaggccataggtgtgtcaatagccctggatcatttaggtgcgagtgtaaaaccggctattacttcgacggaatctccagaatgtgtgtcgacgtgaacgagtgccagagatatcctggcaggttgtgcggccacaagtgcgagaacacgctcggttcctatttgtgtagctgctccgtgggcttcaggctttccgtggatggaaggtcctgcgaggatataaatgaatgcagcagcagtccatgcagccaggaatgcgccaacgtatatggttcgtatcaatgctactgccgtagggggtatcagctttccgatgtggatggagttacatgcgaggacatcgacgaatgtgctttgccgacaggcggccacatctgttcttatcgttgtattaatataccgggttcatttcaatgctcgtgtccatctagcggttacagactggccccaaatggtagaaattgtcaagatatagacgagtgcgtgaccggtattcataattgttcgattaatgaaacatgttttaatatccaaggtggatttcggtgcctcgccttcgagtgtccagaaaactacaggcgctccgcggctacttag

SEQ ID NO: 117101 - DNA, 2112 bp, synthetic construct
  misc_feature 1..2112: note = Description of Artificial Sequence: Synthetic coding sequence
  source 1..2112: mol_type = other DNA
atggaacgtgccgcgccaagcaggcgggtcccactccccttactgctcctgggggggttagccctgctggccgcaggagtggatgcagatgtgctgctggaggcatgctgtgctgatggacatcgaatggctactcaccagaaagactgttctctaccttatgcaacagaatcaaaggagtgccggatggtccaggaacaatgctgccattcacagctcgaggagttacactgtgccactgggatcagtctcgcaaacgaacaggaccgctgtgctacccctcacggggataacgcgagcttggaggctacctttgtgaaacgatgctgtcattgctgcttgctcggcagggccgcacaagcccaagggcagagttgcgaatattctctgatggttggctatcaatgcggacaggtgtttcaagcctgttgtgtgaaaagtcaggaaactggcgacctggacgttggtggacttcaggaaacagacaagattattgaagtcgaggaggagcaggaggacccatacctcaacgaccgctgcagaggaggcggtccatgtaagcagcagtgccgcgataccggcgacgaggtcgtgtgtagctgcttcgtaggttatcagctgttaagtgacggagtgtcctgcgaggatgtcaacgaatgtatcaccggcagccactcttgtcggctcggcgaatcatgtatcaataccgtgggatccttccggtgccaacgggactcatcatgtggtactgggtatgagcttacagaagataattcatgcaaggacatagacgaatgcgagagcgggatccacaattgtttacccgatttcatctgccagaacacactgggctcgttccggtgccgccccaaacttcagtgcaagtccgggtttattcaggatgctctgggtaactgcatagatatcaatgaatgtctatcaatttctgcaccatgccctataggtcacacgtgtattaacaccgaaggatcttatacatgtcagaagaatgtacctaattgcggtcgcggctaccatctcaatgaagagggaacgcggtgtgtcgacgttgatgaatgcgcacctcccgcggaaccctgcggcaagggccaccggtgcgtgaattcccccggatcattccgttgcgagtgcaagaccggatattactttgacgggatcagcagaatgtgtgtggacgttaatgaatgtcaaaggtatcctggacggctctgtggccacaagtgtgaaaatacactcggttcatacttgtgctcttgttctgttggatttagattgtccgtggacggccggagctgtgaagatatcaacgaatgctcttcctccccttgctcacaggaatgcgcaaacgtgtacggttcctaccagtgttactgcaggagaggctatcagctgagtgacgtggatggagtcacatgtgaggacattgatgagtgcgccctgcccacaggcggacatatttgctcatatcgctgtatcaacattcctggctcgtttcaatgttcatgtccatcttcaggctacaggctggcacctaacggccgcaactgccaggacatagatgagtgcgtcaccggtattcataactgttctataaatgagacatgtttcaacattcagggggggttcagatgccttgcgtttgaatgcccagagaattaccgccgctctgctgcaactcagaagagtaagaaaggtagacagaataccccagccggatccagtaaggaagactgcagagttttaccttggaagcagggcctggaggacacacacttggacgcatacctgccatgctgtcgtaggttcactcgaccggaggaaattatcttccttagagccattacccccccgcatcccgccagccaagctaatatcatatttgatatcactgagggcaatctgagggactctttcgacatcataaagcgatacatggacggcatgactgtcggcgttgtgcgacaggtcaggccaattgtgggaccgttccacgccgtcctgaaattagagatgaactatgtggtcggtggtgttgtcagtcatcggaacgtagtcaacgtgcatatcttcgtgtcggaatattggttttag

SEQ ID NO: 117102 - DNA, 2166 bp, synthetic construct
  misc_feature 1..2166: note = Description of Artificial Sequence: Synthetic coding sequence
  source 1..2166: mol_type = other DNA
atggaaagggctgctcctagcaggcgcgtccctcttccccttttgctgctgggtggattggcgctcctggcagcaggagtggacgcagatgtgctcctggaggcatgctgcgccgacggccatcggatggctacacatcagaaagactgctccttgccttacgccactgagagcaaagagtgccgggctgtcggactcgcttctctctgccaggatttaaatggcgcatgggcagtctggaaggtcggtcgagcatcacaggctgagggtactgcctccgcaagagcccagcgtcggggtatggtgcaagaacagtgctgtcattcccagctggaggaactgcattgtgcaacaggaattagcttggctaatgaacaggacagatgtgcaacgccacacggtgataatgcatcacttgaggccacattcgtcaagcgttgttgccattgctgtctgttagggcgagcagcacaagcccagggacagagctgtgagtattcactcatggtaggctaccagtgtggccaggtttttcaggcctgttgcgtgaagagccaagagaccggtgatcttgatgttggggggctgcaagaaacggacaagatcatagaggtggaggaagaacaggaagacccgtatctaaatgataggtgtcgcggtggcggcccttgcaagcagcaatgccgtgataccggggatgaagttgtctgttcttgttttgtcggatatcagctcctgagtgacggagtaagttgtgaagacgtgaatgaatgtattactggaagtcattcatgtcgattgggagagagctgcatcaacactgtaggatctttccgctgccagcgagactcatcttgcggaactgggtacgagctgacagaggacaactcctgcaaagatatcgatgaatgcgagagtggtatccataattgtctccctgactttatttgtcaaaatactttgggctcattccgctgcagacccaagttgcagtgcaagagcggatttattcaagatgccctcggtaattgcatcgatatcaatgagtgtctgtcaatcagtgcaccttgtcctatagggcacacgtgtatcaataccgaggggtcctacacgtgccaaaagaatgtgcctaactgtggacgtggttatcatctgaatgaggaagggaccaggtgcgttgacgttgacgagtgcgcccctccggccgagccatgtgggaagggccacaggtgcgtcaatagtcctggctcctttaggtgtgagtgtaaaaccggctattacttcgacggcattagccgtatgtgcgttgatgtgaacgagtgtcagaggtatccgggacgtctgtgtgggcataagtgtgagaacacgctgggaagctacttatgtagctgcagcgtcggttttagactgtcagtagacggccgctcttgcgaagacatcaacgagtgtagttcatcaccttgttcacaggaatgcgctaacgtatatggctcttatcagtgctattgtcgcagagggtaccagctctcggatgtggatggtgtgacgtgcgaggatatagacgagtgcgcactgcccactgggggccatatatgcagttatagatgcatcaatatcccaggaagcttccagtgctcttgcccttcctccggatacagactcgcccccaatggaagaaactgccaagacatcgatgaatgcgttactgggatccacaactgttcaatcaacgaaacgtgtttcaacatccaaggcggttttaggtgtctggccttcgagtgtccagagaattaccggaggagtgccgcgacaagatgcgagaggcttccttgtcacgagaatcgggaatgctctaaattacctttaaggatcacatactatcacctctcgttccctacaaatattcaggcccctgccgtggtgtttcgaatggggccatcgagcgcggtcccgggggacagtatgcaactcgctatcacaggcgggaacgaggaggggttctttactaccaggaaggtatccccccatagcggcgtggtagctctgacgaagccagtgcccgagccacgggacctgcttctaacagtgaagatggatctgtcccggcacggtactgtgagctcattcgtggctaaactgtttatctttgtcagcgccgagctctag

SEQ ID NO: 117103 - DNA, 570 bp, synthetic construct
  misc_feature 1..570: note = Description of Artificial Sequence: Synthetic coding sequence
  source 1..570: mol_type = other DNA
atgaactcttatactcgaggctcccgacgacctagcgctaaggcagcctcccctgcggcctccgtgactagccgagttagcccaagtggtcctggggtgcctgtggatgctgatgtcctccttgaagcttgctgtgcggatggacaccggatggccacccatcaaaaagactgctcgttgccatatgccaccgaatctaaagagtgtcgcatggttcaagaacagtgctgtcactcacaactggaggagctccactgcgcgacagggataagcctggctaacgaacaggatagatgtgccaccccccacggagacaatgctagtctcgaggccactttcgtgaaaaggtgctgtcactgctgtctgctcggtcgcgccgctcaggcccagggtcagagctgtgaatacagcctgatggtggggtatcagtgtggccaagtgttccaggcctgttgcgtcaagtcacaggaaacaggagacctggacgtcgggggtctccaggaaacagataaaattattgaggtggaggaggaacaggaagatccttacttaaacgaccggtgtcgctag

SEQ ID NO: 117104 - DNA, 81 bp, synthetic construct
  misc_feature 1..81: note = Description of Artificial Sequence: Synthetic coding sequence
  source 1..81: mol_type = other DNA
atggcaacccatcagaaggattgttccctgccatacgctacagaatcaaaagagtgtcgaatggtccaagagcagtgctag

SEQ ID NO: 117105 - DNA, 1806 bp, synthetic construct
  misc_feature 1..1806: note = Description of Artificial Sequence: Synthetic coding sequence
  source 1..1806: mol_type = other DNA
atggagcgggctgcgccctccagaagagtgccactcccattactgcttctgggaggattagctctgttggccgccggagtcgacgcagatgtgctgctggaggcttgttgcgctgatggacatagaatggccactcatcagaaggactgtagcctgccatacgccacagagtcaaaggagtgtagaatggttcaggagcagtgttgccatagccaactcgaggagttacactgtgctaccgggattagcctggccaatgaacaggaccgctgtgctaccccacacggtgataatgctagtcttgaggctacgttcgtcaaacgatgttgccactgctgcctgctgggtagggccgctcaggcccaagggcagtcctgcgagtatagtttaatggtcgggtaccagtgtgggcaggtcttccaggcctgttgtgtcaagtcacaggagactggcgacttagacgttggcggtcttcaggagacggataagatcattgaagtggaggaagaacaggaggacccttacctgaacgaccgctgccggggcggtggcccgtgcaaacaacaatgccgggataccggcgatgaggtcgtgtgttcatgtttcgtggggtaccagctgctgtccgacggcgtgagctgtgaagatgtcaatgagtgtatcactggtagtcactcttgccgactgggtgagagttgcattaatacggtgggtagttttcgttgtcagagagattcgtcctgcggcacggggtacgaactgaccgaagacaactcatgtaaggacattgacgaatgtgagtccggtatccacaactgtctgcctgactttatttgccagaataccctggggagtttcaggtgccgacctaagttgcagtgcaaatccggcttcatccaggatgcactcggtaattgcatcgatatcaatgagtgtctaagcatatcagcaccctgccccattggccatacctgtattaatacggaaggctcttatacctgtcagaagaacgtgccgaactgcggaagagggtatcatctgaacgaggagggcactcggtgcgtcgatgtggatgaatgtgctccgcctgccgaaccatgtggaaagggacacaggtgcgtaaacagccccggtagttttaggtgcgagtgcaaaacggggtactatttcgatgggatctcccgtatgtgtgttgatgtgaatgagtgtcaacggtacccaggccggttgtgtggccacaagtgcgagaatactctagggagctacctctgtagctgttctgtggggtttaggctgtccgtcgacgggcgaagctgtgaagacataaacgagtgttccagctcaccttgtagtcaggagtgtgcaaacgtttatggctcttaccaatgctactgtcgacggggctatcaattaagcgatgtagatggcgtgacctgcgaagatattgacgaatgtgcactacccaccgggggccatatttgtagctatcgttgcataaacattcccgggagctttcagtgttcatgtccaagcagtgggtatagattggctcctaacggcagaaattgtcaggatatcgacgagtgtgtgaccggtattcataactgttcaattaatgagacttgttttaacatccagggagggttcaggtgtttggcatttgaatgtccagaaaactacagacgttcggcagcaacacaaaagtctaagaagggtagacagaacacaccagccggctccagcaaggaggattgtcgtgttctgccttggaagcagggccttgaagatacccatttagacgcgtag

SEQ ID NO: 117106 - DNA, 198 bp, synthetic construct
  misc_feature 1..198: note = Description of Artificial Sequence: Synthetic coding sequence
  source 1..198: mol_type = other DNA
atggccactcaccagaaggactgttcactaccttacgcaaccgagtctaaagagtgccgcatggttcaagaacagtgctgtcacagtcaacttgaggagctgcattgcgcgaccggcataagcctagctaacgagcaggatcgttgcgctactccacacggcgataacgcttctttggaggctacgtttgtcaaatag

SEQ ID NO: 117107 - DNA, 546 bp, synthetic construct
  misc_feature 1..546: note = Description of Artificial Sequence: Synthetic coding sequence
  source 1..546: mol_type = other DNA
tgtaggatggtccaggaacagtgttgtcattcacaacttgaggagctgcactgcgctactgggatctcgctggcgaacgagcaggatcggtgtgctacaccacacggcgataatgcgtccctggaagcgaccttcgtgaagcgttgttgccactgctgcttacttggacgtgccgctcaggctcaaggacagtcctgtgaatactcactcatggtgggatatcagtgtgggcaagtgttccaggcctgctgcgtcaaatcacaagaaactggcgatcttgatgtgggcggccttcaggagacaggcggcggtccctgcaagcagcaatgtcgcgatacaggagatgaagtcgtgtgttcatgttttgttggataccaactgctgtccgacggtgtatcatgcgaagatgtcaacgaatgcatcaccggcagtcactcatgtcgcctgggcgaatcttgtattaatacagtgggttcctttaggtgccagagggattcctcatgtggcaccggctacgagctgacagaagataacagttgcaagtag

SEQ ID NO: 117108 - DNA, 420 bp, synthetic construct
  misc_feature 1..420: note = Description of Artificial Sequence: Synthetic coding sequence
  source 1..420: mol_type = other DNA
atggctacacaccagaaagattgcagcctcccatatgcaacggagtccaaagaatgccgaatggtccaggaacagtgctgccacagccagttggaggagttgcattgtgcgacaggtattagcctggcaaatgagcaggaccggtgcgccacccctcacggggacaatgcatcacttgaggccaccttcgtgaagagatgttgccactgctgcctcctgggcagggcagcacaggctcagggacagtcttgtgagtattctctaatggtcggctaccagtgcggtcaggtgttccaggcatgttgcgtaaagagccaggagacgggcgatctcgatgtgggaggcttgcaggagaccgataagataatcgaagttgaagaggaacaggaggacccatatctcaacgatcgctgtcggtag

SEQ ID NO: 117109 - DNA, 519 bp, synthetic construct
  misc_feature 1..519: note = Description of Artificial Sequence: Synthetic coding sequence
  source 1..519: mol_type = other DNA
atggaaagggccgccccctcccgccgcgtgcctctaccgctgctgctgttaggcggcctcgcccttctggctgccggagtagatgctgatgtactgctggaagcctgctgcgcagatggacatcgtatggcaacccaccagaaggattgtagcctgccttatgccactgaaagtaaggagtgccgtatggtgcaggagcaatgctgccattcacagctggaggagctccattgcgccacaggaatatccctggccaacgaacaggacaggtgtgccactccacacggtgacaacgcctcgctcgaggctacgtttgtgaagagatgctgtcattgttgcctgctcggccgcgcagcccaagcacaggggcagtcatgcgagtactcactgatggtgggctaccaatgcgggcaggtgttccaggcttgctgtgtgaagtcccaggaaacaggtgacctcgacgttggagggctacaggagacagggggtggaccctgcaaacaacaatgccgagactag

SEQ ID NO: 117110 - DNA, 3555 bp, synthetic construct
  misc_feature 1..3555: note = Description of Artificial Sequence: Synthetic coding sequence
  source 1..3555: mol_type = other DNA
atggtcctgttgtgggagcccgctggtgcctggttggccttaggactggcactggcactgggcccttcagtggccgctgctgcaccacgccaggattgtaccggggttgagtgtccccctttggagaactgcatagaagaggccctggagcctggggcctgttgcgccacatgcgtccagcagggctgcgcttgcgaaggctaccagtattatgactgcctccagggcggcttcgttcgcgggcgtgtgcctgctgggcagtcttattttgtcgacttcggtagcacggagtgttcttgccctccagggggaggcaagatttcatgtcagtttatgttgtgccctgaactaccacctaactgtattgaggccgtggtggtggccgactcatgtccccagtgtggccaggtcggctgtgtgcacgccggccacaaatacgctgccggccatacggttcatttgccaccatgccgcgcgtgtcactgtcctgacgccgggggggaactgatatgctaccagcttccaggctgccacggtaactttagcgatgcggaggaaggtgatcctgagcggcactatgaggatccctattcctatgaccaagaagtagctgaggttgaggcagcaaccgccctcggaggagaagtgcaggcaggcgccgtgcaagccggggccggcgggcccccggccgctttggggggcggatctcaacccctgtcaacaatccaggctcccccttggcctgctgtactgcctcggcccacggccgctgcagctctggggcctcctgctccggtgcaggcaaaagctcgacgcgtgacagaggatagcgaggaggaagaggaggaggaggaagaaagagaggaaatggccgtaacagaacagttagccgccggaggccacaggggcctggatggtctccccactaccgctcccgctggcccgtctctgcccatccaagaagagagagcagaggccggcgctagagccgaggccggtgccagacccgaagagaaccttattctggacgcccaagctaccagccgctcgacagggcccgaaggagtaacccacgcaccctctctggggaaggctgccctcgtcccgacccaggccgtccccggctctccacgggatcccgtgaaaccatcacctcacaatatactgtccactagcttgcccgatgcagcctggattcctcccacacgagaggtaccacgaaaacctcaggtcttgcctcatagccacgtagaggaggatactgaccccaattctgtccactctatcccaaggtctagtcctgaaggaagtacgaaagacctcattgaaacttgttgcgctgccggccagcagtgggcaattgacaacgacgaatgcctggagataccggaatccggcactgaagacaatgtatgccgcaccgctcaacgacactgttgcgtgtcttatctgcaagaaaagagctgtatggcgggtgtgctgggagctaaggaaggcgagacttgtggcgcagaagacaacgatagctgcggcataagcctgtataagcagtgctgcgactgctgtgggctaggactgcgcgtgagggccgaaggacagtcctgtgaatctaatcctaatctcgggtatccctgcaatcatgtcatgttaagctgctgtgaaggagaggagccactcattgttcctgaggtgaggcggcctcccgagcctgcggctgcacctcggagagtgtctgaagcagaaatggccgggcgggaagccctttcccttggcacagaggcagagttacccaactccttgccaggcgacgaccaggacgaatgcctgctcctgccaggcgagctctgtcaacatctgtgcattaataccgtgggcagctaccactgcgcttgtttccccgggttctccctgcaggacgacggtaggacatgtcggcccgagggacaccccccgcagcctgaggctccacaagagccagctctcaaaagtgaattttctcaagtggcttctaatacaattccccttccattaccgcagccaaacacttgcaaggacaacggcccatgcaaacaggtgtgtagcacagttggtggatccgccatttgtagctgcttcccgggctacgctattatggccgacggggtaagctgtgaagacattaacgagtgcgtcaccgacctccacacctgcagcaggggtgagcactgcgtgaatactctcggctcatttcactgttataaagcactgacctgtgagcccggctacgccctcaaggatggggaatgtgaagacgtcgacgagtgcgcaatgggaacacacacttgccagccaggcttcctgtgtcaaaacacaaaagggtctttttactgccaggcccggcagcgctgcatggatggttttctccaagaccctgaaggtaactgcgtggatattaatgagtgcacgtccctcagtgaaccttgccgacccggcttctcatgcatcaatacagttggctcctacacatgccagcgaaaccccctcatatgcgcccgtggatatcacgcctccgacgatgggaccaaatgcgtcgacgtgaacgagtgcgagaccggcgtgcaccggtgcggtgagggacaggtctgtcataacttgcccggctcttatcgctgcgactgcaaagcggggttccaacgcgatgcttttgggagggggtgtatcgatgtgaatgagtgctgggcctctcctggtcgactgtgtcagcacacatgtgagaacaccctcgggtcttacaggtgtagctgcgcaagcggcttcctgttggccgctgacggaaagaggtgcgaagacgtcaatgagtgcgaggcccagcgatgttcccaggaatgcgccaatatctacggctcttaccagtgttattgtagacagggatatcagctggcagaggacggccacacttgcacagacatcgacgaatgcgcacagggcgctgggatactgtgcacgtttcggtgcctgaacgtaccagggtcataccagtgtgcttgccccgaacaaggttacacgatgaccgcgaatgggaggtcatgcaaagatgtggatgaatgtgccctcggtacccacaactgctctgaagccgagacctgtcacaatatacagggctcttttagatgcctacggtttgagtgcccacccaactacgtccaggtctccaagaccaaatgcgaaagaacaacctgtcacgatttccttgagtgccaaaactcacctgcacggataactcattatcagctgaacttccagacaggcctcctcgtcccagcccatatctttcgaataggccccgctccagcgtttaccggcgatacgatcgcattgaatattattaagggaaacgaggaggggtatttcgggacaagacggctcaatgcatacacaggcgtagtgtacttacagagagcggtcctggagcccagggatttcgcactcgatgtcgaaatgaaactctggcgccaagggtccgtgacaacctttcttgctaagatgcacattttctttacaacatttgccctgtag

SEQ ID NO: 117111 - DNA, 3696 bp, synthetic construct
  misc_feature 1..3696: note = Description of Artificial Sequence: Synthetic coding sequence
  source 1..3696: mol_type = other DNA
atggtgctgttgtgggagcccgcgggcgcctggctcgctctgggtctcgccttagcccttggacctagtgtcgccgccgcagcgccccggcaagactgtacgggtgtcgaatgtccacccttagaaaattgcattgaggaggcgctcgagccgggggcttgttgtgccacctgcgttcagcagggatgcgcgtgcgaaggatatcagtattacgattgcctgcaaggaggcttcgtccgtggaagagtgccggcaggccagtcatactttgtggacttcgggtcaactgagtgtagttgtccccccgggggcggaaagatctcgtgtcaattcatgctgtgcccagaactcccccccaactgtattgaagccgtggtggtcgctgacagctgtccccagtgcggccaagtggggtgtgtgcacgcaggccacaagtacgccgcaggccacactgtccatctgcccccgtgtcgggcgtgtcactgtccggacgccggcggcgagctgatttgctatcagctgccgggctgccatgggaatttttccgacgctgaggaaggcgaccctgagagacattacgaggacccatatagttacgaccaggaggttgccgaagtggaagcagcaaccgctctcggcggtgaagtccaagcgggggctgttcaggcaggggcgggaggaccgccagccgccctcgggggtggcagccagccattgtccacaatccaggcacctccatggccggccgtactgccccggccaaccgcagccgccgctttgggcccacccgcgcctgtccaagctaaggcccgcagggtcaccgaagatagcgaggaagaagaagaagaggaagaggagcgggaagagatggcagtgaccgaacagcttgctgccggtgggcatcgtggcctggatggtctgccaacaaccgctccggctgggccatctctgcccattcaggaggagcgcgctgaagccggcgctcgtgccgaagccggggcacgtccagaggagaacctcatactcgatgcacaagctaccagccgatctacgggcccagagggcgtaacgcacgccccatccctcgggaaggcagctttggtgcccacgcaggccgtgcccggaagtcccagagatccagtgaagccatccccacataatatcctgagcaccagcttacccgatgcagcgtggatcccacccacacgcgaggtgcctaggaagccccaggtcctgcctcactctcacgtggaagaggatactgacccgaatagtgtccacagtattcccaggagttctcccgaggggtctactaaggacttgattgaaacctgctgcgccgcggggcaacagtgggcgatcgacaacgacgagtgcttagagatacctgagtcaggcaccgaggataacgtgtgcagaaccgcacaacggcactgctgcgtctcgtacctccaggaaaagtcttgcatggcaggagttcttggagctaaagagggagaaacctgtggggctgaagacaacgattcctgtgggatctccctgtacaaacagtgttgcgattgttgtgggctagggctgcgagtgcgggccgaaggccagtcatgtgagagcaaccccaacctcgggtacccatgcaatcatgtgatgctgtcctgttgcgaaggcgaagagcctctaatcgtgccggaggtgcgacgcccccctgagccagcagccgccccaaggagggtgtcagaggctgagatggctggccgcgaggcactttctctcggaaccgaagccgagctgccaaattccctgcccggtgacgaccaggatgaatgcttattactcccaggcgaattgtgtcagcacttgtgcatcaacaccgtgggcagttaccattgcgcatgttttcctgggtttagcctgcaagacgacgggcgcacatgcagacctgaaggccaccccccccaaccagaggccccccaagagcctgccctcaagtccgaattctcacaggtggcctccaatacaatccccttgcccctcccgcagccgaacacctgtaaagacaacggcccttgcaagcaagtatgctcaactgtaggtggctcagcaatctgtagctgctttcctgggtacgctattatggcagacggcgtctcttgcgaagaccaggatgaatgtctaatgggggcccacgattgtagtcgacggcagttctgtgtaaataccctgggctctttctactgcgtcaaccacaccgtgctgtgtgcggatggttacattctgaatgctcatagaaagtgcgtagatatcaatgagtgtgtgactgacctccacacatgctccagaggggaacactgtgttaacacgctcggatcattccactgctacaaggccctgacttgtgagcctggatacgctttaaaggacggtgaatgtgaggatgtcgacgaatgtgcgatggggacccacacatgtcagcccggcttcctatgtcagaacacgaaaggcagcttttactgtcaggctcgtcagcgttgcatggatgggtttctccaagaccccgaagggaactgtgtagacatcaacgagtgcacaagcctcagcgagccttgcaggcctgggttctcctgcattaataccgtgggatcctatacctgtcaacgcaacccactgatctgtgcccggggctaccacgcctctgatgatggcaccaagtgtgtcgacgtgaacgagtgcgagaccggtgtgcatagatgcggcgagggccaggtgtgtcacaacctgccaggatcctatagatgtgattgcaaggctggctttcaaagagatgcctttggtagaggctgcatcgatgtgaacgaatgctgggcctctccgggacggctttgtcagcacacctgtgagaacactctgggttcctatcgttgctcatgcgcatccgggttcctgctggctgccgatgggaagcggtgtgaagatgtcaacgagtgtgaagcacagcgctgtagccaggaatgtgcaaatatctacggcagctaccagtgctactgtcgacaggggtaccaattggcagaagatggccatacatgcacggacatcgacgagtgcgctcagggagctggcatcctgtgcaccttcagatgcctcaatgtccctgggtcttaccagtgtgcttgtcccgaacagggctacacaatgactgctaacgggagatcctgcaaggacgtggacgagtgtgccctcggaactcacaactgcagtgaggcagagacctgtcacaatattcaggggtccttcaggtgtctgaggttcgaatgccctccaaattatgtccaggttagtaagacaaaatgtgaacggactacctgccatgactttctcgaatgccaaaacagccccgcccggataacgcactatcagctgaattttcagacaggcttgttagttcctgcccacatattccggattggcccagcacccgcattcactggggatacaattgccttaaacatcataaagggcaatgaagagggttactttgggactagacgcctgaatgcctacacgggagtcgtgtacttacagcgcgcagtgctggagccgcgggacttcgcactggacgtcgaaatgaaactctggcggcagggctctgtaaccactttcttagcgaagatgcacatcttttttactaccttcgcgttatag

SEQ ID NO: 117112 - DNA, 480 bp, synthetic construct
  misc_feature 1..480: note = Description of Artificial Sequence: Synthetic coding sequence
  source 1..480: mol_type = other DNA
atggtcttactgtgggaacccgccggagcctggttagcgctcggactcgctctagcactcggccccagtgttgctgccgctgcgccccggcaggactgtaccggcgttgagtgtccaccactggagaattgcattgaggaggcattagaaccaggcgcctgctgtgccacatgtgtgcagcagggatgtgcgtgtgagggttatcaatattacgactgtctgcagggtggctttgtgcggggccgggtgccggctggccagagctacttcgttgacttcggaagtacggaatgttcctgccctccaggaggggggaaaataagctgccagttcatgctgtgccccgaactgccacccaactgtatcgaagcagtcgttgttgccgattcatgtccccagtgtggtcaggttgggtgcgtccacgccggacacaagtacgccgcaggacacacagtgcatcttccaccctgtagggcctag

SEQ ID NO: 117113 - DNA, 3696 bp, synthetic construct
  misc_feature 1..3696: note = Description of Artificial Sequence: Synthetic coding sequence
  source 1..3696: mol_type = other DNA
atggttctcctttgggaacctgctggcgcttggctggctttgggcctcgcattggcactggggccttccgtggccgcggcagctcccaggcaagactgtacaggcgtggaatgtcctccactggaaaactgcattgaagaagctctcgagcctggagcttgctgtgcaacctgtgtgcaacaggggtgcgcgtgcgagggctaccaatattatgattgtctccagggtggttttgtccggggtcgagtgccagcaggtcagagttatttcgtggattttggcagcactgaatgttcatgccctcccggcgggggtaagatatcctgtcagttcatgctttgcccagagttacctcccaattgtattgaagctgtggtggtcgcagacagctgtcctcagtgtgggcaggtcggctgcgtgcatgccggccacaaatacgctgcaggccatactgtacacctgcctccatgtagggcctgtcactgccccgacgccgggggagaattgatctgctatcaactaccgggctgccacggcaatttctcggatgcagaagagggagatcctgagcgacactatgaggacccctacagctacgatcaggaagtggcggaagtggaagccgcgactgcgctcggaggcgaggtgcaggccggcgccgtgcaagctggggccggaggtccacccgctgcgctcggaggtggttcacaaccactctcgacaatacaggcacctccctggcccgccgtgcttcccaggcctactgccgctgcagctctgggaccaccagccccagtgcaagcgaaagctcggcgcgttaccgaggactcggaggaggaagaggaagaggaagaagaaagagaagagatggccgttacagagcagttggccgctgggggccatagagggttggacgggctccctacaaccgcgcctgccggtccctctctgcctattcaggaggagcgagcggaggctggagcaagagcagaggctggcgcgcggcctgaagagaatcttattctggacgctcaggccacaagcagatcaactggacccgaaggagtgacacacgccccctcactaggaaaggccgccctggtgcccacccaggccgtgcccgggtcgcctcgggaccccgtgaagcctagtccccacaacattctttccacctcgctccccgacgccgcatggatccctcccactcgagaggtccctcggaaacctcaagtgctgccccattcccatgttgaagaggataccgaccccaactcggtacatagcattcctcgaagcagccctgagggaagtaccaaggaccttatcgagacctgctgcgccgctggccaacaatgggctatcgacaatgacgagtgcctcgagatacctgagtctggcaccgaggataatgtttgtcgcaccgcccaacgccattgctgcgtgagctatctacaagaaaaaagttgcatggccggagttctgggagcgaaggagggcgaaacttgtggagcggaggacaacgactcttgcggcatcagcctgtacaagcaatgctgtgattgttgtggtttgggtctgcgcgtgcgtgctgagggtcaaagctgcgagtcaaaccctaatcttggatatccctgcaaccatgtgatgctcagctgttgtgaaggcgaagaaccgctgatcgttcccgaggtgcgacgaccccccgagcccgccgcggccccaagacgcgtgagcgaggccgagatggctgggcgcgaggcgctgtccttaggcactgaggccgaactgccaaattccctccccggggatgaccaagacgaatgcttgcttctccccggggaactttgtcagcatctgtgcatcaataccgtcgggtcatatcattgcgcatgcttcccaggcttcagcctgcaggacgatggaagaacctgccgccctgaaggacatcccccgcagcccgaggcaccgcaggagcctgctctcaagtctgagtttagccaggttgcaagcaacaccataccattacctctgccacagcccaacacatgcaaggataatggaccatgtaagcaggtgtgtagcactgtaggcgggtccgcaatctgttcatgctttcccggatatgcgatcatggctgatggagtgtcctgcgaagaccaggatgagtgcctgatgggagctcacgattgttcacggcggcagttttgtgtgaatacactgggatccttctactgtgtcaaccacaccgtcctctgcgcagacggatatattctcaacgcccatcggaagtgtgtggatattaacgaatgtgtgacagaccttcatacctgtagtaggggagaacactgtgtgaacacccttggttctttccactgttacaaagctttgacctgtgagccaggctacgcactgaaagatggcgagtgcgaggatgtcgacgagtgcgctatgggcactcacacgtgtcagccgggattcctgtgtcaaaacactaagggttctttttactgccaagcgagacagaggtgtatggatggcttcctccaggatcctgaagggaattgtgtggacatcaacgaatgcacctcactttctgagccctgtcggcccggcttttcttgtattaacactgtagggagttatacctgtcagagaaaccccctgatatgtgccagaggataccacgccagtgatgacgggacaaagtgcgtggatgtcaacgagtgtgagactggcgtacacagatgtggagaaggtcaagtatgtcataatctgcctggttcttatcggtgtgattgtaaggctggatttcagcgggatgcctttggaagaggttgcatcgatgtgaacgagtgctgggccagccctggaaggctctgtcagcatacctgtgagaatacattagggtcctacagatgcagctgtgcttccggcttcctcctggcggctgacggcaagcgctgtgaagatgtcaatgagtgtgaagcacagaggtgctcacaggagtgcgcgaacatttatggcagttatcagtgctactgccgccaaggataccaattggcagaggacggacatacctgcacagatatcgacgaatgtgcccagggagctggaattttatgtacctttcggtgtcttaatgttccagggtcatatcagtgtgcctgcccagagcaggggtataccatgacggccaacggccgtagctgtaaggacgtcgacgaatgtgccctgggcactcacaattgctcagaagctgaaacatgccacaacatccagggcagttttcgttgtcttcggttcgagtgccccccaaattatgtgcaggtcagtaagactaagtgtgagcggaccacatgtcatgactttctggagtgtcagaattctccggctcgcatcacacactatcaactaaacttccagaccgggttactggtgcctgcccatatcttcagaattggaccagctccggcattcaccggcgatacaatcgcactgaacattattaaaggcaatgaggaaggctatttcgggacccgacgactgaacgcttacactggagtggtgtatttgcaaagggccgtgctggagccaagagacttcgccctcgacgttgaaatgaagctctggcggcagggaagtgtgaccacattcctagccaagatgcatattttcttcaccacatttgccctttag

SEQ ID NO: 117114 - DNA, 3633 bp, synthetic construct
  misc_feature 1..3633: note = Description of Artificial Sequence: Synthetic coding sequence
  source 1..3633: mol_type = other DNA
atggaaacctcactttcactcgagtcaggccaccatggtagctaccggcggggtgaccggccaggccttgcatggactatggtgttgctctgggagcccgcaggtgcttggttagccctgggactcgccctcgccttagggccttcagttgcagccgccgctcctaggcaagattgtactggcgtggagtgtccaccactggagaactgcatagaggaggctctggaaccgggtgcctgttgtgccacctgtgtccagcaaggatgtgcctgcgaagggtatcaatactacgattgtttacagggcggctttgtccgtggtcgtgtaccagctggtcagtcctactttgtcgatttcgggtctaccgagtgtagctgccctccgggcggtgggaagatttcttgtcagttcatgctgtgtccagagctgcccccgaactgtatagaagcagtcgtagtggcagattcatgtcctcaatgtggacaggtgggatgcgtgcatgcaggccataagtacgctgccgggcacacagtgcacttgcccccatgccgcgcatgccactgcccggacgcaggcggtgaactgatatgttatcaactgcccggctgtcacggcaacttctctgacgccgaagagggtgatcccgagcgacattacgaggacccatattcctacgaccaggaagtagctgaagtcgaggcagcaactgccctgggcggagaagtacaggcaggagccgtgcaggctggggctggcggtccaccagctgccctcgggggaggttcccagcctttgtccaccatccaggcccctccatggccagccgttctgcccaggcccactgccgcggctgccctgggccctcccgcccccgtgcaggcgaaggccaggagggtcacagaggacagcgaagaggaggaggaggaggaggaagagcgcgaagaaatggccgtcactgaacagctcgccgccggcggacacagagggctggatgggctacctacaacggcacctgctggaccatcccttcctattcaggaggaaagagcggaggcaggcgcccgcgcagaggcaggcgcacgccccgaagaaaacttaatactggacgcacaggcgaccagtagatctaccggaccagagggagtgacacacgccccaagcctcggaaaagcagccttagtgccaacacaggcagtgcctgggtcgcccagagaccctgttaagcccagtcctcacaatatcctgtctacatctctgcctgacgctgcttggatacctcctacccgggaagtgcccaggaagcctcaggtgctgccccactctcacgtggaggaggacactgacccgaacagcgtccacagtattccaagaagttctccggaaggcagcacaaaggatctgatagagacttgctgcgctgcgggacagcagtgggcaattgataacgatgagtgcctcgaaatcccagaatcgggcaccgaagataacgtctgtcgcacagctcagaggcattgctgcgtttcttacctgcaggagaagtcctgcatggctggtgttcttggggccaaggagggagagacatgcggagccgaggacaacgatagctgcggcatcagtctgtataagcagtgttgtgattgctgcgggctgggcctgagagtgagggctgagggacaaagctgcgaatccaaccctaacttaggttatccttgcaaccatgtgatgttgagctgttgcgagggggaagagccattgattgtgccagaggtcagacggccccccgaacctgccgccgcccccaggcgagtgtccgaggccgagatggcagggagagaggcactgagcctggggactgaagcagagttacctaattccctccctggggatgatcaagatgagtgtctgcttttgccaggcgagctgtgccagcacctttgtatcaatactgtcggctcctaccactgcgcttgcttcccgggtttctctttacaggatgatgggcgtacatgtcgacctgaaggacaccccccacaaccggaagcgcctcaggaaccagcactgaagtctgaattctcccaggtagctagcaataccattccccttccactcccacagcctaacacctgtaaagacaacggcccttgcaagcaagtgtgctctaccgtgggcgggagcgcaatctgttcttgttttcccggttacgccattatggcagacggggtgagttgcgaggacataaacgaatgcgtgacggaccttcatacatgtagccggggcgagcattgtgtgaatactcttggttcttttcactgctataaggctctgacatgcgaaccaggctatgctttgaaagatggagaatgcgaagacgtggatgagtgcgctatggggacccacacttgtcagccaggctttctatgccagaatactaagggctcattttattgtcaggcccggcagagatgtatggacgggtttttgcaagatcctgaagggaactgtgtcgacatcaacgaatgtacaagtctgtccgagccttgtaggccgggtttcagctgcatcaataccgttggcagctatacatgtcaaagaaatcctcttatttgcgcacggggataccacgcttcagatgacgggacaaaatgcgtagacgttaacgagtgcgagaccggtgtgcaccgatgcggggaaggccaggtctgtcataacctgcccggttcttaccgctgcgattgcaaggctggatttcagcgggatgcatttggcagaggatgcatcgatgtgaatgagtgctgggccagccccggcagattatgtcagcatacctgcgaaaacacccttgggtcttatcgatgctcatgtgcttctgggtttctgttagccgccgatggaaagcgctgtgaggatgtgaatgagtgcgaggctcagcgctgctcacaggagtgcgccaacatttatggcagttaccaatgctattgccgccagggttatcaactagccgaagacggccacacttgcaccgacatcgacgaatgtgctcagggcgctggcatcctctgtacttttcgctgtctcaacgtcccaggcagctaccagtgtgcctgccccgagcaaggctatacaatgacagctaacgggagatcttgcaaagatgtagacgaatgtgctctagggacccacaactgctctgaagccgagacatgtcataacatccaaggctcattcaggtgcctgaggttcgaatgtcctcctaattacgtgcaggtgagcaagacaaagtgtgagcggactacttgccatgatttcctcgagtgccagaattcgcccgcacgcattactcactaccagttgaactttcagactggcctgttggtgccagctcatatctttcgaatcgggcccgcacccgctttcaccggtgatacaattgcacttaacattataaaaggtaacgaggaagggtacttcgggactcgccgactgaatgcttatacaggtgttgtatacctacaaagagcagttctggaaccgcgcgactttgccctcgacgtggagatgaaactgtggaggcaaggctcggtcacaactttcctggctaaaatgcacatcttcttcaccaccttcgccctgtag

SEQ ID NO: 117115 - DNA, 1347 bp, synthetic construct
  misc_feature 1..1347: note = Description of Artificial Sequence: Synthetic coding sequence
  source 1..1347: mol_type = other DNA
atgccaggaataaaacggatattgacagtgactatcctagcactgtgtctgccttcccctggcaatgcgcaggctcagtgtaccaatggattcgatcttgatcggcagtctggacagtgcttggacatcgatgagtgtcggaccatcccagaggcttgtcggggcgacatgatgtgtgtgaaccagaacggaggttatttatgcattccaagaaccaatccggtgtaccgggggccgtactctaacccctattctacaccttactccggtccttaccccgcggcggctccgccactgtccgctcccaactacccaactatctcccgcccactcatatgtcggtttggataccagatggacgaatcgaatcagtgtgtggacgtcgacgaatgcgccacggatagtcaccagtgcaacccgacccaaatatgcattaataccgaaggaggatacacctgctcttgcaccgatgggtactggttgcttgaaggacagtgtttggacatcgacgagtgtagatacggatattgccagcagctttgcgctaacgtacccggctcttactcctgtacctgtaacccggggtttacactgaatgaggatggtcgtagttgtcaggacgtgaacgaatgtgctacagagaatccgtgcgtgcagacatgtgtgaacacttacggcagtttcatatgcagatgtgaccctggatatgaactggaagaggatggcgtacattgttcagacatggacgagtgcagcttcagcgaattcctgtgccagcacgagtgcgttaatcagcctgggacgtacttctgtagctgtcctcccggatatattctgttggacgataaccgatcatgccaggacattaatgaatgtgagcatcgaaatcatacttgcaaccttcagcaaacctgctataacctgcagggtggcttcaaatgtatcgatccgatacggtgcgaagaaccctacttacgaatttccgataatagatgcatgtgccccgccgaaaacccaggatgccgggaccaaccattcacaatactgtaccgggatatggatgtggtgtccggccgttcagtccccgccgatattttccagatgcaggccactactaggtaccctggtgcctactatatttttcagattaagagtgggaatgaaggccgggaattctatatgcgccagaccggcccaatcagcgccactcttgtcatgactagacctatcaaaggtccgcgggagatccaactggacctggagatgatcacggtcaataccgtcattaacttccgcggtagttcagtgattaggctgcgaatctatgtgtcacagtaccctttttag

SEQ ID NO: 117116 - DNA, 276 bp, synthetic construct
  misc_feature 1..276: note = Description of Artificial Sequence: Synthetic coding sequence
  source 1..276: mol_type = other DNA
atgcctgggattaagcgcattctgaccgtcacgatcctggccctctgtttgccttccccaggaaacgctcaggctcaatgcaccaacggctttgatctggataggcagagcggacagtgtttggacatcgacgagtgtcgcactatccccgaagcatgccgtggcgacatgatgtgcgtgaaccagaatggcgggtacctgtgtatcccccgaaccaaccccgtatatcgtggaccgtactccaatccctattcaactccttactccgggccttag

SEQ ID NO: 117117 - DNA, 1320 bp, synthetic construct
  misc_feature 1..1320: note = Description of Artificial Sequence: Synthetic coding sequence
  source 1..1320: mol_type = other DNA
atggttcccagctcaccccgagcgctctttctactcctcttgatcctggcctgcccagaacctcgcgccagtcagaattgcctcagcaaacagcagctgttaagcgcaatcagacagctgcaacagctcctgaagggtcaggaaactagatttgctgaaggcatacgtcatatgaaatccagactcgccgccctacaaaacagtgtcggccgggtgggacccgatgcactgccagtctcctgtcccgccctgaatacacccgctgacggccgtaaatttggttctaaatatcttgtggaccatgaagtccatttcacctgcaaccctgggttccgcttagtggggccatcctccgtggtgtgtctgcccaatggcacatggacaggtgaacagccccattgccgcgggatttccgaatgcagctcgcagccatgccaaaacggcggaacgtgcgttgagggagtgaaccaatatcgatgcatctgccctcccggtagaacaggaaacagatgtcagcaccaggcccaaactgcggcccctgagggcagtgtggcaggagattcagctttcagtagggccccacggtgcgcgcaggtggaaagagcccagcactgcagctgcgaagcaggattccacctttcgggggccgcgggcgatagcgtttgccaagatgtgaacgagtgcgagctgtacgggcaggagggtcgaccacggctttgcatgcacgcttgcgtcaatacgcctggatcatacagatgcacgtgccccggcggctaccgaactctcgcagacggaaagagctgtgaggacgtggatgagtgcgtgggattgcagcctgtctgcccccagggaactacttgcattaacacgggtggaagcttccagtgcgtgagccctgagtgccctgaggggagcggaaacgtgtcttacgtgaaaacgagcccgtttcagtgcgaacgcaacccctgccccatggacagcagaccctgtcgccacctgcctaagactatttcatttcactacctctctctgccaagcaacctcaagactcccattacactgttccgcatggcaacagcctccgcgccaggacgtgccggacccaacagtctgagattcgggattgtcggcggtaacagcaggggccacttcgtcatgcagcggagtgaccgacagacgggggacctcatactggtgcagaacctggaaggcccccagacactcgaggtggatgtcgacatgagtgagtatttggatagatcttttcaggccaaccatgtctctaaagtgaccatctttgtgtctccttacgatttttag

SEQ ID NO: 117118 - DNA, 1182 bp, synthetic construct
  misc_feature 1..1182: note = Description of Artificial Sequence: Synthetic coding sequence
  source 1..1182: mol_type = other DNA
atggtgcccagctcccctagggctctctttctactcctgctcattctcgcttgtcctgagcctagggcgtcccaaaactgtctgtcaaagcagcagttactcagcgccatccggcagctgcagcaactcctcaaagggcaggaaacaagatttgcggaaggtattcggcacatgaagtccagactagcagcactccagaattcagtcggccgagtaggaccagatgctctgccggtgagctgtccagctctgaatacacccgcagacggccgaaagttcggcagtaagtatctagtggatcacgaagttcacttcacgtgcaacccgggcttccgcttagtgggtccatcgtccgtggtgtgtctaccaaatggtacctggactggtgagcagccacactgtagaggcattagtgaatgttcatctcagccttgtcagaatgggggcacttgcgtcgagggggtcaaccaatatcgctgtatttgtcccccagggcgaacaggcaacaggtgtcagcaccaggcccagaccgatgtcaatgaatgtgagctttacggacaggagggccggccacggctgtgcatgcatgcctgcgtgaatacccctgggtcctaccgctgcacctgtcccgggggctaccgtacattggcggacggcaagagctgcgaagacgtcgacgagtgtgtgggtctgcaacctgtctgtccccagggaacaacatgcataaatacgggaggcagcttccaatgtgtgtcacctgaatgccccgagggctccggtaatgtgagctatgtgaaaaccagcccatttcagtgcgagcgaaacccttgtcctatggacagtcggccttgcagacacctgcccaagaccatttccttccattatttgtctctgcccagcaatctgaagactcccatcaccctgtttaggatggccacagcgtccgcccctggcagagcaggacccaatagcctcaggtttgggattgtgggtggcaattctagagggcacttcgtgatgcagcgctccgaccgtcagacaggcgatctcattctggttcagaatctcgaggggcctcagacactggaagttgacgtagatatgagtgagtatctggatcgatctttccaggccaatcacgtgtccaaagtgaccatctttgtatcaccctacgatttctag

SEQ ID NO: 117119 - DNA, 942 bp, synthetic construct
  misc_feature 1..942: note = Description of Artificial Sequence: Synthetic coding sequence
  source 1..942: mol_type = other DNA
atggaactggacagggcggtcggggtcctaggtgccgcaacactgttactgtcctttctgggcatggcatgggcactgcaggcagccgatacctgtccagaggtcaagatggtagggctggaaggctccgataagttgaccatcctgcggggttgtcctggcctcccaggggctccaggacccaagggggaggccggaacaaatgggaagaggggagaacgcggcccaccaggtcctccgggtaaagcaggccccccaggtcccaacggtgctccaggtgaacctcagccatgtctaaccgggcctcgcacttgtaaagacctcctggataggggtcacttcctcagtggttggcatacgatttaccttccagattgtagacctctgactgtattgtgtgacatggatactgatgggggaggctggacagtttttcagagaagggtcgatggaagtgtggacttttatagggactgggcgacctacaagcaggggttcggctctagactgggcgaattttggctaggaaatgataatattcacgcgctgaccgctcaaggtacttctgagctgcgggtggatttagtggatttcgaagacaattatcagtttgcaaagtatcggtcctttaaggttgccgacgaggcagagaaatacaacctggtccttggcgctttcgtagaagggtcagccggcgactctctcacttttcacaacaatcaatcattcagcacaaaagatcaagacaatgaccttaacaccgggaattgtgcagttatgtttcagggcgcatggtggtacaaaaattgccacgtttccaacctgaacggacgctatttgcggggaacacatggaagcttcgctaatggaatcaactggaaaagtgggaaggggtacaactattcatataaggtgtctgagatgaaagtgcgtcccgcatag

SEQ ID NO: 117120 - DNA, 828 bp, synthetic construct
  misc_feature 1..828: note = Description of Artificial Sequence: Synthetic coding sequence
  source 1..828: mol_type = other DNA
atggaacttgaccgggctgtgggagtgttgggagccgctacactgctccttagttttctcggaatggcctgggccctccaggctgccgacacttgccccggcgaaagaggacccccagggcccccaggaaaggcagggcccccggggccgaatggtgcccccggcgagccccaaccatgcttgacagggccccgcacatgcaaagacctgctggaccggggacactttctatccggatggcatactatttatctcccagattgtagacctctaacagtcttgtgtgatatggacacagacgggggcgggtggacggttttccagcggcgggtagacgggagtgtggacttctatagagactgggctacctacaaacagggcttcgggagtagactgggtgaattttggctgggaaacgacaatatccacgctttaactgctcaaggaacgagcgagctgagagtagatctcgtcgactttgaagacaactaccagttcgccaaatacagatcattcaaggttgcagatgaagctgaaaaatacaatctggtactaggtgcattcgtggaaggatcagccggcgactccctgacattccacaataaccagtccttttccacaaaggatcaagataatgatcttaataccggcaattgtgccgtcatgttccagggcgcttggtggtacaagaactgccacgtgagtaacctgaacggcagatatctaaggggcactcacggatcgttcgccaacggcatcaattggaagtccggtaaggggtacaactatagctataaggtctccgaaatgaaagtacgcccagcctag

SEQ ID NO: 117121 - DNA, 564 bp, synthetic construct
  misc_feature 1..564: note = Description of Artificial Sequence: Synthetic coding sequence
  source 1..564: mol_type = other DNA
atggagttgtctggagcgaccatggccaggggcctggccgtactcctggtgctgtttcttcacattaaaaacctccccgcccaggctgccgacacttgtccggaagtgaaggttgtcgggcttgagggctccgataagctgacaattctgaggggttgtcctggccttcctggggcccccggacccaagggagaggcgggtgtgatcggcgagcgtggcgagcggggtctccctggagcccctggcaaagcaggaccagtggggccgaagggggatgccggacagtcccaatcttgcgctaccggtcctcggaactgtaaagatttactggaccgagggtactttctctctgggtggcacacaatctatctgccagactgccggcccctgaccgtgctctgcgatatggataccgatggaggcggctggactgtgtttcagcgacggatggatggcagtgtggacttttaccgggactgggccgcttacaagcagggattcggtagtcagctcggcgagttctggctgggcaatgacaatattcacgcgctgaccgcacagtag

SEQ ID NO: 117122 - DNA, 981 bp, synthetic construct
  misc_feature 1..981: note = Description of Artificial Sequence: Synthetic coding sequence
  source 1..981: mol_type = other DNA
atggagcttagcggagccaccatggctagaggactggcagtgcttttagtgctcttcctccatatcaagaacctacccgctcaggccgctgacacttgcccagaagttaaagtcgtcggcctggagggcagcgataagctcacaatcctccgtgggtgtcctggtctgccaggcgcccccggcccgaaaggtgaggctggggtgatcggagagcgaggcgaacgcggacttccaggcgctccagggaaggcgggcccggtgggtcctaaaggtgatagaggagaaaaaggcatgcggggcgagaagggggacgctggccaatctcagagctgcgcgaccggaccacgcaactgcaaggacctcctggacagaggctacttcctctccggatggcataccatttacctgcctgattgccggccgctgaccgttctttgcgacatggatacggacggagggggttggactgtgtttcagcgccgaatggatggcagcgtcgatttctatagggattgggctgcttataagcagggattcggctctcaactcggggaattctggttgggaaacgataatatccacgcccttactgcacaggggtcttccgagctgcgcgtggatctggtggactttgaggggaatcatcagtttgcaaaatacaaatcatttaaggtggctgacgaggcggaaaaatataagctcgttctgggtgcctttgttgggggctcagcgggcaactcattgactggacataataataactttttctccactaaagaccaggacaatgacgttagctcaagcaactgtgctgagaagttccagggagcctggtggtacgctgactgccatgcctccaacttaaacggattatatctgatgggcccccatgagtcgtacgccaatgggataaattggtcggctgcaaaaggctacaaatacagttacaaggtttccgaaatgaaggttcggccagcatag

SEQ ID NO: 117123 - DNA, 1083 bp, synthetic construct
  misc_feature 1..1083: note = Description of Artificial Sequence: Synthetic coding sequence
  source 1..1083: mol_type = other DNA
atggagctgagtggtgcaaccatggctcgcggcctggctgtactgctggtactctttctgcacataaagaacctgccggcccaggcagccgatacatgcccagaagtcaaagtggtgggcctggaaggctctgataagttaaccatcctgaggggctgcccagggcttccaggagcaccgggacctaaaggcgaggctggcgtcataggcgagcgcggcgagcgaggactacctggcgccccggggaaggctggccctgtgggacccaaaggcgatcggggggagaaggggatgcgtggtgagaaaggagacgcaggacagtcccagagttgtgctactggaccgaggaattgcaaagacttactggatcgtgggtatttcctgtctgggtggcatacgatctacttgcccgactgtagacccctgacagtattgtgcgacatggatacagatggaggcggctggactgtcttccaacgccgaatggacgggtctgtagacttctatcgggattgggccgcatataagcagggctttggatcgcagactcattcccacgatgcacacagctgtccttttgccccctcctctgtgaaaccaccccatgcgcacaatcttacccgggggcgaatcatgttcctgaacatgttcactcttggacagaaaagctttacctctttcaacgtgtgttttcttaatacaagcggctttgatcatttcccagtgtcggttgctagacaggtctttccttggaacctcgtatcacgcgaagagagtggaccacttttttctcgctggcattatcggtgctctggaaggctctcagacttttgcgaggattttccacctccagttattgataccggcaggagcagtccgcctcccccatccctgccacatccaccaatgccacattcacaacactttaccctgttggaaaagggccactttggtgtacaaaagacgctgacaaaaaagggagaatccttagtgggaacgttcctgcttcccacaacagccgagtttatgctgtgggcaggctggctgttgggaagagacaagcacctggccctgactaagtag

SEQ ID NO: 117124 - DNA, 900 bp, synthetic construct
  misc_feature 1..900: note = Description of Artificial Sequence: Synthetic coding sequence
  source 1..900: mol_type = other DNA
atggatttgctgtggatactcccaagcctatggctcttgctgctgggaggtccagcatgtctgaagactcaagagcaccccagttgccctggccctagggagttggaagcctcaaaggtggtgctattgccctcgtgccctggggcgcctggttcaccaggagagaaaggtgcgccgggacctcagggccccccaggcccccctgggaagatgggtcccaaaggcgagcccggggatccggtaaaccttcttcggtgtcaggagggccctcggaactgccgtgagttactctcccaaggagccactctttccggctggtaccacttgtgcctcccagaagggagggcgctaccagtgttttgcgacatggatacggaggggggcggttggttggtattccagagacgccaggacggctcagttgacttttttcgcagttggtccagctacagagcaggcttcggaaaccaggagagtgaattctggctcggtaatgagaacttgcatcaactcacgctgcaaggcaactgggaattacgggtggagttggaggatttcaatggcaacagaaccttcgctcattacgctaccttccggttgctcggcgaagttgaccactaccaattggcccttgggaaatttagtgaaggtaccgcaggtgactctctgtccctgcattccggcaggccatttaccacatacgacgctgaccacgacagcagcaatagtaactgtgctgtgatcgtccatggagcttggtggtacgcttcatgttatcgctctaatctaaacggacggtatgctgtctctgaggctgcggcccacaaatatggcatagattgggctagcggacgtggggtcggccacccctacaggagagtgcgcatgatgctcaggtag

SEQ ID NO: 117125 - DNA, 867 bp, synthetic construct
  misc_feature 1..867: note = Description of Artificial Sequence: Synthetic coding sequence
  source 1..867: mol_type = other DNA
atggacctcctgtggatcctgccctccctgtggttactgctgttaggaggccctgcctgccttaagacgcaggagcacccgtcatgtcccggcccgagagagcttgaggcgtccaaagtggtgctccttcccagttgtcccggggccccgggctcgcctggcgagaagggagctccaggaccacagggacctcctgggccgcctggcaagatgggtcctaaaggggagcctggtccgagaaattgtcgagagctcctctcccagggagctacgttgtccgggtggtaccacttgtgtctgccagagggtcgcgccctgcctgtgttctgtgacatggatactgaggggggcggatggctggtgtttcaacgcagacaggacgggagtgtggattttttcaggagctggagctcatatcgggctggattcggaaatcaggagtccgaattctggctgggcaatgagaacctccatcaactgaccctgcagggaaactgggagctgcgggtggaactggaggacttcaatggcaatcgtacctttgcccactatgctacatttcggctgctgggggaggttgaccactaccagcttgccctgggcaaattttccgagggaactgctggagattccctcagtctgcactccgggaggccttttacaacatacgacgctgaccacgactcgtcaaactctaattgtgccgtaattgtgcacggggcttggtggtatgcctcatgctataggtccaacctcaatgggaggtacgccgtttcagaagccgccgcccacaagtatgggatcgactgggcatcggggagaggtgttggccatccctatcggcgagtccgcatgatgctcaggtag

SEQ ID NO: 117126 - DNA, 300 bp, synthetic construct
  misc_feature 1..300: note = Description of Artificial Sequence: Synthetic coding sequence
  source 1..300: mol_type = other DNA
atggacaccgagggaggggggtggctggtgttccaaagaagacaagacgggtctgtggatttcttcagatcatggtcgagctaccgtgcgggcttcgggaaccaggaatcggaattctggttaggcaatgagaatctgcatcagctaaccctgcagggcaattgggaactccgcgtggaacttgaagacttcaacggcaatcggacttttgcacactacgccacgtttcggttgttgggggaagttgatcactaccagctggctttaggaaagttctctgaggggaccgcgggcgaatag

SEQ ID NO: 117127 - DNA, 2094 bp, synthetic construct
  misc_feature 1..2094: note = Description of Artificial Sequence: Synthetic coding sequence
  source 1..2094: mol_type = other DNA
atggcagagacctcgccagaacctagcggccaactcgttgttcattccgacgcccacagtgacactgtattggcctcgtttgaggaccaacgaaaaaagggctttctttgtgacattaccctgatcgtagaaaacgtacattttagagcccacaaggccctgctggcagccagttctgagtactttagtatgatgtttgctgaagagggagagataggacaatctatttacatgctggaaggcatggtcgccgataccttcggaatcttactggaattcatatacaccggttacctgcacgcatctgaaaagagtacggaacagatcctggctaccgcccagttcctcaaggtgtacgacttggtcaaggcatacacagatttccagaacaatcacagctctcccaagcccactaccctcaatacagccggtgctcccgtcgtcgtcatcagtaacaagaaaaatgatcccccaaagcgaaaacgtggtaggcctaagaaagtcaatactctacaggaggagaaatccgaactcgcagccgaagaagagattcagctccgagttaataacagcgtgcagaacagacagaattttgtggtaaaaggagatagtggtgtactgaatgagcagatcgccgcaaaggagaaggaggaaagtgaaccaacttgcgagcctagtagagaggaggagatgcccgtggagaaggacgaaaactacgaccccaaaacagaagatggacaggcatcccagtctcgctacagtaaaaggagaatatggcgaagtgtcaagctgaaggactacaagctcgtgggagaccaggaggaccatggctcagctaaacgcatatgcggacgaagaaagaggcccggcggaccagaagcgagatgcaaggattgcggtaaagtctttaaatataaccatttcttggcgatacaccagcgctctcacaccggggaacgaccattcaagtgcaacgaatgcggcaaaggattcgctcaaaagcactccttgcaggtccatacaaggatgcacaccggcgaaagaccttacacctgtaccgtgtgtagtaaggcgctgactacgaaacacagtctcttagagcatatgtctcttcacagcgggcagaagtcgttcacttgcgatcagtgcgggaagtactttagccaaaacagacagctgaaatcccactaccgcgtccatacaggccattctttgccagagtgcaaagactgccaccgtaagttcatggacgttagccaattaaagaaacacttacggacccatacgggcgaaaagccttttacatgtgagatctgtggtaagtcatttactgcaaagtcatctctgcaaactcacattcgcatccataggggtgagaagccttattcatgtggaatttgtggaaaaagcttctccgatagctcagcaaagcgtcgtcactgtatcctgcacacaggaaaaaagccttttagctgcccagaatgtaatctacagttcgccaggctcgacaatctcaaggcacacttaaagattcacagcaaggaaaaacacgcatccgacgcaagctccatctccggttcctccaatacagaggaggttaggaatattctccagttacaaccttatcagctctctacatctggagagcaggaaattcagctgctggtgaccgacagcgtgcataatatcaacttcatgcccggtcccagtcaaggcattagcatcgttacagcagaatcatcgcagaacatgaccgcagaccaggccgccaatctgactctgctcacccagcagcctgagcagctccagaatttgatcctatcggcccagcaagaacagaccgaacacattcaaagcctgaacatgatcgagagccagatggggccctctcagacagagccagtgcatgttatcactcttagcaaggagacactagaacacctacacgcccaccaagaacagacggaagagctccaccttgctacttctacatcggatccagctcagcatctacagttaacgcaggaaccagggcccccaccccccactcatcatgtgcctcaacccacccccctcggacaagaacaaagttag

SEQ ID NO: 117128 - DNA, 420 bp, synthetic construct
  misc_feature 1..420: note = Description of Artificial Sequence: Synthetic coding sequence
  source 1..420: mol_type = other DNA
atggggcaaaagggcagtagcgggctgttcagagctgtgtcagcctttggagtggttggcttcgtgaggttcctcgaagggtattacattgttttaatcacaaagaggcgtaaaatggctgatattggcggccacgcgatttataaggtggaggacactaacatgatctacatcccgaacgatagcgtgagggttacccaccccgatgaggcccgttacctccgtatttttcagaacgtagatctcagctcgaatttttattttagctattcatacgatctgagccattccctgcagtacaacctgactgttttacgaatgccacttgagatgctcaaaagcgagatgacacaaaacaggcaggaatccttcgatatttttgaggacgaaggtctgattacccaaggcggtagtggttag

SEQ ID NO: 117129 - DNA, 411 bp, synthetic construct
  misc_feature 1..411: note = Description of Artificial Sequence: Synthetic coding sequence
  source 1..411: mol_type = other DNA
taattattcgaagagctctacgaggaccacggcgacacgctgagcctccagtacggcggcagtcagctggttcatcgagttaagacttacaggaaaatagctccatggacacagcactccaaagacatcatgcagaccctgtccagatactattccaacgccttttccgatgctgacaggcaggattcaattaacctgttccttggcgtctttcacccaactgagggtaagccacacctatgggagctccccactgatttttacctgcaccataagaacaccatgcgactgctcccaactcggaggtcatatacgtactggtggaccccagaagttattaagcacctgccactcccatacgacgaagggttcctcgctcggtctcctgctaatctcgagtgttccaactag

SEQ ID NO: 117130 - DNA, 300 bp, synthetic construct
  misc_feature 1..300: note = Description of Artificial Sequence: Synthetic coding sequence
  source 1..300: mol_type = other DNA
atgactagttcagccagagacttcatgccaaagaccgtgggaatagatcctagtcctttcacagtgcggaaacctgatgagacagggaaatcagttttaggtaataaaagcaaccgggaagaggcggtgcttcagaggaaaacagccgcaagtgccccacctcctcctagcgaggaggcagtgtcctcatcttcagaagacgatagcggaactgaccgagaggaagagggttccgtttctcagagatcaactcctgtgaagatgaccgatgctggggactctgcaaaagtcaccgagtag

SEQ ID NO: 117131 - DNA, 1806 bp, synthetic construct
  misc_feature 1..1806: note = Description of Artificial Sequence: Synthetic coding sequence
  source 1..1806: mol_type = other DNA
atgactggatacttgcgtatatttcagaacgttgatctttcctctaatttctacttttcttattcatacgacctgtcacactccttgcagtataacctgacagtcctgagaatgcccctggagatgctcaagagtgaaatgacccagaacaggcaggagagttttgatatatttgaagatgagggcctcataacccaaggagggtccgtggaccaggccgacccgtttgcccacgttgctgcattgcatttcgatcagatgttccagagatttgggtctcccataattattctgaacctagtgaaagagagagaaaagagaaagcacgagagaattttgtctgaggaactggttgcagccgtgacatacctgaatcaattcctccccccagagcacactatcgtatatattccctgggatatggcaaagtatactaaatcaaagctctgcaacgtcttagacaggttgaacgtcattgctgaatccgtggttaaaaaaactgggtttttcgtgaacagaccagactcatactgcagtatcttacgtcctgacgaaaagtggaacgaacttggcggctgcgtcattcctaccggccgactccagaccggtatcctcagaactaattgcgttgattgtctggacaggaccaataccgcccagtttatggttggaaaatgtgcactagcgtatcagctctattcgcttgggctgatcgataaacccaacctgcagttcgacacagatgccgttagactgttcgaggagctgtacgaggaccatggagatacactttcccttcagtacggtggctcacaactggtgcacagggtgaaaacctataggaaaatcgctccctggacccagcatagcaaggatataatgcagacactgtcgcgctactactctaacgcatttagcgatgcagacagacaggactccatcaacctgttcctgggcgtgttccatccaacagagggtaaacctcacttgtgggaactccccacagatttttatcttcatcataagaacaccatgcggctgctgcctacacgaagatcatacacctattggtggacacccgaggtgattaagcacctgcccctgccctatgacgaggtaatttgcgcggtaaacttaaagaaactgatcgtcaaaaagttccacaagtatgaggaggaaatcgatattcataatgaattttttcggccgtacgagctgtcgtcctttgacgacacgttttgcctcgcaatgacaagttctgctagagatttcatgcccaagacagtcggcatagatccaagtcccttcaccgtgcgcaaaccagatgaaacagggaagtctgttctggggaataagtcaaaccgggaggaggcagttctgcagcggaagaccgccgcctccgctcctccacctcccagcgaggaagcagtaagctcgtccagcgaagatgactctggcactgacagagaagaggagggcagcgtcagtcaacgaagcaccccggttaagatgacggatgccggtgatagcgccaaggtcaccgaaaacgtggttcagcccatgaaagagctttacgggatcaatctctcagacgggctcagcgaagaggacttttctatttacagtcgaacccccatatccgcttttagtcaggacaacatatacgaggtccagcctccacgcgtggaccgcaagagcacggaaatattccaagcacacatacaggcctcacagggcatcatgcagccgctggggaaggaagactcttctatgtacagagagtacattcggaacagatacctctag

SEQ ID NO: 117132 - DNA, 714 bp, synthetic construct
  misc_feature 1..714: note = Description of Artificial Sequence: Synthetic coding sequence
  source 1..714: mol_type = other DNA
atgaggtactttctggtcggatccaacaacgcagagacaaagtatagggtactgaagatcgaccgcacagagccaaaagatctagtgataattgacgacaggcacgtttacacacagcaggaagttagagagctcttagggagactggacctgggtaatcggacgaagatgggacagaagggtagttcagggcttttccgagctgtgtccgcattcggcgtggtaggcttcgtgcggttcctcgagggttattatattgtgctgatcacaaagaggcgaaaaatggctgatattggcgggcatgcgatatataaagtcgaggatactaatatgatttacatccctaatgactccgtccgtgtgacccaccccgatgaggcgcggtatctgcgcatctttcagaacgtggacctgtccagtaacttctatttttcctactcttatgacctgtcccacagtcttcagtacaacttgactgtgctcagaatgcctctggaaatgcttaagtctgagatgacacagaatcgtcaagagtctttcgacatcttcgaggatgaaggactcatcacccagggtggatcaggggtgtttggaatttgttccgagccctacatgaagtacgtatggaacggtgagctcctcgacattatcaaatcaaccgtacaccgcgattggttgttgtatattatccatggattctgtggccaaagttag

SEQ ID NO: 117133 - DNA, 969 bp, synthetic construct
  misc_feature 1..969: note = Description of Artificial Sequence: Synthetic coding sequence
  source 1..969: mol_type = other DNA
ttgtaccaggtgtccacccacgaacagagtgagagtgctcatgggcggaccggccccagcacagggggacgtcaacggtccaggcatgagcaggcgcgggactcctccaggcatagcgcgagtcaagaagggcaggacacaattagaggccaccctggatcttcgaggggcggtaggcaggggtcccactatgagcagtcagtagattcctccggccacagcgggagccaccactcacacaccacatcccaggagcgttcagacgtcagtagaggacagtcaggcagccgaagcgttagccggcagacacgcaacgagaaacagtcaggggacgggagccgccactccgggtcccgccaccacgaggctagttcacgagctgactcttcacggcatagccaggtgggtcagggtcaatctagtggccccaggacctctaggaaccaaggaagctccgtatcacaggactccgattctcaaggacactctgaggactccgaacggcgcagcggttctgcgtctagaaaccatcacggctcggcgcaagaacaatccagggacgggtcaaggcaccctcggagtcaccatgaggacagggcaggtcacggccactctgccgagtccagtcgccagagtggaacccaccacgccgaaaactcctccgggggtcaggcggctagtagccatgaacaggctcggagttccgcaggcgagaggcatgggagccatcaccaacagtcagccgactcatcccgccactcgggtataggccacggccaggcctcttcggcggttagagattctggtcaccgtggatcctcaggcagtcaggccagcgatagcgagggacactcagaagatagtgacacacagtcggtgtccgcacatggacaagccggaccacaccagcagtcacaccaggaatctactagggggcgatctgccggaagaagcgggagaagtggctag

SEQ ID NO: 117134 - DNA, 969 bp, synthetic construct
  misc_feature 1..969: note = Description of Artificial Sequence: Synthetic coding sequence
  source 1..969: mol_type = other DNA
ctgtatcaagtttcaactcacgagcagtcggaatcctcccatggctggaccggcccatctactcggggcagacaaggatccagacacgagcaggcgcaagacagcagcagacactccgcaagccaggacggccaggatacaattcgtggtcatccaggcagttctagagggggccggcagggctaccaccatgaacactctgtcgattccagcgggcactccgggagccaccattcgcataccacctcccaaggtcggagcgacgcctctcgtggccagtccgggtcaaggtctgcatcgcgcactacccgaaatgaagagcagagtggagacggaagcagacactccggtagtagacatcacgaggcctcaacccatgccgacatttccaggcatagccaggctgtccaaggacagagcgagggctctcggagaagccggcgacaagggtcttcagtgagccaggattccgactcggagggccatagtgaggacagcgagaggtggagcggatcagccagtaggaaccatcgaggctccgtgcaggagcagtctcggcacggctctagacatccacggtcgcatcacgaagaccgggctgggcacgggcactcagcggaccgctccagacagagtggcacaagacacgcagagacatcttccggcggtcaagccgcgagttcccacgaacaggccaggtcgtcccccggagaacgacacggctccaggcaccagcagtctgctgacagtagtagacactcagggatcccacgcggccaggcaagctccgcagtcagagacagccgacactggggatcaagcggcagccaagcttctgacagtgagggccacagcgaagagagcgatacgcagagcgtttctggacatggccaggccggaccacaccaacaatcacaccaggagagcgcgcgggatcgttctggagggcgcagcggacggagtggctag

SEQ ID NO: 117135 - DNA, 12186 bp, synthetic construct
  misc_feature 1..12186: note = Description of Artificial Sequence: Synthetic coding sequence
  source 1..12186: mol_type = other DNA
atgagtacgcttcttgagaatatctttgctatcataaaccttttcaagcagtacagcaagaaagataaaaacaccgatactttatctaagaaagagctgaaggaactcctggaaaaggagtttagacagattctcaagaaccccgatgacccagatatggtggacgtgttcatggatcacctcgatatagaccacaataagaagatcgatttcacagaattcttgctgatggtctttaaactcgcgcaagcctattacgagagcacccggaaagagaaccttcccatttctggtcataagcacagaaagcattctcaccacgacaagcacgaggataataaacaggaggagaataaagagaataggaagaggccctccagccttgaaagaagaaataaccggaaaggaaataagggacgcagcaagagtccgcgcgaaactgggggcaagcgacacgaaagctcctcagaaaagaaagaacggaaaggttacagccccacccaccgggaggaagaatatggcaagaaccatcataacagttcaaaaaaagagaagaacaagacagaaaatactcggttaggcgataatcggaagaggctgagcgagcgtctggaggagaaggaggataacgaagagggtgtatatgattatgaaaacactggcagaatgactcagaaatggattcagagcgggcacattgctacttactacaccatccaggacgaggcttacgacacaaccgacagtctattagaagagaacaaaatttatgaacggagtcggagctcggacggcaaaagctcgtcccaagtgaacaggagcaggcacgagaacacgagtcaggttccactacaggagagcagaacccgaaagcggagggggtccagagtgagtcaagaccgagactccgagggccattccgaagattctgagcgccattccggcagtgcttctcggaaccatcacggctcagcttgggagcagagcagagatggatctagacaccctcggagtcacgacgaggatcgtgcttctcacgggcattcagctgacagtagtaggcagtccggtaccaggcatgcggagaccagctccagaggccagactgcctcatctcacgaacaggcaaggagttccccgggtgagcgccatgggtctggacatcagcaaagcgcagacagctccagacacagcgctaccggtcgtggccaggccagcagtgccgtatcggacagggggcataggggctcttccgggagccaggcgagcgactcagaaggacattccgagaatagcgacactcaaagcgttagtgggcatgggaaggccgggctgcggcagcagtcacatcaagagagcactcggggtcggtcaggcgaaaggagtgggaggagcgggtccagtttgtatcaagtatctacccacgaacaaccggactcagctcatggaagaacagggactagcacaggtggccggcagggatcgcatcatgagcaggctcgggattccagccgccactccgcctctcaagaggggcaggatactattcgtggccacccaggttcttccagaggggggcgccaaggaagccatcatgaacagtccgttaatagatctggtcactcaggctcccaccactcgcacaccacaagtcagggacggtcagacgcgtctcacggccagtccggttcacgcagtgctagtcgacagacccgcaacgaagaacagtcgggcgacgggacacgccacagcggaagcagacatcacgaggcttcaagtcaggccgattcatcccggcattcccaggtaggccagggccagagctccggccctaggacctctcgaaaccagggaagcagcgtgagccaggattccgatagtcagggccactccgaggactccgaaagatggtccggctcggcaagcaggaaccaccacggcagtgcccaggagcaatctcgggatggatccagacatcctcggtctcatcacgaagaccgggctgggcatggtcattccgctgacagttctcgcaaaagcggaacccggcacacacaaaatagctcatcaggccaggctgcctcatctcatgagcaggccaggtcttcggcaggagagcggcatgggtcacgccatcagctgcagagtgctgactctagccgacatagcggcacgggccatggacaagcttcttcagccgtgagagattctggccacagaggcagcagtggctcccaggccaccgacagcgaaggacactccgaggatagtgacacacaatcagtttccggacatggacaagccggacaccatcaacagtcgcatcaagagtccgcccgggataggtctggagaacggtcccgtaggtctggctctttcctgtatcaggtgagtacacacaaacaatctgagtcatctcatggatggacaggcccctctactggagttaggcagggatcccatcatgaacaagcgcgggacaactcccgacattctgcttcgcaggatggacaggacactatccgtggccaccccggttcgagtagaagaggaaggcaaggttcccaccacgaacagagcgtggatagatccggccattctggatcccatcactctcacactacctcccaggggcgctctgacgcctctcgcggccagagtggatctcgctccgctagtagaaccacccgcaatgaagaacagtcacgagatggttctaggcactctggcagcagacatcacgaagcaagttcccacgctgacattagccgacacagtcaggcgggacaagggcagtctgaaggaagcaggactagccgccgccagggctcttcagtgtcacaggatagtgatagcgaggggcattctgaagattcagagcgttggagcgggagcgcttctcgtaatcaccgtggatcggcgcaggagcagtcccggcacggatccaggcatcctcggtcccaccacgaggatcgggccggccacggacacagcgcggactcttctcgacagtcgggaactccccacgccgaaactagttccggcggccaggctgccagtagccatgagcaagctcgcagcagcccaggtgagcgccacggcagccggcaccagcagtcggcagacagtagccgccacagcggaattccaagaagacaagctagtagtgccgtgcgggactctggccattggggatcatccgggagtcaggccagcgactccgagggtcattccgaggaatcggacacccagagcgtgtctggacacggacaagacggcccacatcagcagtcacaccaggaatcagctcgcgattggagcgggggtaggagcggccgctccgggtctttcatttaccaggtgagcacacatgaacaaagcgaatccgcgcacggacgcacaaggacgtcaacaggacgcaggcaggggtcacaccacgaacaggctagggactcatccaggcattcagcatctcaggagggacaggacacaattcgggcgcatcctgggagtcgccgcggggggaggcaggggagtcaccatgagcaaagtgttgacaggagcggacattcgggtagccaccattcccataccacgtctcaggggcgctccgacgcttctcacgggcagagcggctcaaggtccgcttcccggcagacaaggaaagataagcagagcggggatggatctagacactccggtagccgacatcatgaagccgcttcttgggctgatagctctcggcactcccaagtcggccaggaacagtcttccggttcccggacttcaagacaccagggatccagtgtctcacaggatagcgactctgaaagacacagcgacgacagtgagagactgtctggatccgcttcaaggaatcaccacgggtcctcccgcgaacaaagccgcgatgggtcaagacatccaggattccatcaagaagatcgcgcgtctcacgggcatagtgcagacagttccagacagagcggcacgcatcatactgaatcttcatcccatggccaggcggtatctagccatgagcaggcaagatccagccccggggagaggcatgggagcagacatcagcagtcagccgatagctccaggcacagcgggatcggccaccggcaggccagtagcgcggtgagggattcaggtcatagagggagttccggctctcaagtcacaaatagcgaggggcactctgaagactccgatacacagtcagtgtccgcccacggacaggcaggccctcaccagcagtcccataaggagtctgcccgaggccagagtggagagagttcaggccgttctagaagtttcctgtatcaagtctcatctcatgaacaatctgagtccactcatggacagactgctcctagcacaggggggcggcaaggaagcaggcatgagcaggcccgcaatagttccagacactcggcttcccaagatggccaagacaccattagaggacatcccggttcctcaagaggtggccgacagggatcttaccacgaacagtcagtcgatcgcagcggtcacagtggctaccaccactcccacaccacccctcagggccggagtgacgcgtcccacgggcaatcggggcctaggtccgccagtcggcagactagaaatgaagagcagtctggcgacggttccagacactccggttccaggcaccacgaaccatcaacacgcgctggatcatcccgccactctcaggtcggacagggagagtcagccggcagcaagaccagcaggcgtcaaggctcgtccgtttcccaagatagagattccgaaggtcacagtgaagacagcgagcgcaggtccgaatctgccagccgcaaccattatggttctgcgagggagcagtcccgacacggctcccggaatccaagatcccaccaggaggatagggcgtcccatggccacagtgcagaatcctcgcgccaatcaggcaccagacacgcagaaacctcctctgggggacaagctgctagttctcaggagcaggcccggtcaagtccaggcgagcgccacggcagtaggcatcagcagtcggccgactcgagcactgattccggaactggccggcgacaggacagttcagtggtgggtgattctggtaaccgagggagttctggtagtcaagcctctgatagtgaagggcatagcgaagagtcagacacacagagtgtaagtgctcacgggcaggctggaccccaccagcagagccaccaagaaagcacacgcggtcagagcggcgagcgctcaggcaggtccgggtcctttctgtaccaggtaagcacccacgagcagagcgagagcgcacacgggcgcaccggacctagcacgggggggcgccagcgaagtcgccacgagcaggctagagactcttcaagacattcagcctctcaggaaggacaggatacgatacgcggccacccagggtcatcccggggaggaaggcagggctcacactacgagcaatcagtcgattcttctggccacagcgggtcccatcattcacataccactagccaggaacgatctgatgtgtctcgcggacaaagcggctcccgctctgtgtcacgccagacccggaacgaaaagcaaagcggcgatggatcgaggcatagcgggagtcggcaccacgaggccagctctcgcgccgattctagccgacattcccaggtggggcaaggccagtcttcaggtccccggacctcacggaatcaggggagttcagtgtcacaagactcagactcacaggggcacagtgaagactctgaaagatggtcaggctcagctagcagaaatcatctggggagcgcttgggagcagtctcgtgatggatcacgacaccctgggtctcaccacgaggacagagccggtcatggacattcagccgactcatcccgacagagtggcaccagacacactgaatccagtagcagaggtcaggctgcctcatcgcatgagcaggcccggagctccgcgggtgaaaggcacggatctcatcaccagttgcaaagcgcagacagctcgaggcactccggcatcggccatggacaggcatcgtctgccgtgcgtgatagcggacatcgcggctatagtggtagtcaagcgtccgactctgagggccattccgaggattccgatacccagtctgtgagcgcccaagggaaggccggaccacaccagcagtctcacaaagaaagcgcaaggggccagagtggggagtcttccggtaggtccggttcttttctgtaccaagtgtctacacatgagcagagtgagagcacccacggccagtcagctcctagtaccggtggaagacagggatcccactacgaccaggcacaggatagctcacgccattctgcttcacaggagggccaggatacaatccgtggacacccaggacctagcagaggaggacgccagggatctcaccaagagcaatcagtagaccgttctgggcacagcggcagccatcactctcataccacgtcccagggcaggtccgatgcatccaggggtcagagtggttctcgtagcgccagtaggaaaacttatgacaaggagcagtccggtgacggttccaggcatagcggcagccaccatcacgaagcttctagttgggctgactcgtcgcgccatagtctcgttgggcaggggcagagctctggacctcggacatctcgtccgcgagggtcaagcgttagccaggacagcgacagcgagggacacagcgaagactcagaacgccggtcaggctccgcttcacggaatcatcacggcagtgctcaagaacagagccgtgatggctcccggcatcctcgttctcatcacgaggatcgcgctgggcacggacattctgccgaaagcagtcggcaaagcggcacccatcatgccgaaaattcatccggggggcaggccgcaagctcacacgaacaggcaagatcatccgccggagaaagacacggcagccaccaccaacagagtgctgattcaagccgccacagcggcattggtcatggccaggcatccagtgctgtccgggactctgggcatagagggagtagtggctctcaagcctccgacagcgagggccattccgaggactctgacactcagagtgtgagcgctcatggccaagccggtccacaccagcagagccaccaggagtcgactcggggaagatctgctggcaggagcggaagaagcgggagctttctttatcaagtgagtacccatgagcagtccgagagcgctcacgggcgcacagggacctcgaccgggggccgccaggggtcgcatcataagcaagcccgagattccagtcgtcacagcacatcccaggagggtcaagataccattcacggccaccccgggtcatcttccggaggacgacaggggtcccactatgagcagctagtggaccggagtggccactccgggagccatcattcccatactacatcacaaggaaggtctgatgcctctcacggccacagtggttcccgatctgccagcagacagaccagaaatgacgaacagtctggcgacggatcacgccactcgggctcccggcaccacgaggcatcttcgagagctgattcctcagggcactcccaggtggggcagggccaatcagaaggaccgagaacatcacgcaattggggtagctccttttcccaggactccgatagccagggtcactcagaagattcagaaagatggtccgggtccgcgtcaagaaaccaccatggctcagctcaggagcagctgcgggatgggagtcgccatccccggagtcaccaagaagatcgcgccggacacgggcacagcgcggactcctcgagacagagcggaacgcggcacacccagacctctagtggcggacaggccgcttcaagccatgaacaggcacgctcgagcgccggagaacgccacggtagtcaccatcagcaatctgctgacagttcccggcactccggcatcggacacggccaggcaagctctgccgtcagggacagcggtcacagaggatatagcggctcccaggcctcggataatgagggtcatagcgaagactcagatactcaaagcgtgagtgcccatggccaggcggggtcccaccagcagagccatcaggagtccgccagaggccgatctggcgaaacctccggacactctgggtccttcctgtaccaagtgtcaacccatgagcaaagcgaatcctctcatggatggactggtcctagtacacgtggccggcagggatcacgccacgaacaggctcaggactcgagtcgacactccgcatcccaggacggccaggacaccattaggggacacccgggaagctcaagggggggtaggcaaggctatcaccacgaacacagcgtggacagttctggccacagtggctctcaccactcccacacaacgtctcagggccgaagtgacgcttctcggggccaaagcgggtcacgctcagccagccgaaccactaggaatgaggaacaaagcggtgacggaagccgacattccggctctcggcaccatgaggcatctacccatgccgacataagcaggcattctcaggccgttcaggggcagtccgaaggctcccgccgctccaggcggcagggtagcagtgtgtcacaagattccgatagcgaggggcattcggaggactcggaacgatggtcaggcagcgccagtaggaaccatcatggatcggcccaggagcagctgagggatggctccaggcatccaaggtctcaccaggaagaccgcgcaggtcacggccacagcgcagacagttcaaggcagtccgggacccggcatacccaaacatcttctggcggccaggccgcaagcagccacgaacaagctagaagctcggccggcgagcgccacgggagtcatcatcaacaatccgccgactcatcgcggcacagcggcatcgggcacggacaggcaagctcagccgtcagagatagtggccatagagggtactctgggtctcaagcttccgataacgaaggtcactcggaggactcagacacccagtccgtgtccgcacacgggcaggctgggagccatcagcaaagccaccaggaatctgctaggggtcggtcaggagagacctctggccacagtggctcattcctttatcaggtttcaacgcacgagcaatccgaaagtagtcacgggtggacaggccctagtaccaggggccggcagggctcccgtcatgagcaggcacaagacagttcacgtcactcagcaagccagtacggccaagatacgatccgcggccatccaggctcctcgagagggggacgtcagggataccatcacgaacatagcgtggattcaagcggccactcaggtagccaccattcgcacacaacctcacaggggcggagtgacgcctcccgcggccaatcaggatctaggagtgcgtctcggaccactcggaacgaggaacaatccggtgatagttcccgtcatagcgtctcaaggcaccatgaggcgtcaacgcacgcagacatttcaagacactctcaggcagtccaggggcaatccgaaggaagcagaagatcccgaaggcaaggaagcagcgtctcccaggattcagattccgaggggcacagtgaagattccgagcggtggagcggctctgcgtcccgtaatcatcgcggttccgttcaggaacagagccggcacggaagcagacacccacgatcccaccacgaggaccgagctggacacggccacagcgccgaccgtagtcgtcagagcggcacacgacacgctgagacttcctccggcgggcaggccgctagttcacacgagcaggcacggtcttcacccggggaacgtcatggctccagacatcagcaatcagccgactcgtctcggcatagcgggataccaagggggcaggcaagctctgcggtcagggactccagacactggggatcatctggtagccaagcttcggatagtgaaggccattctgaggagagtgatacgcagtctgtgtcagggcatggccaggcggggccccaccagcaaagtcaccaggagagcgcccgcgacaggtctggcggtagatctggcagaagtggttcctttctctaccaggtcagcacgcacgagcagtccgagtctgcgcatggtagaaccaggacttctacaggacggagacaggggtcacaccatgaacaggcccgggattcatctcggcactctgcaagccaagagggacaagataccatacggggccatccggggtcttcaagaagaggacgacaagggagtcactacgagcaatccgtggaccgatcaggccattctggatctcaccacagccacactactagccagggccgtagtgacgcctcaagaggccagagtggatctaggagcgctagtaggcagacccgtaatgacgagcagagcggagacgggtctaggcactcttggagccaccaccatgaagcctctacgcaggcagacagttcacggcacagccagagtggccagggtcaatcagccggaccaaggacatcccgaaaccaaggaagttcagtgtcacaagattctgatagtcagggtcactcagaggactcagaaagatggagcggcagcgcttcccgcaatcatcgaggctctgcccaggaacagtcccgggacggttcccgacaccccacctcccaccatgaggaccgagccggccacggccactccgcggagtcttctaggcagtcagggacgcatcacgccgaaaactcttccggaggtcaggccgcctccagccatgagcaggcgaggtcatcggccggtgagcggcacggaagtcaccatcagcagtcagcagactctagtcggcatagcggtatcgggcatgggcaagcgagctccgccgtgagagattctgggcatcggggatccagcgggtcacaagcctctgactctgagggacacagtgaggacagcgatacacagtctgtaagtgctcatgggcaagccgggccccaccagcagtcccaccaagagagcacaagggggagaagcgcaggtaggtcgggaaggagtgggtctttcctgtatcaagtgtctacgcatgagcagtcggaaagcgcccacggtcgggctggtcctagtactggcggtcgccagggctctaggcatgaacaggcccgggatagcagcagacacagcgccagccaggaaggacaagatacaattaggggacaccctggctcccgtagaggcgggcggcagggctcttaccacgagcagtcagttgaccgcagcgggcactcggggtcccatcattcccataccaccagccagggtcgctctgatgcctcgcatgggcagtcgggaagtcgcagtgcttccagagagacaaggaacgaggaacagtctggagatggcagcagacactcgggcagccgccaccatgaagcttccacccaggccgactccagtcgtcactctcagtccggacaaggagagagcgcgggttccaggagatctcgacgacagggcagcagcgtgtcgcaggacagcgactcagaagcctacccagaggactccgagcggagaagtgaatcagcatctcgcaaccaccatggctctagtagggaacaatcaagggatgggtctcgccatcccggcagttctcacagggatactgcctcacatgtacagagttctcctgtgcagtctgacagctcgacagcaaaagaacacggtcatttctctagcctgtcgcaagattctgcatatcattccggtatacagagtaggggctcgcctcattcctcttcatcctatcactaccaaagtgaaggcaccgaacgccagaaggggcaaagcggtttggtctggaggcacgggtcttatggaagcgccgattatgactacggagagtccggtttcaggcacagtcagcacggctcggtgagctataatagcaatcccgtcgtctttaaggagagatctgatatttgtaaagcctccgctttcggcaaagatcaccctagatactatgcaacgtacataaataaggacccaggcctgtgtgggcactctagcgatattagcaaacagttagggttttcacagtcccagcgctattactattacgaatag

SEQ ID NO: 117136 - DNA, 969 bp, synthetic construct
  misc_feature 1..969: note = Description of Artificial Sequence: Synthetic coding sequence
  source 1..969: mol_type = other DNA
ctgtaccaggtttcaacccacgagcagcccgatagcgctcatgggaggaccgggacttcaacaggcggaaggcagggtagccatcacgagcaggctagagattcgagccgccattccgcctcccaggagggacaggataccattcggggccatcctgggtcatcccgggggggacgtcaggggtctcaccatgaacagagcgtgaatcgcagcggacattcaggcagccatcattcgcatacgaccagtcagggacggtctgatgcttcccatgggcagagtggaagtcgtagcgcatcgagacagacgcgcaacgaagagcagtccggagatggaactcgccattcaggttcaaggcaccatgaggcttcgtcgcaggccgatagtagccgccactcacaggccggccaggggcagagtgagggcagccgaacctctaggagacagggaagctcagtgtctcaggacagcgattcagaagggcatagcgaggatagcgagcgctggagtggctcagcatccaggaaccaccgtggaagcgctcaggaacagagcaggcatgggtccaggcacccaaggtctcaccacgaggatcgtgccggtcatggacacagcgcagattcttccaggcaaagcggcaccccccatgcggagacctcgtcgggaggccaagcagccagttcccacgaacaagcacgcagttctcctggcgaaagacatgggagcaggcaccagcagtcggcagatagcagtagacattccgggatacccaggaggcaggctagctctgccgtgagggatagcggtcactgggggtccagcggaagccaggcaagcgatagtgagggtcactcagaagaaagtgacactcagtcggtttctggccacggccaggatggacctcaccagcaatctcaccaggaatccgcccgcgactggagtggcggccgtagtgggagatcaggttag

SEQ ID NO: 117137 - DNA, 3402 bp, synthetic construct
  misc_feature 1..3402: note = Description of Artificial Sequence: Synthetic coding sequence
  source 1..3402: mol_type = other DNA
atgcggagccgcggcagcgatactgagggaagcgctcaaaagaagttcccacgacacaccaaaggccactcgttccaagggcctaagaatatgaagcatagacaacaggacaaagatagtccatctgagtccgacgttatcctaccctgtccaaaggccgagaagccacactcgggtaatgggcatcaagctgaagatctgagccgagatgatctgctgttcctcctctcaatccttgagggggagctgcaggctcgcgacgaggtgatcggcatattaaaggcagagaagatggacctcgctctactggaggcgcaatacggattcgttactccaaaaaaggttttggaggccctccaacgcgatgcctttcaggccaagagcaccccgtggcaggaggacatctatgaaaaacccatgaacgagctggacaaggttgtcgagaaacacaaagaatcatacagacgcattctgggtcagctcctggtagccgagaagagtcgcaggcaaactatcttagagctagaggaagaaaaacgtaaacacaaggaatatatggaaaaaagtgatgagttcatctgcctcctggaacaggagtgcgagcgcttgaagaagcttatcgatcaggaaataaagagtcaggaggaaaaagaacaggaaaaagagaagagagtgacaactctaaaggaggaactgactaagctcaagagcttcgccctgatggtggtggacgaacagcagcggctcaccgcgcagctcaccttgcaaagacagaaaatacaggaactgacgactaatgcgaaagaaactcataccaagttagcgctagccgaggctagagtccaagaagaagaacagaaagcgactaggctggagaaagaacttcaaacgcagaccacaaagttccatcaagaccaagataccatcatggctaaacttaccaacgaggattctcagaatagacagctgcagcaaaagctcgccgcgttgtctcggcaaattgatgaactcgaagaaactaacaggagtctgcgcaaggccgaagaggagttgcaagacattaaagagaagatttccaaaggcgagtatggaaatgccggcataatggctgaggtggaagaactgcgtaagcgagttttggatatggagggcaaggatgaagaactaatcaagatggaggagcagtgccgtgatttgaataagcggcttgagcgagaaacgctgcagagtaaggactttaagctggaagtggaaaagttaagtaagcgaatcatggcacttgagaaactggaagatgccttcaataagtccaagcaagaatgttattcgctgaaatgtaatctggaaaaggaaagaatgacaaccaagcagcttagccaagagctggagagtctcaaggttcggatcaaggaattggaagctattgagtctagactggaaaagaccgagttcactttaaaagaggacctcactaagctcaaaacactcacggtgatgttcgtagacgagcggaaaaccatgtctgaaaagctcaagaaaaccgaagacaaactacaggcagccagctctcagctgcaagtcgagcaaaacaaagtaacaaccgtgaccgagaagctgatcgaagaaaccaaacgcgctctgaagtcaaaaaccgatgttgaggaaaaaatgtacagcgtgacaaaggagagggatgatctgaaaaataagcttaaagcggaggaagagaagggcaacgatcttcttagccgggtcaatatgttgaagaaccgcttacagtcattagaggccatagagaaggactttctgaaaaataaattgaaccaagactcaggaaagagcacgaccgctttgcatcaagagaataataagatcaaggagctgtcccaggaagtcgagcggttgaagctcaagttaaaggatatgaaagcgatcgaggacgatttgatgaagactgaggacgagtatgagaccctcgagcgtcggtatgccaatgagagggacaaggcccaatttctgagtaaggagctggaacatgtcaagatggaactggcgaaatataagttagcagaaaagaccgagaccagtcacgagcagtggcttttcaaaaggttgcaggaggaggaagcaaaaagcggacatctttcgcgtgaggtcgatgccctaaaagaaaaaatccacgagtacatggctacagaagacctcatctgtcatctgcaaggtgatcacagcgtcctgcaaaaaaaactcaaccagcaagagaaccgcaaccgcgatctcggcagagagatcgagaacctgactaaggagctcgaaagataccgccacttctcaaagtctctgaggccatcactcaatggccgcaggatttcagatccccaagttttctcaaaagaggtccagaccgaggcggtggacaatgagccacctgattacaaaagcttaataccccttgagagagctgtcatcaatggacagctgtatgaagaaagtgagaatcaggatgaagatcccaatgacgagggctcggtcctgtcttttaaatgtagccagagcacgccatgtcccgtgaaccgcaagctatggattccatggatgaagtctaaagagggacatctgcaaaacggaaagatgcagaccaagcccaatgccaattttgtgcagcccggtgacctggtgcttagtcatacaccagggcagcccttacacatcaaggtcacaccagatcacgtgcaaaacaccgcaacactcgagataacttctcccactactgagtccccacactcttacacttccacagcagtcattcctaactgcggtaccccaaaacagagaattactatactccaaaacgcaagcatcactcccgtcaaaagcaaaacgtctacggaggatctgatgaacttggagcagggcatgagtccgatcaccatggccacatttgctcgagcccagacccccgagagttgcggttccttgactcccgaacggaccatgtctccaattcaagtgctagccgttacgggatccgcaagcagtccggagcagggcaggagcccagaacccacagagatctcagccaaacatgccattttccgtgtgagtcccgaccggcagagtagctggcaatttcaaaggtctaacagcaatagcagcagcgttatcaccaccgaggacaacaagatccacatacacctgggaagtccttacatgcaggcagtggccagtcccgtccgacctgctagtccttccgctccactgcaggataaccggacccagggactgatcaacggggcactgaataaaacaacaaataaggttacttcgtcaataaccattaccccgacagccacgcctctgccacgccagtcccagatcacagtgagcaacatctataactag

SEQ ID NO: 117138 - DNA, 3408 bp, synthetic construct
  misc_feature 1..3408: note = Description of Artificial Sequence: Synthetic coding sequence
  source 1..3408: mol_type = other DNA
atgaggtctcgaggtagcgatactgaaggcagcgcccagaaaaaattccctcgccacacgaagggacattcttttcaaggcccaaaaaatatgaaacatagacagcaagacaaggatagcccaagtgaatctgatgttattctcccctgccccaaagcggagaagccacactccggaaacggccatcaggccgaggatctgtcaagggatgatctgctgtttcttctttcaattttggaaggcgaactgcaggcccgggacgaggtgatcggcattctaaaggccgaaaaaatggacctggcgcttctggaagcccagtacggctttgtcaccccaaaaaaggtgctggaggccttacagcgggacgcatttcaagcaaagtccactccttggcaagaagatatctatgagaaaccgatgaacgaactggataaggtggtggaaaagcacaaagaaagttataggcgcatccttggccagcttttagtcgcagaaaaaagtagacgccagacaatccttgagttagaggaggagaaacgcaaacataaggagtacatggagaagtctgacgaattcatctgtctcttggagcaggaatgtgaacgtttgaaaaagctgattgatcaggaaatcaagagtcaggaagaaaaggaacaggagaaagagaaacgcgtcacaactttgaaagaagagttaacgaaactcaagtccttcgctctcatggtcgttgatgagcagcagcggttgacagcgcaactaacactgcaaagacaaaaaattcaggagctgaccaccaacgcgaaggagacccataccaaacttgctctcgccgaggcgagagtgcaagaggaagagcagaaagctacaaggctggaaaaggagttacagacccaaactacgaagttccatcaggaccaggacacaatcatggctaagctaacaaacgaagactctcaaaacaggcagttgcagcaaaagttggccgccttgtcgagacagatcgatgagttggaggagacaaacaggagtttacgtaaagcggaggaagagctccaggacatcaaggagaagatctcaaaaggcgaatatgggaatgctggaatcatggctgaagttgaagagctgaggaagcgagttctggatatggagggaaaagacgaagaactgattaagatggaagaacagtgtagggatttaaacaaaagactggaaagagaaaccctgcagagtaaagactttaaactggaagtcgaaaagctgagtaaacgcatcatggccctggaaaaactggaagacgcatttaataagtctaagcaggagtgttattccctgaaatgcaacctcgaaaaggaaaggatgaccactaagcagctctctcaggagctggaatccctcaaggttaggataaaagaactcgaagccatagaatcccggttagaaaaaaccgagttcaccctgaaggaagacttaactaagctgaagaccctcacggtgatgttcgtggatgagcgtaagaccatgagcgagaaacttaagaagaccgaagataagttgcaggctgcctcatctcaactgcaggtggagcagaataaggtgaccactgtgaccgaaaagctaatcgaagagaccaaaagagctctaaagtcgaagacagatgtcgaggaaaaaatgtatagtgtcaccaaagagcgcgacgacctcaaaaataaactgaaagccgaggaggagaagggcaatgatctgctctctagggtaaacatgctcaagaatagactccagtccctcgaagcgattgaaaaagattttttgaaaaataagcttaatcaagatagcggtaagagcaccaccgcactccatcaggagaataacaaaattaaagagctgagccaggaggtagagcgcctgaagttaaagctgaaagatatgaaagccatcgaagacgatttgatgaaaaccgaagacgagtacgagactcttgagcgtagatacgcaaatgagcgtgataaagctcagtttctgagtaaggaactcgagcatgtcaaaatggaactagctaagtacaagttagccgagaaaaccgaaacaagccacgagcagtggcttttcaagcgcctgcaggaagaggaggctaagtcgggacatctctcccgagaagtggacgccctaaaagaaaagatccacgagtacatggccaccgaagatctgatctgccatttgcagggagatcactcagtcctgcagaaaaagctcaaccaacaagagaacagaaacagagatctcggaagagaaattgaaaatctgactaaggagttggaaaggtacagacacttctctaagtcgctcaggccaagtctcaacggccgaagaatctctgatccgcaagtgtttagcaaggaggtgcagactgaggccgttgacaacgaaccaccagattataaaagcctgattccactggaacgggccgtgatcaatgggcaactctacgaagagtcagaaaatcaggacgaagaccccaatgacgaaggcagcgtgctttcgtttaaatgtagtcagtcaacaccgtgccctgtgaataggaaactgtggataccttggatgaagtccaaagagggtcacctgcagaatgggaagatgcagaccaaacctaatgctaacttcgttcagccaggtgacttggttttatcccacaccccaggtcagcctctacatattaaagtgactccagaccatgttcaaaataccgctaccctcgagatcacaagtccaacaacagaatccccacatagctacacaagcaccgccgtaattcccaattgcgggacccctaagcagagaatcacgattctgcaaaatgcgagtattacccctgtgaagtctaagacgagtactgaagacttgatgaatctcgaacagggaatgtcccctatcacaatggccacattcgcccgtgcccagacccccgagtcttgcggtagcttgacacctgagcgtactatgtctcctatccaggtcctagccgttactggctcagccagcagccctgaacagggccgaagtccagagcccacagagattagtgccaaacatgcgatttttagagtgtctccagacaggcagtcatcctggcagttccaaaggtctaatagcaacagtagctcagtcattactactgaagataataagatccatattcaccttggaagtccctatatgcaggctgtcgcatctcctgttaggcccgcatctccgtccgccccactccaggacaacagaacacaggggctcataaacggcgcgctgaacaaaaccacaaacaaggtgacttcaagcattaccattacgcctacagctacaccgttaccaagacagtcccagataaccgtggaaccgcttctgctgccccactag

SEQ ID NO: 117139 - DNA, 2682 bp, synthetic construct
  misc_feature 1..2682: note = Description of Artificial Sequence: Synthetic coding sequence
  source 1..2682: mol_type = other DNA
atggtggtggatgagcagcagcgtctgacagcgcaactgaccttacagcggcagaaaatccaagaactgactaccaatgctaaagagacgcacaccaagcttgccttggcggaagctcgggttcaggaggaggagcagaaggctacgcgcctcgagaaggagctgcagacgcagacaacaaaatttcaccaggaccaggacaccataatggctaaattgacaaatgaggacagccagaataggcaattgcagcaaaagcttgctgcccttagccggcagatcgacgagctggaggagaccaatcggagcctgcgcaaggcagaggaggagttacaggacattaaggaaaaaatctctaagggcgaatacggtaacgccggcattatggcagaggtggaagagttgagaaagcgagtgctggacatggaaggaaaggacgaagagttgattaaaatggaggagcaatgcagagacttaaataagcgactggaacgggagactttgcagagtaaagactttaagttagaggtcgagaaactgagtaaaaggatcatggcattggagaaactggaggacgcttttaacaagtcaaaacaggagtgttactccttaaagtgcaacctcgagaaagagcgcatgacaacaaagcagctctctcaagaactcgaaagcctgaaggtaagaatcaaggagttagaggcaatcgaaagtcgcctggagaagacggagttcacactgaaggaggatctgacgaagctcaaaacactgaccgtcatgtttgtggacgagcgtaagacaatgtcggaaaagctgaaaaagacagaggataaattgcaggcagctagcagccagcttcaggtggagcagaataaagtgacgacagtcacggagaagttaatcgaagagacaaagagagccctgaaatccaaaaccgatgtcgaagagaagatgtactccgtgaccaaagaacgagatgacttaaaaaacaaattgaaagccgaggaggagaaagggaatgacctcctgtcacgggtcaacatgctcaagaaccggcttcagtctctagaggcgattgaaaaagacttcctcaaaaataaactgaaccaggattctggtaaaagtacaactgcccttcaccaagaaaataacaaaattaaagaactatcacaagaagtggaaagactcaagcttaagcttaaagacatgaaggccatcgaagacgatctcatgaagaccgaggatgaatatgagactctcgaaagaagatacgccaatgaaagagacaaagcacagttcctcagcaaagaactggaacatgtgaaaatggagctggccaagtacaaattggctgaaaagactgagacgtcgcatgaacagtggctgtttaagagactccaagaggaagaggccaaaagcggacacctctcccgagaggtcgacgcactgaaagagaagattcatgagtatatggccactgaggacttaatatgtcacctgcagggggatcatagcgtgttgcagaagaagttgaaccagcaggagaaccggaaccgtgatctcggccgtgaaatagagaacttgaccaaggaactggaaagatacaggcacttcagcaaaagcttgaggccctctttgaatggccggaggataagtgacccacaagtattttccaaggaggtgcaaacagaggccgtggataacgaacccccggattataaatctctgatcccactggaaagagccgtgatcaacggccagttgtatgaggagtcagaaaatcaggatgaggacccgaatgacgagggaagtgttctttcctttaagtgtagccagtccacaccatgtccagtgaatcgaaaactctggataccttggatgaagtccaaagaaggacaccttcagaatggcaagatgcagaccaaacctaacgcaaatttcgtgcaaccaggtgatttggtgcttagccatacgccaggccaaccgctgcacattaaggttactcctgaccacgtacagaataccgcaacgctagagataacaagtcctaccacagagtccccccattcctacacatcaacagctgtcattcctaactgtggaacccccaagcagcggatcacaatcctgcagaacgcgagtataacgcctgtgaagtcaaagacctctacagaggatctcatgaatttggagcagggaatgtcacctataactatggcaactttcgcccgggcccagacgccggaaagctgcggatctctgactcctgagcgtaccatgtccccaattcaggtgctggccgtaactggaagcgcctctagccctgagcagggcaggagtccggagccgactgagatcagtgccaagcatgctatcttccgggtttctccagacaggcagtcgagttggcaattccagaggtctaacagtaattctagttctgtgataactacggaagataataagattcatatacacctcggaagtccctatatgcaggcagtggcgtcccccgtccgccccgcatcccctagcgcacctctgcaagacaacagaacacagggattgatcaatggagcactgaataagaccaccaacaaggtaacctcttctatcacaattacacccacagcaaccccactgccacggcagtcacaaatcaccgtctccaatatttacaactag

SEQ ID NO: 117140 - DNA, 768 bp, synthetic construct
  misc_feature 1..768: note = Description of Artificial Sequence: Synthetic coding sequence
  source 1..768: mol_type = other DNA
atgcgttccagaggatccgatacagagggatcagcccagaagaaattcccccggcacaccaagggccactcatttcagggccctaaaaatatgaagcaccggcaacaggacaaggatagcccatctgaatctgacgtcatattgccgtgcccgaaagctgaaaagccccactctggcaacggacatcaagcggaggatctgagcagggatgacctgttgttcctattgtcaattcttgaaggtgaacttcaggcccgggacgaggtcatcggtatcctgaaagccgagaaaatggatctggcactgctggaggcacaatacgggttcgtaactcccaaaaaagtcctcgaagctttgcagagggatgccttccaggccaaatcgacgccatggcaagaggacatttacgagaagccaatgaacgaactggacaaagtggtagaaaaacacaaagagtcttatcggcggattttgggccagctactggtggcagagaagagtcggcggcagaccatattggaacttgaggaggagaagcgcaagcacaaagaatacatggaaaagagtgacgaattcatctgcttgttggaacaggagtgtgaacggtggtcactggctcttctgcctaggctggagtgtaatgggatgatcttggcccattgtaacctctgtctgctcggcagtagtgattcgcctgccagtgccttccaggtagcggggatcactggtaccaggcatcatgcccagttagtgttcgtctttctttag

SEQ ID NO: 117141 - DNA, 2640 bp, synthetic construct
  misc_feature 1..2640: note = Description of Artificial Sequence: Synthetic coding sequence
  source 1..2640: mol_type = other DNA
atggtcgtggatgaacagcagagactgacagctcagcttactctgcagaggcagaagatccaggagttgaccacaaacgctaaagaaacacacaccaagctggcacttgccgaggcgagggttcaagaagaggagcaaaaggcaacaaggctcgagaaggagctgcagacgcagacgaccaagttccatcaagaccaggacacaattatggcaaaactgactaacgaggactctcagaatcgtcaactgcaacagaaactggccgctctctctaggcagattgatgagctagaagaaacgaacagaagtcttcggaaagcggaggaggagctccaggatattaaagaaaagataagcaagggtgagtacggcaacgcaggtatcatggctgaagtcgaggagctgatcaagatggaagaacaatgcagagatctaaataagagactggaaagagagacattacaatcaaaggacttcaaactagaagtagaaaagctctccaaaaggatcatggccttagaaaaactggaggatgccttcaacaagtctaaacaggaatgctactctctgaagtgtaatctggagaaagagaggatgactaccaagcagctgagccaggagctagagtcactgaaagtcagaataaaagagttagaggccattgaaagccggcttgagaagactgaattcacgctgaaagaggatctgacaaagctgaagacactgactgtgatgttcgtggacgagagaaagactatgtctgagaagctcaaaaaaaccgaggacaagcttcaggcggccagttcccagctgcaagtggagcaaaacaaggtgacaacagtaacagagaagctgatcgaagaaaccaagcgtgcccttaagagcaagaccgatgttgaagaaaaaatgtattccgtgacaaaggagcgagacgatctaaaaaataagttgaaagctgaagaggagaaaggcaatgatctcctgtctcgggtgaatatgctgaaaaatcgcctgcaatcacttgaagctattgagaaggacttcctgaagaacaaacttaaccaggactcaggtaaaagtaccacagccctccaccaggagaataacaaaatcaaggaactgtctcaagaggtggagaggttaaaactcaagctgaaggacatgaaagccattgaggacgatctgatgaaaacagaggacgagtacgaaactctggaacggaggtatgccaacgaaagagataaggcccagtttctgagcaaagaactggaacatgtaaagatggagctggccaaatacaaactcgccgaaaagacagaaacaagtcacgagcaatggctgtttaaacgattgcaggaggaggaggcaaaatcgggccacctgagccgtgaagtggatgcattaaaagagaagattcatgagtacatggcaactgaagacttgatttgccatctgcagggcgaccactccgtacttcagaagaagctgaatcagcaagagaacagaaaccgggatcttggccgggagatcgaaaatctgacaaaagagctcgaacgataccggcatttttctaaaagcctgcgcccaagtcttaacggaagaaggatctccgaccctcaggtgttttccaaagaagttcagactgaagccgtggacaatgaacctccagattataagtcgctgattcctttggagagggctgtgattaatggacagctgtacgaagagtccgagaaccaggacgaggatccaaacgacgagggtagtgtgctcagctttaaatgctctcagtctaccccttgcccagttaatcgaaagctctggataccctggatgaagtctaaagaaggacacttgcagaacgggaagatgcagaccaagcccaacgctaactttgttcagccgggagatcttgtgctttcacatacacctggacaaccgctgcatattaaagtgacccctgatcacgttcagaatacagcaaccttggagatcacctccccaacaactgagtctcctcatagctatacatctacggctgtgattcctaattgcgggacccctaagcaaagaattacgatcctccagaatgctagcattactccagtaaagagcaagacctctaccgaagatttaatgaacctagagcaaggcatgagccccatcacaatggcgacatttgctcgggcccagactccagagagctgtggaagtttgacccctgagaggacaatgtcccctatccaagtcctcgcagtcacgggatccgcatcatcccctgagcagggcaggagtccggaacctactgagatcagcgcgaagcacgccatctttcgtgtgtcccccgataggcaaagctcatggcagttccagcgtagtaacagcaattcttctagcgtgataacaaccgaagacaataaaatccacatccacttagggtctccctacatgcaggctgtcgccagccccgtgcggcccgccagtccgtctgctccattacaggacaataggacacagggactcattaatggagctttaaataagactaccaataaagtgacatcctcaattactatcactccaacagctaccccactacctcgtcagagtcagattaccgtctccaacatttataactag

SEQ ID NO: 117142 - DNA, 2688 bp, synthetic construct
  misc_feature 1..2688: note = Description of Artificial Sequence: Synthetic coding sequence
  source 1..2688: mol_type = other DNA
atggtagtggacgaacagcagcgtctaacggctcagctgaccctgcaacgccagaaaatccaggagttaacaacgaacgccaaggaaacgcatacaaagcttgctctggccgaggccagggttcaggaagaagagcagaaagcaacacgcctggagaaggaactgcagacccagacaacaaagtttcaccaggatcaggatacaataatggctaaactgactaacgaggacagccaaaaccgacagctccagcagaagctcgccgccctcagcagacagattgatgaattggaggaaaccaaccggtctttgaggaaggctgaagaagagctacaagatattaaggagaagatttctaaaggtgagtacggaaatgcaggcatcatggctgaggtcgaagagttaagaaaacgggtgttggacatggaggggaaagatgaggagctgattaagatggaggaacagtgtcgagacttgaacaaaagattggaaagagagactctccagagcaaagatttcaagctcgaagtggaaaagttgagcaaacgaatcatggccctggagaagctggaggatgcttttaataagtcaaagcaggaatgttactccctcaaatgcaatcttgagaaggagaggatgaccacgaagcagttgagccaggagctggagtcccttaaggtgcgaattaaggaactggaggccattgagtcgaggctcgaaaagaccgaatttactttgaaagaggatctcaccaagctcaagacattaactgtgatgtttgtcgacgagaggaaaacgatgagtgagaagcttaagaaaactgaagataaactccaggccgctagcagtcagctgcaggtggaacagaataaggttaccaccgtgactgaaaaactgattgaggagacaaaaagagctttaaaaagcaagacagatgtagaggaaaagatgtactctgtgacaaaagaacgcgacgacttgaagaataagttgaaggcagaagaagagaaaggaaacgatctcctgagtcgcgttaacatgctcaagaaccggctccagtccttggaggccatagagaaggattttctcaagaacaaactcaaccaggactcaggcaagtccaccacagcgttgcaccaagagaacaataagattaaagaactgagccaggaagtggagaggttgaaactcaagcttaaagatatgaaggccatcgaggacgatctgatgaaaacagaggacgaatacgaaaccctcgagcgcaggtacgccaatgaaagagacaaggctcaattcttaagcaaggagcttgagcacgtgaaaatggagctggcaaaatacaaactggccgaaaaaacggagacatcgcatgagcaatggcttttcaaaaggctccaagaagaagaggccaagagcgggcacctgtctcgcgaagtggacgccctgaaagagaaaatccacgagtacatggccacagaagatctgatttgccatttgcaaggagatcactctgtgctacaaaaaaaactcaatcaacaggagaacaggaaccgggatctgggtcgagagattgaaaacctcacgaaagagctggagagataccgtcatttctctaaaagcctgagaccctcactgaatgggcgtcggatttcagacccacaggtgttcagcaaagaggtgcagactgaagcagttgacaatgaaccacctgactataaatcccttattccgctcgaacgcgcagtgatcaacgggcaactgtacgaggaaagcgagaaccaagatgaagacccaaacgacgaggggtccgtactgtcatttaaatgctctcagtctacaccctgtcccgtgaataggaagctatggatcccatggatgaaatcaaaggagggccatctccagaatggtaaaatgcagacgaaacctaacgccaatttcgtccagccaggagatctcgttttgtctcatacacctggccagccactgcacatcaaggtcacccctgaccacgtgcagaacacagccaccctagagatcacgagccctactacagaatctccccatagctatacgtccactgccgtcattccaaattgcggaactcctaaacagagaattactatccttcaaaatgcttccatcacccccgtgaaaagtaagacaagtacagaagacctgatgaaccttgaacaaggaatgagtccgattaccatggctacatttgctagagcacagacccccgagagttgtgggagtctgacaccagaacggaccatgtctccaatccaggtacttgccgtgacaggctcggcaagctccccagagcaaggcagatctcccgagccgaccgagatctccgccaagcacgcaatttttcgcgtgtctcccgaccgccagagtagttggcaattccagcgcagcaattctaacagctcatctgtcattactaccgaagacaacaaaatccatatccacttaggcagtccgtacatgcaggcggtggcatcccccgtgcgaccagcttcgcctagcgcacctctgcaggacaaccggacccaaggcctgataaacggtgccctaaacaagactactaacaaagtcacctcgagtattacaatcaccccaacagctaccccattacctcggcaaagccagatcacagtggaaccactgcttcttcctcattag

SEQ ID NO: 117143 - DNA, 2136 bp, synthetic construct
  misc_feature 1..2136: note = Description of Artificial Sequence: Synthetic coding sequence
  source 1..2136: mol_type = other DNA
atggcgctggaaaaacttgaggatgcgttcaataaatctaagcaggagtgctattcgctaaaatgtaacctggaaaaagagcggatgaccactaagcagctatcacaggagttggaaagtctaaaagtgagaatcaaggagcttgaagcaatcgagtcccgacttgaaaaaacagaatttacattaaaagaagatttaactaaactgaaaaccctcactgttatgttcgtggatgagcgaaaaaccatgagcgaaaaattgaagaagaccgaggacaagctccaggctgcctcaagtcagctgcaggtggaacagaacaaagttaccaccgtcaccgaaaagctgatcgaggaaaccaaacgggccttaaaaagcaagactgatgttgaggagaaaatgtactcggtgaccaaggaacgcgacgacctcaagaataagctaaaagctgaagaagaaaagggcaatgacctcctgagtagggtgaacatgctcaagaaccgcctccagagcttggaggccattgaaaaagattttttaaaaaacaaacttaatcaggactcaggcaaatccactactgcgcttcatcaagaaaataataagattaaggagctttcacaggaggtcgagaggctgaagctgaagttaaaagacatgaaagccatcgaagatgacctcatgaagacagaagacgaatacgaaacgctggaacggagatacgccaacgaaagggataaggcccagtttctcagtaaggagctcgaacacgtgaaaatggagttggcaaagtacaagttggctgagaaaacagagaccagtcacgagcagtggctctttaagcgtctccaagaggaggaagctaagagtggccacctttcccgtgaagtggacgccctcaaagaaaaaattcatgagtatatggcaactgaggaccttatctgtcatctgcagggggatcattctgtgctgcagaagaaattaaatcagcaagagaacagaaatcgtgatttgggtagggaaatagagaatctaactaaagagcttgagcggtatcggcatttctctaaaagcctaagaccaagcctgaatgggagaagaatttcagatccacaggtcttctcaaaggaagtgcagaccgaagccgtggacaatgaaccaccggactacaaatcccttattcccttggagagagccgtgataaatggacagctgtacgaagaaagtgagaatcaggacgaggatccaaacgatgagggctcggtcctcagtttcaagtgctcgcagtctacaccatgtcctgtcaaccgtaaactctggattccatggatgaagtccaaggaagggcatcttcagaacggcaaaatgcagacaaagcctaatgccaatttcgtgcagcccggcgatttagttctctctcacactccaggccagcctctgcatatcaaggtcaccccagaccacgtgcagaacaccgcaaccctcgaaattacaagtccaacaaccgagagcccgcatagttatacctctaccgctgtgatccctaactgcggcactccaaagcagcggatcacaatactgcagaatgcaagtatcaccccggtcaaatcgaagacatctacggaagatctgatgaacttggaacagggtatgagcccaatcacaatggctacattcgccagagctcagactccggaaagctgtggctcgctcactcccgaacggactatgagccctattcaggttctcgccgtcactggcagtgcctcatcacctgagcagggcagatcccccgagccaaccgagatctctgccaaacatgctatttttcgcgtgtccccggaccgccagtcttcatggcaatttcaaaggtcaaactccaactcctcaagtgtgatcaccacagaggataataagattcacattcacctcgggagcccttacatgcaagccgtggcctcgcctgtgcgccctgcaagtccatctgctccactccaggacaaccggacacaggggctgataaacggggccttaaataagacaacaaacaaggtgacctccagcatcaccattactcctaccgctaccccacttccgaggcagtcccagataaccgtggagcccctactgctccctcattag

SEQ ID NO: 117144 - DNA, 2514 bp, synthetic construct
  misc_feature 1..2514: note = Description of Artificial Sequence: Synthetic coding sequence
  source 1..2514: mol_type = other DNA
atggtggtcgacgagcagcagcgcttaaccgcccagctgaccctgcagcgacagaagatccaggaactgacaactaacgccaaagagacacacacaaaactagccctcgctgaggcaagagttcaggaggaggagcagaaggctacccggctggaaaaggagctgcagacccagacaaccaagtttcaccaggaccaggatactattatggccaaactaaccaacgaagactcacagaaccgtcagctgcagcagaaactggccgccctatcccgccagattgacgagctggaggagacaaacagatccttgcgcaaggcggaagaggaactgcaggatattaaagagaaaatttcgaaaggggaatacggcaatgccggcattatggcagaggtcgaagagctgcgcaaacgtgttctggacatggaaggaaaggacgaggagttgatcaagatggaagaacagtgtagagacctgaacaagcgacttgagcgcgagacactccaaagcaaggacttcaagctggaagtggaaaagctctctaagcgtatcatggctctggaaaagctggaggatgccttcaacaaaagtaaacaggagtgctacagtctcaaatgcaatctcgaaaaagagcggatgactactaagcagctcagtcaggagctcgaaagcctgaaggttaggatcaaagagcttgaggccatcgagagccgtctggaaaagaccgaatttaccctgaaggaagacctcacgaaattgaaaactctgaccgtgatgttcgtcgacgagaggaagacgatgtccgagaaactgaagaaaacagaagataaactgcaggcagcatcgagccagctacaggtggagcagaacaaagtgaccactgtgactgaaaaactgatagaagaaacaaagcgagctctgaaaagcaagactgatgtggaagagaaaatgtacagcgtgaccaaagaacgtgatgatttgaagaacaaactcaaggccgaggaggagaaggggaatgacctcctgtctagagttaatatgctaaagaacaggctgcagtctctggaagccatcgaaaaggactttctgaaaaataagctgaaccaagattctggtaagtctacaacagctctccaccaggagaacaacaaaattaaggagttgtcccaggaggtggagcgcctgaagctgaagctcaaagacatgaaagccatcgaggacgatctgatgaagaccgaagacgaatacgagacacttgaaaggcgttatgctaatgagagagacaaggctcagttcctctccaaggagctggagcatgttaagatggaactggctaagtacaagctggcagaaaagactgagacaagccacgaacaatggctctttaagcggcttcaggaagaggaggctaaatctggtcatctgtcacgcgaggtagatgcactgaaggaaaaaatacatgaatatatggctactgaggatctgatctgtcatctgcagggtgatcacagtgtcctgcagaagaagctcaatcagcaggaaaatcgcaatcgggacttgggccgggaaatcgagaatttaacgaaagagctggagaggtaccgacactttagtaagtccctgcgccccagcctgaatggacgcagaatcagcgatccgcaggtattctcaaaggaggttcagacagaagccgtcgataatgagccccccgattataagtccttgattcccctggagagagcggtcattaacggtcaactgtacgaggagagcgagaatcaagacgaagatcctaatgatgaggggagcgtgctcagttttaaatgcagtcagtccaccccctgccctgtcaatcgaaagctctggatcccctggatgaaatcaaaggaggggcacctgcagaatggtaaaatgcaaacgaagccaaacgccaatttcgtccagcccggtgatctcgtcctatcgcacaccccagggcagcctttacacataaaggtcacacctgaccatgtccaaaatacagctacactcgaaattacaagtcccactacagaatccccacatagctatacaagtactgctgtgattccaaactgcggtaccccaaaacaacggataacaatcctgcagaacgccagcataacaccggtgaaaagcaagacctccactgaagatctcatgaacctggagcagggcatgtctccaattacgatggctacattcgcacgcgcccagactcctgagtcttgcggttccctgacaccagagcggaccatgagcccaatccaagtgttggctgtgacaggctcagcctcaagccccgagcaaggccgctctccagagcccaccgagatctccgcaaaacacgccatcttcagagtgagccctgacaggcaaagtagttggcagtttcagaggagtaatagcaattcttcatcagtcattactacagaagataacaagattcacattcacttaggcagtccatacatgcaggctgtggcaagtccgtag

SEQ ID NO: 117145 - DNA, 7944 bp, synthetic construct
  misc_feature 1..7944: note = Description of Artificial Sequence: Synthetic coding sequence
  source 1..7944: mol_type = other DNA
atgtctagtagccactctagggctggccaatccgcagcaggagccgccccgggtggcggggttgatacccgcgatgccgagatgcctgcaaccgaaaaggaccttgcagaggatgccccatggaaaaagattcagcagaatacatttacgaggtggtgcaatgaacatctcaagtgcgtgtcaaagcgcatagctaacctgcagaccgacctgagtgatgggctgagactcattgccctactcgaagtgttaagtcagaaaaaaatgcataggaagcacaaccagcgcccaactttccgtcagatgcagctggaaaatgtcagcgtcgctctggagttcctggatcgtgaaagtatcaaactggtgagcatcgatagtaaagccatcgtcgatggcaacttgaagctgatcctaggtctcatatggacgttgatcttacactattctatctccatgcccatgtgggacgaagaagaagatgaagaagcaaagaaacagactccaaaacaaaggttgctgggttggatccaaaataagcttcctcagctgccaatcaccaactttagccgggattggcagtctgggcgcgccctgggcgcgctggtggatagctgcgcccctggactctgcccagactgggatagctgggacgcctctaaacccgtgacaaacgctcgtgaggctatgcagcaggctgatgattggctcggaatcccgcaggtgattacgcccgaggaaattgtcgaccctaacgtcgacgaacattccgttatgacttacctgagccaatttcctaaagctaagctgaagccgggcgctcccctgagaccaaagttgaacccgaagaaggcacgggcctacggtcctggcattgaacctactgggaatatggttaagaagcgtgctgagttcacagttgaaacacgcagtgcgggccagggagaagtgctcgtgtatgtggaggatcccgcgggccaccaggaggaggcaaaagtgacggccaacaacgataagaatcgaacattctctgtgtggtatgtgcccgaagtcaccgggactcacaaagtgaccgttctgtttgcaggtcagcatattgctaagtcaccatttgaggtgtatgttgataagagccagggcgacgcatcaaaagtgaccgcacaaggccctggcttggagccatctggcaatatagcaaataagactacctattttgagatattcactgccggagctggcacaggcgaagtcgaagtcgtcatccaggaccccatgggccagaagggtaccgttgagccacaactggaggccaggggcgactccacttacagatgctcttatcaaccaaccatggaaggtgtgcacaccgtccatgtgaccttcgctggtgtccctataccccgaagcccatatactgttaccgtggggcaggcatgcaacccctcagcttgtagggccgtaggcaggggtctgcagccaaaaggggtacgggtgaaagagactgccgactttaaggtgtacactaaaggcgccggcagtggggagttgaaagttactgtaaaggggcccaaaggagaggaacgcgttaagcagaaagacctgggggatggagtctacggattcgagtactacccaatggtaccaggaacctacatagttacaatcacctggggcggccagaacatcggcagatcaccatttgaggtgaaagtggggaccgagtgtggcaaccaaaaagtgcgggcctggggaccgggactggagggaggagtggtgggaaagagcgccgacttcgtggtggaggcaattggggacgatgtcggaacactgggcttttccgtagagggcccaagtcaggcgaagatagagtgtgacgacaaaggtgacggatcctgcgacgtccgctattggccccaggaggcaggggagtacgctgtccacgtcctgtgtaacagtgaggatattagactctcgccctttatggctgacatacgggacgccccccaggactttcacccagaccgagtgaaggcccgaggacccgggctggagaaaaccggcgtggctgtgaacaagccagctgagttcactgtggatgccaagcatggtggcaaggcccccttgagggtgcaggtgcaggataacgaaggttgtcccgttgaggcgctcgtcaaagataatggcaacggaacctactcatgcagctacgtgccaaggaaaccagtgaaacacactgcaatggtctcttggggtggcgtctccatccctaatagtccttttagggtaaatgtgggagccgggagtcatcccaacaaagtcaaagtttacgggccgggtgtcgccaaaacggggctcaaggcccatgaaccaacatatttcaccgtggattgtgcagaggcaggacaaggtgatgtcagcattggcattaaatgtgctccaggcgtcgtggggcctgccgaggctgatattgatttcgacattattagaaatgacaatgatacctttaccgtcaagtacactccccgaggcgctggtagttatactatcatggtactgttcgccgaccaagctacccctacctcccccatccgggttaaggttgaacccagtcatgatgcctccaaggtgaaggctgaaggccctggtctgtcccgaactggcgtggagttagggaagcccacacacttcaccgttaacgcgaaagccgcggggaaggggaaattagatgtacagtttagtggcctcactaaaggggatgcagtcagagacgtggatatcattgatcaccacgacaacacctatactgttaaatataccccagtccagcaagggccggtgggcgtgaatgttacatatgggggtgacccaatccctaagagccccttctctgtggcagtctcgccctcactggatctgtccaagattaaggtgagtggattaggcgaaaaggtcgacgtgggtaaggaccaggagtttactgttaaatccaaaggcgccggaggacaggggaaagtcgcatcaaagatcgtcggcccgagcggcgctgccgtaccctgcaaagtcgagccaggtctaggagctgacaactccgtcgttaggttcctgcctagggaagagggcccctacgaggtggaagtgacctacgatggcgtcccagtccctggcagtccatttccacttgaagccgttgctcctaccaagcctagtaaggtgaaggccttcgggccgggcctgcagggtggatcggctgggtcccctgcccgcttcacaattgataccaagggggcggggaccggcggcttaggtctcactgtggaggggccttgcgaagcacaactagaatgtctggacaacggagacgggacgtgcagcgtgagttatgtacccaccgagcctggcgactataacatcaatatcttgttcgccgatacacatatacccggatctcccttcaaggctcacgtagtaccttgttttgacgcttctaaggtcaagtgcagcggcccgggactcgaacgcgcaaccgcaggagaggtcgggcaatttcaggtggattgcagctccgcaggctccgcggagttgacaatcgaaatctgtagtgaggcaggcttgcctgccgaggtgtatatacaggaccacggcgatggcacacacacaattacctatatacctctctgtccgggcgcatacacagtgaccatcaaatacggaggccagcccgtgccaaattttccctccaagctgcaggtggaacctgccgtagacacctctggagtgcagtgctacgggcctggcatcgaaggccagggcgtttttagagaagcaacaactgagttttccgtcgacgcccgcgctctgacccagacaggcggaccccatgtgaaagctcgcgtcgccaatccaagtggcaatctcaccgaaacttacgtccaggaccggggagatggtatgtacaaagtcgagtatactccttatgaagaggggcttcatagtgtcgatgttacttacgatggttctcccgtgccatcgtcgcctttccaggtgccagtcactgaagggtgcgatcctagtagggtgcgcgtgcacggtcctgggatccagagtggcaccaccaataagcctaacaagtttacggtcgaaacaaggggggctggcactggcggacttgggctggctgttgaagggccgtctgaggcgaagatgagctgtatggacaataaggatgggtcttgttctgtggagtacatcccatacgaggctggaacctatagtctcaatgtaacctatggtgggcatcaggtgcccgggtctccctttaaggtgcccgtgcatgacgttacagacgcaagtaaggtgaagtgttctggacctggcttgtcacctggcatggtgagggcaaacttgcctcagtcctttcaagttgatacgagtaaagcgggagtggcacccctacaagttaaggtacagggaccaaagggcctagtggaacccgtggatgtggttgataatgcggatgggacacagactgtaaactacgttccaagcagagagggcccttattcgatcagtgtgctttacggagatgaagaagtgcctagatctcccttcaaagtgaaggtgctacctacccatgatgccagtaaagtaaaggcatcgggtcccgggctgaacacgactggcgtgcccgcatctctcccagtggaatttacaatcgacgccaaggacgctggtgaggggctgctcgcggtccagataaccgacccggagggtaagcccaaaaagacacacatacaagataatcacgatggaacttatactgtggcctacgtgcctgacgtcaccggacgctataccatcctgatcaaatacgggggcgacgaaattcctttctctccgtaccgggtacgcgccgtacccaccggggatgcatcaaagtgtacagtgaccgtgtcgattggtggccacggtctcggcgccggtatcggacccactatccaaattggggaagagacggtgatcactgtggacacaaaagctgcaggtaagggtaaagttacttgcactgtgtgtacacccgacgggtctgaggtcgacgtggatgtcgtagagaacgaggatggcacattcgacattttctacacggcgccccaacctgggaaatacgtgatttgcgtgcgattcggcggcgagcatgtccctaacagcccttttcaagtaaccgctttagctggtgatcagcccagcgttcagccacctctgcgaagtcagcaactggcccctcagtatacgtacgcccagggaggccagcagacctgggcgcccgaaaggcccctcgtcggtgtcaatggcctggatgtcacatccttgcgcccattcgacctggtaataccgtttacgataaaaaaaggggagataactggagaggtccgcatgccgtctggcaaagttgcgcaaccaaccatcactgacaataaggacggaacagttaccgtgaggtacgccccgtcagaggccggactgcacgagatggatatacgctatgataacatgcatatacctggctctccattgcaattttacgtcgattatgttaattgcggacatgtgacggcgtatggtcctggtctgacacacggcgtggttaataaacccgcaaccttcaccgtcaacacgaaggatgcgggtgaaggaggattatctctggcaatcgagggcccttctaaagctgaaatctcctgcacagacaatcaggatggtacttgcagcgtcagttatctccccgtgttgcccggcgactactccattctggtgaagtacaacgagcagcacgtcccaggttctccttttacagcgcgcgtcactggcgacgattccatgagaatgagccacttaaaagtggggagcgcggcagatattcccataaacatctccgagacagacctatcactccttactgcaacagttgttccgccaagtggaagggaggagccctgcctgttaaagcgcctgaggaatgggcatgttggcatttccttcgtcccaaaggaaacaggagagcatctggtacatgtcaagaagaacgggcagcacgtggccagcagccccatccctgtggtgatcagccagtcagaaatcggcgacgcctcccgagtgcgagtcagcggacagggcctgcacgagggccataccttcgaacctgcggagtttattatcgacacaagagatgcaggctatggaggcctgagcttgtccattgaaggacccagcaaagttgacataaacacagaagatctggaggatggaacatgcagggtaacttactgccctaccgaacctgggaactacattatcaatatcaaattcgccgatcagcatgttccaggcagtccattttcggtaaaggtgactggtgagggtagggtgaaggagtctatcaccaggagaaggagagccccgtcggtcgctaacgtcggctcccattgtgatctgagcctcaaaatccctgagatatctatacaggatatgacagcccaggtcacatctccctccgggaaaacacacgaggccgaaatcgtcgaaggggagaatcacacatactgtatccgtttcgtgccggctgagatgggaacccatacagtctcagtgaagtacaagggccagcacgtccccggctcaccgtttcaattcacagtgggaccattgggggagggaggcgctcacaaagtacgggctggcggtcccggactggaaagggctgaggccggagtacctgcagaatttagcatctggacacgagaagccggcgccggtggattagctattgccgtcgagggaccgtctaaggccgagattagcttcgaggaccgaaaagacggcagttgcggcgtggcctatgtggtgcaggagcctggagactatgaggttagcgtgaaatttaacgaggaacacattccagatagcccattcgtcgtcccagtggcttccccttccggagacgcccgacgcctaacggtgtcttcccttcaggaatcaggtctgaaagtgaaccagcctgcatccttcgctgtctctttgaatggcgcaaaaggagcaatagatgccaaggtacatagcccctccggcgcactcgaggaatgctatgtcactgagattgaccaggataagtatgccgtccgcttcattccaagagagaacggagtctatctgatagacgtaaagttcaatggtacacatattcccggctcaccattcaagatccgggtgggtgaacctggacacgggggcgatcccgggctggtgtcagcatacggggcgggcctcgaaggcggagtgaccgggaaccctgccgagtttgtggtgaataccagtaacgcaggagccggggctctgagtgtcacgatagacgggccttcaaaagtcaaaatggattgtcaagaatgtcctgagggctacagagtgacttatacacccatggctcctggcagctatctcatctcgatcaagtacggcgggccttaccacatcggtgggtcgccctttaaagccaaggttacaggacccaggctcgtttcaaatcactcacttcatgaaacatcgagcgtattcgtcgatagtctgactaaggcaacttgcgcccctcagcatggggcccctggtcctggccccgccgacgcttctaaagttgttgccaagggcctcggactttccaaggcctacgttggtcagaaaagtagctttacagtcgattgctcgaaagccggcaataacatgttgctcgtgggtgtgcatggccccagaaccccctgcgaagagattctggtaaagcacgtcgggagccggctctatagcgtttcataccttctcaaagataagggtgagtataccctagtcgtcaaatggggggacgagcatattcctggctctccctaccgggtcgtagtgccctag

SEQ ID NO: 117146 - DNA, 6948 bp, synthetic construct
  misc_feature 1..6948: note = Description of Artificial Sequence: Synthetic coding sequence
  source 1..6948: mol_type = other DNA
atgcccgccacagaaaaggatctggccgaagatgctccatggaaaaaaattcaacagaatactttcactcggtggtgcaatgagcatcttaagtgcgtgtccaagaggatagcaaacttgcagaccgatctctccgatggattgcgcctcattgctctcctggaggtcctatctcagaagaagatgcatcggaagcataaccagcggccaactttcagacagatgcaactggagaatgtgtccgtggctctggaattcttggatcgggagtcaatcaagttggtaagcatagactccaaggctatcgtggatggtaacctcaaactgatccttggactcatttggacactgatcctgcattattctattagcatgccaatgtgggatgaggaggaagatgaagaggctaaaaagcagacccctaaacagaggcttctgggctggatacagaataagctgcctcaactgcccattaccaactttagccgcgactggcagagcgggagagcgctgggggccctggtcgacagttgtgctcctggtctctgccccgactgggatagctgggacgcatctaagccagtgacaaacgctcgcgaggctatgcagcaggctgacgattggttgggcatcccccaggtcattacaccagaagagatcgtggaccccaacgtggatgagcattcagtgatgacatacctttctcaatttcccaaagcaaagctgaaacctggggcacctttgaggcctaaactgaatcccaaaaaggcgagggcctatggtcctggcatcgaaccaactgggaacatggtcaaaaagagggccgagttcacagtcgagaccaggtcagccggacagggggaggtgctggtctacgttgaggatccagctggacatcaggaagaggcaaaggttacagccaacaatgataaaaacaggacgttcagcgtctggtatgtaccggaagtcaccggtacccataaggtaaccgtcctgtttgccgggcagcacatagcaaaaagtcctttcgaggtttatgtggacaagtcacagggagacgcaagcaaggtaactgctcaagggcccgggcttgagccctctggtaatattgccaataaaacaacctattttgagatctttaccgccggggccggcacgggtgaagttgaggtcgtgattcaagatccaatggggcagaagggtactgtggaacctcagctggaagcccgcggagactctacttaccgctgttcatatcagccaaccatggaaggcgttcacacagtccacgtcacgtttgctggcgtgccaataccccggtctccatacacagtcacagtcgggcaggcctgtaaccctagcgcctgccgggccgtcgggcgcggtttacagcccaagggggtgcgagtcaaggagacagcggatttcaaagtgtacactaagggcgccggctctggtgagctcaaagtgactgtgaaaggtcccaaaggagaagagcgtgtaaaacaaaaagacctcggagacggggtctatggctttgagtactatccaatggtgccagggacgtatattgtaacaataacctggggaggtcagaacatcggacgctccccattcgaggtcaaggtcggaacagaatgtgggaatcagaaagtgcgagcttggggacccgggctggagggcggagtggtgggaaaatcagctgattttgtagtcgaggcaattggcgacgacgtgggaaccctgggctttagcgtagaaggccctagtcaggctaaaatcgaatgtgacgataagggggatggcagttgcgatgtgcggtattggccccaggaggccggcgagtacgctgtgcacgtgctctgtaacagtgaggacatccgcctgagtccatttatggcggacatccgagacgctcctcaagacttccaccctgacagggtgaaggcgcgagggccaggtctggagaaaactggagttgccgtgaacaagcctgccgaatttactgttgacgcaaaacatggaggcaaggctcccctcagagtgcaggttcaggataacgaggggtgtcctgtcgaggcactggttaaggacaacgggaacggcacatattcatgcagctatgttccccggaaaccagtgaagcatacggcaatggtgtcatggggcggggtgtctatacctaattccccgttccgcgttaacgtcggagccggaagccaccctaacaaggtgaaggtctacggaccgggagtcgctaagaccgggctgaaggcacatgaacctacctactttacagtcgactgtgcagaagctggccaaggggatgtcagcatcggcattaagtgtgcacctggagttgtggggcccgctgaggctgacatcgatttcgatattattaggaatgacaatgacacatttacagtaaagtatacaccaaggggggccgggagctatactattatggttcttttcgcggaccaggctacgccaacgtcaccaatcagggtgaaggtggaaccttcacacgacgcatccaaagtgaaggccgagggtcctggcctctccagaactggagtggaattagggaagccaacacacttcactgttaatgcaaaagccgccggaaaggggaaattggatgtccagttctcgggcctgaccaaaggcgacgccgtgcgggatgttgatattatagaccaccacgacaacacctacactgtgaaatacactccagtgcaacaggggcctgtgggcgtgaacgtgacgtacggaggggaccccattccaaaatccccattttccgtggccgtcagccctagccttgatctatcaaagattaaggtgtcgggactgggcgagaaggtggacgtgggaaaggatcaagaatttaccgtcaaaagcaagggcgccggtggccaagggaaagtagccagcaagatcgtgggcccatctggcgctgccgtgccatgcaaagttgagccgggtttgggcgctgataattctgtggtcagatttctgccacgcgaggaaggcccctatgaagtcgaggtgacctacgatggcgttcctgtaccaggaagcccgttccctctcgaggcggtagcaccaaccaagccttccaaggttaaagccttcggccccggcctccaaggcggttccgccgggagtccagctcgcttcactattgacacgaagggagctgggacaggtggcctcggcctgaccgtagagggaccttgtgaagcccagctcgaatgcttggataatggagacggcacttgctccgtgtcttacgtacccacagagcctggtgactataacattaacattctttttgcagacacccatatcccagggagcccatttaaagcccacgtcgtaccatgttttgacgcctcaaaagtcaagtgctccggtcctggcttggaaagggccaccgcaggcgaggtggggcagttccaggttgattgttctagcgctggaagtgcggagctgaccatcgagatctgctcagaagcggggctgcctgcagaggtgtacatacaggatcacggagacggcacacacacgatcacgtatattccattatgccctggcgcctataccgtgaccattaagtatgggggacagccggttccaaactttccaagcaaattgcaggtcgaacccgctgttgacaccagcggtgttcaatgttatggccccgggatagagggacagggtgtgttccgagaggctacaaccgagttctccgtggatgcaagggcactgacccagactgggggtcctcatgttaaagcacgcgtagccaatcccagtggcaatctgactgagacctacgttcaggaccggggggatggtatgtataaggtggagtataccccatatgaagaaggcctgcattctgtcgacgtgacatatgacggaagtcccgttccttcttccccttttcaggtgcccgttacagaaggctgtgatccatcaagggtacgcgttcacggacctggtatacagagcggaaccactaacaaacctaacaaatttactgtggagacccgaggagctggtacaggaggactgggactggccgtggaaggcccatctgaagctaagatgtcttgtatggacaataaggatgggagctgctccgtggaatacattccctacgaggccggcacatatagcttaaatgttacctacggtggacaccaggtccccggatccccgttcaaggtccccgtccacgacgtaaccgatgcctccaaggtgaaatgctcaggaccaggtctgtcgcccggcatggtgcgcgctaatctgccccaatctttccaggtagacacttccaaggctggtgttgcaccacttcaggttaaggtccagggacccaagggtctggtcgagccagtggacgtcgtagacaatgcagacggcacacagaccgtcaactatgtcccatcaagagaagggccttatagcatctctgtgctgtacggagatgaggaggtgccacgctcgccgttcaaagtgaaggtactgcccacccatgatgcctcaaaagtgaaggcctcaggaccagggttgaacaccactggagttcccgctagtctgccagtggagttcactatcgatgctaaagatgccggtgagggtctgctcgctgtccagatcacagatccagaaggcaaaccaaaaaagacccacattcaggataatcacgatggaacttacaccgtcgcatatgtccccgacgtgactggcagatataccattctgattaaatacggtggcgatgaaattcctttcagtccttatagagtacgcgccgtgcccactggagacgcatccaaatgcacagtgactgtgtctatagggggccacggtctgggtgccggaatagggccaacaatccagattggggaggagaccgtgataacggtagataccaaggccgctggaaagggcaaggtcacgtgtaccgtctgcacacccgacggatcagaggtggatgtggatgtcgtggaaaacgaagatggcacatttgatattttctacacagcccctcagcctggaaaatacgtcatttgcgtacgctttggaggcgagcacgtaccaaacagcccctttcaggtgaccgctttagccggagaccagcccagcgtacagccacctttacgatcccagcaactggcccctcagtatacctacgcgcaaggcggccaacagacttgggccccagaacggcccttggtaggcgtaaatgggttagatgttacctctctcagaccctttgaccttgttatccccttcactataaaaaaaggagagatcactggtgaagtccgtatgcccagcgggaaagtcgctcaacccactattaccgataataaagatggaacagtaaccgtccgttacgctccgtctgaagcgggactgcacgaaatggatattaggtatgacaacatgcatattccaggcagtcccttgcagttctatgtggactatgttaattgcgggcacgttaccgcctatggcccaggcctaacccacggcgtcgtgaacaagccagcgaccttcacggtgaatacaaaggatgcaggagagggtggtctcagtctcgcaatcgaaggcccgagtaaagccgaaatcagttgcactgacaatcaggatggcacctgttctgtgtcctatctcccagtgctgcctggtgattacagcatcctggtaaaatacaacgaacagcacgtccctggctcgccttttactgctcgggttaccggggatgactctatgcgaatgagccacttaaaggtcggctctgcagcggacattcctatcaacatctcggagatttcctttgaagaccgcaaagatggttcctgcggagtggcctatgtggtacaggaacccggagactatgaggtgtccgttaaatttaatgaggaacatattcccgactctccattcgtcgtgcccgttgcaagccccagcggcgatgccagaagacttacagtgtctagcctacaggagagcggcctaaaagtgaatcaacctgctagctttgccgtatctctaaatggggcaaaaggagcaatagatgccaaagtgcactctccaagtggagctctggaggagtgctacgtgacggagatagaccaggataagtatgctgtgagattcatccccagagaaaacggggtgtacttgattgatgtgaagtttaatggaacgcatatccccgggtcacctttcaagatccgagttggggaacctggccatggcggagatcccggcctcgtcagtgcgtatggtgccgggttggagggaggggtgactggcaaccccgccgagtttgtcgtcaacacctcaaacgctggagctggggccttgtcggtcaccattgacggacctagcaaagttaaaatggattgccaggagtgtcctgagggctaccgagtgacatatacgccaatggcacccggctcctatcttatctctatcaagtacggcgggccttatcacattggtggctctccctttaaggccaaggtgactggtccaagattagtcagcaaccactcgcttcatgagaccagttcagtcttcgtcgactcattgactaaagctacatgtgcgccacagcacggagcacccggacctgggcccgccgacgctagcaaagtggtggccaaaggcctagggttaagtaaagcatacgttggtcaaaaatctagtttcacggtggattgctccaaagcaggaaataacatgctcctagtaggcgttcacggacctcgcacaccctgcgaagaaattttggtaaagcatgtgggatcgagactgtacagcgtgtcatatttgctgaaagataagggggagtacacactggttgtaaagtggggggacgaacacattccgggctcaccctatcgagtggttgtcccatag

SEQ ID NO: 117147 - DNA, 2343 bp, synthetic construct
  misc_feature 1..2343: note = Description of Artificial Sequence: Synthetic coding sequence
  source 1..2343: mol_type = other DNA
atgcccagtggaaaagtggcacaaccaaccatcacggacaacaaggacgggaccgttacggtgagatacgccccctccgaggccggcctccacgaaatggatatccggtatgataacatgcatatacccggttcccctctccagttttacgtggactacgtgaactgcggacatgtcactgcctacggccccggtctcacccacggagtggtgaacaagccggctacctttactgtcaacacaaaagacgctggcgaaggggatgacagtatgcggatgtcacatttgaaggttggctccgcggctgatatcccaatcaacatctcggagaccgatctgtcactgctgaccgctaccgttgttccccctagtgggcgcgaggagccatgcctcctgaagcggttaagaaacggccatgtaggcatctcctttgtgccgaaggagaccggtgagcatttggtgcacgtgaagaagaatggtcagcatgtggcgtccagccccattccggtggtgatatctcaaagcgagattggggacgcaagcagagttcgggtgagcggacagggccttcacgagggtcacaccttcgagcccgcggagttcataatagacactcgcgacgctggctatggtggcctcagcctctctatagaggggccttccaaagttgatatcaatactgaggatcttgaagatggtacttgccgggtgacgtactgtccgaccgaacccggcaattatattattaatattaagttcgccgaccagcatgtgccagggagcccgttcagcgtcaaggtcacaggagaaggcagggttaaggaatccattaccagacgccgtagggcccctagcgtcgcaaatgttggcagccattgcgatctttccctcaaaattccagagatctcaatacaagatatgactgctcaggttacttccccttcgggaaagactcatgaagccgagatcgtggaaggggagaatcacacttactgcatccgctttgtgcctgctgaaatggggacccacactgtgtctgtgaagtataaagggcagcatgtgcccggctctccttttcagtttaccgtgggccccctcggcgagggaggggctcacaaagttagagcaggtggccccggactcgagcgggccgaagctggggtgccagctgagttctctatctggacacgagaagccggcgcgggcggactcgccatagctgtggagggtccaagtaaagccgagattagtttcgaggataggaaggacggcagctgtggtgtggcctacgtggtccaggagcctggggactacgaggtaagcgtcaagttcaatgaggaacatatacctgactccccgttcgtggtcccagtagcctctcccagcggcgacgctaggcggttgacagtctcctccctgcaggaaagtggattaaaagttaaccaaccagcctccttcgcagtgtcacttaatggagccaaaggggccattgatgccaaggttcactccccatccggagcactggaggaatgctacgtcacggaaatcgatcaggacaagtatgccgttcgctttatcccaagggaaaacggcgtataccttattgacgttaagttcaacggcactcatatcccagggagcccatttaaaattcgagtcggcgaaccaggacacgggggggatcctgggctggtttccgcatacggtgcaggtctggagggcggagtgaccgggaacccagcagaattcgttgtcaataccagcaacgctggagcgggggcattgagcgtgacaatcgatggaccgtctaaagtgaagatggattgtcaggagtgccctgagggctatcgggtgacatacactcctatggcccctggatcttacttaatttctattaagtacgggggcccctaccacatcggagggtctccttttaaggccaaagtaacaggaccgaggctggtcagtaatcactccctccacgagactagttccgttttcgtcgatagtctcaccaaggctacgtgtgctccgcaacatggcgctccgggacccgggcccgccgatgcttcaaaggtagtcgcaaaaggtctggggctgtctaaggcctatgttggtcaaaaaagctctttcacagttgactgcagcaaggcggggaacaatatgctactcgtcggagtccatggcccaaggactccctgtgaggaaatcttggtgaaacatgtaggttccaggctgtactctgtgtcctatctgttaaaagacaaaggcgagtataccctggtcgtaaaatggggcgatgaacacatccccggttcaccctatcgggtggttgtgccttag

SEQ ID NO: 117148 - DNA, 7920 bp, synthetic construct
  misc_feature 1..7920: note = Description of Artificial Sequence: Synthetic coding sequence
  source 1..7920: mol_type = other DNA
atgtctagctcgcacagccgagctggtcagtccgcggcaggagctgcaccggggggcggggttgacacaagggatgcagaaatgcctgcaaccgaaaaagacttggctgaggacgcgccttggaagaaaattcagcagaacacctttacgagatggtgcaatgagcatctaaaatgcgtcagcaagcgcatcgctaatctccagactgacctgtctgatggcctgcgattgattgccttgctagaggtcttgtcccaaaaaaaaatgcatcgcaagcataaccagcggcctacctttcggcagatgcagctggaaaatgtgtccgttgcactggaattcctggatagggagtcaatcaagctcgtgagcattgatagcaaagccattgtggatggcaatttgaagctcattctgggactaatttggacattaatcctgcactacagcattagtatgcccatgtgggatgaggaggaagacgaagaggcaaagaaacagacccccaagcagcgtcttctcggttggatacagaataaacttcctcagctgcccattaccaacttcagccgggactggcaaagtggtcgggcgctgggggccctggtagacagttgtgcgccagggttgtgtcccgattgggattcttgggatgctagtaaaccggtgacaaacgccagggaagcaatgcagcaggctgacgactggctcggaatcccacaagttatcacacctgaggagatagtggatccgaatgtcgatgagcacagcgtgatgacctacctcagccagtttccaaaggccaagctgaagccgggggctccgttgcgacccaaattaaaccccaaaaaggcccgagcctatggccccggaattgagcctactggcaatatggtcaagaagcgcgctgagttcacagtggaaactcgctccgccgggcagggtgaggtgcttgtgtacgttgaggacccagctggacatcaagaggaagcaaaagtcaccgcaaacaacgacaagaatagaacttttagtgtctggtatgtgccagaggtgacagggacacacaaggtcaccgtgctttttgccgggcagcacattgcaaagtcaccatttgaggtgtacgtcgacaaaagtcagggagatgctagcaaagtaaccgcacagggaccagggcttgagccatctggcaacatcgcaaacaagaccacctactttgaaatctttaccgcgggcgccggaactggagaagtggaagtggtgatccaggatcccatggggcaaaaaggcacagttgaacctcagcttgaagcacgcggcgactcgacttatcgttgtagctatcagccaaccatggaaggggtccatactgtgcatgttacattcgccggcgtccctatccctaggtcgccctatacggtgaccgtcggccaggcatgcaatccatctgcatgtagggctgtggggcgtggtctgcagcccaaaggcgttcgagtgaaagaaaccgcagactttaaggtttatactaagggagccggaagcggtgaactgaaggttactgttaagggccctaagggcgaggagcgcgttaagcaaaaagatttaggtgacggggtttatgggttcgaatactatcctatggttccagggacctatattgtgacaattacatggggaggccagaatatcggacggtccccatttgaggttaaggtgggaacagaatgcggaaaccagaaggtgcgtgcctggggtcccggcctcgagggaggcgttgtcggcaagtcagccgatttcgtggttgaggcaataggggacgatgtcggaaccctgggattctctgtcgaggggccatcccaggcgaaaattgaatgcgatgataagggcgacggaagctgtgacgtgcgttactggcctcaagaggctggggaatatgcggttcatgtattgtgtaatagtgaggacatacgtctgagtccctttatggctgatattcgggacgcacctcaagatttccaccccgaccgagtgaaggcccggggacccggcctggagaaaaccggagtcgccgtgaacaagccagccgaattcacagttgacgcaaagcacggtggtaaggcccccctcagagtgcaggtccaggacaatgaaggatgccccgtggaggccctggtaaaggataacggcaacgggacatattcttgctcctacgtaccccgcaagcctgtcaaacatacagctatggtgagctgggggggagtgtccatcccaaattctccttttagagtcaacgtgggcgctgggtcacatccaaataaagtcaaggtctacggacccggagttgctaaaaccggacttaaggcacatgaacccacatatttcactgtcgattgcgctgaggccggccaaggtgacgtttccatcgggattaaatgcgctcctggggttgttgggccagccgaggccgacattgacttcgacattattcggaacgacaatgacacatttacagtaaagtacactccccggggcgccggcagctacactataatggtgttgtttgccgaccaggccactccaactagccccataagggtgaaggtggaaccctctcatgatgcttccaaggttaaggcagagggcccagggctcagccggacaggtgttgagctcggcaaaccaacgcactttaccgtcaatgctaaagcagctggcaaaggaaagctcgacgtccagttttctgggctgactaagggcgacgccgtgcgcgatgtcgatattattgaccatcatgataacacgtatacggtcaaatacaccccagtccagcagggacccgtgggtgtgaatgtgacctacgggggggatcctatcccaaagtccccctttagcgtggctgtcagccccagtttggatctctctaaaatcaaggtgagcggacttggcgagaaggtggatgtgggcaaagaccaggaattcactgtgaaatccaagggcgctggaggacagggcaaagttgcctctaaaattgttggcccatctggagccgctgtgccttgtaaggtcgagcctgggctgggggcagacaattcggtggtccgctttttaccccgggaggaaggaccctatgaagtggaggtgacctacgacggcgttcccgtgcccggaagtccattccctttagaggctgttgctcctaccaagcccagcaaagtcaaagcgtttgggccagggttacagggtggaagtgccggttctcctgcacggttcaccatcgatactaagggcgctggaacggggggcctgggacttacggtagaaggcccttgtgaggcgcagctggagtgtctcgacaatggcgatggcacgtgctctgtttcttacgtgccgacagagccaggagattacaacataaacatcctctttgccgatactcatatcccaggcagccctttcaaggcccatgtggtgccatgtttcgacgcttccaaggttaagtgctctggcccgggcctcgaacgagcgacagcaggtgaagttggtcagttccaggtggattgttcctctgctgggtccgcggaattgactatcgaaatctgtagcgaagcaggactgcccgcagaggtgtatatacaggaccacggggacggaacccataccatcacttacatcccactctgccctggcgcatatacagtaactattaaatacggagggcagccagtccctaactttccttctaaactgcaggtggaacctgcagtcgacacaagcggcgtgcaatgctatggcccaggaatcgaaggtcagggggtttttcgagaggctactacagaattttcagtcgacgcccgtgccctgacccagacggggggtccccacgtgaaggccagggtcgctaacccgagcggcaatcttacagagacttatgttcaagatcgaggagacggtatgtataaggtagagtacacaccttacgaggagggcctccacagcgtggatgtgacatatgatgggtctcctgttccctcgtccccatttcaggtacccgtgaccgagggctgtgatccctcacgggttagagtccacggaccaggcatccaaagcgggacaacaaacaaaccgaataagtttactgtggagacaaggggtgctggcacaggcggactgggccttgctgtggagggcccttccgaagcaaaaatgagctgtatggataacaaagacggatcatgttctgtggagtacatcccttacgaggcaggaacctattcattgaatgtcacttatggcgggcaccaagtacctggatctccctttaaagtacctgtgcatgatgtgactgatgccagcaaggtgaagtgcagtggtcccggcctatccccgggcatggtaagagccaacctgcctcagtctttccaggttgacacttccaaggctggggtcgccccattacaggtgaaggtccagggccctaagggtctcgtagagcctgttgatgtggttgacaatgccgatggcacacagacggtcaactatgtgccctctagggaaggcccgtactccattagcgttttgtacggtgatgaagaggtccctcgctcaccatttaaggttaaggtcctgcctactcatgacgcatcaaaggtgaaggcgtcaggcccggggctgaacaccacaggcgttccagcttcgctgccagtggagttcacgattgatgccaaagacgccggcgaaggcctcctggctgtgcagattacggatccggaagggaaacccaaaaagacccacattcaggataatcacgacggaacatatacagtggcctacgtcccagacgtaactggtcggtatactatattgatcaaatatggtggcgacgagattccattctctccatatagagtgagagccgtccccactggcgacgccagtaagtgcaccgtgactggcgcaggcatcggcccgaccattcagatcggtgaagaaactgtaattacagttgataccaaggccgctggcaaaggaaaggtgacctgcacagtgtgcacacctgacggaagtgaagtggacgtcgacgttgtagaaaatgaggacggaacatttgatattttctacacagccccacaacccggaaagtacgttatctgcgtaagattcggcggggaacacgtccccaactccccctttcaagtcacggctctggccggagatcagccttccgtccagcccccgctgcggagccagcagctggcacctcagtatacttacgcccagggagggcagcaaacatgggcgcccgaaagacccctggtaggtgttaatggtctggacgtgaccagtctgcggccatttgatctggttattccttttacaatcaaaaaaggggagataacgggagaggtacggatgccgagtgggaaggtggcacaaccaactatcacggataacaaagatgggacagtgaccgttcggtatgccccctctgaggctggcctccacgagatggatattcggtatgataatatgcatatcccaggctcccccctgcagttttacgtggactatgtgaattgcgggcacgtcacagcatacggtcctggactcacacatggcgttgtgaataaacccgctacgttcactgttaataccaaagacgctggtgaaggcggcctgagtctcgctatcgaaggtccaagcaaggccgagatctcatgcacagacaaccaggacggaacgtgctccgtgagttatctgcccgtcttgccaggtgattactcaattctggtcaaatacaatgagcagcatgtgccaggttccccctttacagcccgggtgactggcgacgatagcatgcgaatgagccatctcaaagtcggctctgctgccgatatcccgataaatattagtgagactgacctgtctctactgaccgctaccgttgtcccgccttcaggtcgcgaagaaccctgcctcctcaagcggctgcgcaatggccacgtggggataagttttgttcctaaggaaacaggggaacacctggtgcacgtcaagaagaatgggcagcacgtagcttctagcccaattcctgtggttatttcccagagtgagattggcgacgcatcacgtgtgcgcgtcagcggacagggcctgcacgaagggcatacctttgaacccgcagaattcattattgataccagagatgctggttatggtggcctcagcctcagtattgaggggccttctaaggtggatattaacacagaagacctcgaagatggcacctgtcgtgttacatactgcccgaccgagccgggaaattacattatcaatatcaaattcgcagaccagcacgtgcctgggagccccttctctgtgaaagtgactggagaaggtcgcgtaaaagaaagtattacccggcgacggagagcaccctctgtggccaatgtcggctctcactgcgacctatccctcaagattcccgagatttccattcaggatatgacagcccaggtaacatccccatctggcaaaacacatgaggcagaaatcgtggagggtgaaaatcacacctattgtatccgttttgtccccgccgagatgggaacccacaccgtgtcagtaaaatacaagggccagcatgtgcctgggagcccttttcagttcaccgtcggtcccttaggcgaagggggggcccacaaagtgcgggccggcggccctgggcttgagagagcagaggcaggggtacctgcagaattcagcatttggactagagaggctggtgcgggtggtctggcaattgccgttgaagggccatctaaggcagagattagctttgaggacaggaaggacggaagttgcggagtggcctatgtggtgcaggaacctggagactatgaggtgtcagtgaagtttaacgaggagcacatcccagatagtccctttgtggtccctgtggcgagcccatctggcgatgcacggaggttaacggtgtcgagcctccaggagtccggcctcaaggttaatcagcccgcctccttcgccgtgtccctcaacggtgccaagggggccatcgatgcgaaggtgcactccccctccggcgccctggaggagtgctacgtgacagagatcgaccaggataaatatgcggttagattcataccccgagaaaacggcgtgtacctgattgacgtgaaattcaatgggactcatatccccggaagcccctttaaaattcgagtgggagagcctggtcacggaggcgatcccgggctggtgtccgcctatggtgcaggtcttgaagggggtgttactggcaatcctgccgaattcgtggtgaacacctctaatgctggtgctggagccttgtcagtgactattgacgggccaagtaaagtgaagatggactgccaggagtgccccgaaggctacagagtgacctataccccaatggcccctgggtcttacctgatttctattaaatacgggggcccctaccatattggcgggtcccccttcaaggccaaagtcaccggccctagattggtgtcaaatcatagtctgcatgagacatcgtcagttttcgtggattcccttacaaaagccacctgcgccccccaacatggggcccccgggcccggaccagccgatgcctccaaagttgtcgcaaaaggattgggactgagtaaggcctacgtgggccagaagtcatctttcaccgtggattgcagcaaagcagggaataacatgcttcttgtcggagtgcatggacctcggaccccttgcgaagaaatcttagtgaagcacgtgggctctcgactgtacagcgtgtcttatttacttaaggataagggcgaatacacactcgtggttaaatggggcgatgaacacattcctggctcaccatatagggtggtggtcccatag

SEQ ID NO: 117149 - DNA, 7809 bp, synthetic construct
  misc_feature 1..7809: note = Description of Artificial Sequence: Synthetic coding sequence
  source 1..7809: mol_type = other DNA
atgcccgtgacagagaaagatctggccgaggatgcaccatggaagaagattcagcagaataccttcacacggtggtgtaacgagcaccttaaatgtgtgaacaaacgtatcggaaatttgcagaccgatctgtctgacggtctcagactgattgccctactcgaagtactgtctcagaaacgcatgtacaggaaatatcaccagcggcctaccttccgtcagatgcagcttgaaaacgtttcagtcgctctggaattccttgacagggagtctatcaagctggtgagcatagactcgaaagctatcgtagacgggaacttgaaactgattcttggtttggtctggactctcatattgcattacagtataagtatgcccgtttgggaggatgaaggagacgacgatgcaaagaaacagacacccaaacagcgcttactgggatggatccagaacaagatcccttatctaccgatcactaatttcaaccagaattggcaggacggaaaggctttaggggcattggtagattcttgtgcgcccggactttgcccagattgggagagctgggatccccagaaaccagtggataacgctagagaagctatgcagcaggcggatgactggcttggagtcccgcaagtcatcacccccgaagaaatcattcatccagacgtagacgagcactcggtcatgacttatttgtcccagttcccaaaggcaaagctcaaacccggtgcccccctgaagccgaagcttaaccccaagaaagcgcgggcatatgggagaggcattgaacccaccggtaacatggtgaaacagcccgccaaattcacggtagatacgatatctgcagggcagggcgatgtgatggtgttcgttgaagaccccgagggcaacaaagaggaagcacaggtcacccccgattcagataagaataagacctattctgttgagtacctgcccaaagtaacgggactgcataaggtcacagtcctattcgctggccagcacatttctaagtcgccattcgaagtgagtgtggataaggcccagggcgatgcgtctaaggtaaccgccaagggtcccggattagaagccgtgggcaacatcgccaacaaaccaacgtactttgatatttacaccgccggagcgggtgttggcgatattggggtggaggtggaggatcctcagggcaaaaacactgtggaactcttggtggaagacaagggcaatcaggtgtatcgctgcgtctataaacccatgcagccagggccccacgtggtgaagatattcttcgccggagacacaatcccgaagagccctttcgtcgtgcaagtcggcgaagcctgcaaccctaacgcatgccgcgctagtgggcgcggactccagcccaagggcgttcggattcgggagaccaccgactttaaggttgatacaaaggccgctggctctggcgagttgggagttacaatgaagggacctaaaggacttgaagagctggtcaagcagaaagacttcctggacggagtgtacgctttcgaatactacccttctaccccaggaagatactccatcgctatcacgtggggcgggcaccacattcccaaatctccgtttgaagtgcaggtgggaccagaagccggcatgcaaaaggtccgggcttggggccccgggctgcacggggggattgtaggtaggtccgctgattttgtcgtggagtccatcggctctgaggttgggtctctgggtttcgccatagagggcccctcccaagcgaagattgaatataatgatcagaatgacggctcgtgtgatgtgaagtattggcctaaggagcctggggaatatgcggttcatatcatgtgcgatgatgaagacatcaaagacagtccttacatggcttttatccacccagctacgggtggctacaaccctgatctggtgagggcttatggcccaggcctggaaaagtccggctgcattgtaaacaacctcgctgaattcactgtggacccgaaggacgcgggcaaagccccactcaagatttttgctcaggacggcgaggggcagagaatagacatccagatgaaaaacaggatggacggtacctatgcgtgcagttatactccagtaaaagcgatcaagcatacaatcgccgtggtttgggggggagttaatatcccccactccccgtaccgggtcaatattggacagggcagtcaccctcagaaggtgaaggtatttggccccggggtggaaagatctggcttgaaagccaacgagcccacacactttacagtggactgcaccgaggctggagagggtgacgtctctgtgggaattaaatgtgatgcgcgggtactgagtgaagatgaggaagatgtagatttcgatattatccacaacgcgaatgatacatttacagttaaatacgttccccctgcagcaggaaggtacaccatcaaggtgttgtttgcgtcccaagagatccccgcctcgccattccgcgttaaggtcgatccttcccacgacgccagtaaagtaaaggccgagggtcccggcctctccaaggcaggcgtcgaaaatgggaaacctacacacttcaccgtgtatacaaaaggggcagggaaagcacccctaaacgtgcagttcaatagtccattgcccggtgatgctgtgaaggatctggatattattgataattacgattactctcataccgttaagtacacacccactcagcaaggcaacatgcaggtgctcgtgacatacggtggagaccctattccaaaatcccctttcaccgtgggagttgctgcccccctcgacttgagcaagattaaactcaatggtctggaaaacagagtggaagttgggaaagatcaggaattcaccgtggacactcgcggcgccggcgggcagggcaaactcgacgttacgattctttctccaagcaggaaagtggtgccatgtctggtcacaccagtgacaggtcgcgagaacagcacagcaaaatttattcctcgcgaagaaggtctttacgctgtggatgtaacctatgacgggcaccccgtacctggaagcccatataccgtggaggccagcctgcccccagacccctcaaaagtaaaggcacatggccctggtttggaaggggggttggttggtaagcccgccgaatttaccatagacaccaaaggcgccggaaccggaggccttggtctgacggtggagggaccatgtgaagcaaagatcgaatgcagcgataacggcgatggtacctgctctgtcagctacctacctaccaagccaggagaatattttgtgaatatactttttgaggaagtccatatcccaggctccccgttcaaagccgatattgagatgcccttcgaccccagcaaggtcgtggctagtgggcctgggctggagcatggaaaagtgggtgaggccggcctactttcagtagattgcagcgaagcagggccaggagcgcttggcttggaggccgtctccgactcaggcactaaagctgaggtaagcatccaaaacaataaggacggaacttacgccgtgacgtacgtgccactcacagctggcatgtatactttaactatgaagtatggaggcgaattggtccctcactttcctgcccgcgtgaaggttgagccggccgtcgacacctcacgcatcaaagtctttggcccaggtattgagggcaaggatgtcttcagagaggctacgaccgactttaccgtggatagtcgccccttaacgcaggtgggaggcgatcacatcaaagctcacatcgctaacccaagcggcgctagcacagagtgctttgttaccgacaatgccgacggtacatatcaggtggaatacacccccttcgagaagggcctgcatgtggtagaggtaacatatgacgacgtgccaatccccaattccccttttaaggtggctgtgacagaaggatgtcagccttcacgggtgcaggcccaaggtcccggcctgaaggaagcgtttactaataagccaaatgtcttcacagtggtgactaggggagccgggattggtgggctgggcatcactgtcgaaggaccctccgaatctaagatcaactgcagagacaataaggatgggagttgttcagctgagtacatccctttcgccccaggggactacgatgtcaacattacatacggcggcgcccacattcctggcagtcccttccgtgtcccagtcaaagatgtagtagacccatccaaagtgaagatcgcaggacctgggctcgggtccggtgtacgggctcgggttttgcagagcttcaccgtggactccagcaaggctgggcttgcgcctttggaagtgcgagtactcggacctcgcggactggtcgaaccggtcaatgtggtcgataacggagatggcacccatactgtcacctatacaccctctcaggaagggccttacatggtcagtgtgaagtatgccgacgaggagatccctcgctcgccattcaaggtgaaagtgctgcctacatatgacgccagtaaagtcactgcatctggcccagggctctccagctatggcgtgccagcttctctgcccgtggacttcgcaatcgacgcccgcgacgcaggcgaggggctgctggctgtgcaaatcaccgaccaggaaggaaagccaaaacgggccatcgttcatgataacaaagacggtacatacgccgttacttacatccctgataagactggtagatacatgatcggagtcacttacggcggcgatgacattcctctgagcccttacaggatacgggctacgcagaccggcgatgccagcaaatgcctggctacaggccccggcattgcaagtaccgtgaaaacaggagaggaggttggctttgtggtggacgcaaagactgccggcaagggcaaggtcacatgcactgtgctgacgcctgacgggacggaggctgaagctgacgtcattgagaacgaggacgggacctacgatattttctacacagccgctaagcctgggacttatgtcatttacgtgcgcttcggcggagtggatatcccaaacagcccctttaccgtcatggctaccgacggtgaagtgaccgccgtggaggaggcacccgtcaacgcatgtccaccaggcttccggccttgggttactgaagaggcctatgtgcctgtgtctgacatgaacggactggggtttaagccctttgatcttgtgatacccttcgccgtgcggaagggtgagataaccggagaggtacacatgccttctggaaaaacagctactccggaaattgtcgacaataaagatggcactgtgacagtgcgctatgcgcctactgaagtggggttgcacgaaatgcacataaaatacatgggatcccacatcccggagtccccattacagttttatgtgaattatcccaactctggctccgtatcagcatacggacctgggctcgtctatggcgtggctaacaaaactgctacttttacgattgtaacagaagatgcaggagaggggggtctcgatttagcaatcgaaggcccctccaaagctgagattagttgtatcgataataaggatggcacatgtacggtgacctatctccccacactgccaggagactatagtatcctggtgaagtataacgataaacatatacccggaagtcctttcactgctaaaattaccgacgactcacgtaggtgctctcaggtcaaactcggatcggcagcagattttctgctcgacatatccgagaccgatctttcatcactgaccgcgagcatcaaagcccccagcggtagggacgaaccatgcctcctaaagcggctccccaataaccatattggtatcagctttattcccagggaagtcggcgaacacctggtgtctatcaaaaagaatggtaaccacgtggccaactcgccagtgtctatcatggtggtgcagtcagaaataggagatgctcgacgagccaaggtttatggcaggggacttagtgaaggccggaccttcgagatgtcagatttcatagtcgacacacgtgatgcgggatatggtggcatctctttggctgtagagggcccgtccaaagtggatattcagacggaagacctcgaagacggcacctgtaaagtgtcctattttcccacagtgcctggagtgtacattgtgtccacaaaattcgccgatgagcacgtgcctgggagtccatttaccgtgaaaattagcggggaaggaagagtcaaggaatccataacgagaacttctagggctccaagcgtggctacggtgggttcaatttgcgatttaaaccttaagatccctgagattaatagcagcgacatgtcagcacatgtgacaagtccttctgggcgagttacagaggccgagatcgtgcctatgggcaagaatagccattgcgtccgattcgtgccacaggagatgggagttcacactgtgtctgtgaagtatcgaggccagcacgtgacgggatccccttttcagtttacagttgggccccttggtgaaggcggagcccacaaggtcagagctggaggtcctggacttgagaggggggaggccggagttcctgccgagttttctatttggactcgagaggcaggggctggcggtctgtccatagcagttgaaggcccttcaaaagctgagataacctttgacgaccataagaacggttcatgtggtgtgtcctatatcgcacaggaaccaggtaattacgaagtatcaattaaatttaatgatgagcacatcccagagagcccctacttggtgcctgtaatcgctccatccgacgacgctaggcgccttaccgtgatgtcattgcaagaatctggtctcaaagtgaaccagccagccagcttcgctatacggcttaacggtgctaagggaaaaatagacgctaaggtccatagcccaagtggcgccgtagaagagtgtcacgtgagtgaattagagccagataaatatgctgtccggtttatcccccacgagaatggtgtccataccattgacgtcaagtttaacggctcacatgtggttgggtctccattcaaggtcagggtaggagagccaggccaggcaggtaacccagctttagttagtgcctatggcaccggattggagggcggtactactggcatccagtctgagtttttcattaacaccactagggctggccccggcacactgtctgtcactatagaggggccttctaaagtgaagatggactgtcaagagactccagaaggctataaagtcatgtacaccccaatggcacctggcaattacctcatctccgtgaaatacgggggccccaaccacatcgtgggaagcccctttaaagcaaaagtcaccggccagcggctcgtgtctccggggtctgctaacgagacaagctctattctagttgagagcgtcacaagaagtagtaccgagacttgctactccgcaattcctaaggccagcagcgacgcctctaaggtgactagcaagggagctggcctcagtaaggcttttgttgggcaaaaatcatctttccttgttgattgtagcaaggcagggtctaatatgcttttaattggagtgcacggccccactacgccctgcgaagaggtgagtatgaagcacgttggaaaccaacaatataacgtcacatatgtggtgaaggagagaggtgactatgttctagcagttaaatggggtgaggaacatatccccggcagtccatttcatgtgaccgttccctag

SEQ ID NO: 117150 - DNA, 7686 bp, synthetic construct
  misc_feature 1..7686: note = Description of Artificial Sequence: Synthetic coding sequence
  source 1..7686: mol_type = other DNA
atgccagtcacagagaaagacctcgccgaagacgccccatggaaaaagatccagcaaaacacattcacacgatggtgcaacgaacacctgaagtgcgtcaataaacggatcgggaacctacaaactgatctgagtgacggcctgcggctgattgccttactcgaggttctatctcagaagcgcatgtatcgaaagtatcaccaacgccccactttccgacagatgcagctagagaatgtgtccgtggctctggagttccttgatcgagagtcgattaaattggtcagcatagatagtaaggctatcgtcgacggtaacctgaagttgattctcggcctagtgtggacgctgattctccattacagcattagtatgccagtttgggaggatgaaggcgacgacgacgcaaaaaaacagacacccaaacaacgcctgcttggctggattcagaacaaaataccctacctgccgattactaacttcaaccagaactggcaggacggtaaggccctcggcgccctcgtggattcatgcgcccccggactctgtcctgattgggaatcctgggatcctcagaaaccagtggacaacgcccgggaggccatgcagcaggccgacgactggctcggtgtgccccaagtgatcactccggaggagataattcacccagacgtggatgaacattccgttatgacctacctgtcgcagtttcccaaggccaagctgaaaccaggcgccccactgaaacccaaactgaaccccaagaaagcacgggcctatgggcgggggattgagcctactgggaatatggtgaaacaacctgctaagtttaccgtggatacaatatccgccgggcaaggggacgtgatggtgtttgttgaagaccctgagggcaacaaggaggaggctcaggtcacccctgatagtgacaaaaacaagacatacagtgtagaatacctccccaaagtcaccggcttacacaaggtaaccgtgctctttgccggacaacacatcagtaaatcacctttcgaagtctccgtcgataaggcccagggtgatgctagcaaggttactgctaagggcccaggcctggaagctgtgggaaatatcgctaacaaacctacctactttgacatttacacagccggggccggcgtgggtgacattggggtggaggtggaggatccccagggcaagaatactgtcgaactgttggtggaggacaagggcaaccaggtttaccggtgcgtctacaagccaatgcaaccgggcccccatgtcgttaagatttttttcgctggcgacacaatccccaagtcacccttcgtagtgcaggtaggcgaagcatgtaaccccaacgcttgcagggcttccggtagaggacttcagcctaaaggggttagaatccgcgaaactaccgattttaaggtcgacaccaaggccgccgggtctggcgagctcggcgtaactatgaagggcccaaagggactggaggagctcgtgaaacagaaggacttcctggacggcgtttacgcgttcgaatactacccctctactcccggccggtatagtattgccatcacatgggggggtcaccacattcccaagtccccatttgaagttcaggtgggcccggaggctggcatgcagaaggtcagagcttgggggcctggattgcatggaggaatcgtgggccgctctgcagacttcgtagtggagagcatcgggtctgaggtgggcagtctgggctttgccattgagggccccagccaggctaaaatagagtataacgaccaaaacgatggaagttgtgacgttaagtattggccaaaggaacccggagagtatgcagtccacattatgtgtgatgatgaggacattaaggactcaccttatatggcgtttattcaccctgccacaggtggatataatcccgatctcgtcagggcttacggccctggccttgaaaagagtgggtgtatcgtcaataatctggctgaatttaccgtcgatccaaaggacgccggtaaagcaccattgaaaattttcgcacaggatggggagggacagcggatcgacattcagatgaagaaccgcatggacgggacttacgcctgcagctacacccctgtgaaggccatcaaacacaccatagcggttgtatgggggggagtgaatattcctcacagtccatacagggtgaacattgggcaagggagccacccgcaaaaagtgaaggtctttggacccggggtggagcgatcaggcctgaaggccaacgaaccaactcactttacggtggactgcacggaagccggcgaaggtgacgtgtccgtgggcattaaatgtgatgcaagagtactgtctgaggacgaagaagatgttgatttcgacattatacacaacgccaacgatacattcacagtcaaatacgttcccccagcagctggaagatatacaatcaaagttctgttcgcaagtcaggagatcccagccagccccttcagggtgaaggtagacccctcccacgacgcctctaaagtcaaggccgaaggccctggtctttccaaagctggagtggaaaatggaaagcctactcacttcacagtttacactaagggagccggaaaagcccccctcaatgtgcagtttaacagccctttacctggcgatgccgttaaagacctcgacatcatcgacaactacgattacagccatacggtgaagtatacaccaacgcagcagggaaacatgcaagtgctggttacttacggaggtgatccaatacctaagtctccctttaccgtgggggtcgctgccccattagatctatctaagattaagttaaacgggttggaaaatagagtcgaagtcggcaaagatcaggagttcaccgtggatacgcggggagctggcggccaagggaagctggacgtcacaatcctgtctccgtccagaaaagtagtgccgtgtctggtgacacccgtgactggacgcgagaactcaaccgcgaagttcattcctcgcgaagagggtctctacgctgtggacgtgacctatgacggtcaccccgtccccggctctccttacacagtggaagcctctctcccgcctgacccaagtaaagtgaaagctcatggacctgggctcgagggcggtctggtcggaaagccggcagaatttaccattgacacaaaaggcgcaggcaccgggggcctcgggctgaccgttgaaggcccctgcgaagccaagatcgagtgctccgacaacggcgacggtacatgctctgtatcctacctgcctacaaaacccggagagtattttgtgaatatactcttcgaggaagtccacatacctgggagtccctttaaagccgacattgagatgccattcgatccctctaaggtcgtggcgtccggcccgggtctggaacacggcaaggtgggcgaggcaggcttactcagtgtggattgctcagaggctggccccggcgctctgggcctcgaggctgtgtctgacagcggcaccaaagcagaggtttctatacagaataataaagacgggacgtacgcagtgacctatgtccccctgacggcaggaatgtataccctgacgatgaagtacgggggcgagttggttccacactttcccgctagagttaaggttgagccagctgtcgatacctcccgcataaaagtttttggaccaggcatcgaagggaaggacgtgtttcgcgaagcaactaccgactttacagtcgattcaaggccgcttacccaggtcgggggcgatcatatcaaggctcatatcgcaaacccttcaggggcctcgacagagtgttttgtgaccgataatgcagatggcacctaccaggttgagtacactccatttgaaaaaggcctgcacgtggttgaggttacctatgacgacgtgccgattccgaattctcccttcaaagtagcagttacggaaggctgccaaccctcaagggtccaggcacagggcccaggattgaaggaggccttcactaataaacccaacgttttcacagtggtgactcggggagccggaatcgggggactcggcataacggttgaaggcccttcagagagcaagattaactgtcgtgacaacaaggatggctcctgcagcgcagagtatatccctttcgcgccgggcgactacgacgtgaatattacctacggaggagcacatatcccaggctccccatttcgagtacctgtcaaagatgtcgtggacccttctaaggtcaaaattgctgggcccggactgggctctggcgttcgggcacgcgtcctccagtcattcaccgtcgacagctccaaggccggcctcgccccccttgaagtgagggtgctgggtccgcgcggcctggttgaacccgtcaatgtcgtcgacaatggcgacggcacccacaccgtgacatacacgcccagccaagagggcccttatatggtctccgtgaagtatgctgatgaagagataccccgctctcctttcaaggtgaaggtccttcccacttacgatgctagcaaggtgaccgcctcgggcccaggcctgagtagctacggcgtccctgccagtctccccgtggactttgccattgacgccagggatgccggagaagggcttcttgctgtccagataacagatcaagagggcaaaccaaagagggcaatcgtacacgataataaagacggtacatatgcggtgacctatatccctgacaagacagggcgctacatgattggggtgacttatggaggcgacgatatccctctctctccatatcgcattcgagcgactcagaccggtgacgctagtaaatgtctcgcaaccggacccgggatagcttcaaccgtgaagacgggggaggaggtcggattcgtcgtggacgcaaagaccgctggaaaggggaaagtgacctgcaccgtcctgacacccgacgggaccgaagccgaggctgacgttattgagaacgaagacggtacctacgacattttttacactgccgccaaacccggaacatatgtcatctacgtcaggttcggaggcgtggatatccctaattcaccatttacagtaatggcaacagacggcgaggtgacagctgtagaggaagcccccgtgaacgcctgtccaccaggttttagaccctgggtgaccgaggaagcctatgtacccgtgagcgatatgaacgggttaggctttaaacccttcgacctcgttatcccattcgccgtgcgtaaaggtgagattacgggtgaagtccatatgccttcaggaaagacagctactccagaaatcgtggacaacaaggatgggacagtgacagtgagatatgcccccacggaagtgggactacatgaaatgcacattaagtacatgggttctcatatacctgagtctccactgcaattttacgtgaattatcctaactccggcagcgtgtcagcctatggccccggcctcgtttacggagtggcaaacaaaactgcgacattcaccatcgtgacagaggatgccggcgagggtggcctcgatctggcaattgaggggcctagtaaagcagaaataagctgcattgacaataaagacggaacctgcactgtgacgtacttaccgacgctgcctggggactattctatcctggttaaatataacgataaacatattcccggctcaccctttactgccaagattaccgatgatagcagacgttgctcccaggtcaagctcggatctgccgcagatttcctcttggatatcagcgagaccgatctctcctccctgacagcgagcattaaggcaccctcggggagggacgaaccttgtctgctaaagcggcttcctaataaccatatagggatctcttttatccctcgcgaggtgggtgaacacctggtctcaattaaaaagaatgggaaccatgttgcgaattcaccggtatccatcatggtcgtgcagagtgagatcggggacgctagacgtgctaaggtttatgggaggggcttgtcagagggaagaacctttgagatgagtgactttatcgtggacaccagagacgccggatacggggggatctcactcgccgtggaaggaccgtctaaggtcgatattcagactgaggacctcgaagatggcacgtgtaaagtgagctactttccaaccgttccgggcgtgtacatcgtcagcactaaatttgctgatgagcacgtgccggagatcaacagcagcgatatgtcagctcatgtgacctcaccttccggccgcgtcaccgaagcagagatcgtgccgatggggaagaattctcactgcgtgcgttttgtgccgcaggaaatgggcgtccacaccgtttcagttaaatataggggccagcacgttacagggtctccctttcagttcaccgtgggacctttgggcgaaggtggggctcataaagtgagagcaggcgggcctggccttgagaggggggaagccggtgtgcccgcagagttctccatctggaccagggaggccggcgccggcgggctgtccatcgcggtggagggcccgagcaaggcggagatcacctttgacgatcataagaacggtagttgcggggtgagttatatcgctcaggagccgggaaactacgaagtatctataaaatttaacgacgagcacatcccggagtccccgtatttagtgcctgtcattgcacctagtgacgacgcccggagactgacggtcatgagcctgcaggaatccgggttgaaagtcaaccaacccgccagctttgccattagattgaacggagccaaaggcaaaattgatgccaaggtgcactcaccatctggggcagttgaggagtgccatgtttcggaattggagcctgacaagtatgccgtcaggttcattcctcacgagaacggagtacataccatagatgtgaaatttaacggaagtcacgtcgtgggtagcccttttaaagtacgagttggggaacctggtcaggccggaaaccccgccctggtgtcggcctatggcacaggtctggaagggggtacaaccggtattcaatctgaattttttatcaacactactcgggcgggccctgggacattgtcagtcaccatagaaggcccgtccaaagtgaaaatggattgccaggaaacacccgaggggtacaaagtcatgtacacaccaatggcccccgggaattaccttatctctgtgaaatacggtggtccaaaccacatcgtgggttcgccctttaaagctaaggtaacgggacagagattagtgagtccaggctccgctaacgagacatcatccatcttggtggagtctgtgaccagatcttcaacggaaacgtgctactcagccatccccaaagctagttccgatgcttccaaagtcacatccaaaggcgctggcctgagcaaagcctttgtcggacagaagtcttcgttccttgtcgactgttcaaaggctggctccaacatgcttttaatcggggtccatggcccgacaacaccgtgcgaagaagtctcaatgaagcatgttggcaaccagcagtacaacgtgacttacgtggtcaaggagcggggcgattatgttcttgcagtgaaatggggcgaggagcacataccaggttctccatttcatgtgacggtgccttag

SEQ ID NO: 117151 - DNA, 6453 bp, synthetic construct
  misc_feature 1..6453: note = Description of Artificial Sequence: Synthetic coding sequence
  source 1..6453: mol_type = other DNA
atgccagttaccgagaaggatttagccgaagatgccccatggaaaaagatccagcaaaacacatttactcgctggtgtaacgagcacctcaaatgtgtaaacaaaagaattggaaacttgcagactgacctgtctgacggactccggttaatcgccctgctggaggttctctcccagaagagaatgtataggaaataccaccaacgcccaactttcagacagatgcagctggaaaatgtgagcgtggcactggagtttctggatcgcgagtctatcaaacttgtgagcatcgattcaaaggccatcgtcgacggcaatctgaaactcatactgggactcgtgtggacactcattttgcactactcaatcagcatgcccgtttgggaggatgaaggggatgatgacgctaaaaagcagacaccaaagcagaggctgctagggtggattcaaaataagatcccatacttgcccattactaattttaaccaaaattggcaggacggtaaagcactcggtgccctcgtggattcatgcgcccccggcctgtgccctgattgggaaagctgggatccgcagaagcccgttgacaacgcccgcgaagccatgcagcaagcggacgattggctcggtgttccacaggtgattacacccgaagaaatcatccacccggacgtcgatgagcattctgtcatgacatacctgtcccagttccccaaagctaaattgaaaccaggagcgcccctgaaacctaaactgaatcctaagaaagcccgagcatacgggaggggaatagagccgacgggtaacatggtgaagcaacctgctaagtttactgtggatacaattagcgccggtcagggagatgtcatggtgttcgtggaagatcccgaggggaacaaagaagaagcacaggtgacacccgattctgataagaacaaaacctacagcgtggagtacctgcctaaggtcactggcctgcacaaagtcacggtgctgttcgccggacaacacattagcaaatcgcctttcgaggtgtctgtggacaaggcacagggagacgcatcaaaagtcaccgccaagggaccgggactcgaggccgtggggaacattgccaacaagcctacttatttcgatatttatactgctggcgcaggagtgggagacatcggagtggaggttgaagaccctcagggcaagaacactgtggagctcctggtggaggacaaagggaaccaggtgtataggtgtgtgtacaagccaatgcagcccggaccccatgtggtgaagatctttttcgcaggggatacaatacctaagtctccgttcgtcgtgcaggtgggggaggcttgcaacccgaacgcttgcagagcttctgggcggggccttcaaccaaagggcgtgagaatcagggaaaccacggattttaaagttgatactaaagccgccgggtctggggagctaggggtgaccatgaagggcccaaagggtctcgaagagttggtcaagcagaaggacttcctggatggcgtatacgcgtttgagtattatccttccacacctgggcggtattctattgcgattacatggggcgggcatcacatccctaagtcccctttcgaagttcaggtgggcccagaggcaggaatgcagaaagtccgagcctggggcccaggactgcacggcgggatcgtgggaagatctgccgacttcgtagtcgagagcattggatccgaggtaggatctctggggttcgccatcgagggtccctcacaagccaagatcgaatataatgaccagaacgacggcagctgcgacgtgaagtattggcccaaagaacctggtgagtacgctgttcatatcatgtgtgatgatgaagatatcaaagacagtccctacatggctttcattcaccccgccaccgggggctataatcctgatctggtgagagcctacggccccggcctcgagaagtctggatgcattgtgaataatcttgcggaatttaccgttgacccaaaagatgccggaaaggcccccctcaaaatctttgcgcaggacggggaaggacagaggatcgatatccaaatgaaaaatagaatggatggtacatacgcctgctcctacacaccagtcaaagccatcaagcacacaattgcggtcgtctggggaggagtgaatattccgcacagcccttacagggttaacataggtcaaggaagccacccacaaaaggtaaaggttttcggacccggcgtagaacgatctggattgaaagcaaatgaacccactcactttaccgtcgactgtactgaggccggcgagggagacgtctccgtgggcatcaaatgcgacgctagggtcctctccgaagacgaagaagacgtagattttgacatcatccacaacgcaaacgacactttcacggtcaaatacgtgccacctgcagccggtagatatacaataaaagttctgttcgcctcccaggagattcctgctagcccattcagagtgaaggtcgacccttctcatgatgcttctaaggtgaaagcagaaggccctgggctaagtaaagcgggcgtggaaaatggcaaacctactcacttcacggtatacacgaagggggccggcaaagctcctctgaacgtgcagtttaactcgcccctgcctggtgatgccgtgaaagatttagacatcatagacaactacgattacagccacacggttaagtacacccctacccagcaaggtaacatgcaggtgctcgttacatatggaggggaccctatcccaaagtctcctttcactgttggtgttgctgcacccctggatcttagtaaaatcaaacttaatggcttagagaacagggtagaggtggggaaagatcaggaattcaccgtcgatacaaggggggccgggggccaagggaagcttgatgtgaccattctgtctccttcaagaaaggtcgtcccatgtctggtcaccccggtgactgggagggagaactctacagccaagttcattccccgcgaggaagggctctatgctgtggacgtcacctatgacggacaccccgtgcccgggtccccatacacggttgaagcctccctgccaccagacccctcgaaggtgaaggctcacgggccagggttggagggggggctcgtgggtaagccagcggaattcacaatcgacacaaagggtgcaggcaccggaggtctcggcctcactgtagagggtccttgcgaggctaagatcgaatgctctgacaatggggacggtacttgcagcgtgagctatctgcctacgaagcccggggagtactttgtaaacatattattcgaagaagtgcatatacccggttcgcccttcaaggctgatatagaaatgccttttgacccatccaaggtcgtggcctccggtccagggctggaacacgggaaagtcggtgaagcgggacttctgagtgtcgattgttctgaggccggacctggcgctcttggactagaagccgtatctgacagtggtacaaaggcggaagtttccatacagaacaacaaggatggcacctatgcagttacatatgtgcctcttactgccggcatgtacacattgaccatgaagtacggtggagagcttgtccctcactttcccgctcgggtaaaggtcgaacctgcagtcgatacgtcccggatcaaggtttttggtcctgggatcgaaggcaaggacgtctttcgcgaggctacgactgacttcaccgtggattctcgacctcttacacaggttgggggagaccacatcaaagcacatattgcaaaccccagcggcgcatccactgaatgttttgtgacagacaatgccgacggcacatatcaggttgaatacaccccctttgagaagggcctgcatgtagtcgaagtgacttacgacgacgtgccaatccctaactcaccattcaaggtcgcagtgaccgaggggtgccagcccagtcgagtgcaggcgcagggacctggattgaaggaagccttcaccaataagccgaacgtgttcacagtggtgacacgaggcgccggaatagggggcctgggcataacagtagaagggccttctgagtccaaaatcaactgccgggacaacaaagatggcagctgctcagctgaatatattcccttcgcccctggggattacgatgtgaatatcacatacggtggtgcacacattcccggaagcccatttagagtacctgtcaaggacgtcgtcgatccttccaaagtgaaaatcgcaggccctggtttaggttcgggcgtcagggccagggtcctccagtcttttactgtggactcttcaaaggccggattagcaccactcgaggtgagagtcctgggcccacggggactggtcgagccagtcaatgtggtggataacggggacggcacacataccgtgacatacacaccttcccaggagggcccctacatggtgtctgtgaagtacgcggatgaggagattccccgctccccctttaaagtgaaggttctgccaacttacgatgcctctaaggtgactgcttccggtccggggctgtcttcatatggcgtgcccgctagtctgcccgtggatttcgccattgatgcaagggatgctggcgaaggcctgctggcagtacagataacagaccaggagggcaaacccaaacgagcaatcgtccatgacaataaggatggtacctatgccgtcacctatatacccgacaagacaggcagatacatgatcggagtaacctacggaggagacgacatacccttgtcaccctatcgcatcagagccacccagacaggagacgcatccaaatgccttgctacaggtccgggcattgcttcaacagtgaagaccggtgaagaggtaggttttgtggtagacgctaaaacggccggcaagggcaaagtgacttgtactgtcctcacacccgatggtaccgaagcagaagctgatgtgattgaaaacgaggatggcacctacgatatcttctataccgccgccaagcccggaacctatgtaatttacgttcggttcggaggagtggacattccgaactccccattcacagtcatggctaccgacggagaagtgacggctgtagaggaagcaccagtgaatgcctgtcctccaggctttcgcccatgggtgacggaagaagcgtatgtgccggtttcagatatgaatggactgggctttaaaccgttcgatttggtcatccccttcgctgtgaggaaaggggagatcacaggtgaggtgcatatgccgtccggaaagaccgccaccccagaaatcgttgacaataaagacggcaccgtgacggtgcggtacgcacctaccgaagtgggccttcacgaaatgcatattaagtatatgggctctcacatccccgagtctccactgcaattttatgtgaactatcccaattccggatccgtatcagcatacggaccgggacttgtctatggcgtggcaaacaagaccgccacattcacgatcgtcaccgaagacgccggagagggtggtctcgaccttgccatcgagggacccagcaaggcggaaatttcatgcatagataataaagatggaacttgtacagtgacctaccttccaacgctgcctggagactatagtatattagtaaagtataatgacaaacatatccccggaagccccttcactgcgaagataacagacgattctcgcagatgttcccaggtgaagctaggttccgccgccgacttccttttggatatcagcgagaccgatttgtcctccctaactgccagcatcaaggctcctagcgggagagacgaaccctgcctgctgaagagactgcccaataaccacataggtatctcattcattccgcgcgaggttggcgaacacctcgtgagcataaagaaaaacgggaatcacgtggcgaattctcccgtgtccatcatggtagtgcagtccgagattggagacgcacggcgggcaaaagtttatggacgcggattatctgagggacggacttttgaaatgtcagattttatagtggataccagagacgccggctatggcgggatctccttagccgttgagggtccctctaaggtcgacatacaaaccgaggatctggaggatggcacttgcaaggtcagttacttccccactgtgcccggcgtgtatatagtctccaccaagtttgcagatgagcatgtgccgggctctccattcactgtcaaaatctccggcgagggaagggtgaaggaatccatcactaggacatccagggcccctagcgtagccacagttggaagcatctgtgatttgaacctcaaaatcccaggcgtgcgggtcatgaactgctcagcccagatcctctggggatggcgagtgcagttccacactggctccagaaaccagcaacagtag

SEQ ID NO: 117152 - DNA, 7737 bp, synthetic construct
  misc_feature 1..7737: note = Description of Artificial Sequence: Synthetic coding sequence
  source 1..7737: mol_type = other DNA
atgcccgtcactgaaaaagacctggctgaggatgctccgtggaaaaaaattcagcagaatacgttcaccaggtggtgcaacgaacacctgaagtgcgtgaacaagcgcatcggcaacctgcagacagatctcagcgacgggcttcgcctcatagccctcttagaggtgctcagccagaagagaatgtatcgcaaataccaccaaagacctaccttcagacaaatgcagctcgaaaacgtgtcagtcgccttggaatttttggaccgtgagagcatcaagctagtcagtatcgacagcaaggccattgtagacggtaatcttaagctgatcctgggcctggtctggaccttaatcctgcactactccatcagcatgcccgtgtgggaggacgagggcgatgacgacgctaagaaacagacccctaaacagaggctactgggatggattcagaataagatcccctatctgccaataactaattttaatcagaactggcaagacggcaaagctctgggagcgttggtggactcttgtgcccctgggctgtgcccagactgggaaagctgggacccccaaaagccggtagacaatgcccgcgaagctatgcagcaggccgatgattggcttggcgtacctcaagtaatcactcctgaggagattattcatccagacgtggatgaacactcagtgatgacttatctgtcacagtttccaaaggcaaagttgaaacctggggcccctctaaagccaaaactgaatccaaaaaaggcgagagcatacgggcgtggtattgaacccactggcaacatggtcaagcagccagcaaaatttacagtggacaccatatctgccgggcagggtgacgtgatggtcttcgtcgaggaccccgagggaaataaggaggaggctcaggtcacacccgattccgacaagaacaaaacctattctgtcgagtatcttcccaaagtgaccgggctgcacaaggtgacagtcctctttgctgggcagcacatctcaaagagcccttttgaagtgtcagtcgataaagcacagggggatgctagcaaggtgacagcaaaagggcctggactggaggctgtgggaaacatcgcgaataagccaacatattttgacatttatacagcaggggcaggcgtgggggacattggcgtcgaagtggaggatccacagggcaagaacaccgtggaactattggtagaggataaaggaaaccaggtctaccgatgtgtgtataagcctatgcaaccagggccccacgttgtgaaaatcttttttgcaggggatacaattccgaagagtcccttcgtggtgcaggtgggcgaggcctgtaacccgaacgcgtgtagagcgtcggggaggggtctgcagccgaaaggggttaggatccgggagacaactgattttaaggttgataccaaggcagcaggctctggggaactgggtgtgaccatgaaagggccgaaagggctggaagaactggtcaagcagaaggatttcctggatggcgtgtatgcttttgagtattacccgagtactcccggaaggtacagcattgctattacctggggtggtcaccacatccccaaaagcccctttgaggtgcaggtaggtcctgaggctggaatgcagaaggtgcgagcatggggtccgggcctgcacggcggcatcgtgggtcggtcagcagatttcgtggtcgaatccataggatctgaagttggttccctcgggttcgccattgagggcccatcccaggctaagattgagtataatgaccagaacgatggtagttgcgatgtgaagtattggcccaaggagccaggtgagtacgcagtgcatataatgtgtgacgatgaggatatcaaagattccccatacatggcctttatccaccctgccaccggtggctacaaccccgatctcgtgcgcgcctatgggcccggattagagaaatctggctgcattgtgaataacctggcggaattcacagtcgacccaaaggatgcaggtaaagcaccattgaagatctttgcccaggatggggagggacagcgaatcgacatccaaatgaaaaatcggatggatggcacctatgcttgctcatacacacccgtcaaggcaataaaacacaccatcgccgtcgtatggggaggagtgaacatacctcattctccgtatagggtaaatatcggacagggatcgcaccctcaaaaggtcaaagttttcggcccaggagtggagagatcaggtctcaaggctaatgaaccaacccacttcaccgtcgactgtacggaagccggcgagggagacgtgtccgtaggcataaaatgtgatgcaagagtcctgagcgaagacgaagaggacgtggatttcgacattattcataatgctaacgacacgtttactgttaaatacgtcccgccggccgctggcaggtatacaattaaggtgttgtttgcctcccaggagattccagcaagtccattcagggtgaaagtggatccatctcacgatgcatcgaaggtcaaagccgaggggccagggctaagtaaagccggtgtggaaaacggcaaaccaacccattttaccgtgtatactaagggcgcaggcaaagccccgttaaatgttcaattcaactctcctctgcccggtgatgctgtcaaagacctggatattattgacaactatgactactcacataccgttaagtatactccaacccagcagggcaacatgcaggttttagtgacctacgggggtgatccaatcccaaagtcacctttcacggtgggcgtggccgcccctctggacctctctaagattaaacttaatggactggagaaccgtgtggaggtgggcaaggatcaggagtttacggtggacacgcgcggagcagggggccagggtaaacttgatgtgaccattttgtcccctagccgtaaagtagtcccatgcttagtgacccccgtgactggtcgagagaattcgactgccaagttcatccccagagaagaggggctctacgccgtggacgtgacctatgatgggcatcctgtacccggatctccatacacagttgaggccagcctgcctccagaccccagtaaggtcaaagcccacggaccaggcctcgaaggagggctggtaggcaagcccgccgaattcaccatcgacaccaaaggggccgggaccgggggcctgggccttacagttgagggtccttgcgaagctaaaattgaatgttccgacaacggcgacggaacctgcagcgtgagttacttacccacgaagccaggtgaatatttcgttaatatactgttcgaggaagtgcacatccccggaagcccctttaaggccgatatcgaaatgccctttgatcccagcaaagtggtggcttctggccccgggctggaacatggaaaggttggggaagccgggctgctgagcgtggactgtagcgaggctggccccggggcgctgggcttagaggccgtctcagactctggaaccaaagcagaggtctcaatccaaaataataaagacgggacttacgcagtgacctacgtacctctgacagccggaatgtatacattgactatgaaatacggcggggaacttgtaccccacttccccgctcgcgttaaggtcgagccagcggtcgacacctccagaatcaaagtatttggccccggcattgagggaaaagatgttttccgagaagcaacaacagatttcaccgtcgactcgcggcctctaacccaggtgggtggagaccacataaaagcccatattgccaatccctccggcgcttccaccgagtgctttgtcacggacaatgcagatgggacgtatcaggttgaatacaccccttttgagaagggtcttcatgtggttgaggtgacctatgacgatgtgcccatcccaaacagtccatttaaagtggcagtcactgagggatgtcagccatcacgtgtgcaggcccagggccctggcctgaaagaggcctttaccaacaagcctaacgtgttcaccgtggttacgaggggagccgggattggtggcctgggcattaccgtagaaggcccatctgagagcaagattaactgccgggataataaagatgggtcctgttcagcagagtatatcccctttgctccaggcgactacgacgtgaatattacttacggaggcgcccatatcccaggaagccccttcagagttcctgtgaaggatgtcgtagaccccagcaaggtcaagattgcgggccccggcttagggtcaggcgtgagagctagagtgctgcagtctttcaccgttgattcttctaaggcgggtttggcccccctcgaagtcagggtgttggggcccagaggtcttgtggaaccagtcaacgtggtggataacggcgacgggacacataccgttacttatactccatctcaggaagggccatatatggtgtcagtcaagtatgccgatgaggaaatacctcgaagtccattcaaggtgaaggtgctcccaacatacgacgctagcaaagtgacggcatccggacctggtctgtcctcttatggtgtgcccgccagcctgcccgtggatttcgcaattgacgcccgggacgctggggaaggactgttggccgtccagatcacggatcaggagggtaaacctaaaagggccatagtgcacgataataaagatggcacatatgctgtcacgtacattcctgacaaaacaggcaggtatatgataggcgtgacatatggcggagacgatatcccactttccccataccgcatccgggcaacacaaaccggggatgcatcaaagtgcctcgctaccgggcctggaattgcatctacggtcaagaccggggaggaggtgggtttcgtggtggacgccaagactgcgggcaagggtaaggtgacctgcactgttctcacacctgatggcaccgaggcagaagctgacgtgattgagaatgaagacggcacttacgatattttctatactgccgcaaagcccggcacctatgtgatttacgttagattcggcggagtggacatcccaaattctccattcacggtaatggtcactgaggaagcctacgtccctgtttcagatatgaacggcttgggattcaaacccttcgatctcgttattcccttcgccgtgagaaaaggtgaaattacaggggaggtacatatgccctcaggcaagacagccacgccagaaattgtggacaacaaagatgggaccgtcactgttcggtatgcacctaccgaggttgggctccatgaaatgcatatcaagtacatgggatcacacatccctgagtccccgctgcagttctacgtgaactatccgaactccgggtccgtcagtgcttatggtcccggccttgtgtatggggtggctaataagaccgcgacctttactatcgtgactgaagacgccggtgaaggtggcttggatctggccatcgagggcccttcaaaagccgagatctcatgtattgacaataaggacggcacctgtaccgtcacgtatctccccaccttgccaggggactactctattctggtaaaatacaacgacaaacacattcccggcagcccctttactgcgaagataacagatgacagcaggcgttgctcacaggtgaagctggggagtgccgctgatttcttgttggacatctccgagacagatctgtcttcactgaccgcaagtattaaagcaccgtctggtcgggatgagccctgccttctcaagcgcctgccgaacaaccatatcggtatctccttcattccacgggaagtcggggagcatctcgtttctataaaaaaaaacggaaaccacgtcgccaattctccagtgagcattatggttgttcagtctgaaataggcgatgcccggcgggccaaagtgtacgggcggggcctgagtgaaggcagaaccttcgagatgtccgacttcatagtggatactagggacgctggatacgggggcatttctctcgctgttgaaggtcctagtaaagtggacatccagactgaggatcttgaagatggcacctgcaaggtgtcttacttccctacggtccctggagtttacattgtgtctaccaagttcgccgacgaacacgtaccaggcagcccattcaccgtgaagatttcaggagagggtcgggttaaggaaagcataacccgcacatcacgtgctcccagcgtggcgactgtggggagcatctgtgacctgaacttgaaaataccagagataaattccagcgacatgagcgctcatgttacaagcccctcaggccgggtaactgaagccgagatcgtgcccatgggtaagaacagtcactgtgtgcggttcgtgccccaggaaatgggggtacacacggtaagcgtaaagtatcggggacagcacgtgactgggtctcccttccagttcaccgtcgggcctcttggcgaagggggcgcccataaagtgcgggctggagggccagggcttgagcgcggagaggccggggtacctgctgagttcagcatctggacgcgggaggccggcgccggcggacttagcatcgccgtggaaggtccttccaaggccgagattaccttcgatgaccataaaaatgggagttgcggagttagctatatcgcccaggagccgggaaattatgaggtcagcatcaagtttaatgatgaacatattcccgaatccccatacttggtccctgttatcgccccctctgacgatgcccgacgattgacagtaatgagcctgcaggaatccggactgaaggtaaaccagccggccagcttcgccatccggctgaatggcgccaaaggaaaaatcgatgcgaaggtgcactcaccctccggcgctgtggaagaatgtcacgtctctgagctggaaccagacaaatacgcagtgagattcatcccacatgagaacggcgtgcatacaatcgatgtaaaattcaatggatcccatgtcgtgggctcccctttcaaggtgagggtgggagagccaggccaggccggaaatcctgctttagtgtctgcttacggcacggggctggaaggtggcaccaccggaatccaatccgaattttttatcaacacaacccgcgcaggccctggcaccctcagcgtgaccattgagggcccaagcaaggtcaaaatggattgccaagaaactccggagggctataaagttatgtatactcccatggctcccggaaactacctcatatcggtcaagtacgggggccccaaccatatcgtggggtcaccattcaaggctaaagtaacgggccagcggctcgttagcccaggtagtgctaacgagaccagtagcattctggtggagagcgtcacaaggagttccaccgagacttgctatagcgcaatccccaaggcctccagcgacgcctcaaaggttactagcaaaggcgcagggttgtctaaggctttcgtcggacaaaagtccagctttctggtcgattgttctaaagccggcagtaatatgttgctcattggtgttcatggccccacaactccttgcgaagaagtctccatgaagcacgtcggtaaccaacaatataatgtgacctacgtagtcaaagaacggggagattatgtgctcgcagtgaaatggggtgaggaacacatcccaggcagccctttccacgttacagtgccctag

SEQ ID NO: 117153 - DNA, 7269 bp, synthetic construct
  misc_feature 1..7269: note = Description of Artificial Sequence: Synthetic coding sequence
  source 1..7269: mol_type = other DNA
atgcaagagcacagtactagacgccggtctctcagcctgtgccctgactgggagtcctgggatccgcaaaaacccgtggataatgccagggaagccatgcaacaggcagatgactggttgggagttcctcaggtgattacccctgaagagattattcacccggatgttgatgaacactccgtgatgacatacctctcacagtttcctaaagccaagttgaagcccggcgctcctctgaagcccaagctgaatcccaaaaaggcccgcgcatacggccgcggtattgagcccaccggtaatatggtaaaacagccggccaaattcaccgtagacacaatatctgcagggcaaggagatgtgatggttttcgtggaggacccagagggcaacaaggaggaagctcaggtgacccccgacagcgataagaacaaaacctattccgtggagtatctccccaaggttacaggcttacataaggtgaccgtcctctttgcggggcagcacatctccaagtccccttttgaggtctctgtagacaaagcccagggggacgcctcaaaggtgaccgctaaaggccccggactggaggcggtgggtaatattgccaacaagcccacctactttgacatttacaccgccggagccggcgtgggtgatatcggcgtcgaggtcgaggacccgcagggcaaaaatactgtggagttactggtggaggataagggcaatcaagtctaccgctgtgtgtacaagcccatgcagcccggccctcatgtggttaagatctttttcgcaggggataccattcctaaatcaccctttgtggtgcaggtgggtgaagcttgcaatcccaacgcatgtagggcaagcggtagaggcttgcagcctaagggagtgcggattcgggaaactaccgatttcaaggttgatacaaaggcggcgggatctggggaactaggcgtgactatgaagggaccaaagggattggaggaactcgtaaaacaaaaggacttcctcgacggcgtgtacgctttcgagtactatccatcaactccagggcggtactccattgctatcacttggggcggacaccatatccccaagagcccttttgaagtccaagtgggtccagaggcaggaatgcagaaagtacgggcttggggccctgggctgcatggtggaattgtggggagatccgctgattttgtggttgaaagcattggttctgaggtggggagtctggggttcgctattgaagggccctcccaagccaagatcgagtacaatgaccaaaacgatggaagctgtgatgtaaagtactggccgaaagagcctggtgagtacgctgtgcacattatgtgtgatgatgaagacattaaggattctccatacatggctttcatccatcccgctacaggcggatataatccagaccttgttcgggcatatggtcccgggttggagaagtctggatgtattgtaaacaatctcgcagagttcacagttgatccaaaggacgccgggaaggcccctcttaaaattttcgcccaggacggcgaaggccagagaatagacattcagatgaagaacagaatggatggcacatatgcctgcagctacacacctgtgaaggctataaaacacacaatcgccgttgtctggggcggcgtaaacatcccacacagcccgtaccgggtgaacatcggtcaaggctctcacccgcaaaaagtgaaggtttttgggccaggagttgagaggtcaggactgaaagcaaacgagcctacccacttcaccgtagactgcacagaggccggcgaaggcgatgtgtcagtcggcataaagtgtgatgctcgagtcctttctgaggacgaagaggacgtcgatttcgatattatacacaatgccaatgacacttttactgttaaatacgttccccctgccgccggtagatatacaatcaaggtcctcttcgcctcccaagagatcccagcatcaccgtttcgcgtgaaggtagatcccagccatgatgcatcaaaggtcaaagccgagggcccgggactttctaaagccggcgtggagaatggaaaaccaacacactttaccgtgtatacaaaaggcgcaggtaaggcccccctgaacgtacagtttaatagccccttgcccggtgacgcagtaaaagacttagacataatagataactacgactatagccacacagttaagtacacgccaactcagcaggggaacatgcaagttctcgtcacatacgggggcgaccccatcccaaagagcccattcaccgtgggagtggctgctcctctggatctatcaaaaatcaaactgaacggattggaaaatcgggtcgaggtcggtaaagaccaggaatttacggtcgacactcggggcgccggggggcagggcaagttggacgtcactattctaagcccttccaggaaggtggtgccttgtctcgtcactcctgtgactggcagggagaatagcacggccaagtttatcccccgggaggagggactttacgcagtggatgtcacttacgatggccatccagtgccaggcagtccatataccgtagaggcatctttacccccggacccgtccaaagtcaaggctcatggcccaggattggagggaggacttgtcggcaagcccgccgagttcactattgacaccaagggagcaggaacaggcggcctgggcctgactgtggaggggccttgcgaggcgaagatagaatgttcagacaacggtgatggaacatgctcggtctcatacctgcctaccaaaccaggcgagtactttgtgaacatcctgttcgaggaggtgcatatccctgggagcccattcaaggccgacatcgaaatgccatttgatccttcaaaggtagtggcctctgggcccggtctcgaacatgggaaagttggagaggcgggactactaagcgtggactgttctgaagctggcccaggcgccttaggcttggaggcagtttccgactcgggaacaaaggccgaagtgagcattcaaaataacaaagatggaacatacgccgttacatacgtgccacttaccgcaggcatgtacacactgacaatgaagtacggcggcgaactggtgccccactttcctgcccgcgtgaaagtcgaaccagctgtggacactagccgaatcaaagttttcggacctggcatcgagggcaaggatgtttttcgcgaggcgactactgactttactgtggactctcggcctctcacacaggtcggtggcgatcacatcaaagcacatattgcgaaccctagcggagcctccacagagtgcttcgtcactgataatgctgacggcacttatcaggtggaatatacgccatttgaaaaaggactccatgtcgtagaggtcacctacgatgatgtgccaatcccaaactccccctttaaggtcgccgttaccgaagggtgccagccctctcgcgttcaggcccaggggccaggtctgaaggaggcctttacaaataaacccaatgtgttcacggtggtgacccgcggcgccggcataggcggcctggggataacagtagaaggaccatccgagtctaaaatcaattgccgcgataataaggacggatcttgtagcgccgagtacatccccttcgcccctggggattacgatgtgaatataacctatggaggtgctcatattcccggcagcccctttcgtgttcctgtaaaagatgttgtggacccatcaaaagtgaaaatcgccggcccaggcctgggctcaggagtgagggctcgtgttttacagtccttcaccgtcgactcctccaaggctggtctcgcacccttagaagttcgagttctgggacctcgtggactagtggaaccagtcaatgtcgtggataatggagatgggacgcacaccgtgacatacaccccctcacaggaagggccctacatggtgtcagtgaaatatgctgatgaggaaattcctcgaagtccctttaaagttaaagtgctgcccacctatgatgcctctaaggtcaccgcctcgggccctgggctgtcaagctatggggtcccggcgtcactgccggtcgatttcgcaatcgacgcccgggacgcaggggaaggtcttcttgccgtccagatcactgatcaggaaggaaagccaaaacgggcaatcgtgcacgataacaaagatgggacgtatgccgtgacttatattcctgacaagacaggacggtacatgattggggttacatatggaggggacgacatacctctttcgccttaccgtatccgcgccacccagactggggacgcctccaagtgtctggcaactgggccaggtattgcctccacggtgaaaacaggagaggaggttggtttcgttgtggatgctaaaaccgctggcaagggcaaagttacctgcaccgtccttacccctgacggcacagaggcagaagctgatgtgatcgaaaatgaagacggcacatatgatatcttctacactgcggcgaaaccaggtacatacgttatctacgtgcggtttggcggggtggacataccaaattccccattcacggttatggccactgacggagaggtcacggctgtggaagaggccccagttaccgaggaggcatacgttcccgtaagcgatatgaatggcctgggattcaagccttttgacctggttattcccttcgccgtgagaaaaggagaaataactggagaggtgcatatgccaagcggaaagacagcaacacccgagatcgtcgacaataaagatggcactgtgaccgtcagatacgcgccgaccgaagtggggctgcatgaaatgcacataaagtatatgggatcacacatacccgagagccctttgcaattctatgtaaactacccaaattccgggtctgtgagcgcatacggtccaggattggtatacggtgtcgctaataagacagccacgtttacgatagtgaccgaggacgctggggagggcggcctcgacctcgctatcgaggggccaagtaaggctgaaatttcatgcatcgacaataaagatggcacctgcactgttacatatctccccacactgccaggggactactccatcctcgtgaaatacaacgataagcacatccctggatctccctttactgcaaagatcactgatgattcgcgacggtgcagtcaagtgaagctggggtctgccgctgactttctgcttgacatttctgagaccgacctgtcatcattgaccgcaagtataaaagctccttcgggccgcgatgaaccatgcttgctcaaacggctgccaaataatcacatcggaatctcttttattccgagagaggtcggtgagcatttggtgtctatcaagaagaatgggaaccatgtggctaattccccggttagtatcatggtcgtgcagagtgaaatcggagacgccaggcgcgctaaagtctacggcaggggcttatccgaaggcagaaccttcgagatgtcagacttcattgtcgatactcgtgatgcaggctatgggggcatctccttggccgtagaagggccctcaaaagtggacatacagaccgaggatctggaggatggaacatgcaaggtgagctactttcccacagtcccaggcgtgtacatcgtgtcaaccaaatttgccgacgagcacgtcccgggcagcccattcactgtaaaaatttcaggagaaggcagggtaaaggagagcattacacgcactagccgcgccccctctgtggccactgtgggctcaatttgcgatctcaacctgaagattccagaaattaactcttccgatatgtccgcccatgtgacatccccatctgggcgggtaactgaggccgaaatcgttcccatgggtaagaactcacactgcgtccgcttcgtgccccaagaaatgggtgtgcacacggtttctgttaaatataggggacagcacgtgacaggatctccctttcagtttactgtcgggcctctgggtgagggaggcgcacataaggtcagagccgggggccctgggctggaaagaggagaggccggcgttccggccgagttttcgatctggactagagaagctggtgcaggtggcctttcaatcgcagtggagggaccgtctaaagccgaaatcacatttgatgaccacaagaacggaagctgtggagtgagctacattgcccaggaacctggcaactacgaagtgtctattaagtttaatgatgaacacattcccgagtccccctatctcgtgcctgtgatcgcaccctcagatgacgcaaggaggctgaccgtgatgtctttgcaagagtctggtctgaaggtaaaccagccagccagcttcgctatccgcttaaacggtgccaaaggaaagatagatgcgaaggttcactccccaagcggagctgttgaagaatgccatgtctccgagctggaacccgataaatatgccgtccgatttatcccacacgaaaacggtgtccacaccatagacgtgaaattcaacggatcgcatgtagtgggttctccattcaaggtgagggtgggagaaccagggcaggcagggaatccagccctggtatccgcctatggcactggcctggaggggggaaccacagggatccaatccgagttctttataaacaccactcgcgccgggccaggcacgctgtcggtcacaatcgagggccctagcaaagtgaagatggattgtcaagaaactccggaagggtataaggttatgtatacacctatggcaccaggaaattacctcatctcagtgaagtatggtggccccaaccacattgtcggttcaccttttaaagctaaagtgacagggcaaagactggtctctcccggaagcgccaatgaaacgtcaagtattttagtcgagtcagtgacacggagctctaccgaaacctgttacagcgccatcccgaaggcctcttctgacgctagtaaggtcactagcaaaggagccggactgtccaaagctttcgtcggtcagaagagctcctttctcgtggattgtagtaaggccggtagtaacatgttgctgatcggtgtgcacggccccacgaccccctgcgaggaggtttcgatgaagcacgttggtaatcagcagtataatgtcacctacgttgttaaagagcgcggagattacgtcctggccgtcaagtggggggaggagcacatcccagggtcccctttccacgttacggttccctag

SEQ ID NO: 117154 - DNA, 7776 bp, synthetic construct
  misc_feature 1..7776: note = Description of Artificial Sequence: Synthetic coding sequence
  source 1..7776: mol_type = other DNA
atgcccgtcacagaaaaagacttggccgaagacgccccttggaagaagattcagcagaatacctttacgaggtggtgcaatgaacacttgaaatgtgtcaacaaaagaatcgggaatctgcaaacagatctgagcgatggcctcaggctgatcgccctccttgaagtgctcagccaaaagcgcatgtacaggaaatatcaccaacggccgaccttccggcagatgcagctggaaaatgtgtcagtagccttggagttcctcgatcgggaaagcatcaagctcgtctcaatagactccaaggcgattgtggacggtaacctgaagctcattctcgggctggtgtggacgttgattttgcactactccatctcaatgccggtctgggaggatgagggggatgatgacgcaaagaagcagaccccaaaacagagactgctcggatggatccaaaataagatcccctatttgcccatcacaaatttcaaccagaattggcaagacggtaaggccttgggggcactggtcgatagctgcgctccaggcctgtgtccagattgggaatcatgggacccacagaagccggtggacaacgccagagaggctatgcaacaagctgacgactggctcggcgtcccgcaggtcatcactcccgaagaaattatccacccagacgttgatgagcactccgtgatgacttacctgtcacagtttccaaaggcaaagctgaagccaggcgcccctctcaaacctaagctaaatcctaaaaaagctcgtgcttacggacgaggcatcgagcccaccgggaacatggttaaacagcccgccaaattcacggtggacaccatctccgctggacaaggcgatgtcatggtctttgttgaagatcctgaaggcaataaagaagaggctcaggtgacacccgacagcgataaaaataagacctacagtgtggagtatctgccgaaggtcaccggcctgcataaagttactgttcttttcgctggccaacatattagtaaatctcccttcgaggtcagtgttgacaaagcacagggggacgcaagcaaggtgacggcaaagggtccaggcctcgaagccgttggcaacatagccaataaacccacttatttcgatatctacactgcaggagctggcgtgggagatattggcgtggaggtggaagaccctcaggggaagaataccgttgagctgctggtagaagacaaaggcaaccaagtctataggtgcgtctataaaccaatgcaaccaggaccgcacgtggtcaagatcttctttgctggagatacaatcccaaagagcccctttgtagtgcaggtgggggaggcctgcaacccaaacgcgtgcagggctagcggacggggcctgcagcctaagggagttcgaattcgggagacaacagacttcaaggtggatactaaagcagccggctctggagagttaggtgtgacaatgaaaggccctaaaggcttagaagagctggtaaagcaaaaagacttcctggacggagtctatgccttcgaatattaccccagtacccccgggaggtacagcatcgctattacctggggaggtcatcacatcccaaagagtcccttcgaagtgcaggttggacctgaggcgggaatgcagaaggtacgggcttggggtccagggcttcatggtggtatcgtcgggcgcagcgcagattttgtcgtggagagcattggctccgaggttggctccctggggtttgctattgagggcccttcacaggctaaaattgagtataatgaccagaacgatggcagttgtgacgtcaagtattggccgaaagagcccggtgagtatgcggtacatatcatgtgcgacgatgaagatattaaggatagcccctacatggcattcatccaccccgctacgggcggttataaccctgacttagtgagagcctatggaccaggtttagagaaaagtggttgcatagtgaacaacttagccgaatttaccgttgaccctaaggatgctggcaaggcccccctgaaaatcttcgctcaggatggagaaggtcagcggatcgacatacagatgaaaaatcgtatggacggcacctatgcgtgcagctatacacctgtcaaggccattaagcatactatcgcagtggtttggggcggggtgaacatccctcactcaccctaccgggtgaatatcggccagggaagtcacccacaaaaagttaaagtattcgggcctggcgtggaaaggtctggactcaaagccaacgaacccacacacttcaccgtagactgtaccgaggccggcgaaggagatgtaagcgtcggtataaagtgtgatgcgagagtcctgtccgaggacgaagaggatgtcgactttgacattatccacaatgcaaatgataccttcaccgttaaatacgtgccccccgccgcgggccggtataccattaaagtcctattcgcgagccaggagattcctgcctccccattccgagtgaaggtggatccatcccatgatgcctcaaaggttaaagcagaagggcccgggctgtccaaggcaggggtcgagaacggaaaacccacccatttcacagtgtacaccaagggtgctgggaaggcacctctgaacgttcagtttaactcccctttgcccggtgatgccgtaaaggatctggacatcattgacaattatgactactcccacactgtgaagtacaccccaacgcagcaaggaaacatgcaggttctcgtaacgtacggaggcgaccctattcctaaatctccttttacggtgggcgtggcagccccgctagatctttcaaagatcaagctcaacggcctagagaacagagttgaagtcggaaaagaccaggaattcacagtggatacaagaggcgcaggtggtcaggggaagctggatgtgaccattctgagcccatcacgcaaagtcgtaccgtgcttggtgacacccgttacagggagggagaactcaacggcaaaattcattcctcgcgaagaaggcctctatgccgtggacgtcacatatgacggacaccctgtgcctggatccccatatacggtggaggcctcactccctcccgacccatcaaaagtaaaggcacatgggccagggctggagggcgggctggtcgggaagcccgctgagttcaccatagacaccaaaggggccggaactggagggctcggcctcacagttgagggcccatgtgaggccaaaatcgaatgttctgataacggagatggtacctgttcagtcagctatctaccaacaaaaccaggggagtactttgtaaacattctattcgaagaggtgcatatcccaggttctcccttcaaagcagacatagaaatgccttttgatccttccaaagtcgtggctagtggtccagggttagagcacggtaaagtcggagaggcgggattgctgagcgtggactgctcagaggcgggacctggcgccctgggccttgaggccgtatctgactccggcacgaaagccgaagtgtccatccagaacaacaaagacggaacttacgcagttacctacgtgcctctgactgctggtatgtacacgctcactatgaagtacggaggcgagcttgtccctcatttcccagcacgggtcaaagtcgagccagctgtcgacaccagccgcattaaagtgttcggaccagggatcgagggcaaggatgtttttcgcgaggcgacgacggactttaccgtggattcccgcccactcactcaggtaggaggcgaccacattaaagctcacatcgcaaatccctcaggggcctctacagagtgtttcgtgaccgataacgccgacggtacctaccaggttgagtacacaccattcgaaaagggcctgcatgtggtagaggtgacttatgatgatgtacccatccctaacagtcccttcaaagtcgcagttactgaaggctgccagccttccagggtccaggctcagggccccggactgaaggaggccttcaccaacaaaccaaatgtgttcactgttgtgacacggggcgcaggaataggcggcttgggcatcactgtcgagggcccttccgagagcaagattaactgccgagacaataaagatggaagctgctctgctgaatacataccctttgctcctggggactatgatgtgaacatcacctacggcggtgctcatattccgggaagtccatttagagttccagtgaaggacgttgttgacccttctaaggtgaaaattgctggcccaggattgggaagcggagtgcgcgccagggttctgcagagtttcacagtggacagctccaaggctggcttagcacccctggaggtgcgtgtccttgggccaagggggctggttgagcccgttaatgtcgtggacaacggggacggcacccatacagttacctataccccctctcaggaaggcccgtacatggtgagcgtgaaatatgcagacgaggagatcccacgatctcctttcaaggtaaaggtgttgcccacttatgacgcttctaaggtcactgccagcgggccagggttgtcctcgtacggggtaccagcgagcctgcctgtggactttgctatcgacgccagggatgccggggaggggcttctcgcagtacaaatcacagatcaggaagggaaacccaaaagagctattgtacacgacaataaagatgggacatacgcggtcacgtacatcccggacaaaaccggaaggtacatgataggagtaacttatggcggagacgatattcctctgagcccttaccgcattagagccacccaaaccggggacgcatccaagtgtctcgccacagggccaggcatagcgtccaccgtaaagactggcgaggaggtgggcttcgtggtagacgctaaaaccgccggaaagggaaaagttacctgtacagtcctcacacccgatgggacggaggccgaagcagatgtaatcgaaaacgaagatggcacctatgacatcttctatacagctgcaaagcctgggacatacgtaatctacgtgaggttcggcggtgtagatattccaaattctccttttacggtcatggccacggatggggaagtgacggccgttgaagaagcccctgtaaccgaggaagcttatgtccctgtcagcgatatgaatggtcttggattcaagccctttgacctggtgattcctttcgccgtgaggaaaggggaaataaccggtgaggttcatatgccatccgggaagactgctacgcctgagatcgtcgataataaggatggcaccgtgacagttagatacgcgcccaccgaagtcggtcttcacgagatgcacattaagtacatgggctctcacattcccgaatctccactccagttttatgtgaactacccaaacagtgggagcgtaagtgcctacggcccaggcctcgtgtatggcgttgctaacaagacggcgacttttaccatcgtcactgaggacgctggagaagggggtctggatctggccatcgagggcccaagcaaggccgaaatcagctgcattgacaacaaagatggaacttgtacagtgacgtacctccccacgctcccaggtgactactcaatcctggttaagtataacgacaagcacattcccggatcccccttcactgcaaaaattacagatgatagtcgccggtgtagtcaggtaaaactcggatcggccgcagactttctgttagatatctcggaaactgacctgtctagtctgaccgccagcatcaaagccccaagcgggcgggatgaaccttgcctgctgaaaaggcttccaaataaccatataggaatctcatttatcccccgcgaggtgggtgaacatctcgtaagcataaagaaaaatggaaaccatgtcgcaaatagcccagtgtcaattatggtcgtgcagagtgaaattggcgatgctaggcgggctaaagtgtacggacgagggctttcagagggaaggacatttgagatgtccgatttcatcgtcgacaccagagatgcaggttatgggggcatctctctggccgttgagggaccaagtaaggtggacatacagactgaggacctggaagacggaacctgtaaggtgagctacttccccacagttcctggcgtgtatatcgtgtcaaccaagtttgccgatgaacacgtgcccgggtccccttttacagtgaagatttcaggagaggggcgagtgaaagagtcaattacacgcaccagtcgggctccgtcagtggccaccgtgggatccatttgcgacctgaatctaaaaatccccgaaattaactcctccgacatgtccgctcacgtgacttcccctagtgggcgagtgactgaggccgagatcgttccgatgggcaagaacagccattgcgtgcgctttgtgcctcaagagatgggtgttcacaccgtatcagtgaagtatcgcggtcagcacgtgaccgggagcccatttcaatttactgtagggccactaggcgaaggcggcgcacataaggtccgggctggcgggcctggccttgagagaggtgaagctggagtgccagctgagttctctatttggacacgcgaggctggcgccgggggtttgagtattgctgtggaggggccctccaaggcggaaatcaccttcgacgatcacaagaatggatcttgtggcgtgtcttacatcgcccaagagcccggtaactacgaagtgagcatcaagttcaacgacgaacatatccccgagtctccttaccttgtgcctgtgatcgcgccgtcggacgatgccaggcgtcttactgtcatgtcgctccaggaatccgggctgaaggtcaaccagccagcctcttttgcgataagacttaacggggccaaaggcaagatcgacgccaaggtgcactcgccaagtggagccgttgaggagtgtcacgtttccgaacttgaaccagacaagtacgccgtacggtttatcccgcacgaaaacggtgtgcatacaattgacgtgaaattcaatggctcgcacgtggtggggagccccttcaaagtgcgggtgggagaaccggggcaggctgggaaccctgctctggtcagcgcgtacggaaccggcttagagggcggcacaactggtatccagagtgagttctttattaataccactcgagccgggccaggtaccctgtcagtcactatagaagggccctctaaagtcaagatggattgtcaggaaacccccgagggctataaagttatgtacacccctatggctcccggaaattatctcatctctgtgaagtacgggggtccgaaccacattgtgggatcgccatttaaggctaaggtcacgggccagcggctcgtgagcccagggagcgcaaatgaaacctcatcgatcctggtagaaagcgtgacgcgcagctcgacagagacttgctactccgccatccccaaagccagctctgacgccagcaaggtgacatccaaaggcgctggcctgagtaaagcatttgtgggccagaagtctagctttcttgtggattgcagtaaggcgggatcaaatatgctcctgatcggagtccatggccctaccactccttgcgaagaagtatcgatgaaacacgtgggcaatcagcagtacaatgtaacgtatgtggtcaaggagcgtggagactatgtcctggccgtgaagtggggagaagagcatattcccggttcaccgttccacgtgaccgtcccctag

SEQ ID NO: 117155 - DNA, 408 bp, synthetic construct
  misc_feature 1..408: note = Description of Artificial Sequence: Synthetic coding sequence
  source 1..408: mol_type = other DNA
tagctggccgttgaggggccttccaaggttgacattcagaccgaggacttggaagatggaacatgtaaagtctcttactttccgactgttccgggcgtgtacatcgtttccactaagttcgccgacgagcacgtccctgaaatcaactcgagcgacatgtccgcacatgtcacatctcccagtggacgcgtaacagaagccgagatcgttcccatgggaaagaactctcactgtgttcgtttcgttcctcaggagatgggcgtgcacaccgtttcagtcaaatacagagggcagcatgtcaccggtagccctttccagttcaccgttggcccactaggtgaaggcggtgctcataaggtgcgagcaggagggcctgggctggagagaggtgaagctggggtcccctag

SEQ ID NO: 117156 - DNA, 7902 bp, synthetic construct
  misc_feature 1..7902: note = Description of Artificial Sequence: Synthetic coding sequence
  source 1..7902: mol_type = other DNA
atgcctgttacggaaaaggacctggccgaggacgctccctggaagaaaatacagcagaacactttcacccgttggtgcaacgagcacctgaaatgtgtgaataagagaatcggaaatctccagacggatttgtcagacgggctgaggttgatcgccttgttagaggtattgtcacaaaagagaatgtatcgaaaatatcatcagcgcccaaccttccgtcaaatgcagcttgaaaacgtatctgtcgcactagaattcctggaccgcgagagtatcaagctcgtcagcatcgattccaaggccatagtggacgggaacctgaaattgatactggggctggtttggaccctcattctgcattattctattagtatgcccgtgtgggaggatgaaggcgacgacgacgctaagaagcagacgcctaagcagcgactactgggctggattcagaataagataccttacctccccataacgaatttcaatcagaactggcaggatggaaaagccctaggggcactcgttgactcctgtgcccccgggctgtgccccgattgggagagttgggatccacagaaacctgttgataatgccagagaggctatgcagcaggccgatgattggctgggagtgccacaagtaataaccccagaggagataatccatccagacgtggatgaacacagtgtcatgacttacctctcacagttcccaaaagctaagctcaagccgggcgctccactgaaaccgaaactcaatcctaaaaaggcaagagcatatgggcggggtatcgaaccaactggaaacatggtgaagcagcctgccaaattcacagtggatactatttcggccggccagggagatgtgatggtcttcgttgaggaccccgaaggcaacaaggaggaggcccaggttacacctgatagcgacaagaacaagacgtattccgttgagtacttgccgaaagtaactggcctgcataaagtgactgtgctatttgcaggacagcatatcagcaagtccccctttgaggtgtcagtcgataaggctcagggtgacgccagcaaggtgactgccaaaggcccggggctcgaggcagtagggaacattgccaataagcctacctacttcgatatttatactgctggagccggggttggggacatcggggtagaggtcgaagacccgcagggcaaaaacacagttgaacttttggtcgaggataaaggcaatcaggtttaccggtgtgtttataagccaatgcagccaggccctcacgtggtgaagatcttcttcgctggtgacacaatacccaagtctcccttcgtagtgcaagtgggtgaggcctgcaatcctaatgcatgtcgcgcatcagggagaggactccagcccaaaggagttcgtatacgcgaaaccacggactttaaggtggacaccaaggctgcaggatctggcgagcttggtgttacaatgaaaggacccaagggcttagaagaacttgtgaaacagaaggatttcctagacggagtctatgcctttgagtactatccatcaacccccggcagatatagcattgcaattacttggggtggccatcatatccctaagtcccctttcgaggttcaggtcggcccggaggctggcatgcagaaggtgcgagcatgggggccagggctgcacggcggaattgtggggcgctccgctgacttcgtggtggaaagcatcggcagcgaggtgggctccctcggatttgcaatcgagggtccctcgcaagctaagatcgagtataatgatcagaatgacgggtcctgcgacgttaaatattggccaaaggagccgggcgagtacgcagttcatataatgtgcgatgatgaggacatcaaggattcaccatatatggccttcatccatcctgctactggaggctacaatcccgatctggtacgagcttatggacctgggttagaaaagtcaggctgtattgttaacaatctggcggagtttactgtcgaccctaaggatgctggcaaagcgcccctgaaaatttttgcccaagatggcgaaggccagcgaatcgacattcagatgaagaataggatggatggaacatacgcgtgtagctataccccagtaaaggctattaaacatactatcgctgtggtgtgggggggagtgaacataccccactctccatacagagtaaacattggtcaggggagtcatccccagaaggtgaaagtgttcggccctggcgtggagaggtccgggttgaaggcaaacgaaccaacccattttactgttgactgcaccgaggccggtgaaggcgacgtgagcgtgggaatcaaatgcgacgctcgcgtgttgagtgaggatgaggaggatgtggatttcgacatcatccataatgccaacgacacgtttactgtgaaatatgtgccccccgccgccggtcggtacacaatcaaagttctttttgcttcacaggagatcccagcgtcccctttccgcgtgaaagttgacccaagccacgatgcctcgaaagtgaaagcagagggccccggactgtccaaggccggggtggagaacggcaagccaactcatttcacggtatatacaaaaggtgccgggaaagcccccttgaatgtgcaatttaattcgcctcttcctggggacgcagtgaaggacttggatataatcgacaattacgactactcccacacagttaagtacactccaacacagcagggcaatatgcaggttttggtgacatatggcggagacccaattccaaagagcccgtttaccgtaggcgttgctgcacccctggacctttccaaaattaagttgaacggattggagaatcgtgttgaggtcggaaaagaccaagagttcacagtggacactcgaggagccggcggccagggcaaattggacgtcactatactctccccgagccggaaggtcgtcccgtgtctcgtgaccccagtgacagggcgggaaaactctaccgccaagttcatacctcgggaggaggggctctacgctgtcgacgtcacctatgacggacaccccgtgcccggttccccttacactgttgaagcaagtctgccacctgatccctcgaaggtgaaggcacacgggccagggctggaggggggtctagtggggaaaccagctgaattcactatcgacactaagggtgccggaacagggggacttggcctgacggtggaagggccatgtgaggctaaaatcgaatgtagcgataatggcgatggaacatgcagtgtctcctacctgccgaccaaacctggcgagtacttcgtgaacatactattcgaagaggtgcacattcccggatccccattcaaagcagacatcgaaatgcccttcgatccaagtaaggtggtcgcctcgggtcctggtttagaacacggaaaagtgggcgaagctggcttgttgtctgtcgactgctccgaggcaggtccaggcgcccttggcctggaggctgtctccgatagtggaactaaggccgaagtctctatacaaaacaacaaggatggaacgtatgccgttacctatgtccctctgaccgctgggatgtacaccctgaccatgaagtatgggggtgagctcgtgccccatttccctgcacgtgtgaaggtcgagccagcagtggacacctccagaatcaaggtgtttgggcccggaatagagggcaaggatgtgtttagagaagcaacaactgatttcaccgtggactccagaccactgactcaggtggggggagatcacattaaggctcacattgctaacccttccggagctagtacggaatgtttcgttacggacaacgccgatggcacttatcaggtggagtacacacccttcgagaaaggtctccatgtggtggaagttacatacgacgacgtccccatcccgaacagtccgtttaaggtggcagtgaccgaaggctgccagccaagtcgagtgcaggcgcagggccccggcctgaaggaagcctttaccaataagcccaacgtgttcacagttgtcacaagaggcgcaggcattggtgggctgggaattaccgtcgaaggtccatctgagtcaaagataaattgtagggataacaaggatggcagctgcagcgcagagtatatacctttcgctccgggcgactacgacgtaaacataacttacggtggtgcccacatccctgggtcaccctttcgagtgccagttaaagatgtggtcgatccctccaaggtgaaaatagctgggccgggactgggtagtggagttcgtgctagagtcctgcaatcctttaccgtggactcaagtaaagccgggttagcacccctcgaggtccgagtactcgggcccagggctgatgacacagattcccagtcctggcgcagcccacttaaagctctgtccgaatttttcaaaggtgatcctaaaggcgacttcaacaagactggtctggtggaacccgttaatgtagtggacaatggtgacggtacacacactgtgacatatacaccatcccaagagggaccttatatggtgtctgtcaagtacgctgacgaagaaatcccgcggtctccttttaaagtcaaggttctgccaacttacgacgcctccaaggtgactgcttccgggccaggactgtcctcgtacggggtcccagcctctttgcctgttgatttcgcaattgatgccagagatgcaggggagggccttcttgctgtgcagataaccgatcaggaggggaagccaaagcgtgctattgtccatgacaataaggacggcacctacgcggtgacctatatccccgacaagacaggccgatatatgataggggtgacatacggcggtgacgacatcccgttgtcaccctatcgcattagggcgacgcagaccggtgacgcatctaagtgtttagccaccggccccggaatcgcgtctaccgtcaagaccggggaagaggttgggttcgtcgtagatgccaagaccgctggcaaaggcaaagtgacgtgtacagttctgacacctgacgggaccgaggcagaagcagatgtgattgagaacgaagacgggacctacgacattttttataccgccgccaagccagggacgtacgtcatttatgtgagattcgggggcgtggacattcctaatagtccattcactgtgatggcgaccgacggggaggttactgccgtggaagaagctcccgtaaatgcctgtccacctggatttcgaccctgggtcacagaggaggcatacgttccagtttcggatatgaatggacttggatttaaaccctttgacttggtaataccctttgcagtgcgaaagggcgaaatcacaggtgaagttcatatgcctagcggcaaaacggccacaccggagattgttgataacaaggacggtacagtgacggtgcgatatgcacctactgaagttgggctgcacgaaatgcacattaagtacatgggttcacacatcccagagagccctctgcagttctacgtgaattaccctaactctgggtccgtgtctgcctatggtccggggttggtgtatggagtcgccaacaagacagccaccttcactattgtaacagaggacgctggagaaggagggctggacttagctatagaaggtcctagcaaggccgagatttcatgcattgacaataaggatggcacctgtaccgtcacctaccttcccaccctgcccggcgattattccattctggtcaagtacaacgataagcacatccctggatccccattcacagccaagataaccgacgactctagacgatgctcccaggtgaaactcggtagcgcagctgacttcttactggatatctcagaaacagatctgagttctctaacagcctccattaaggctccatccggccgcgatgagccttgtttgctgaaacggctgcccaataaccatatcggcatcagctttataccccgagaggtgggagagcatctggtaagcataaagaagaacgggaaccacgtagcaaattcccctgtgagtatcatggtggtccagtctgaaataggggatgcaaggcgggccaaagtatatgggcgaggcctgagtgagggccgcacgtttgagatgtccgatttcatcgttgacaccagggacgccggatacggaggaatcagtctcgcagtggaaggcccaagtaaagtcgatatacaaacagaagatctggaggatggtacctgtaaagtgagctatttccctacagtaccaggagtctacatcgtatcaaccaagtttgctgacgaacacgtaccggggagcccattcacagtaaaaatctctggggaaggcagagtgaaggaaagtattactagaacatcccgagcccctagcgtcgctacagtgggcagcatctgtgacctgaacctcaagatcccagagatcaatagctctgacatgagcgcacatgtcacctctccaagcgggagggtcaccgaggccgaaatcgtccccatgggcaaaaatagccattgtgtgcgttttgtcccgcaggaaatgggtgtgcataccgtgtctgtgaaatataggggacagcatgtcacaggctcaccatttcaatttaccgtggggccactgggtgaggggggcgctcacaaggtgcgggccggcggtcccggtcttgaaagaggtgaagccggcgtccctgccgagtttagcatctggacccgggaagcgggggctgggggactatctatcgctgttgagggcccttctaaggctgaaatcaccttcgacgatcacaaaaatggatcctgtggcgtgtcctacatagctcaggaacccgggaattatgaagtttccattaaattcaacgacgagcacattccagaatctccctacctggtccctgtcatcgcgcccagtgacgatgccaggagactaacagtcatgagtctgcaggagagcgggctaaaggtgaatcagccagcttccttcgcaattagactcaatggcgccaagggtaaaatcgacgccaaggtgcatagtccatcaggggcagtcgaagagtgccacgtttcagaattggaacccgacaagtacgccgtacgctttatcccccatgagaacggagttcacaccatcgatgtgaaattcaatggctcccatgtcgtaggcagccccttcaaggtgcgggtgggtgaacccggtcaggcaggaaatcctgccctggtttctgcttatggtacgggcctggagggaggcactaccgggattcagtcagaatttttcatcaataccactagagctgggcccggcacacttagtgtgactattgagggcccgagtaaagtgaagatggactgtcaggaaacacccgaggggtataaagtgatgtatacgcccatggcacctggcaattacctcattagtgtgaagtatggagggcctaaccacatcgtcggttcacctttcaaagccaaggtgacgggccagagactcgtgtctcctgggtccgccaacgaaacctccagtattctggtagaaagcgtgaccaggagcagtacagagacttgttattcagctatccctaaggcttctagtgacgctagcaaggtcacctctaagggtgctggcctgtccaaagcttttgtaggtcagaaatcctcctttctcgttgattgctctaaagcgggcagtaacatgctgctcattggcgtgcatggccccactactccgtgcgaagaagtgtctatgaaacacgtgggaaaccagcagtacaatgtgacctatgttgtaaaggagaggggagattacgtgctggcggtcaagtggggcgaggagcatatccctggatcccctttccacgtcacagttccttag

SEQ ID NO: 117157 - DNA, 8178 bp, synthetic construct
  misc_feature 1..8178: note = Description of Artificial Sequence: Synthetic coding sequence
  source 1..8178: mol_type = other DNA
atgatgaacaattctggatactctgacgccgggctgggcctgggcgatgagaccgacgaaatgcctagtacagagaaggatctggccgaggacgctccctggaagaagatccagcagaataccttcacacgctggtgcaacgaacacctgaaatgtgtcggaaaaagactcactgacctgcagcgggacctgtcagacggcctcagacttatcgccctgctggaagtgctgtcacaaaagcgcatgtataggaaattccacccgagaccaaacttccgccaaatgaagcttgaaaatgtgtctgtggccctcgagtttcttgagagggaacatataaagttggtctccattgactctaaggctatagtggatgggaatctgaagctgattctgggcctcatatggacactcatcctgcactactccataagcatgcctatgtgggaagatgaagacgacgaagacgccaggaagcagacccctaaacagcgtctgctgggctggatccagaacaaagtaccacagctgcctattaccaattttaaccgcgactggcaggatggtaaggcgctcggagcccttgtcgacaactgtgcgccaggcctttgcccagactgggaggcctgggatcccaaccagccagtggagaatgcacgggaggcgatgcagcaagccgacgattggctgggtgtgccccaggtgattgcccctgaagagatcgtggatcccaatgtggatgagcattcagtcatgacatacctcagtcagttccctaaggccaaattgaagcccggagccccggttcgcagcaaacaacttaatccgaagaaagccatcgcctacgggcctggcatagaacctcaaggcaacacagtccttcagcccgcgcacttcacagtgcagactgtcgatgcgggggttggcgaggtgctggtgtacatcgaggaccctgaaggccacaccgaggaggctaaagtggtgcccaataacgataaggatagaacgtacgctgtgagctatgtgcctaaagttgctggattgcataaggtaactgtcctttttgccgggcaaaacatagagagatcacctttcgaagtgaatgttggcatggccctaggcgacgctaataaggttagtgctcggggtcctgggctggagcctgtgggcaacgtcgccaataaacccacatactttgacatttatacagctggcgctgggaccggtgacgttgccgtggtaatcgtggatcctcaaggccgtagagacacggtggaagttgcattagaggacaaaggagacagtacattcaggtgtacatatcgcccagcgatggaaggacctcacaccgttcacgtggcatttgcaggcgcccccatcacccggagccctttccccgtgcacgtcagtgaagcctgcaaccctaacgcgtgtagagcttccggccgaggactccagccaaagggtgttcgagtgaaagaggtagcagacttcaaagttttcaccaaaggtgctggatcgggtgaactgaaggtgactgtgaagggccccaaaggcactgaagagccagtgaaggtcagggaggccggggacggcgtgtttgagtgtgagtattaccccgttgtccctggaaaatatgtggtaaccatcacctggggcggatacgcgattccccgaagtccctttgaagtccaggtttcgcccgaggcaggcgtgcagaaagtgcgggcttggggcccaggcctcgaaactggccaggtggggaaatctgccgatttcgtggttgaggccatcggcaccgaagtaggaaccctgggattttctatagagggcccaagccaggcaaaaattgagtgtgatgacaagggcgacggatcttgtgacgttcgatactggcccaccgaaccaggagagtatgccgtccacgtcatctgtgacgatgaggatattcgagattctccatttatagcacacattttacccgccccacctgattgcttccctgacaaggtgaaagcatttggcccgggtctggaacctacaggctgtatagtagataaaccagcagaatttactattgacgctcgggccgctggtaagggagacctgaagctgtacgcccaggatgcagacgggtgtcccatagacattaaagtaattcccaacggagacggcacttttcgctgctcttatgtgcccacaaaacctattaaacacaccatcatcatctcatggggaggggtgaacgtccctaaatctccattccgggtgaatgtcggggagggcagccacccagagcgtgttaaagtctatggtccgggtgtggagaaaaccggtctgaaagcgaatgaaccgacgtatttcaccgtcgattgcagcgaagcaggccagggggacgtgagtattggtataaaatgcgcccccggtgtcgttggtcccgctgaagccgatattgattttgacattataaaaaacgataatgacacgtttacagtgaaatacaccccacccggtgctggaagatacacaatcatggtactatttgcaaatcaggaaattcctgcaagcccctttcatataaaagtggatccaagtcacgatgcctccaaggtgaaagcagaagggcctggccttaacaggacaggtgtagaggtagggaaacctacccacttcaccgtcttgaccaagggggccggcaaggccaagttagacgtccagttcgctggtaccgcaaaaggtgaggttgtcagggacttcgaaataatcgacaaccacgattactcctatacagtgaaatatactgcagtgcagcaggggaatatggccgtgaccgtgacgtacggtggcgaccctgttcccaagagccccttcgtggtgaacgtggctcccccactggatttaagcaaaatcaaagtgcagggcctgaacagcaaagttgccgttggtcaggagcaggcattttccgtcaacactagaggggccgggggtcagggtcagctggacgtccgaatgacaagtccttctagaagaccgataccttgcaagctggagcctggcggcggcgcggaagctcaggctgtgcgttacatgccgcctgaggagggcccatacaaagtggacatcacctacgacggacaccccgttcccggtagcccatttgccgtcgaaggagtgctgccacccgacccctcgaaggtgtgcgcgtacgggcccgggctgaaaggcgggctggtcggcactccagccccattctccatcgacactaagggggccggcacaggagggctgggtttgacagtcgagggcccttgcgaggcgaagatcgaatgccaagacaatggagacggatcgtgtgcggtgtcctacctccccacggagccgggcgagtacaccattaatatcctgttcgccgaagcacacataccaggtagtccctttaaggcaacaattcgccccgttttcgatccgtccaaggtgagagctagtgggccagggctggagcggggtaaagtgggagaagcggcaaccttcacagtagactgtagtgaggctggggaggccgagttaacaatcgaaatcctgtccgatgccggcgtaaaggccgaagtgcttatccacaacaatgccgatgggacgtaccatatcacctactctcctgctttccccggcacctatacaattacaatcaagtacgggggacatccggtccccaagttcccaactcgcgttcacgtccagccagcagtagatacctcgggtgtgaaggtctcaggtccaggggtggaacctcacggcgtgctaagggaagtgaccactgagtttactgtagacgcccgatctcttaccgctactggcggcaatcacgtgacagccagagtactgaacccttccggcgctaagactgacacctacgtcactgataatggagatgggacatatagggttcaatatacggcctatgaggaaggcgtgcatctggtggaggtgctctatgacgaggtcgccgtacctaagtcaccattccgcgtgggcgtaactgagggatgtgatcccaccagggtgcgcgccttcggccccggcctggaagggggactggtaaacaaagcgaatagattcacagtggaaacacgcggggctggaacaggtggtcttggattagctatcgagggaccctccgaggcgaagatgagctgtaaagataacaaggacggctcttgcactgtcgagtacatccctttcaccccaggtgattacgacgtgaacataaccttcgggggccgccccatacctggctcgccatttcgggtacccgtcaaggatgttgttgacccaggaaaagtgaagtgtagcgggcccggcctcggagctggcgtccgtgctcgggtaccgcagacctttacagtagactgtagccaagcagggcgagcccccctacaggtggcggtcttggggcccaccggcgtcgcagaacctgtggaagtccgcgataacggggatggaactcataccgttcattatacaccggcaaccgacgggccttacacagtggccgtgaagtatgcagaccaggaggtccctagaagtccatttaagattaaagtgctcccggcacacgacgcgtctaaggtgagggccagcggacctggcctgaacgccagcggaatcccagcttccctgcccgttgaatttacgattgatgcgcgggacgccggggagggactgctgaccgtacaaatacttgaccctgagggcaagcctaaaaaagccaatattcgggacaatggagatggtacgtatacagtgagttatttgcctgacatgtccggtcgctacaccataacaattaaatacggaggtgatgagatcccctattctccttttcgcattcacgcccttcctacaggagacgccagtaagtgtcttgtgacagtgtccatcggaggccacgggctgggagcatgcctcgggccacgaattcagatcggacaggaaacagtgatcactgtggatgcgaaggccgccggcgaaggcaaagtgacgtgcactgtaagcactccggacggggcggaactggatgtcgatgtagtggagaatcacgacggtacctttgacatttattacactgcccctgaaccgggaaaatacgtgatcacgattcgatttgggggtgaacacatccctaattcaccatttcatgtgttagcctgcgacccactgccccatgaggaggaaccttctgaggtgccccagttacgacagccgtatgctccgccccggccaggcgcaaggccgacccactgggcaaccgaagagccagtggttcctgtcgaaccaatggaaagtatgctgagaccttttaatctggtgattccgtttgccgttcagaagggcgagctcacgggtgaggttcgcatgccaagcggcaaaacagcccgacctaatattacagacaacaaagacggtaccatcactgtgaggtacgccccgactgaaaagggtctgcaccagatggggataaagtatgacggtaaccacattcctggcagcccactccagttttatgtggacgctattaactctcgccacgtttcagcctatggtcccggactgtctcacggaatggttaataaacccgctacttttactatcgttacaaaggatgccggcgagggcggcctcagcctggcagtggagggcccatcaaaagctgaaatcacctgcaaggacaataaggacgggacttgcaccgtcagttatctgcctactgcaccaggggattactccattattgtgaggttcgacgacaaacatatccctggtagcccattcaccgcaaaaattaccggggacgattctatgcggacaagccagcttaatgtcgggacctccaccgacgtttctctgaagattacagagtctgatttgtcccaactgactgcctcgatccgggctccaagcggcaatgaggaaccctgtctcctaaaaaggctccctaatcgtcacatcggaatcagctttacccccaaggaagtcggcgagcacgtggtgtccgtgcgcaaaagcgggaaacacgtgacaaattctccattcaagatcctggtgggcccctccgagatcggggatgcctcaaaagtccgcgtatgggggaaaggcttatccgagggacacactttccaggtggcggagtttatcgttgatacgcggaacgccggctacggtgggcttggcttaagcattgaaggtcccagtaaggttgacattaactgcgaggacatggaggatggaacttgcaaggtgacatactgtcccacagagccaggtacctacatcatcaacatcaaattcgcagacaagcatgtgccgggatccccatttactgtgaaggttactggagaaggcaggatgaaggagagcattacacgtaggcgacaagctccttccattgcaacaatcggctcaacatgcgacttgaatctgaagatacccggaaattggttccaaatggtcagcgcacaggaacgtttaaccaggacttttacacggtctagccacacctacactaggactgagaggaccgaaatctccaagacacgcggtggtgagacaaagagagaggtgagagtggaagagtctactcaagtcgggggggacccttttcccgcagtgttcggcgatttcttgggtcgtgagcgtcttggtagcttcggatccatcaccagacagcaggagggcgaagctagctcccaggatatgaccgctcaagtgacttcaccttctgggaaagtggaggctgccgaaatcgtggagggagaagactcagcctattcagttaggtttgtaccccaggagatggggcctcataccgtcgccgtgaagtataggggacagcatgtgcctggttctccattccagtttactgtcggtcctctgggtgagggaggagcgcataaagtgagggcgggaggaactggacttgaaagaggggtggctggagtgcccgccgaattctcaatatggactagagaggccggcgctggggggctgagtatcgctgtcgaaggccccagtaaagcagaaattgcattcgaggataggaaggacggcagctgcggagtttcttatgttgtccaggagccaggtgactatgaggtatcgatcaagtttaatgatgagcacatccccgactcgccttttgtagtacctgtggccagcctctcggatgatgcacggcgcttgacggttacaagtcttcaggagacgggcctgaaggtgaatcagccggcttcattcgcagtgcagctgaacggtgccagaggcgtcatagatgcaagagtgcacacgccatcaggggccgtggaggaatgttacgtgtcagaacttgatagcgataaacataccatccgcttcataccccacgagaacggtgttcacagcattgacgtcaaatttaacggggcccatataccaggtagcccattcaagattagagttggtgagcagtcccaggcaggcgatccaggccttgtatctgcttacggccccgggctggaaggaggaacaacaggcgtaagctctgagttcatagtcaacaccctgaacgccggcagcggagccttatctgttacaatagatggccccagtaaggtgcagttggattgtagggaatgtcctgagggacacgtcgttacatacacacccatggcccccggtaactacttaatcgcgatcaaatacggtggccctcagcatattgtcggaagtcctttcaaggcaaaggtgacaggaccccgcctctcaggggggcactcactgcatgaaaccagcacggtacttgtggaaaccgttaccaaatcttccagctctcgcggctcatcttattcttctatccccaagtttagctccgatgcctccaaggtggtaacccgaggacccggtctgtctcaagcatttgttggccagaaaaacagctttaccgtggattgtagcaaggccgggactaatatgatgatggttggcgtgcacgggcccaagacaccctgcgaagaggtgtacgttaagcacatgggaaaccgcgtctacaacgtcacctacaccgtgaaggaaaaaggagattacattctaatcgtgaagtggggggacgaatctgtgcccgggtccccatttaaagtgaaggtgccctag

SEQ ID NO: 117158 - DNA, 8079 bp, synthetic construct
  misc_feature 1..8079: note = Description of Artificial Sequence: Synthetic coding sequence
  source 1..8079: mol_type = other DNA
atgatgaacaattccggttattctgacgcaggactgggactcggtgacgaaactgatgaaatgccaagcacagagaaagatctggccgaggatgcaccctggaagaaaattcagcagaatactttcactaggtggtgcaatgagcatttgaaatgtgtgggaaagcggctgacagacctgcagagagatctcagcgacggactgcgcctgattgccctgctcgaagtactgtctcagaaaaggatgtatcgcaagttccacccacgaccaaatttcagacagatgaaactggaaaatgtcagtgttgccctcgagtttctggagcgggaacatatcaagctggtgagcattgacagtaaggccatcgttgacggcaatctgaagctcatcttgggccttatctggacactcatactccactacagtatttccatgcccatgtgggaagacgaagatgatgaagacgctagaaagcagacccccaagcagagattgctggggtggatccagaacaaagttccgcagctgcctattactaacttcaatagagattggcaggacggtaaagcactgggagcacttgttgacaactgtgcgccgggactgtgtcccgattgggaggcctgggatccaaaccagcctgtggagaacgccagagaagctatgcagcaggcagacgactggcttggggtcccccaagtgattgcccctgaagaaatcgtggacccgaatgtggatgagcacagcgtaatgacctatttaagccagttccccaaggctaagcttaagccaggtgccccggtacggtcaaagcagttgaaccccaaaaaggccattgcgtacgggccaggaatcgaaccacaggggaatacggtcttgcagccagcccatttcaccgtgcagacagtggatgccggcgtgggggaggttctggtgtacatcgaggacccagagggccatactgaagaggctaaagtggtgcctaacaatgataaggataggacctatgccgtgtcatacgtgccgaaggtggccgggcttcataaggtgacagtcttattcgctgggcagaatatagaacgctcacccttcgaagtgaatgtgggcatggcactgggcgatgcaaacaaggtaagcgccagaggcccagggttggaacctgttggaaatgtcgcaaacaagcctacttattttgatatttacactgctggagccggcacgggcgatgttgccgtcgtcattgtggacccccaagggcgccgggatacagtggaggtggcacttgaagacaagggcgatagcacattcaggtgtacttacaggcccgctatggagggaccgcacacagtccacgtcgcctttgcaggcgcacctattacacggagcccttttccggtgcatgtgtccgaggcctgcaatcctaatgcttgcagggctagtggaaggggtttacagccaaaaggtgtcagagtaaaagaggtggctgatttcaaggtgtttacgaagggcgccggctctggcgaattaaaggtgacagtgaaagggcctaaaggcacggaggagcccgtgaaagtgcgagaagctggtgatggcgtgttcgaatgcgaatactatccggtcgtgcccgggaaatacgtcgtaactatcacctggggcgggtacgccatcccacgaagcccctttgaggtgcaggtcagccccgaagcaggggtccagaaagtgcgcgcctggggaccaggcctcgagaccggccaggtgggcaagtcagctgattttgtcgtggaagccattggcactgaggtggggactctgggttttagcatcgagggcccttcacaagctaagatcgagtgtgacgacaagggcgatggctcttgcgatgtccgctattggccaactgagcccggcgaatacgcagttcatgtgatctgcgacgacgaagatatccgggacagcccatttatcgcacatatacttcccgcacctccagactgcttccccgacaaggtaaaagcctttggtccaggtctggaaccgaccggttgcatcgtggacaagccagccgagtttactatcgatgcccgcgccgccggcaaaggggacctgaagctgtacgcccaggacgccgatggctgtcccatcgacatcaaggtcattcctaatggggacggaacatttcggtgttcctatgtacctactaaaccgattaagcacaccattataatcagctggggcggagtaaatgttcccaagtcacccttcagggtgaatgtcggagagggctctcacccagagcgggtgaaggtgtacggcccaggagtggaaaagaccggcctgaaggcgaacgaacccacatattttacggtggactgcagtgaagccggccagggagacgtttcaattggcatcaaatgtgccccgggcgtggtcggacccgcagaggcagatatcgatttcgatatcataaaaaatgacaatgacacatttactgtcaagtatacacctccgggggccggccgatacactataatggtactgtttgccaaccaggaaatccccgctagtcccttccacatcaaagtggatcctagccatgacgccagcaaagtgaaggcagagggtccaggactgaaccggaccggggtcgaggtcggaaaacccacccacttcacagtgctgacgaaaggtgccgggaaggccaagcttgatgtgcagtttgcaggcaccgctaaaggggaggtcgtgcgcgacttcgagatcatcgataaccacgattactcttatacggtcaaatacacggcggtccaacaggggaacatggccgtaactgtgacatacgggggtgacccagtccccaaaagccccttcgtcgttaatgtggctcctccactcgatctgtccaagatcaaggttcagggtctcaactccaaggttgcggtgggacaggagcaggcgtttagcgtaaatactcggggggccggaggccagggtcagttagacgtacgcatgacaagcccctctaggcgaccaatcccatgtaaactggaaccgggaggaggagccgaagcccaggctgtgcgctatatgccccccgaggaaggaccctataaggtcgacatcacatatgacggtcatcccgtgccagggagcccttttgccgtggaaggggtgctgcctcctgatccttccaaggtctgcgcctatggtccaggtttgaagggcggcctagttgggacaccagcacccttctctatcgacaccaagggcgcgggaactggagggcttgggctgactgtcgaaggaccctgtgaggcaaagatcgagtgtcaggataacggcgacgggtcttgtgccgtctcctatcttccaacagaaccgggagagtataccatcaatatcctttttgctgaagctcatatcccgggcagccccttcaaagccacaatccggcctgtgttcgacccttccaaggttcgtgccagtggtcctgggctggagagagggaaggtgggtgaagcagctacatttacagtagactgctctgaagccggagaggcggagcttactattgagatcttgagcgacgccggagttaaagccgaggtccttatacacaataacgctgacggcacctaccacataacctactcccctgcatttccaggcacgtacaccataactatcaagtatggcggccatcccgtgcctaaattcccaacacgcgtacacgtgcagcctgctgttgacacatctggggtaaaggtgtccggtcccggagtggagccacatggggtcttaagagaggtaactacagagtttactgtggacgcgcggagtctgacagccactggtggcaaccacgtgacagcccgggtgctgaacccatctggagctaagactgatacctacgtcaccgataatggggatggcacctatcgggtgcaatacaccgcctacgaagaaggtgtgcacttggtggaagttctgtacgacgaggtcgctgtgcccaagagtccctttcgggttggggtgacggaagggtgcgatccgacaagggtccgagcttttgggcccggcctggaaggaggactggtgaataaagctaacaggttcacagttgaaacccggggggccggtacaggcggtctgggacttgctattgaggggccctccgaggccaaaatgtcctgcaaagataataaggacgggtcgtgcactgtcgagtacatccctttcacacctggagattacgatgttaatataacttttggggggcgtcctatccccggatctcctttccgagtccccgtcaaagacgtggtagatccaggcaaggttaaatgtagtgggccagggctgggcgccggcgtacgcgctagggtgcctcagacctttactgtggattgctctcaggctggccgcgctcccctccaagtggctgtgctgggccctactggcgtagccgaacccgtagaagtccgagacaacggggacggtactcatactgtacattacacaccagccacggatggtccttacacagtggccgtgaaatatgcagaccaggaagtgcccagatctccattcaaaataaaagtgctccccgctcacgatgcctctaaagtgcgggcttccgggcccgggctgaatgcgagcggcattccggccagcctaccagtggaattcaccattgacgctcgagatgcaggcgagggactgttaactgttcagatcttagatcccgaggggaagcccaagaaggccaacattcgggacaacggcgacgggacgtacacggtgtcctatctgcctgacatgagtggcagatacacgattaccatcaaatacggtggagatgaaatcccatacagcccattccgcattcacgcacttccaaccggtgacgctagcaagtgcctggtaacagtgtctatcggcggtcacggcttaggcgcatgccttggaccaagaatccaaatcggtcaggaaaccgtcatcactgttgacgccaaggccgctggcgagggtaaggttacttgcactgtcagcacgcccgacggagctgagctggatgtggatgtggtggaaaatcatgatggcactttcgacatatattacaccgcccctgaacctggaaagtatgtcattacaatcaggtttggcggcgagcatatacccaatagcccattccacgtgttggccaccgaggagccagtggtcccagtggagccaatggaatccatgcttcgcccctttaacctggtgattccattcgcagttcaaaaaggtgaactcaccggggaggtgaggatgcctagtggaaaaaccgccagacctaacattacagacaacaaggacggtaccatcactgtgaggtatgctcctaccgagaagggcttgcatcagatgggaattaagtacgatggcaaccacatacctggttctcctctgcagttttacgtggacgcaatcaactcgagacacgtgagtgcttacggcccgggactgtcacatggcatggtgaacaagcccgccacattcacaatcgtgaccaaggacgccggcgagggcggcctgagcctggccgtggagggcccgagtaaggctgagataacatgcaaagataataaggatggtacctgcaccgtgagttaccttcctaccgcccctggagactatagcattatcgtgagattcgatgacaagcacatacccgggtcaccgtttacagcaaaaatcactggcgacgacagcatgcggacctcccagctgaacgtgggcacatcgactgatgtctctctgaagattaccgagagcgacctcagccagctgactgccagtattagagcgcctagtgggaatgaggagccatgcttactgaagagactacctaaccgtcatatcgggataagcttcacccccaaagaggtaggtgagcatgtggtgtctgttcgcaaaagcggaaagcacgtgactaattcaccattcaaaattctcgtgggaccatcggaaattggggacgcatcgaaagttagagtctggggaaaaggtctcagcgaaggccacacctttcaggtggcagagttcatcgttgatactagaaatgccggctatggagggctggggctgagcatagagggtccgtcaaaagtcgacatcaactgcgaagatatggaggatggaacttgcaaagtgacttattgtcctacagaacccgggacatacattattaatatcaagttcgccgacaagcatgtacccggatccccctttaccgtgaaagtcacaggggagggaagaatgaaggaatctatcacccggagacgccaagctccttccattgcaacaatcgggagcacgtgtgatctgaacttaaagattcccggtaattggtttcaaatggtgagcgcacaagagcggctgacaaggacgttcactcggagcagccatacatacacccgcaccgaacggacagagatttcaaagaccaggggtggggaaactaagagggaagtgagagtagaagaatctacccaagtagggggggatccctttcctgccgtctttggagacttcctcggaagagagcgattggggtcatttgggagtataacacgccaacaggagggagaagcaagctcacaagacatgacggcacaggtcacaagcccatcaggcaaggtggaggcagccgagatagttgagggtgaagatagcgcctactctgtccggttcgtccctcaggagatgggacctcatacggtggccgtgaaataccgcgggcagcacgtgccaggaagtccttttcaatttaccgtgggccccctaggcgagggcggggcccacaaggtgagagccggtggaacgggactggaaagaggggtggcaggcgtgcccgccgaattttctatttggacccgggaagcgggggccggcgggctgtctattgctgtagagggtcctagtaaggctgagattgcgttcgaggacagaaaagacggatcatgcggagtctcgtacgtcgttcaagaaccaggcgactacgaggtctccatcaaattcaacgatgaacatatcccagactctccctttgttgtgcctgttgcatcgctcagtgatgacgccagaagactgacagtgacaagtcttcaggagacaggccttaaagttaatcagccagcttcatttgcagtccagctcaatggggccagaggggttattgatgcacgcgtccatactcctagcggagcagtggaagagtgctacgtgagtgagctggattcagacaaacatactatcaggttcatcccgcacgaaaacggggttcatagcattgacgttaaatttaatggcgctcacattcctggctcaccgttcaagattcgggtgggggaacaaagccaagctggggacccagggctcgtgagtgcgtatggcccgggtctcgagggcggaaccaccggtgtgtcaagcgagttcattgtcaacacactgaacgccggttcaggagcactgtcagtgaccatcgatggaccatccaaagtccagctggattgtcgggaatgccccgagggtcacgtcgtgacctacactccgatggcccccggcaactacctgattgcaatcaaatatgggggtcctcagcatatcgtaggatccccttttaaggctaaggtcaccggtcctcggttgtctggaggtcactcactccatgagacctccacagtgctcgtggaaaccgtgacaaaatcaagtagctctcggggtagctcctactcaagtatcccaaagttcagttctgatgcctcgaaggtggtgactcgaggcccaggactgagtcaagcatttgtgggccagaaaaactctttcaccgtggattgcagcaaggctggtacgaacatgatgatggtgggagtgcatggacctaagacgccgtgtgaagaagtgtacgttaaacatatgggtaacagagtgtacaatgtgacatatactgtgaaggagaagggagactacattcttatagttaaatggggtgatgagtcagtgcctgggtcccccttcaaggtgaaggttccctag

SEQ ID NO: 117159 - DNA, 264 bp, synthetic construct
  misc_feature 1..264: note = Description of Artificial Sequence: Synthetic coding sequence
  source 1..264: mol_type = other DNA
atgcagctcttcgtcagggctcaggagctgcataccttcgaggtgactggacaggagactgttgcccagatcaaggcccatgtggcatctctcgaaggtatagcccccgaggatcaggtggttcttcttgccggagcgcctctagaagacgaagctaccttgggacagtgcggcgttgaagctctaacgactttggaggtcgctggaagaatgctcggcggcggccagaccggagaagaggaggaggaggatagatcaggctag

SEQ ID NO: 117160 - DNA, 228 bp, synthetic construct
  misc_feature 1..228: note = Description of Artificial Sequence: Synthetic coding sequence
  source 1..228: mol_type = other DNA
atgcaactgttcgtacgggcccaggagctgcacaccttcgaagttaccgggcaggaaactgttgcgcagataaaagcgcacgtggcttccctggaaggaatcgctcctgaggatcaggtcgttctgttagccggcgcacccttagaagacgaggccactctgggtcagtgcggggtcgaggcgttgactaccttagaggtcgcaggccgtatgcttggcggtgagtag

SEQ ID NO: 117161 - DNA, 297 bp, synthetic construct
  misc_feature 1..297: note = Description of Artificial Sequence: Synthetic coding sequence
  source 1..297: mol_type = other DNA
atgcagctgttcgtgcgggctcaggaattacacaccttcgaggtaacgggccaggagaccgtcgcccaaataaaggccctgactactctggaggtggccggcagaatgttaggtgggaaggtgcacggttcactggctagagcggggaaagtcagaggacagacaccaaaagtagccaagcaggagaagaagaaaaagaagacaggcagagccaaaagacgaatgcagtataatcggcgctttgtgaatgttgtgcctaccttcggcaagaagaagggtccaaatgccaacagctag

SEQ ID NO: 117162 - DNA, 330 bp, synthetic construct
  misc_feature 1..330: note = Description of Artificial Sequence: Synthetic coding sequence
  source 1..330: mol_type = other DNA
atgcaattatttgtgcgcgctcaggagctgcacacgttcgaggtcacaggtcaggagaccgtcgctcaaattaaggctcatgtggcttcactcgaggggattgcacccgaagaccaggtcgtgctgttggccggcgcacccctcgaagatgaggcaaccttaggccagtgcggagtggaagcactgacaaccttagaggtcgctggcagaatgttgggtggcaaagtccacggcagcttggccagagctggcaaggtccgtggccagacccctaaggtcgccaagcaggagaagaaaaagaagaagacaggccgagctaagaggagatag

SEQ ID NO: 117163 - DNA, 402 bp, synthetic construct
  misc_feature 1..402: note = Description of Artificial Sequence: Synthetic coding sequence
  source 1..402: mol_type = other DNA
atgcagctcttcgtgagggcccaggaacttcatacgttcgaagtgaccggacaggagacagtcgcgcagattaaagcacacgtcgctagcctagagggaattgctcctgaggatcaggttgtcctgttagccggagcacccctggaggatgaagcgactctgggtcagtgtggcgtggaagccctgaccaccttggaagtggctggtaggatgctgggaggtaaggttcatggttcacttgcccgggctggtaaagtgcggggtcagacaccaaaggtcgccaagcaggagaaaaaaaaaaagaaaacgggtcgagccaagaggcgtatgcagtacaacaggagatttgtaaatgtggtgccaacctttgggaagaagaaaggacccaacgctaatagctag

SEQ ID NO: 117164 - DNA, 228 bp, synthetic construct
  misc_feature 1..228: note = Description of Artificial Sequence: Synthetic coding sequence
  source 1..228: mol_type = other DNA
atgcaactcttcgtgcgggcacaggagctgcacacttttgaggtgacagggcaagaaacagttgctcagatcaaagcgcatgttgcaagtcttgagggtattgcacctgaggatcaagttgtcctgcttgctggtgccccgttggaggatgaagccactctgggtcagtgtggcgtcgaagccctcaccaccctggaagtcgctggcagaatgctcgggggggagtag

SEQ ID NO: 117165 - DNA, 402 bp, synthetic construct
  misc_feature 1..402: note = Description of Artificial Sequence: Synthetic coding sequence
  source 1..402: mol_type = other DNA
atgcagctgttcgtgagagcccaggaactgcacactttcgaggttacaggacaagagacagtcgctcagattaaggcacatgttgcctctctggagggaattgcgcctgaagatcaggtggtgctgctggccggggccccgttggaagatgaggctaccttaggccagtgtggggtggaggcgctgaccacactggaagtcgcaggcagaatgttggggggtaaagtacacggatcactggcacgcgcggggaaggtaaggggacagacacccaaagtagctaaacaggagaagaagaaaaaaaaaacaggtagggccaagcgcaggatgcagtataaccgtcgcttcgtgaatgtcgtccccacctttggaaaaaagaaaggaccaaatgcaaactcttag

SEQ ID NO: 117166 - DNA, 402 bp, synthetic construct
  misc_feature 1..402: note = Description of Artificial Sequence: Synthetic coding sequence
  source 1..402: mol_type = other DNA
atgcagctgttcgtgagggctcaagagctgcacacgttcgaggttacaggccaggagacggtggctcagattaaggcccacgtcgcctcattggagggcatagcccctgaggaccaggtagtcctgctggctggggctcccctggaggacgaggccactctgggccagtgcggggtcgaagctctcacgactttggaggttgccggtcgtatgctcggcggcaaggtgcacgggtctttagctcgggctggcaaggtccggggtcagaccccgaaagtagcaaagcaagaaaagaagaagaaaaaaaccggcagagcgaaaaggcgtatgcagtataatcggcgctttgtgaatgtggtgcccacatttggcaagaagaagggcccgaatgccaactcctag

SEQ ID NO: 117167 - DNA, 1563 bp, synthetic construct
  misc_feature 1..1563: note = Description of Artificial Sequence: Synthetic coding sequence
  source 1..1563: mol_type = other DNA
atgtccgcgggcgaagtcgaacggctagtctctgagctcagcggtggcaccgggggagatgaggaagaggagtggttgtacggggacgaaaatgaagtggaacgtcccgaggaggaaaatgcttctgccaacccgccaagtgggatcgaggacgagaccgcggagaacggagttccaaaacctaaggtcactgagaccgaagacgactccgattccgacagcgatgacgacgaagatgacgtgcacgtcactatcggagacattaaaacaggtgctccccagtatgggagttacggtactgctcctgttaacttgaacatcaaaacaggcggccgcgtgtacggcacgaccgggacgaaggtgaaaggcgtggaccttgacgctccgggatctatcaacggtgttccgctgctggaggtcgatctggattccttcgaagacaagccttggagaaagcccggcgcggacctaagcgattactttaattatggcttcaacgaggatacctggaaggcctactgcgaaaaacagaaacggattcgcatgggcttagaggttataccagtcacaagcaccacaaataaaattaccgtccaacagggccgaacaggtaacagcgaaaaagagacagcattgccgagcacaaaggccgagtttacaagcccccccagcctgtttaaaacgggactgccgccatcaaggaggttgccgggcgctattgacgtgatagggcaaacaatcacgattagtcgtgtcgaaggcagacggagggctaatgaaaactccaacattcaggtactctcagagcgcagtgccacagaggttgacaacaatttttccaaaccccctcccttcttcccacctggcgccccccctacgcatctcccacctccacccttcctgcccccacctcccacggtgagcacagcccctcctcttatccccccccctgggttcccacccccgcctggcgccccgcctcctagccttattccgactatcgaaagtggccacagctccgggtatgatagtaggtctgcccgggcgtttccctacggcaatgtggcctttccacacctcccaggctcggctccaagctggccttcgcttgtggacacctccaagcagtgggactactatgccagacgcgaaaaagatagggacagagagcgcgacagggaccgcgaacgagaccgagatcgggacagggaaagagagcgcacaagagaaagagagagagagcgcgatcattctcctacccccagtgtctttaattccgacgaggagaggtataggtaccgggagtatgctgagaggggatacgagaggcacagagccagtcgcgaaaaggaagagcggcacagagagagaagacaccgtgagaaagaagaaacacggcacaaatcaagcaggagtaacagtaggagacgccacgaaagtgaagaaggagattctcaccgcagacacaagcataaaaaatctaaacgctctaaggagggtaaggaggctggcagcgaacctgccccagaacaggagtcaactgaggcaacccctgccgagtag

SEQ ID NO: 117168 - DNA, 1785 bp, synthetic construct
  misc_feature 1..1785: note = Description of Artificial Sequence: Synthetic coding sequence
  source 1..1785: mol_type = other DNA
atgtccgctggcgaggtcgaaagactggttagtgaactctccggcgggaccggtggggacgaagaggaggagtggttatatggagggccatgggatgtgcatgtgcactccgatctcgccaaagatcttgatgagaacgaagtggagcggcccgaagaggagaacgcctccgcgaacccacctagcggtattgaggatgagacggcggaaaatggcgtcccgaaaccgaaggtaacggaaacagaagacgatagtgactctgactccgatgacgacgaggatgacgttcatgtgacaatcggcgacatcaagactggggctcctcaatacggatcttacgggaccgcccctgttaacttgaacataaaaacaggaggacgggtgtacggaaccaccgggactaaggtgaagggggttgacctggacgccccagggtctataaacggtgttcctcttctggaggtcgacttggattcctttgaagataagccctggcgcaagcctggcgcggatttgtccgattacttcaattatggctttaatgaggatacctggaaagcgtattgcgagaaacagaagagaatcagaatgggcttagaagtaattcctgtgacctcgaccaccaataagattacagcagaagactgcaccatggaggtaacgcctggggcagaaatacaggatggaagattcaatctgttcaaggttcagcaaggtagaaccggaaactctgaaaaggagacagccttaccttctactaaagcagaatttacctctccaccgtctctttttaaaaccggcttgccaccgtctagaaacagtacaagcagccagagccaaacttctaccgcttccagaaaggctaattcctcagtcggaaaatggcaggatagatacggaagagccgaaagccccgacttgcggagactgcccggcgctatcgatgtgattgggcagactatcactatttcgagagtggaaggcagaagaagggctaatgaaaacagcaacatacaagtgcttagcgaacgatccgccacggaggttgataataatttttctaagccgccaccatttttccccccaggcgctcctcctacccacctgccgccacccccttttctacccccaccaccaacagtcagtacggccccccccctgatcccaccgcctggtttcccgccgccacccggcgctccacccccgagcctaattccaacaattgagagcggacacagctccggttatgattcgagaagcgctagagccttcccatatggaaatgttgcattccctcatttaccaggaagcgccccgagctggccgtcgctggtcgataccagcaagcagtgggattactacgctagaagagagaaggaccgagatcgcgagcgcgaccgggacagggagcgggatagagatagagatcgtgagagggaaaggaccagggaacgggagagggagcgcgaccacagccctaccccatcagtgttcaattcggacgaagagcgctaccggtatcgcgaatacgccgagcgcggttatgaaaggcaccgtgcgtccagggagaaggaagaacgtcacagagaacggaggcatcgcgaaaaagaggaaacaagacacaagtcctcgcgctccaatagtcgcaggcgccatgaaagcgaagagggggattcccacagaagacacaagcacaaaaagtcaaaacgctcgaaggaaggcaaggaggctggcagtgagcccgcccctgaacaggagtccactgaagctacacctgccgagtag

SEQ ID NO: 117169 - DNA, 1767 bp, synthetic construct
  misc_feature 1..1767: note = Description of Artificial Sequence: Synthetic coding sequence
  source 1..1767: mol_type = other DNA
atgagtgctggtgaagtcgagcgactggttagcgaactgtctggtggcacagggggagacgaagaggaggagtggctatacggggatgagaatgaagtagaacggcccgaggaggagaacgcttccgcgaacccgccatcaggcattgaagatgaaaccgctgagaatggtgtaccaaagccaaaagtgacagaaaccgaagatgacagcgactctgattctgacgacgacgaggatgacgtgcacgtcacaattggcgacatcaaaactggagccccacagtacggctcatacggcacagcacccgtgaaccttaatataaagactggcgggagggtctacggtaccacaggcactaaagtcaagggcgtcgacttggacgctcccgggagtatcaacggagttccgctgcttgaagtggatctcgatagtttcgaagataagccctggcgaaagcctggagcagacttgagcgactacttcaactacggcttcaatgaagacacctggaaggcctactgtgaaaaacagaagcggattaggatggggcttgaagttattccagtgacctcgaccaccaacaagatcacagcagaagattgcaccatggaggttacaccaggtgcagaaattcaggacggcaggttcaatctgtttaaggttcagcagggccgaacgggcaattccgagaaggaaaccgccctgccttcaaccaaggctgaattcactagcccacctagtcttttcaagaccggtctgccgcctagccgcaatagcactagctcacagtctcagacgtccacggcctcccgaaaagctaacagctccgtcggaaagtggcaggacaggtatggcagagccgaatccccagacctgcgacgccttccgggagcaattgatgtgatcgggcaaaccattaccattagcagagtggaaggccgccgcagagccaatgagaattcaaacatccaggttctatcggagcggtccgccaccgaagttgataataatttcagtaaacctccacctttcttcccacctggggcgcccccaacgcacctgccgcctcccccctttctgcctccacctcctacagttagcaccgcaccacctctgattcccccgcccggcattcccatcactgtgccccccccagggttcccaccccccccaggcgccccacctccttcactgatcccaaccatcgaatccgggcactccagtgggtacgacagtcggagcgcccgcgcttttccctacgggaacgttgcattcccccatctgcctggcagcgccccaagctggccgagtctggttgacacctctaagcagtgggactactatgctcgtcgggagaaagatagagaccgcgagcgagatcgcgaccgcgagcgggatagggaccgtgaccgggaaagagagaggacaagggaaagagaaagagagcgcgaccacagtccaactccaagcgtgtttaactctgacgaagaaaggtataggtatcgggagtacgccgagcgggggtacgagcggcaccgggcctctcgcgagaaggaggaaagacacagagagcggagacatcgagagaaagaagagactcgacacaagagcagccggagcaattcacgccggaggcatgagagtgaggagggcgacagtcaccgacgtcacaagcataagaaatctaaacgaagtaaggaaggcaaagaggccggttccgagcctgctcctgaacaggagtctacagaggctaccccagcggaatag

SEQ ID NO: 117170 - DNA, 366 bp, synthetic construct
  misc_feature 1..366: note = Description of Artificial Sequence: Synthetic coding sequence
  source 1..366: mol_type = other DNA
atggtagatatgatggaccttccaagatcaagaatcaacgctggaatgctggcacagttcatcgacaaacctgtgtgcttcgttggacgcctcgagaagattcatcccaccggtaaaatgttcattctgagtgatggggagggtaagaacgggactatcgagctgatggagcctctcgatgaggaaatttctggaatcgtggaggtcgtcggcagggttactgctaaggccaccattctgtgcacctcttatgtgcagtttaaggaggatagtcatccatttgacctgggtctgtataatgaagcagtcaagattatccacgacttcccacagttctaccccctggggatcgttcagcacgattag

SEQ ID NO: 117171 - DNA, 1413 bp, synthetic construct
  misc_feature 1..1413: note = Description of Artificial Sequence: Synthetic coding sequence
  source 1..1413: mol_type = other DNA
atgttcccagccgggcccccttcccattctcttcttcgactccccctcctgcagttactgctgctcgtagttcaggccgtaggaaggggcttgggacgggcttcgccagccggtggacctttagaagacgtcgtcatcgagcggtaccatattccaagggcatgcccccgggaggtgcagatgggggatttcgtacggtatcattacaacggaacattcgaagacggtaagaaattcgattcctcatatgatagaaacacgttggttgccatcgtggtcggcgtgggccggctgattactgggatggatcgcggactgatgggaatgtgtgtcaacgaaagacggcgcctgatagttcccccccacctcgggtacgggtccataggtctagctggtctcatcccgccagatgccaccctatattttgacgttgtgctcttagatgtatggaacaaggaagataccgttcaggtgagtacactattaagaccacctcactgtccccgaatggtgcaggacggggacttcgtgagataccactataatggaactctcttagatggcaccagcttcgataccagttacagtcgcaaccatacatataacacgtatattgggcaaggttatatcattcccggcatggaccaaggccttcagggcgcttgcatgggggagagacgccgtattacaatccctcctcatctcgcatatggtgagaacggcactggagacaagatccccggctctgccgtactcatttttaatgtgcacgtgattgacttccataaccctgcagatgtggtggagattcgtacgctctcgcgaccatctgagacttgcaacgaaacaacaaagctcggggacttcgttcgctaccactataattgctccctgttggacgggacacaactgttcaccagccatgattatggggcccctcaagaggccaccctcggggctaacaaagtcatagagggcctggacactggtctgcagggcatgtgtgtcggggaaagaagacagctgattgtaccacctcatcttgcccacggcgagagcggagcacgaggagtgcctgggagcgccgtcctgctttttgaagtcgaacttgtcagcagggaggacgggctccccactgggtatctgttcgtatggcataaggacccgcccgctaacctgttcgaagatatggacctgaacaaggacggagaagtacctcctgaggagttctccacatttatcaaggcacaggtatctgagggcaagggcagattaatgccaggacaggacccggagaagacaattggggacatgttccaaaaccaagatcgcaatcaggatggtaaaattactgttgatgagctaaaactaaaaagcgacgaagatgaggaacgggtccacgaggaactgtag

SEQ ID NO: 117172 - DNA, 1749 bp, synthetic construct
  misc_feature 1..1749: note = Description of Artificial Sequence: Synthetic coding sequence
  source 1..1749: mol_type = other DNA
atgttcccagctggacctccctcacactccctactgagacttcctcttctccaactgttgctgttagtggtacaggctgtgggcagaggactgggccgggccagccccgcaggcggacctctggaggacgtcgtaatcgaacgctatcatattcctcgcgcctgtccacgcgaggtgcagatgggtgacttcgtgcgatatcactacaacggtacctttgaggatggtaaaaagttcgacagttcatacgataggaataccctggtagccatcgttgtaggggtaggcagattaatcaccgggatggaccggggcctgatgggaatgtgtgtgaacgagcggaggcggctgatcgtgcccccacatctgggttatgggagcatcggcctcgccggcttgataccccctgacgccaccctgtactttgatgttgtgctgttagacgtgtggaacaaggaagataccgtccaggtgtcaaccctgcttcgccctccccattgtccgagaatggtgcaggatggtgacttcgtgcggtaccattacaacggcaccctgctagacggtacctctttcgacacgtcttacagtaaaggaggaacgtacgatacatacgtcggttctggatggctgattaagggaatggaccaagggttgctgggtatgtgtcctggggagcgccggaaaatcattattcccccctttctggcttatggtgagaagggctatggcaccgtaatacctccacaagcatcccttgtattccatgtgctcctgatagacgtccacaatccaaaagacgccgtgcagctggaaacactggagctaccccctgggtgtgtgcggcgggccggggccggcgactttatgcggtaccactataacgggagtctgatggacggtactctttttgacagcagttactctcgcaatcatacgtacaatacgtacattgggcaggggtacatcatccctggtatggaccagggccttcaaggtgcctgcatgggggagaggcgaagaattaccatccctccacatttggcttatggtgagaacgggactggcgataagatccccgggtcagccgtccttatattcaacgtccacgtaatcgactttcacaatcctgccgatgtggtggagatcaggaccctttctaggcctagcgaaacgtgtaatgagactacaaaactgggcgacttcgtccgataccactacaactgctcgcttctggacggcactcagctgttcacaagccatgactacggagcccctcaagaagcaacactcggggccaacaaggttattgagggcttagacacggggttgcaaggaatgtgcgtcggcgagcgtagacaactcatcgtacccccccacttggcacatggtgaaagcggcgcacggggcgtgccgggctctgcagttttgctttttgaagtcgaactcgtgagtcgggaagacggtctgcctaccgggtacttgtttgtgtggcataaggatcctcctgctaacctgtttgaagatatggatctcaacaaggatggggaagtcccaccagaagagttttccacatttatcaaagctcaagtctctgagggaaaaggccgcctgatgcccgggcaagatcctgaaaagaccataggcgacatgttccagaaccaggataggaaccaggacggaaagattaccgtggatgaattgaagttgaagagcgatgaagatgaggagagggtacacgaagaactgtag

SEQ ID NO: 117173 - DNA, 1629 bp, synthetic construct
  misc_feature 1..1629: note = Description of Artificial Sequence: Synthetic coding sequence
  source 1..1629: mol_type = other DNA
atgtttcctgctgggccgccatcccacagccttctgcgcctgcctcttctgcagctattgctgctcgttgtgcaggccgttgggcggggcttagggcgggcttcccccgctggcggtcccctcgaggacgtggtgatcgagagataccatatcccgcgggcatgcccccgtgaagtccagatgggcgattttgtgaggtatcactacaacggaacctttgaagatggtaagaaattcgattcctcttatgaccgcaacacactggtagcaattgtggttggagtcgggaggctaattactgggatggaccggggactcatggggatgtgtgtcaatgaacggcgcagactgattgtccctccccatttgggctatggctctatcggattagctggcctcatccccccagacgctacattgtactttgacgtggtgctattggacgtgtggaacaaggaggacactgtgcaggtctcgacgctcttacggccaccacactgccctaggatggtgcaagatggagatttcgtgcgctatcattataacgggacactacttgatggaacctcattcgacacaagttacagcaagggcgggacgtacgatacttacgtagggtctgggtggctcattaagggcatggatcagggattgctggggatgtgtccaggggaacgtagaaagattatcatcccaccattcctggcttacggggagaaaggatatggaaccgttatcccaccacaggcatcccttgtcttccacgtgcttctgatcgacgtgcataaccccaaagacgccgtgcaactggaaacgctcgagcttcctcctggctgcgtgcgacgggccggggctggagattttatgcgttatcattacaacggttctctgatggacggcactctcttcgattcttcatactcaaggaaccatacgtacaatacctatatcggccaagggtacatcattcccggcatggatcaagggctgcaaggggcatgcatgggtgagaggaggagaataacaattccgcctcatctcgcatacggggaaaatgggacaggtgataaaataccaggtagcgccgtcttgattttcaacgtgcacgtcattgacttccacaacccagcagatgtagtcgaaattaggacactgtcacggcctagcgagacgtgcaacgagaccaccaaactcggagacttcgtgagataccactataattgtagcctgctcgatggtacgcagctgttcacgtctcacgattacggagcaccgcaagaggccacgctgggggctaataaagtcatcgaagggctggacacaggcctgcagggtatgtgcgtcggggaacgcagacagcttatagtgccaccacacttggctcatggggaatcaggcgctcgaggcgtgcctggtagtgctgtgctcctctttgaggtggaactggtctcccgagaagacgggttaccaaccggatatctgttcgtatggcacaaagacccgcccgcgaacctgttcgaagacatggatctgaacaaggacggtgaggtgccacccgaggaattttcaacctttattaaagcccaggtgtccgaggggaagggtccccacgcgtgggcagggccatag

SEQ ID NO: 117174 - DNA, 246 bp, synthetic construct
  misc_feature 1..246: note = Description of Artificial Sequence: Synthetic coding sequence
  source 1..246: mol_type = other DNA
atgggtgatttcgtacgctaccactataacggcacctttgaggacgggaaaaaattcgattcctcttacgaccggaacacattggtggccattgttgttggcgtgggcaggcttattacggggatggacagggggctaatggggatgtgcgtgaatgaaaggagacggcttatcgtccccccacatctgggatatggctctatagggctggcaggactgatcccgcccgatgcgacactctattag

SEQ ID NO: 117175 - DNA, 1161 bp, synthetic construct
  misc_feature 1..1161: note = Description of Artificial Sequence: Synthetic coding sequence
  source 1..1161: mol_type = other DNA
tgaatcgacgtgcacaaccccaaagatgcagtccagctcgagacattggaactccctccaggctgtgtgcgcagggcgggagccggcgactttatgagataccattataatggttccttgatggacgggacccttttcgattcctcttatagcagaaaccatacatataacacttacattggacaaggctatatcatccccggcatggaccagggcctccagggcgcctgcatgggagaaaggcgtagaattactatccccccacaccttgcctacggggaaaacggaacagactctataggctttcttcagggctctgcccccctacgtcctttcagaagcggcgaaggacaacccagtctaggtcgcgaagggggctatggtaagaccgaacccgcgtaccctcaggatcccgcagttttgggggcctcagtttcttctcccgtgaagtgggcaagtcacgcagatccacagggggataaaatcccaggatccgctgtgcttatatttaacgtgcacgtgatcgatttccataacccagctgacgtggtggaaattcgtacgctgagccgaccatcagagacatgcaacgaaaccactaaattgggagactttgtgagatatcattataattgttcacttctagatggcacccaactgttcacgtcacatgattatggcgccccccaggaggctaccctaggtgcaaacaaagtcattgagggactcgacacaggcctccagggaatgtgtgtgggagagcggcggcagctcattgtccctccacatcttgcccacggcgagtcaggggcacggggtgtaccagggtccgctgtcctgctctttgaagtcgagcttgtttctagggaagacggactgcccacaggatatctctttgtgtggcataaggaccccccagcaaatctgttcgaggacatggacttgaataaagatggcgaagtcccccccgaagagttctctacttttattaaggctcaggtgagcgaaggcaagggacggctcatgccaggacaggacccagagaagactataggcgacatgttccagaatcaagatagaaatcaggacggtaagataacagtggatgaactgaagctgaagagtgatgaagacgaagaacgcgttcacgaggagttgtag

SEQ ID NO: 117176 - DNA, 1068 bp, synthetic construct
  misc_feature 1..1068: note = Description of Artificial Sequence: Synthetic coding sequence
  source 1..1068: mol_type = other DNA
atgaggtaccattacaatgggtctctgatggacgggactctgtttgattcatcttacagcagaaatcacacctacaacacatatatcggccaggggtacattatcccaggaatggatcagggcctgcagggcgcctgcatgggagaacggaggcgcattacgatacctccccacctcgcatacggcgagaacggaacggacagtattggctttctgcagggcagcgccccactaagacccttccgctccggggaaggtcagcctagtttagggcgcgagggcggatatgggaagactgagcctgcttatccacaggacccagcggtgttgggcgccagtgtgtcgtcacctgtgaaatgggcatcgcatgccgatccgcagggtgacaagatcccaggatcagcggtgttgattttcaatgtccacgtcattgattttcacaaccccgccgatgtggtggaaatccggacattgtcaaggcccagtgagacttgcaacgaaactacgaaactcggagatttcgtacgttaccattataactgctcactcctggacggcacacagctgttcacatctcatgactacggtgccccacaagaagccactttgggtgctaataaagtgattgaaggactggacaccggtctacaaggaatgtgcgtcggtgagcgaagacagctcatagtccctccccatcttgcacacggggagagcggcgcacgaggggtgcccgggtctgccgtgcttctgttcgaagtggagttggtctctagggaggatggcttacctacaggatatctttttgtgtggcacaaagacccacccgccaatttgttcgaagatatggatctcaacaaagatggcgaggtgccgcccgaggaattttcaactttcatcaaggcccaggtgagcgaggggaagggtcgactcatgccgggccaagatcctgaaaaaacgatcggcgacatgttccagaaccaggataggaaccaggatggcaaaatcactgttgatgagctgaaattaaagagcgatgaggacgaagagagggttcatgaagagctctag

SEQ ID NO: 117177 - DNA, 327 bp, synthetic construct
  misc_feature 1..327: note = Description of Artificial Sequence: Synthetic coding sequence
  source 1..327: mol_type = other DNA
atgggagtggaaatagagaccataagtccaggggacggacgcacattcccaaagaagggccagacttgcgtcgttcactacaccgggatgctgcagaacggaaaaaaatttgactcatctcgagaccggaacaagccctttaaattcagaatcggtaagcaagaagtcattaagggctttgaagagggcgctgcgcaaatgagtcttggccagcgagccaaattaacttgcacccccgatgtcgcatacggggccactggccacccgggtgttatcccccctaacgcaactctcattttcgatgttgaacttcttaacctcgaatag

SEQ ID NO: 117178 - DNA, 243 bp, synthetic construct
  misc_feature 1..243: note = Description of Artificial Sequence: Synthetic coding sequence
  source 1..243: mol_type = other DNA
atgggcgttgagatagaaactatcagccccggcgacggccgcacttttcctaagaagggccaaacatgtgttgtacactacactggcatgttacagaatggcaaaaaatttgattcctcccgcgaccgtaacaagccattcaagttccggatcggcaagcaggaggtcatcaaaggctttgaggagggtgccgcgcagctggggccgctgtcccccttgcctatttgcccacacccctgttag

SEQ ID NO: 117179 - DNA, 429 bp, synthetic construct
  misc_feature 1..429: note = Description of Artificial Sequence: Synthetic coding sequence
  source 1..429: mol_type = other DNA
atgcggctgtcttggtttcgagtgctcactgtactgtccatttgtctgagcgccgtcgccaccgctacaggggcagagggcaaacgtaagctgcagataggggtgaaaaaaagagtggaccattgtcccattaaatctcgaaagggagatgtgctacacatgcactacaccgggaaactggaagatggtacagagttcgatagctccctgccccagaatcaaccttttgtcttttcgttaggaacaggtcaagtcatcaaaggatgggatcagggactactgggaatgtgtgagggtgagaagcggaagctggtgataccatccgagctcggatacggtgaaagaggggcccctcccaaaatcccagggggcgcgactctggtgttcgaagtggaacttctgaaaatcgaaaggaggaccgagctatag

SEQ ID NO: 117180 - DNA, 429 bp, synthetic construct
  misc_feature 1..429: note = Description of Artificial Sequence: Synthetic coding sequence
  source 1..429: mol_type = other DNA
atgcgcctgtcatggttcagggtgctgactgtgttgtctatctgtctgtccgccgtggccaccgctacaggggcagaaggcaagcgcaaactgcagatcggcgtaaagaagagagtggatcattgccctattaaatctcgtaaaggggacgtcctacacatgcactacactggcaaactggaggacggcacagaattcgactcgtctctgccccagaatcaacccttcgtgttttccttgggaacagggcaggtaataaagggttgggatcagggattgctgggtatgtgcgagggtgaaaaacgtaaactggtgatccctagcgaactgggttacggagagaggggggctcctcccaaaattcccggcggggctactctcgtgttcgaggttgagctgttgaagattgaacgacgcaccgagctctag

SEQ ID NO: 117181 - DNA, 429 bp, synthetic construct
  misc_feature 1..429: note = Description of Artificial Sequence: Synthetic coding sequence
  source 1..429: mol_type = other DNA
atgagactcagctggtttagggtgctgacggtgttgtcaatatgtttaagcgctgtggccactgcgacgggcgccgagggcaaacggaagctgcaaatcggtgtaaagaagcgggtagaccattgtccaattaaatcacgcaaaggtgatgtgctccacatgcattataccggtaaacttgaggacggtaccgaatttgactcatctctgccacagaaccaaccctttgtgttcagcctcggtactggacaagtcatcaagggctgggatcagggattgctaggaatgtgtgaaggggaaaagagaaaacttgtgatacctagtgaactgggctatggggagcgaggcgcacctccgaagattcccggaggcgcaacgctggtgttcgaagtcgaactcctcaaaatcgagcggcggacagaattgtag

SEQ ID NO: 117182 - DNA, 309 bp, synthetic construct
  misc_feature 1..309: note = Description of Artificial Sequence: Synthetic coding sequence
  source 1..309: mol_type = other DNA
atgagactttcttggttccgtgttttaaccgtgctgagcatctgcttgtcagctgttgcgaccgccaccggagcagaaggcaagcgcaaacttcagatcggcgttaaaaaacgagttgaccattgtccaatcaaatccagaaagggcgacgtgcttcacatgcattatacaggtaagctagaggatggtaccgagttcgatagctcactgccgcagaaccaaccatttgtattttctttgggtaccggccaggttatcaaggggtgggatcagggattgctagggatgtgcgaaggcgaaaaacgctag

SEQ ID NO: 117183 - DNA, 3144 bp, synthetic construct
  misc_feature 1..3144: note = Description of Artificial Sequence: Synthetic coding sequence
  source 1..3144: mol_type = other DNA
atggcagtcactttggataaggatgcctactaccgtcgagttaagcgactgtatagtaactggaggaagggcgaagacgagtatgccaacgtcgacgcaatcgtagtgtccgtgggcgttgacgaagagatcgtttatgcgaagtctactgctctccaaacctggctgtttggatacgaacttacagataccattatggttttctgtgacgacaaaataatatttatggcctctaaaaaaaaagtggagtttcttaagcagatcgccaacaccaagggaaatgagaacgcgaacggcgcgcctgcgatcaccttgctcatcagggagaagaatgaatctaacaaaagctctttcgacaagatgatagaagctattaaagagtcaaaaaacggtaaaaaaattggggttttttcaaaggacaaatttcctggggaattcatgaagagctggaatgactgtctgaataaagaaggtttcgataaaatcgatataagtgcagtggtggcctacaccatcgccgtaaaagaggatggcgaactcaatctgatgaagaaggctgcctctattacttctgaagtcttcaacaaatttttcaaagagcgagtgatggagattgtcgacgctgacgaaaaagtcagacattctaagttagcagagtctgtagaaaaggctattgaggaaaagaaataccttgctggcgcagaccccagcacagtcgagatgtgttatcctcccatcatacaatctggaggcaattataaccttaagttctccgttgtctccgataaaaatcacatgcattttggtgccatcacttgcgcaatgggaattagattcaaaagttactgttcaaaccttgtgcggactctgatggtggaccccagtcaggaagtccaggagaactataactttttgctccagttgcaggaggagctgttgaaggaattgcgacacggagtgaaaatctgtgacgtgtataacgctgtcatggatgtggttaaaaagcagaagcccgagctgctgaacaaaataactaaaaatctgggattcggcatggggatagagttcagagagggttccctggtgatcaacagcaaaaaccagtacaaactgaaaaagggtatggtgttttctatcaacctgggtttcagtgatctgactaataaagaaggtaagaaacccgaggagaagacatacgcactgttcattggcgatacagtactcgtggatgaagacggccctgctacagtgttgacgtctgttaagaagaaagtgaaaaacgttggcatcttcctcaagaacgaggacgaggaggaagaggaagaggaaaaagacgaggccgaggatctgctcggaaggggtagtcgggcggctttactgacagagcgtacccggaacgaaatgacagccgaggagaaacgtcgagctcaccagaaggaactggcagcgcagttgaatgaagaagcgaagagacgcctgacagagcagaaaggggagcagcagattcagaaagcccggaaatctaacgtgtcttacaaaaaccctagcttgatgcctaaagagccccatattcgcgagatgaaaatctacatcgataaaaagtatgaaactgttatcatgcctgttttcgggatcgctacccccttccacatcgctaccattaaaaacattagcatgtctgtggaaggagactatacctacctgagaatcaatttctactgccctggctccgccttaggcaggaacgagggcaacatattccccaatccagaggctactttcgtcaaagagatcacttaccgcgcttctaacatcaaagcccccggagagcaaactgtgcccgcccttaatttgcagaatgcctttcgcatcatcaaggaagtgcaaaaaaggtataagacccgagaggctgaagagaaagaaaaagagggaattgtcaaacaggattctctcgtcattaacctcaatagaagcaaccctaagctcaaggatttatatatccgtccaaacattgcccagaaacggatgcagggtagcctggaagctcatgtgaacggctttagatttacttccgtcaggggagataaagtcgatatcctttacaacaacatcaaacacgccctcttccaaccttgcgatggagaaatgattatcgtgctgcattttcacctgaagaacgcaatcatgtttggcaaaaaaaggcacaccgatgttcagttctacactgaagtgggtgagattaccactgatctgggcaaacaccagcatatgcacgacagagacgatctatacgcggagcaaatggagagggaaatgcggcacaaattaaagacagctttcaagaatttcattgagaaagtggaggcgctgaccaaagaagaactggaatttgaggtgccctttagggacctgggtttcaacggcgctccatatcgttctacctgcctcttgcaacctacctctagtgcattagtgaacgccactgaatggccaccattcgtagttactttggacgaagtcgagttgatacattttgaacgggtccagttccatttaaaaaactttgacatggtgatcgtatacaaggactatagcaaaaaagtcacaatgattaacgccatccccgtagcgagcctggacccgatcaaagagtggctgaacagctgtgacctgaaatacaccgagggggtgcaatcgttaaactggactaagatcatgaaaaccattgtggatgacccagagggcttttttgagcagggtggatggtcttttctggagccagaaggcgaaggcagcgacgcggaggaaggagattccgagagtgaaatcgaagatgaaacttttaatccatctgaagacgattacgaagaggaagaggaagactcagacgaagactatagcagtgaagccgaagagtcagactatagcaaggaaagtctcggctctgaagaagagtccggtaaggattgggacgagctggaagaagaggcgaggaaagcagatcgagagagtcgatatgaagaggaggaggagcagagtcgaagtatgagtagaaagcgaaaggcttccgtccactcctcgggacggggctcaaaccggggctccagacattcctcagcccccccaaagaagaaaagaaagtag

SEQ ID NO: 117184 - DNA, 675 bp, synthetic construct
  misc_feature 1..675: note = Description of Artificial Sequence: Synthetic coding sequence
  source 1..675: mol_type = other DNA
atggctgcagcagtcccccagagggcttggactgtcgaacagctaaggagcgagcagcttccaaagaaagatataatcaaatttctacaggagcacggcagcgattccttcctggctgagcacaaactgctcggcaatataaaaaacgtcgcaaagactgctaataaggaccacctggtgacagcatataatcatttatttgaaactaagagattcaagggcacagagagtatctcaaaggtctctgaacaggtaaaaaacgtgaaactgaatgaggataagccgaaggagaccaaatcagaagagactctggatgaaggacctccaaagtatacaaaaagtgtcttaaaaaagggtgacaagactaatttcccaaaaaaaggtgacgttgtacactgctggtacacagggaccctgcaagatgggaccgtctttgatacgaacattcaaacctcggctaagaaaaagaagaacgccaaacctcttagttttaaggtgggcgtcggaaaggtgatccgggggtgggatgaagccttacttaccatgagcaagggggagaaggcacggctcgaaatcgaaccggagtgggcatatgggaaaaaaggacagcccgatgcaaaaattcccccaaatgctaagctgacatttgaggtggaactggtggacattgactag

SEQ ID NO: 117185 - DNA, 1374 bp, synthetic construct
  misc_feature 1..1374: note = Description of Artificial Sequence: Synthetic coding sequence
  source 1..1374: mol_type = other DNA
atgacaaccgacgagggtgccaaaaacaacgaagagagccctacagcaaccgtcgcggaacagggggaggatatcacctctaagaaagatcgcggagtcttgaaaatagtcaaacgggttggcaatggcgaagagaccccaatgatcggggacaaggtttatgtgcattacaaaggcaaactgtcgaatggcaagaaatttgatagttcccacgacaggaatgagccgtttgtattcagcctgggcaaggggcaagttataaaggcctgggatattggagtggctaccatgaaaaaaggcgaaatctgccacctgttgtgcaagcctgagtatgcttacgggtcagccggatcccttccaaagatacccagcaatgcaacccttttcttcgaaattgaactgctggacttcaaaggagaagaccttttcgaagatggggggattatcagacgaactaaaagaaaaggcgaagggtactcaaaccctaatgaaggagcgacggttgaaatccacctagaaggccggtgcggaggtcgcatgtttgattgccgcgatgtggctttcaccgtgggcgaaggcgaggatcatgatattccgataggcatcgataaagccctggaaaaaatgcagcgcgaggagcagtgcattctgtacttgggacctagatacgggtttggtgaggccgggaagccgaaattcggtatcgaacccaacgccgaattgatttacgaagtgaccctcaagtccttcgagaaagcgaaggagagctgggagatggacaccaaagagaagcttgagcaggcagccattgtgaaggaaaaagggactgtttatttcaaaggaggaaaatatatgcaggccgtcatccaatacgggaagatagtcagctggttggaaatggagtatggcctgtccgaaaaggaaagcaaggcctctgagtctttcctgttggccgcattcctcaatctcgcgatgtgttacctaaagttgagggagtacacgaaagcagtcgaatgctgcgacaaggcactaggactggatagcgccaacgaaaaaggtttgtatcggagaggcgaagctcaattgttgatgaatgaattcgagagcgccaagggcgattttgaaaaagtcctagaggtcaatccccagaacaaggccgcgagacttcaaatctcaatgtgccagaaaaaagccaaggaacacaatgagcgggaccgtaggatctacgcaaatatgtttaagaaatttgcagagcaggatgctaaggaagaagcgaataaagctatggggaagaagacttccgagggtgttacaaacgaaaaagggactgatagccaagctatggaagaagagaagcccgaaggccacgtgtag

SEQ ID NO: 117186 - DNA, 1374 bp, synthetic construct
  misc_feature 1..1374: note = Description of Artificial Sequence: Synthetic coding sequence
  source 1..1374: mol_type = other DNA
atgacaaccgatgagggtgcgaaaaataatgaagaatcacctacagctaccgtggccgagcagggggaagatatcacgtctaagaaagatcggggggtgctgaaaatcgttaaacgcgtaggaaatggagaagagacccccatgattggggacaaggtgtacgtccactacaagggtaagctgtcaaatggcaaaaagtttgacagttcacacgataggaacgagccgtttgtgttctccctgggcaaagggcaggttattaaagcctgggatattggtgttgctaccatgaagaaaggggaaatttgtcacctgctgtgtaaacccgagtacgcatacggatcggcgggctctctccctaagatcccaagcaacgcgaccctcttcttcgagattgagctgctggatttcaagggagaggacttatttgaagatggtggaatcattaggagaacaaaacgcaaaggtgaaggctacagcaatcctaatgaaggtgccacagtggagattcacctggaggggaggtgcgggggaaggatgttcgactgccgggacgtagccttcactgtcggggagggagaagaccacgatatcccaatcggaattgacaaggccttagaaaaaatgcagcgggaggagcagtgcatactttatctgggacctcgctatggattcggggaagccgggaaacctaagttcggaattgaacctaatgccgagctgatatacgaggtgacactgaaatccttcgaaaaggccaaggagtcttgggagatggacacaaaggaaaagctagaacaggcagccatagtcaaggaaaaagggactgtttattttaaaggcggaaagtacatgcaggcagtcattcagtatggaaaaattgtctcttggttagaaatggagtatggactcagcgaaaaagagagtaaggcgagcgagtctttcttgttagccgcattcctgaacctcgccatgtgttaccttaagctgcgggagtacactaaggccgttgaatgctgtgataaagcgttgggtctggatagcgccaacgagaagggactgtacagacgcggggaggcccagctgctaatgaacgaatttgagagcgccaagggagactttgagaaagtgctggaagtcaatccgcaaaataaagctgcccggctgcagatctcgatgtgtcagaaaaaggccaaggaacacaatgagcgcgatcgcaggatctatgccaatatgttcaaaaagttcgccgagcaggacgcaaaagaggaggcgaataaagccatggggaagaaaacctcagagggagtgacaaacgaaaagggcacagattcccaagccatggaagaggagaagcccgagggacacgtctag

SEQ ID NO: 117187 - DNA, 801 bp, synthetic construct
  misc_feature 1..801: note = Description of Artificial Sequence: Synthetic coding sequence
  source 1..801: mol_type = other DNA
cttcttatgaaggtcccaaggaccatgaagaaggcacctcagccccttctgctcagcagagagaggatcctcccacccaaagacagaggagtgctgaaaatagtaaagcgagtcggcaacggggaagagacccctatgatcggggacaaggtctatgttcactataaagggaagctgtcgaatggcaagaaattcgacagtagtcacgacagaaacgagcctttcgttttctctctcgggaaaggtcaagtaattaaagcgtgggacataggcgtcgctaccatgaagaagggcgaaatctgtcacctcctatgcaagccagaatacgcctacgggagtgcaggtagcttgcccaaaattccctcgaacgccacgctcttttttgaaattgaacttcttgacttcaagggggaagatttgttcgaagatggtggcattatcagaaggacaaagcgtaaaggggagggatacagtaatccaaatgagggagccactgtcgagattcacctggagggcagatgtggcggccgtatgtttgactgtagggatgtggcctttacagtgggtgagggagaagaccacgatattcctatcgggatcgacaaggctctggaaaagatgcaaagagaggagcagtgtatattatatctggggcctcgccctaagaaccctgggaggtggatccccaaaaaaaactggtcccgccttccattaagcaagcgccgcgagccgtatacgtctcgttgcgtcagcccgtatgccatcctgagtattagtaagaatttgtttaaatgctggtag

SEQ ID NO: 117188 - DNA, 1374 bp, synthetic construct
  misc_feature 1..1374: note = Description of Artificial Sequence: Synthetic coding sequence
  source 1..1374: mol_type = other DNA
atgaccactgacgagggcgcgaagaataatgaggaaagcccgactgctactgttgccgaacaaggggaagacatcacctccaagaaggataggggtgtccttaaaatcgtcaaaagggtgggtaacggagaagagacccccatgatcggcgacaaagtttatgtgcattacaagggcaagctctctaatgggaagaaatttgattcaagccatgaccgaaacgagccttttgttttcagcctcggtaagggacaagtcattaaagcatgggatatcggcgtcgctactatgaaaaagggcgagatctgccatttgctctgcaagcctgagtacgcctatggcagcgccggctcattgccaaagattccaagcaatgccacactattttttgaaattgagctgcttgattttaagggggaagacttgtttgaagatggcggtattatccgccggactaaaagaaagggggagggttactcaaatccgaacgagggggcaacagtggagatccatctcgagggaaggtgcggcgggaggatgttcgactgtagggatgtggcttttactgtcggcgaaggcgaggatcacgacattccaattggcatagataaggcactggagaaaatgcagagggaagaacagtgtatcttatacctcggcccgcggtatggttttggcgaagctggcaagcctaaattcggcatcgagccaaacgctgaactaatatatgaagtcacgctgaaaagttttgagaaggccaaggagagttgggagatggacactaaagaaaaactggaacaggccgccatcgttaaagagaaaggcaccgtgtattttaaaggtggaaagtacatgcaagctgtgattcagtatggtaagatcgtctcttggttggagatggaatacgggctgagcgagaaagagagtaaggcgagtgaaagctttttgctcgccgcctttttaaacttggctatgtgttacctgaagttgcgcgaatacaccaaggccgttgaatgctgtgataaggccctggggttggacagtgcgaatgaaaaaggcctgtaccgacgcggggaggcccagcttctcatgaacgagtttgagagcgctaagggcgacttcgagaaggtgctggaagttaatccacagaataaggcagcccgtctgcagattagcatgtgccagaagaaggctaaagagcataacgagagagatagaagaatttatgcgaacatgttcaaaaaattcgccgaacaggacgccaaagaggaagccaataaggctatgggcaagaaaaccagcgagggggttacaaacgagaagggcaccgactctcaggcaatggaggaggaaaagcctgaagggcatgtgtag

SEQ ID NO: 117189 - DNA, 1374 bp, synthetic construct
  misc_feature 1..1374: note = Description of Artificial Sequence: Synthetic coding sequence
  source 1..1374: mol_type = other DNA
atgactactgacgagggagcaaaaaacaatgaggaatccccaacagcgaccgtggcagagcaaggagaagacattactagtaagaaggatcggggggtgctaaagattgttaaaagggttgggaacggcgaggagaccccaatgattggcgacaaggtttacgttcattacaaaggcaagctctctaacggcaagaagttcgacagctcccatgatcggaatgaaccctttgtgttcagtcttggaaaagggcaggtgattaaagcttgggatatcggagtggctactatgaaaaagggcgagatctgccacttactgtgcaagcccgagtacgcgtatgggagtgcgggtagccttcccaagataccatctaacgctacattgtttttcgagatcgagttgctggatttcaagggtgaagacttattcgaggacggcggaatcataagacggacaaagaggaaaggcgagggatattctaaccccaatgagggagccactgtggaaattcatctagaagggcgatgcggcggcaggatgttcgactgccgggacgtcgcgttcaccgtcggtgaaggcgaagaccacgacattcccatcggtatagacaaggctctggagaaaatgcagagggaggaacagtgcattctctatttaggccctcgatatggcttcggcgaggcaggaaagcccaagttcggcatcgaaccaaacgccgaactgatctacgaggttacgctcaagtcatttgaaaaggccaaggagagctgggaaatggacacgaaggaaaagcttgagcaagcagctatcgtgaaggagaaagggaccgtgtactttaaggggggtaagtacatgcaggccgtgatccagtacgggaagatcgtgtcatggctggagatggagtacggcttgagcgaaaaagagtccaaggccagcgagagtttcctcctggctgcatttttgaatcttgcaatgtgttatttgaagttgagagagtatactaaggcagtggagtgctgtgacaaagctcttggtctggatagtgctaatgagaaaggtctgtaccggcgtggtgaggcacagctgcttatgaatgagttcgagagcgccaagggagactttgaaaaggtactcgaagtaaacccccagaataaagccgccagactgcaaatatcaatgtgccagaagaaggcaaaggagcacaacgagagagacagaagaatctatgcgaatatgtttaagaaatttgccgagcaagatgcaaaagaagaggccaacaaggctatgggcaagaagacttctgaaggggtcaccaatgaaaaggggacggactcccaggcaatggaagaagaaaagcccgaaggtcatgtgtag

SEQ ID NO: 117190 - DNA, 837 bp, synthetic construct
  misc_feature 1..837: note = Description of Artificial Sequence: Synthetic coding sequence
  source 1..837: mol_type = other DNA
atgttcgactgtcgggacgtggcttttactgtaggcgagggagaggaccacgatattcctataggcatagacaaggcccttgaaaaaatgcaaagggaagagcaatgtatcctctacttgggccctaggtacggattcggggaggcgggaaagcccaaatttggtattgagccgaacgcagagctgatctacgaggtgacgcttaaatcgtttgagaaggccaaggagagctgggaaatggatacaaaggaaaagttggagcaagccgcaattgtcaaggagaaaggaactgtgtatttcaagggggggaagtatatgcaagccgttatccagtatggaaagatcgtttcttggttagagatggaatacggcctcagtgaaaaggaatccaaggctagtgagtcttttctgcttgcggccttcttgaatctcgccatgtgttacttgaaactccgggaatataccaaggcagtcgagtgctgtgataaagccctgggactggatagcgccaacgagaaaggcctataccggaggggggaggctcagctgctcatgaatgaattcgagagcgctaaaggtgatttcgaaaaggtactggaagtgaatccgcagaacaaggccgcacggctccagatctctatgtgtcagaagaaggccaaagaacataatgagcgcgacagacgaatatatgcaaacatgtttaagaagtttgctgaacaggatgccaaagaagaggctaataaggccatggggaagaagactagcgaaggagtgaccaatgagaagggcaccgattcccaagctatggaggaggaaaagcctgaaggccacgtttag

SEQ ID NO: 117191 - DNA, 807 bp, synthetic construct
  misc_feature 1..807: note = Description of Artificial Sequence: Synthetic coding sequence
  source 1..807: mol_type = other DNA
atgaccactgacgaaggggcaaagaataatgaagaaagtccgactgccacagtggccgaacagggcgaggatataacttctaaaaaagatcggggagtgttgaaaatagtgaaacgggtggggaatggggaggagaccccaatgattggcgacaaggtgtatgttcactataagggcaaattgagtaacgggaaaaaattcgatagctcccacgaccggaacgaaccttttgtattctcattgggcaagggccaagttatcaaggcttgggatatcggcgtggcaaccatgaaaaaaggggagatctgccatctgctgtgcaagcccgagtacgcctatggtagcgcaggctcactccctaagatcccctccaacgccacccttttctttgagattgagttattggattttaaaggcgaggatttgtttgaggatggagggatcattcggaggaccaagcgaaagggcgaagggtattccaatcctaacgagggagcgacggtcgaaatccacctcgaaggacgttgtggaggaaggatgttcgactgccgggatgtggcctttacggtgggcgaaggcgaagatcacgatatccccatcggcatcgataaggcacttgaaaagatgcagcgggaagaacagtgcatactgtacctggggcctcgtcctaagaacccaggcagatggatccctaaaaagaactggagtaggctgccgcttagcaagagacgcgagccatacacttcaaggtgcgtgtcgccttacgctatcctgtctatttccaaaaacttatttaaatgctggtag

SEQ ID NO: 117192 - DNA, 1263 bp, synthetic construct
  misc_feature 1..1263: note = Description of Artificial Sequence: Synthetic coding sequence
  source 1..1263: mol_type = other DNA
atgaccaccgagcagggagaggagacgcccatgattggtgacaaagtttacgtgcattataaaggtaaattatctaatgggaaaaaatttgattcatcacatgaccgtaatgaaccatttgtgttctcccttggcaagggacaagttattaaggcctgggatataggtgtggccaccatgaagaagggcgaaatttgtcacctgttgtgcaaacctgagtacgcttatggctctgctgggtcattgccgaaaattccttcaaatgctaccctattttttgagatcgaactactcgactttaagggagaagatctgttcgaggacggagggatcattcggaggacaaagcggaagggcgaaggatattccaaccctaacgagggggcaaccgtagaaatccatctggaaggtcggtgcggaggtcggatgtttgactgtcgtgacgtggcattcaccgtgggggaaggggaggaccatgacatccccattgggattgacaaagcactcgaaaaaatgcagcgcgaggagcagtgcattctatatcttggtccccgctacggctttggagaggccggcaagcctaagttcggaatcgaaccaaatgcagaactgatttatgaggtcacgttgaagagctttgagaaagccaaagagtcctgggaaatggacacaaaagagaaattggagcaagcagccattgtcaaagagaaaggtactgtgtattttaaaggcggaaagtatatgcaagccgttatccaatatggtaagatcgtgtcatggttggagatggagtacggcctgagcgagaaggaatccaaggccagcgaaagcttcctgttagccgcatttctgaatctggccatgtgttacctgaaactccgcgaatacacaaaggctgtggaatgctgtgacaaggcattgggactggatagtgccaatgagaagggcctgtatcgccggggcgaagcccagttgctgatgaatgagttcgagtccgcaaaaggagatttcgaaaaagtcctggaggtgaatccccagaacaaggctgctaggttgcaaatttccatgtgtcaaaagaaggcaaaagagcataatgaacgggatcgtaggatatacgcaaacatgttcaagaagttcgctgagcaagatgctaaggaagaagccaacaaagcgatgggaaaaaagacctcggaaggagttacgaacgaaaagggtacagactctcaggcaatggaggaggaaaagcctgagggacacgtatag

SEQ ID NO: 117193 - DNA, 984 bp, synthetic construct
  misc_feature 1..984: note = Description of Artificial Sequence: Synthetic coding sequence
  source 1..984: mol_type = other DNA
atgggcgggagtgccctgaatcagggagtcctagagggcgatgatgcccccggccagagtttgtatgaacgactttcccagcgtatgctggatatatctggagaccgcggcgtcctgaaagacgtgatcagggaaggagctggcgacctggttgcccctgacgcctccgtcctcgtgaaatacagtgggtacctcgagcatatggatcgaccattcgacagcaactacttcagaaagacaccccgcctgatgaagctgggagaggacattactctttggggaatggaactgggcctgctgagcatgaggcggggcgagttggcgcgctttctgtttaagcccaactatgcttacggaactcttggttgtccccccttaattcccccgaatacgaccgttctgttcgagatagagctgctggacttcctggattgtgcggagagtgacaaattctgcgctctcagcgccgagcagcaggatcagtttcctcttcagaaggtgctgaaagtagctgccaccgaacgagaattcggcaattatctttttcgacagaataggttctacgatgctaaggttcgttataaaagagccttgctgctcctccggcggcgttccgctcctcccgaagagcagcatcttgtggaagctgcaaagctgcctgtactgctcaaccttagctttacttaccttaagctcgatagacccacaatcgccctttgttacggtgaacaggccctcatcatagaccagaaaaatgctaaagcactgttccggtgtggccaggcatgcctgttgttgaccgaatatcaaaaggccagggatttcctggtacgtgcccagaaagagcagccattcaatcacgatattaacaacgagttgaaaaagctggcatcgtgttatcgcgactacgtcgacaaggagaaagagatgtggcaccggatgttcgcaccatgcggggatggatccaccgccggcgagagttag

SEQ ID NO: 117194 - DNA, 969 bp, synthetic construct
  misc_feature 1..969: note = Description of Artificial Sequence: Synthetic coding sequence
  source 1..969: mol_type = other DNA
atgtcagctagctcctggccccagaacggaatgccaccaagtagcctttacgagcgcttatctcagaggatgttggatatcagtggggatcggggtgtgcttaaagacgtgatcagagaaggtgcgggtgatctggtggccccagatgcatccgtgttggtaaagtactccggctatttggaacatatggatagaccatttgattcgaattattttaggaaaacaccgcgtctgatgaagctcggagaggatattaccctttgggggatggagttaggtttgctttccatgcgccggggcgaactggcccgctttctgtttaaacctaactacgcctatggcactctggggtgtccaccgctgataccccccaatacaactgtgctctttgagatcgagctcctcgacttcctggactgcgcggaaagcgataagttctgtgctctctctgcggagcagcaggatcagtttcctctgcagaaggtgttgaaggttgcggcaacagaacgggagtttggaaactatctgttcagacagaataggttttatgatgccaaggtcagatacaagagagcattattgctcctgcggcgtcgatcagcaccaccggaggagcagcaccttgtcgaggctgctaagctgcccgtgctgctcaacctgtcgttcacttacctcaaactagacaggcctaccattgcgctctgctatggcgagcaagccctcatcatcgaccagaagaacgccaaagccctcttccggtgtgggcaagcttgtctgctacttaccgagtaccagaaggccagggattttctcgtgcgcgctcagaaggagcagcctttcaatcatgacatcaacaatgaactcaaaaagctggcttcctgttatagagactatgtggataaggagaaagagatgtggcatcgaatgttcgccccatgcggcgatggctctaccgctggagaaagttag

SEQ ID NO: 117195 - DNA, 531 bp, synthetic construct
  misc_feature 1..531: note = Description of Artificial Sequence: Synthetic coding sequence
  source 1..531: mol_type = other DNA
atggacctgcctgattctgcgtcacgcgtgttctgtggtagaatccttagtatggtgaataccgatgacgtgaatgcgataatcctcgcccagaaaaacatgctggaccgcttcgagaagaccaacgaaatgttgctaaacttcaacaacttgtcgagcgcgcggcttcagcagatgagtgaaaggttcctgcaccatacccgtacactggtcgaaatgaagcgtgacctagatagcatattccggcgtattcgcactctcaaaggtaagctggcaagacagcatcccgaggcatttagtcacattcccgaagcctctttcctggaggaagaggacgaggatccaatcccccccagcactactaccacaatcgccacgtcagagcagtcaactgggtcctgcgacacttctccggacaccgtctctcccagcctgtctcccggcttcgaggacctatcccacgttcaacctggcagtcccgcgatcaacgggcgttcccagaccgatgacgaggaaatgacaggcgagtag

SEQ ID NO: 117196 - DNA, 1326 bp, synthetic construct
  misc_feature 1..1326: note = Description of Artificial Sequence: Synthetic coding sequence
  source 1..1326: mol_type = other DNA
atgggcgtgggcgcaggaagggtgtcccagagtggggccccttcccctggtggcgctggacgggcaaatagctgtccaccctcctctatggccagctgcgcagagccttctgagcctagcgctccactgcctgctggagtacctcctctggaggactttgaggttcttgatggagttgaggatgccgaaggagaagaggaggaggaggaggaagaggaggaagaggacgatttgagcgagctgccccctcttgaagatatggggcagcctccggcagaggaagctgagcagcccggagcgttagctcgcgagtttctggccgctatggagcctgaaccggcacccgcccccgcacctgaagaatggctggacatactagggaatggattgttgcgaaagaagactttggtccccggcccacccggcagctccaggcctgttaaagggcaagtcgttaccgtgcacctgcagacatcccttgagaatggcactagagtgcaggaggaacctgagctagtcttcacactcggagattgtgacgtaatccaagccctcgatctctccgtgcctttaatggacgtgggagagacagctatggtgactgctgacagtaaatactgctatggtcctcaaggccgcagcccatacatcccaccccatgccgcattgtgcttggaagtgacactgaagactgcagtcgacggaccagacctagaaatgctgactggccaagagcgcgtggccctggcaaacaggaagcgtgaatgcggaaatgcccactaccagcgcgccgatttcgtgctcgcagctaactcttatgacctcgctatcaaggccatcacgtctagtgccaaggtcgatatgacattcgaggaggaagcccagctcctccagctaaaagtcaaatgccttaataacctggcagcttcgcagctcaaactggatcattatcgggctgcactccgctcttgttccttggtcctggagcaccaaccggacaacatcaaggctctgtttcgaaagggcaaagtccttgctcagcagggggaatactcagaagccatccccatactgagagcggccctgaagttagaacctagcaacaaaacaatacatgctgaactgtccaaactggtgaagaagcacgcagctcagcgaagcaccgagactgctttgtaccggaaaatgctggggaacccttcaaggctgcctgcgaagtgtccagggaagggcgcttggagcatcccctggaagtggctgttcggcgctacggccgtagctcttggcggggtggctctgtccgttgtgattgcagctcgaaactag

SEQ ID NO: 117197 - DNA, 762 bp, synthetic construct
  misc_feature 1..762: note = Description of Artificial Sequence: Synthetic coding sequence
  source 1..762: mol_type = other DNA
atggctagctgtgcagagccctctgagccctcagcgcctctccccgcaggagttcctcctttagaagacttcgaggtccttgacggtgtcgaagacgccgaaggagaggaagaggaggaggaggaggaggaggaggaggatgatctcagcgagctaccgcccttggaagacatgggccaacctccagcggaggaggccgagcagcccggggctcttgcgagggagtttctggctgctatggaacccgagcccgctcctgcaccggcaccagaagagtggcttgacattctggtggacatgacgttcgaggaagaggcacaactgttacaacttaaggtgaagtgcctgaataatttggctgcaagtcagctgaagctcgaccactaccgggccgcgctccgctcctgctccctcgtactcgagcatcagccagacaatatcaaagctctgttccggaaaggcaaagtcttggctcaacagggggagtatagcgaggctatccccatacttagagctgccctaaagctggaaccatccaacaaaactatccatgccgagttgagcaagctagtcaaaaagcatgccgcccagagaagcacagaaaccgccctgtacagaaagatgctcggcaatcccagtaggttgcctgcaaagtgtcccggcaagggtgcatggtctatcccgtggaaatggttattcggcgcaacagccgtggcccttggtggcgtggctctgagcgtggtgattgctgcacggaactag

SEQ ID NO: 117198 - DNA, 1599 bp, synthetic construct
  misc_feature 1..1599: note = Description of Artificial Sequence: Synthetic coding sequence
  source 1..1599: mol_type = other DNA
atggccaaacgcgtcgccattgtgggagcaggggtctcaggactggcatcgattaagtgttgccttgaagaggggcttgagcccacatgcttcgagcggtccgacgacttgggtggactttggcgattcactgaacacgtggaagaagggagggccagtctgtataaatctgtcgtatctaactcatgcaaggaaatgtcctgttattcagattttccattccccgaggattatcctaattatgtcccaaactcacagtttttggaatatttgaagatgtatgcaaaccactttgacctgctgaaacatatacaattcaaaacaaaggtttgtagtgttaccaagtgcagtgactcagcagtgagcggacagtgggaagtggtcaccatgcacgaggaaaaacaggagtctgccatttttgatgctgtgatggtctgcacaggcttcttgacaaacccatatctgcccctggattccttcccaggtatcaacgcattcaagggtcagtattttcactcaagacagtataagcaccctgatattttcaaggacaagagggtgctcgtgatcggcatgggcaattcaggcacagatatcgccgtggaggcgagtcatctcgccgaaaaagtgttcctatctactacagggggaggctgggttatttcacgtatatttgatagcggttatccctgggatatggtatttatgaccagatttcaaaacatgctacgcaatagcctgcctaccccaatagtgacctggctgatggagagaaaaataaacaattggctgaatcatgccaactacggcctgattcccgaggacagaacacaactgaaagaatttgtcttgaacgacgagttgcctggccggattatcactgggaaagtcttcattagaccttccatcaaagaagtaaaggaaaactctgtgatcttcaataatacaagcaaagaagagcccatcgatataatagtttttgccaccggatacacttttgccttcccgttcctggacgaaagcgtggtcaaggtcgaggacggccaggctagcttgtataagtacatatttcccgcgcatctacagaagccgacactggccatcattgggttgatcaaaccgctggggtccatgattcccaccggcgagacacaggctagatgggcagtgcgcgttctgaagggggtcaacaagttgccacctccttcagtgatgatcgaggagataaacgcaaggaaggagaataagccaagttggtttggcctatgttactgtaaggccctccagtccgactatatcacctatatagatgaactcctcacatacatcaatgctaagcctaacctttttagcatgttgctgaccgacccacacctggccctgacggtgttcttcggaccatgttcaccgtatcagtttaggctgacaggcccggggaagtgggaaggtgcccgtaatgcaattatgacccagtgggatcggaccttcaaggtgattaaggccagagttgtacaagagtccccaagtccatttgagtcctttctcaaagtgttttcatttctcgctctgctggtggcaatttttctgatctttctatag

SEQ ID NO: 117199 - DNA, 1599 bp, synthetic construct
  misc_feature 1..1599: note = Description of Artificial Sequence: Synthetic coding sequence
  source 1..1599: mol_type = other DNA
atggctaaaagggtagctatcgttggcgcaggggtgtctggcctcgcgtccatcaagtgttgcctcgaggagggcctggagccaacctgtttcgaacgcagcgatgatctggggggtctctggcgattcaccgagcatgtggaagaggggagagccagcctgtacaagagtgttgtttcaaatagctgcaaagaaatgtcttgctacagtgactttccattccctgaagactaccctaactacgtccctaactcgcagtttcttgagtatctgaagatgtacgccaaccattttgacctcctcaagcacattcagttcaaaacgaaggtctgttccgtcaccaagtgttcagactccgccgtgagcgggcagtgggaagttgtcaccatgcacgaggagaagcaggagtcggccatatttgacgctgtcatggtgtgcaccggcttcctcacaaacccatacctgcctcttgactccttccccgggattaatgcctttaaggggcaatactttcattccagacagtataagcatccagacatcttcaaggataaacgggtgcttgtcataggcatgggaaactccggcacggacattgctgtggaggccagtcacctggcagaaaaagtgttccttagcacgacaggtggagggtgggtgatatcccggatcttcgactcaggatatccctgggacatggttttcatgacacgttttcagaatatgttgcggaattcccttccaacgcctattgtaacttggctgatggagcggaagattaacaactggcttaaccacgcaaattacggcctgattccagaagataggactcagttgaaagagtttgtcctcaatgacgaactgccgggacgcattattaccggcaaggtattcattcggccatcgatcaaagaggtgaaagagaattctgtgatcttcaacaatacctccaaggaggagcccatcgatattattgtgttcgccaccgggtacacatttgccttcccttttttagacgagagtgtggtaaaggtggaggatgggcaggcgagtctgtacaaatatatatttcctgcacacctccagaagcccacgctcgctattatcggccttattaaaccgctgggctcaatgattccaaccggggagacacaggcccgttgggcagttcgcgtgcttaaaggggtgaataagctgcctcctccaagtgtgatgattgaagagatcaatgccagaaaagagaacaagccttcctggtttggactgtgctactgtaaagctttgcaaagcgactacatcacctatatcgacgagctgctcacctacatcaatgccaaacccaatctgttttctatgctgttaactgatcctcatctggctctgacagttttttttggaccctgttctccatatcagttcaggcttaccgggcccgggaagtgggagggcgcgcgaaacgctattatgacgcaatgggacaggacgtttaaggtgatcaaggcgcgcgtggtacaggagtccccttcccctttcgagtccttcttgaaggtgttttctttcctagctctgctagtggccatcttcctaattttcttgtag

SEQ ID NO: 117200 - DNA, 1410 bp, synthetic construct
  misc_feature 1..1410: note = Description of Artificial Sequence: Synthetic coding sequence
  source 1..1410: mol_type = other DNA
atggccaaaagagtagcaattgtcggagccggtgtctcgggcctcgcctccatcaagtgctgcctggaggagggattggaacctacttgcttcgaaagatctgatgatttggggggcctgtggcgattcactactaaagtttgcagcgtgacgaaatgctctgactcggctgtgagtggtcagtgggaagtggttactatgcacgaagagaagcaggagtcggcaattttcgatgccgtgatggtgtgcactggatttctgacgaatccctatttgcctctcgacagcttcccaggcattaatgcatttaaagggcagtacttccactcccggcagtataaacacccagatattttcaaagataagagagtgctggttattggcatgggcaattcaggaaccgatatcgcggtggaggctagtcaccttgctgaaaaagtcttcctcagtacaacaggcggagggtgggtgatatccagaatatttgattcgggctacccttgggacatggtatttatgactcgtttccagaacatgttgcggaactccttgccaacccccatcgtaacttggctcatggagcggaagatcaacaattggctgaaccacgccaactatggtctgattcctgaagatagaacacagctgaaggagtttgtgctcaacgacgaactgcctggccgcataatcaccggcaaggttttcattcgcccatcgataaaagaggtgaaagaaaattctgttattttcaacaacaccagtaaggaagagccaatcgatatcatcgttttcgccactggttacaccttcgcctttccttttttagacgaatctgtggtgaaggtagaggatggacaggctagcctctacaagtacattttccccgcacatttgcagaagccaactttggccatcatcgggctcatcaagcctctgggctctatgatccccaccggcgaaactcaggcaagatgggcagtgcgcgtgctcaaaggggtcaacaaacttccccccccatcagtaatgattgaggaaataaatgcccgtaaagagaataagcctagctggtttgggctttgttactgcaaagccctgcagagcgattacattacatacatcgacgagctgcttacatacatcaatgctaagccaaatctgttcagcatgttgcttacagacccccacctggctctcacagtattcttcggcccttgctccccctaccagtttcgactgaccggtccaggaaagtgggaaggcgcacgcaatgccataatgacccagtgggataggacgtttaaagtgatcaaggcacgcgtggtccaggaaagtccttccccctttgaatcttttctgaaggtattctccttcctcgcactgctggtggccatatttctgatcttcctgtag

SEQ ID NO: 117201 - DNA, 627 bp, synthetic construct
  misc_feature 1..627: note = Description of Artificial Sequence: Synthetic coding sequence
  source 1..627: mol_type = other DNA
atggccaaacgggtcgctatcgttggagctggagtgagcggactagccagcattaagtgctgcttggaagaagggctggaaccaacctgtttcgagagaagcgatgatctcgggggcctgtggagattcactgagcacgtggaagagggaagggcatccctgtataagtccgtcgtgtccaatagctgtaaagagatgagttgttacagcgacttccctttccctgaggattaccctaactatgtgcctaactcacaattcctggagtacctgaagatgtatgccaaccatttcgacctgctcaaacacattcaattcaagaccaaggtttgtagcgtcactaaatgctctgatagtgctgtgtccgggcaatgggaagtggtgaccatgcacgaggaaaaacaagaatctgccattttcgatgccgtgatggtatgtaccggatttttgacaaacccttatttgcctcttgactccttcccgggcataaacgcctttaaagggcagtattttcactcaaggcaatataagcaccccgatatatttaaggataaaagagtgctcgtaattggcatgggcaacagtggcacggacattgctgtagaagcttcgcacttagccgagtag

SEQ ID NO: 117202 - DNA, 1830 bp, synthetic construct
  misc_feature 1..1830: note = Description of Artificial Sequence: Synthetic coding sequence
  source 1..1830: mol_type = other DNA
atggagggtaaacctatgagaaggtgcacaaacatccggccaggcgagacagggatggacgtcacctctagatgcacactgggggaccccaacaagctaccagagggcgtgcctcagcccgcccgcatgccgtacatatccgacaagcaccccaggcagacgcttgaggtcattaacctgctgaggaaacatcgagagctctgtgatgtcgtgctggtggtgggtgcaaagaaaatatacgctcatagggtcatcctctccgcctgtagtccctactttagagccatgtttactggggaactggccgaatcccgacaaaccgaagttgtgatacgtgacatcgatgagcgagcgatggaacttctgattgactttgcatacacatctcagataactgtggaagagggtaacgtccaaactctgctgcctgcagcgtgtttattgcagctggctgagatccaggaagcgtgctgtgaatttttgaagcgccagctggatcccagcaactgcttggggattagagcctttgccgatacgcattcctgtcgagaactgctcagaatagctgataaatttacacagcacaactttcaagaagtgatggaaagtgaggagtttatgttgctgccagcaaatcagctgatcgacataatttccagcgatgagcttaatgtgcgaagcgaggaacaagttttcaacgccgtcatggcttgggtgaaatactccatccaggagcgccgcccacaactgcctcaggtcctgcagcacgttaggctccctctactgtctcccaaatttttagttggcaccgtcggaagcgatcctctcatcaaatccgatgaagaatgtagagacctggtagacgaggctaaaaattatctgctgctgccccaggagcgcccactgatgcaaggcccgaggaccaggcccaggaaaccaatcaggtgtggtgaggtgttgtttgccgttggtggctggtgttcaggcgatgcaatcagctccgtcgaacgctatgatccccagaccaacgagtggagaatggtggcctctatgagtaaacggcgttgtggcgtgggggtcagtgttcttgacgatctactgtacgcagtgggaggccatgacggttcctcttaccttaacagtgtcgaaagatatgacccgaaaactaaccagtggtccagcgacgttgcacctacttcgacctgtaggacatcagtaggtgtggctgtgctgggtggctttctgtacgctgttggtgggcaggacggcgttagttgcctcaatattgtggagcgttacgatcctaaggaaaataaatggactcgggtggcttcaatgtcaacgaggagactcggtgtcgctgtcgccgtcttaggtggatttctttacgcggtgggagggtccgacggcaccagccctctcaacaccgtcgaacgctacaacccacaggaaaaccgctggcacactatcgcacctatgggtacaagaagaaagcacctgggctgtgccgtttaccaggacatgatttacgccgtcggcggtcgagacgataccacggagctgagcagcgccgagagatacaatccaagaactaaccaatggagtcccgtggtggccatgaccagtcggcggtcaggggtcggtctagctgtagtaaacggccagttgatggccgtgggaggttttgatggcacgacctacctaaaaacaatcgaggtctttgatcctgacgccaatacatggcgtctctatggcgggatgaattaccgccgactggggggaggcgtaggagttattaagatgacacactgcgagagccacatttggtag

SEQ ID NO: 117203 - DNA, 1416 bp, synthetic construct
  misc_feature 1..1416: note = Description of Artificial Sequence: Synthetic coding sequence
  source 1..1416: mol_type = other DNA
atggccaagaaggtggccgttatcggtgcaggcgtcagcggcctcattagccttaagtgttgcgtagacgagggcctcgagccgacgtgcttcgaaaggacagaagacatcgggggtgtgtggagattcaaggagaatgttgaggacggcagagcgtcaatctaccagtctgtggttactaatacgtctaaggaaatgagttgcttttcagattttcccatgcctgaggacttcccgaattttctgcacaattccaagctgctcgagtatttccggatctttgccaagaagtttgatctgctcaagtatatccaatttcagacaacggtgctctctgttcgtaagtgcccggacttctcatcaagcggccagtggaaagtggtgactcaatcaaatgggaaggaacaatcagctgtgttcgatgcagtcatggtgtgttctgggcaccacatattgccacacatcccccttaaatctttcccaggcatggaaaggttcaagggccagtactttcacagccgacagtacaaacaccctgacggctttgagggaaagcggatcttggtgattggcatgggaaattctgggagtgacatcgcagtggaactgagtaagaatgctgcacaggtgtttatctccacgcgacatggcacctgggtaatgtccaggatcagtgaagatggatacccatgggactcggtgtttcacaccagatttagatcaatgcttaggaacgtgctgcccaggaccgcagttaagtggatgatcgagcagcagatgaacaggtggtttaatcacgaaaactatggattggagccacagaacaaatacataatgaaggaacccgttctcaatgacgatgtgccatcccgattattatgcggcgcaatcaaggtcaagagcaccgttaaagaactcaccgagaccagtgcgatctttgaggacggcaccgtagaagagaacatcgacgtaatcatctttgccactggatatagcttcagtttcccctttctcgaagattcactggtgaaagtggagaacaacatggtttcgctgtataagtacatctttcctgcccatttggataagtccaccctggcatgcatcgggctgattcagccactcggaagtattttcccgactgcagaactgcaagctagatgggttaccagagtcttcaagggcctgtgttcattgcccagtgagcgcaccatgatgatggatattatcaagcgaaacgagaaaagaatcgatttgttcggggagagccagtcccagaccttacaaacaaattatgtggattatctcgacgagctggccttagagatcggcgccaaaccggatttttgcagtctcctgttcaaagacccaaaattggctgttcggctttactttgggccttgcaactcctactag

SEQ ID NO: 117204 - DNA, 1599 bp, synthetic construct
  misc_feature 1..1599: note = Description of Artificial Sequence: Synthetic coding sequence
  source 1..1599: mol_type = other DNA
atgggcaaaaaagtggctattattggcgctggagtaagcggcctagcctctattcgcagctgtctagaggagggtttggagcccacctgttttgaaaaatctaacgatattggtggactctggaagttctccgatcatgctgaggaaggccgtgcctcaatttacaaatctgtcttctctaactcttccaaggaaatgatgtgttttccagacttcccatttcctgatgacttccccaactttatgcataacagcaaaatccaggaatatatcatcgcattcgccaaagagaagaatctccttaagtacatccagtttaagacttttgtgagctctgtgaacaagcacccggattttgcgacaaccggtcagtgggacgtgactaccgagcgggatggcaaaaaagaatccgccgttttcgacgctgtgatggtgtgtagcgggcaccacgtgtaccctaatcttccaaaggagtcattccccggcctgaatcatttcaaaggaaagtgtttccactcacgcgattacaaggagccgggagtattcaatggtaaacgcgtactggttgtagggctgggaaactccggttgtgatatcgctaccgagctatccaggaccgccgaacaagtgatgatctcatctagaagcggctcctgggttatgtcccgggtttgggacaacggatacccctgggatatgctacttgtcacgcggtttggaacctttcttaagaacaatctgccaacagccatatcagattggctgtacgtcaagcagatgaacgctaggttcaagcacgagaattacgggcttatgcctttgaacggcgtgctgagaaaggaacccgtatttaacgacgagctgcccgctagcatactgtgtggcatcgtgagtgtaaaacccaatgttaaggagtttaccgagacatccgcaatatttgaggacggcactatatttgaagggatcgattgcgtgatctttgcaacaggctattcattcgcatatcccttcctggatgaatccatcatcaaaagcagaaataacgagattattctcttcaagggggtcttcccaccgctccttgaaaaatcaaccatcgctgtcattggattcgtacagagcctcggcgccgctatcccaaccgtggatctgcagtccagatgggcagctcaggttatcaaaggtacttgcacactcccctcaatggaagacatgatgaacgacatcaacgaaaagatggaaaaaaaacggaaatggtttggcaagtctgaaacaatacagacagactatattgtgtatatggacgagcttagcagcttcattggagctaagccgaatataccttggctctttctgactgacccgaaattggctatggaggtgtatttcggaccatgctcaccttatcaattccggttggtggggcccgggcagtggcccggcgctcgcaacgctatcctcactcagtgggacaggtctttgaaacctatgcagactagggtggtgggcagactgcagaaaccttgtttcttcttccactggctcaaactcttcgccattcccattctgctgatcgccgtgtttctcgtccttacctag

SEQ ID NO: 117205 - DNA, 1599 bp, synthetic construct
  misc_feature 1..1599: note = Description of Artificial Sequence: Synthetic coding sequence
  source 1..1599: mol_type = other DNA
atggggaagaaagtggccatcatcggcgcaggggtatccggactcgcaagtatcagatcttgccttgaagagggtctggaacccacttgcttcgaaaaatctaatgatattggcggtctgtggaagttctcagaccatgcagaggaagggcgcgcaagtatctataaatcagtatttagtaatagtagcaaggagatgatgtgcttccccgacttccccttccctgatgatttcccaaatttcatgcacaattctaagatccaggagtacatcatcgcattcgccaaggaaaagaacctcttgaagtacattcagttcaaaacgtttgtgtcaagcgtgaacaagcacccggattttgcaaccaccggccaatgggacgtcacaactgaaagggacggcaagaaagaatctgccgtttttgatgcagtcatggtgtgctccggtcatcatgtctaccccaatcttcccaaggagtcctttccaggtctaaaccatttcaaaggcaaatgcttccattctagagattataaagagcctggcgttttcaatggaaagcgggtactggttgtgggcctgggcaacagcggctgcgatatagcgactgaattgtcccgaactgccgagcaggtaatgatatccagcaggtcaggcagttgggttatgagcagagtttgggacaacggttacccgtgggacatgctcctggtcacccgatttgggaccttcctgaaaaacaatctccctacagcaatttccgattggctctacgtgaagcaaatgaacgcccgcttcaagcatgaaaactacgggctgatgccactgaacggagtcttgaggaaagagccagtgtttaacgacgagctgccagcttctatcctgtgcggcatcgtcagcgttaagcccaacgtgaaagaattcacagaaacaagcgcgatcttcgaggacggaaccatctttgagggtattgactgcgtcatttttgccactggttacagtttcgcttacccattcctcgacgaatccattatcaagtctagaaataacgaaattattctattcaaaggagtctttcccccgctgttggaaaaatccaccattgcagtgataggattcgtccagagccttggcgctgcaatcccaactgtggacctgcaaagtagatgggccgctcaagtgattaagggcacatgcaccctgccatccatggaagacatgatgaacgacatcaacgaaaagatggaaaaaaagcgtaagtggtttggaaagagcgaaaccatacaaactgactacatcgtttatatggatgagctgagttcttttattggggccaaaccgaatattccttggttgtttctgactgacccaaaactggccatggaggtttactttgggccgtgctctccttaccagttcagactggtggggccaggacagtggcccggagcccgaaatgccatactgacccagtgggacaggtctctcaagccaatgcagactcgcgtcgtaggaaggttgcagaagccatgcttcttctttcattggttaaagctgtttgccatcccgattttactgatcgccgtctttttggtcctgacatag

SEQ ID NO: 117206 - DNA, 1410 bp, synthetic construct
  misc_feature 1..1410: note = Description of Artificial Sequence: Synthetic coding sequence
  source 1..1410: mol_type = other DNA
atgggcaagaaagtcgcgatcattggtgccggggtctccggcttggcgtccattaggtcatgtcttgaggaagggttggagccaacttgttttgagaagagcaacgatatcgggggcttatggaagttcagtacgtttgtcagttccgtgaataaacatcctgacttcgcgaccactggccagtgggatgttactaccgaacgggacgggaagaaagagagcgctgtgtttgacgctgtgatggtttgctccgggcatcacgtatatcctaacctgcccaaggagtccttcccaggtttaaaccattttaaggggaaatgctttcactctcgcgactataaagaaccaggtgtctttaatggcaaacgcgtccttgtagtgggcttagggaattccggatgtgatatcgccactgaactgtcccggacagcggagcaagtgatgataagctcacgctccggctcgtgggtaatgtctcgagtgtgggacaacggctacccttgggatatgctcctggtaacccgattcgggacttttctcaagaacaacttgcctactgccatctcggattggttgtatgtcaaacagatgaacgctcgattcaaacacgaaaattatggtttgatgcctttaaacggcgttctccgaaaggaacccgtcttcaatgatgagctgcccgcttccattttgtgcgggattgtttcggtgaaaccgaatgtgaaggagtttacggaaacgagcgcaatcttcgaggatggaactatctttgaaggcatagactgtgtgatcttcgccaccggatactcattcgcatatccctttctggacgagtccattattaagtccagaaacaacgagatcatactctttaaaggcgtattcccgcctctgctagagaagtccaccattgcggttatcgggtttgttcagtccttgggggcagccattccaaccgtggatctgcagagccggtgggctgctcaggtaatcaagggcacctgtacactgccttctatggaggatatgatgaatgacattaacgagaaaatggagaaaaaacgtaagtggtttggtaaatcggagaccatccagaccgactatatcgtgtatatggacgaactttcttcctttatcggtgccaaacccaacattccttggctgtttcttaccgaccccaaactggcgatggaagtgtacttcgggccctgcagtccatatcaatttcggcttgtcggccccgggcagtggccaggagctaggaacgctatcctgacacagtgggaccgatccctgaagccaatgcagacgcgggtcgttgggagactccagaagccatgcttcttcttccattggctgaagttgttcgccatcccaatcctccttatagcagtctttctggtcctgacgtag

SEQ ID NO: 117207 - DNA, 1539 bp, synthetic construct
  misc_feature 1..1539: note = Description of Artificial Sequence: Synthetic coding sequence
  source 1..1539: mol_type = other DNA
atgccagcctccactaggtcccagaagaggcagggcatggactctctgctcgagcctctgaaaatgaacatggatcacgccgaggagggacgagcaagcatctataagagcgtatttagtaacagcagtaaagagatgatgtgtttcccagactttccctttcccgacgattttcctaactttatgcataacagtaaaattcaggagtatatcatagcctttgcgaaagaaaagaatctgctgaagtatattcagtttaaaacctttgtgtcatcggtgaataagcaccctgattttgccactaccggccaatgggatgtgacgaccgagcgggatggaaagaaagagagtgccgtcttcgatgccgttatggtgtgctctggacaccatgtgtatccgaatctccctaaggaatctttccctggactgaaccattttaagggcaagtgctttcacagccgagattacaaggagcccggggttttcaatggtaaaagagtcttagtggttgggttgggaaattccgggtgtgatatagccacagagctctcgcggacagcagaacaggttatgatcagctcacggtccggatcttgggtaatgtccagggtttgggacaacggatacccctgggatatgctgctggtgacacgctttggtacctttcttaagaacaacctacccaccgcaatcagtgactggctctacgtcaagcagatgaacgcaagattcaaacacgaaaactatgggctgatgccactgaacggcgttttgaggaaggagcctgtcttcaatgatgagctgcctgcctccatattatgcggtatcgttagtgtgaagcccaacgttaaagaattcacagaaacctctgccatttttgaggatggaacgatcttcgagggaattgactgcgtgatctttgccacggggtacagcttcgcctacccttttcttgatgaatcaattattaagtcccggaataatgagatcatcttgttcaaaggtgtgttcccccccctattagaaaagtcgactattgccgtgatagggttcgtgcagtccctgggcgcagcaatccccaccgtggacctgcagtcaagatgggccgcccaggtgatcaagggtacatgtacactcccctcaatggaagatatgatgaatgatattaacgaaaagatggaaaaaaaaaggaagtggtttgggaagtctgaaactatccagaccgattacatcgtgtacatggacgaattgtcatcgttcattggcgctaagcctaatatcccctggttgttcctgactgatcccaagctggccatggaggtttactttggcccttgcagcccctaccagttccgactggttggaccaggccagtggccgggagcccgaaacgctattctaacccagtgggaccggtctcttaagccaatgcagacgagagtggtgggaaggctacagaaaccttgttttttttttcattggctcaagctttttgcaatacctatcctattaatcgccgtcttccttgttctgacttag

SEQ ID NO: 117208 - DNA, 1677 bp, synthetic construct
  misc_feature 1..1677: note = Description of Artificial Sequence: Synthetic coding sequence
  source 1..1677: mol_type = other DNA
atggccaagaaagtggcagttatcggcgcaggggtctctgggctttctagtattaaatgctgcgtggatgaggacctggaacccacgtgttttgaacgatctgacgacatcgggggtctctggaaattcacagagtcgtcaaaggatgggatgactagagtgtacaagagtctggttaccaatgtgtgcaaggagatgtcatgctacagtgactttccctttcatgaggattatcccaactttatgaaccacgagaaattttgggactaccttcaggaattcgctgaacacttcgacctgctgaaatacattcagtttaagacaacggtgtgctccattactaaaaggccagacttcagtgagactgggcagtgggacgtggtgacagagacggagggcaagcaaaatagggcagtctttgacgctgtgatggtgtgcacaggtcatttcttgaatcctcacttgccgctggaggcattcccagggatccataagtttaaaggccaaatcctgcactcacaggagtacaagatcccagaggggttccaaggcaagagggtcctggtcattggcctgggcaacacgggcggagacattgcggtcgaattaagccgaacagcagcacaagtgctgctgtccacacgtacgggaacctgggtgttagggagaagtagcgattggggatatccttataacatgatggtgaccagacgttgctgctcgttcatcgctcaagtgttgcctagtcggtttcttaactggattcaggagcggaagctcaataagagatttaaccacgaggattatggcttaagcatcaccaaaggcaaaaaagctaaattcatagtcaacgacgaactccctaactgtatcctctgtggggcgataaccatgaagacctccgttattgagtttactgagacctccgccgtcttcgaagacgggacagtagaagagaatatagatgtagtgattttcacaactgggtacactttttcatttccgtttttcgaagagccccttaaaagcctgtgcacaaagaagatctttctctataaacaggtctttcccctcaacctggagcgtgctaccctggccatcattggcttgattggccttaaaggaagcattctgagtgggacggaattgcaggctcgctgggtcactcgcgtattcaaaggactgtgtaagataccacctagtcagaagctgatgatggaggctactgagaaggagcaactcataaaacgaggcgtattcaaggacactagcaaagacaagttcgactatatcgcatacatggacgacattgcagcttgcatcggaacgaaaccttcgataccactcctttttctaaaggaccccaggctagcctgggaggtcttcttcggcccttgcaccccctatcagtaccgattgatgggacctggaaaatgggatggagccagaaacgcaattctgacacaatgggatcggacactcaaacctctcaaaacacggatagtgccggacagcagtaagcccgctagcatgagtcattacctgaaagcatggggggcaccggtgctgctcgcttctttgttgctcatttgtaaaagctcgcttttccttaagctcgtgagagacaaactgcaggacaggatgtctccatatttagttagcctgtggcgaggctag

SEQ ID NO: 117209 - DNA, 1602 bp, synthetic construct
  misc_feature 1..1602: note = Description of Artificial Sequence: Synthetic coding sequence
  source 1..1602: mol_type = other DNA
atgaccaaaaaaagaatcgctgtcattgggggcggggtctcgggtttatcctcaatcaagtgttgtgttgaagaggggctggagcccgtctgtttcgaaagaaccgatgatatcggtggactttggcggtttcaggaaaacccagaagagggacgtgccagtatctacaagtctgtgattattaatactagtaaggagatgatgtgcttttccgactatcccatcccagatcattatcccaacttcatgcacaacgcacaggtactggagtattttcgaatgtatgctaaagagttcgatttactcaagtatatacggttcaaaaccaccgtttgttctgtcaaaaagcagcccgactttgcaacttctggacagtgggaagtagtgaccgagtctgaaggtaaaaaagagatgaatgtatttgacggcgttatggtgtgtacagggcatcataccaacgcacacctccctctcgagtcttttcctggcattgaaaaatttaaaggacagtattttcactcgagagactataagaaccccgaggggttcaccgggaagcgcgtaatcatcataggcattgggaattcggggggagacctagccgttgagatcagtcagacggcaaagcaggtgttcctgagcacccgcaggggggcatggatactcaatagagtcggcgactatggataccctgccgatgtcttgttctcatctcgtttaactcattttatctggaaaatttgcggacagtctctggccaataagtacctggagaaaaagatcaatcagagatttgaccacgagatgttcggtctgaagcccaagcacagggcattaagccagcacccaacactgaatgacgacctcccaaaccgcatcatcagcggtttagtcaaagtaaaaggcaatgtcaaagagttcacagagaccgctgctattttcgaggatggaagtagagaggatgacattgatgctgtcatattcgctacagggtattcgttcgactttccatttctcgaggactccgtgaaagtcgtgaaaaacaaaattagtctgtataagaaggtgtttccgcctaacctcgagagacctacgctggcgataatcggtctgatacaaccccttggcgcaatcatgccaatttccgaactccaggggcggtgggctacacaggtgtttaaaggcctcaagactttaccatcacagtccgaaatgatggccgagattagtaaagcgcaggaggagattgataagcgatatgtagagagccaacggcatacaattcaaggcgactatatcgacaccatggaggagctggccgatcttgtcggagtgcgtcccaacctgctgtcattagcattcacagaccccaagcttgccctccacctcctgctcggaccctgtacaccgatccattacagagttcagggccccggcaaatgggacggcgcccggaaagccatactcacaacagatgaccgtattaggaaacctctgatgacgcgtgttgtggagcggtcctcttctatgactagcactatgactattggcaaattcatgctagctctcgccttctttgctatcatcatcgcatacttttag

SEQ ID NO: 117210 - DNA, 858 bp, synthetic construct
  misc_feature 1..858: note = Description of Artificial Sequence: Synthetic coding sequence
  source 1..858: mol_type = other DNA
atgacgaaaaaaagaatcgctgtaatcgggggtggggtctctggcttgtcttctattaaatgctgcgtcgaggaaggccttgaaccagtgtgcttcgagcgaaccgacgacatagggggtctgtggaggttccaggagaaccctgaggaagggagagcttccatttataaatccgtgatcattaatactagtaaggaaatgatgtgttttagcgactatccaattcccgaccactatcctaatttcatgcataatgcccaagtgcttgagtatttccgaatgtacgccaaggagttcgacctcttgaagtatattcggtttaaaaccaccgtttgttccgttaagaagcaaccagacttcgctaccagcggccagtgggaggtggtaacagagtcggaaggtaagaaggaaatgaacgtatttgatggagtgatggtgtgcactggccaccacaccaacgcccatctaccgctggagagtttccctgggattgagaagtttaagggccaatatttccatagcagagattacaagaatcctgagggatttactgggaagcgtgtcatcataatcggaattggtaattcaggaggcgacttggctgtggagatttctcaaactgccaagcaggtgttcctgagtactcgccgcggggcatggatcctaaaccgagtcggcgattacggatatcccgctgatgtgttattctccagtaggctgactcacttcatttggaagatttgtgggcagagtctcgcgaataaatatttggaaaaaaagattaatcaacgattcgatcacgaaatgtttggcctaaagcccaagcatagatccaaggatattgcgctcaccgagtag

SEQ ID NO: 117211 - DNA, 1395 bp, synthetic construct
  misc_feature 1..1395: note = Description of Artificial Sequence: Synthetic coding sequence
  source 1..1395: mol_type = other DNA
atgaccaagaagcgcatagcggtgatcgggggcggtgtcagcggcctctcctctattaagtgttgcgtcgaggaagggcttgaacctgtgtgttttgagagaaccgatgatatcggcggactgtggagattccaggagaacccagaggagggtagagcatcaatttataagtcggttatcattaatacttcaaaagagatgatgtgcttctccgattaccctatacccgatcactaccctaacttcatgcacaatgctcaggtgttggagtatttccggatgtatgcaaaggagtttgatctgctgaaatacatcagattcaaaacaaccgtgtgctcagttaaaaagcaacccgactttgcgactagtggtcagtgggaggtggtgactgagtccgaagggaaaaaggagatgaacgttttcgacggcgtaatggtctgtacggggcaccacaccaacgcccatctgcctctggagtccttccccggaattgaaaaattcaagggacagtacttccattcccgggactacaagaacccggaaggctttaccggtaagcgagtgatcataattgggattgggaattctgggggcgacctggccgtcgagatttcccagactgctaaacaggtttttttgtccacgcgaagaggggcctggattttgaacagggtgggggattacggataccctgcagatgtcttgttctcctctcggctcacccattttatttggaagatatgtggacagtccctcgcaaacaagtacctggaaaagaagatcaatcagaggtttgaccatgagatgttcggtctcaaacctaaacaccgcgcccttagtcagcaccccactttgaacgacgatctgcctaatagaatcatcagcggactcgttaaggtgaaaggtaacgtgaaagagtttactgaaaccgctgccatctttgaggatggctctagggaggacgacatcgacgccgtgatcttcgctaccggctattcttttgattttccattcctcgaggactcggtaaaggtcgtgaagaacaagatcagtctgtacaaaaaagtgttccctcccaacttggaaagaccaactttggctattatcggcctgatccagcctttgggcgctatcatgcctattagcgagctgcaggggagatgggccacacaagtctttaagggattgaaaactctcccttctcagtctgagatgatggctgagattagcaaagcccaagaagagatcgataaatccctaactatgcgcaagacatcagataaacctaaactcaagaatatactgcagatccccgactacttgaagactgtcaagatcatcaacaaagaatctttacggaactgccccggaataaagggtcccaaggagacttag

SEQ ID NO: 117212 - DNA, 579 bp, synthetic construct
  misc_feature 1..579: note = Description of Artificial Sequence: Synthetic coding sequence
  source 1..579: mol_type = other DNA
atgacaaagaaaaggatagccgtcataggggggggagtctccgggcttagctctatcaagtgttgcgttgaggagggactggagcccgtgtgcttcgaacgcactgatgacataggagggttgtggcggtttcaagaaaacccagaggaagggcgggcatcaatttataagtctgtgatcatcaacacttctaaagagatgatgtgctttagcgactaccccatacctgatcactacccaaactttatgcacaacgcccaagtgttggagtactttcgaatgtatgctaaggagttcgacctgctgaagtatattaggttcaagaccacggtgtgcagtgttaagaagcagccagactttgctacgtccgggcaatgggaagtcgttaccgagagcgaagggaaaaaggagatgaatgtcttcgacggagtgatggtgtgcaccggccatcatacgaatgcccatttgcccttggagagctttcccggcattgaaaagttcaaaggccaatacttccactctcgcgactacaaaaaccccgaagggttcacaggaaagcgagtaatcattataggctag

SEQ ID NO: 117213 - DNA, 438 bp, synthetic construct
  misc_feature 1..438: note = Description of Artificial Sequence: Synthetic coding sequence
  source 1..438: mol_type = other DNA
atgaccaaaaagcgcattgcagttatcggaggcggagtgtccggcctttctagcatcaagtgctgtgtggaggaaggcctcgagcccgtttgtttcgaacgcaccgatgatatcggcggtctctggaggttccaggagaaccctgaagagggacgcgctagcatctataagtctgtgataataaataccagcaaggagatgatgtgttttagcgactacccgattcctgaccactaccccaatttcatgcacaacgcccaggttctggagtattttaggatgtacgccaaggagttcgatctgctgaagtacatccgcttcaaaaccacagtgtgttcggtcaagaagcaacccgactttgccaccagcggacaatgggaggtagttacggagtctgaagggaagaaggaaatgaacgtttttgatggagtgatgtag

SEQ ID NO: 117214 - DNA, 3810 bp, synthetic construct
  misc_feature 1..3810: note = Description of Artificial Sequence: Synthetic coding sequence
  source 1..3810: mol_type = other DNA
atggaagctactggcgtattaccttttgtacgaggggtggacctctctggaaacgatttcaaaggcggttacttccccgaaaacgtgaaagctatgactagcctaagatggctaaaactgaaccgaaccggactctgttacctgccggaagaactcgccgctctgcagaagctcgagcacctttcagtgtctcacaataatctgacaaccctgcacggcgaactgtcatccctgccgtccctgagggcgatagtggcgcgggctaactccctgaaaaactcaggggtccctgacgacatattcaaactggatgaccttagtgtgctggacctctcacacaaccagctaaccgagtgcccacgcgaactggaaaatgccaagaatatgctcgtgctgaacctgtcccacaactccatcgataccatcccaaaccagctctttatcaacctcaccgacctactgtacctggatctgtccgaaaacaggctggagtccctccccccccagatgagaaggttggttcacctgcagacactggttctgaatggcaatcctctgctacacgcccagctgaggcagctccccgccatgacagctcttcaaactctccatttgagatctacccagcggacccagagcaatctgcctacatcactggaggggttgtcgaatcttgccgacgtggacctgtcctgcaatgatctgaccagggtgcctgagtgtctatacacgctgccctcactgcgcagactcaatctgtctagcaaccagatcactgaactctcattgtgtatcgaccagtgggttcatgtggaaacgttgaatctctctagaaatcaacttacatcactgccaagcgccatctgtaaactaagcaaactcaaaaaactctatctgaactcaaacaagttggacttcgacggattaccttccgggattggcaagctgacaaaccttgaggagttcatggctgccaataacaacttggaactagtgccagaaagcctctgccgctgccccaaattacggaaattggtgctcaataaaaaccatctggtgacgctccccgaagccattcatttcctcacagagatcgaagtgcttgacgttcgtgaaaacccaaacttggttatgccacctaaaccggcagaccgggccgccgagtggtacaatatcgacttctcattgcagaatcagctccggctggcgggcgcctcgcctgcaactgttgccgccgccgcagctgccggcagtggcccaaaggaccccatggctaggaaaatgaggctgagaagacggaaagactccgcccaggacgatcaggccaagcaagtgttgaaggggatgagcgacgtggcccaggagaaaaataaaaaacaggaggaatctgcagacgcccgcgccccctcaggaaaggtcagaaggtgggatcagggcctggagaagcctcgtttggactatagtgagttctttaccgaggacgtcggtcagcttcctggcctcacaatttggcagattgaaaatttcgtgcccgtgctggttgaagaagcgttccatggcaagttttacgaggccgactgttatatcgtcttgaaaacctttttggacgactccggcagtctgaactgggagatttactactggatcggcggcgaggccacattggataagaaagcttgttctgccatccatgccgtgaacctgaggaattacctgggtgcggagtgccgtactgtgcgcgaggagatgggtgatgagagcgaggagttcctgcaagtcttcgataacgacatttcttacatcgagggaggcaccgcctcaggtttttacactgtggaggacacgcattatgtgactcggatgtatagggtatacggtaagaagaatattaagcttgaaccagttccactgaagggaacatctttagacccgaggtttgtgtttctgttggatcgcggactcgacatttacgtttggaggggcgcccaagcaaccctgtccagcactaccaaggcccgcctgttcgcggagaagatcaataaaaacgagagaaagggaaaggccgaaatcactcttctagttcaaggacaggaactcccggagttctgggaggcactcggtggagagccttccgagataaagaagcacgtacccgaggatttttggccacctcaaccaaaattgtacaaggtaggtctgggcctgggctaccttgaacttccccagatcaactacaaactctcagtcgagcataaacagaggcccaaggtggaattaatgccaagaatgaggctcctccaaagtctgttggacacacgatgcgtatatatcttagactgctggagcgacgtgttcatctggttggggaggaaaagcccacgccttgttcgagcagctgcgctcaagttagggcaggagctatgtggaatgctgcataggcccaggcacgccacagtgtcgcgctctctcgaaggcaccgaagcccaggtttttaaggcaaagtttaagaattgggacgacgtcctgaccgtcgattacacgaggaatgcagaggccgtgctgcaatcccccgggctgtcggggaaggttaaaagagacgctgaaaaaaaggatcagatgaaggcagatttaactgcactgtttctcccacggcaaccgccgatgtcactggcagaggctgagcaactgatggaagaatggaatgaggacttggacgggatggagggttttgtactcgagggcaaaaaatttgcccggctgcctgaagaggagttcggtcacttttacacccaagattgctatgtcttcctgtgccggtactgggtacccgtggagtacgaggaggaagagaaaaaggaggacaaggaggagaaggccgaggggaaggaaggggaggaagccactgccgaggccgaggagaagcagccagaagaggactttcagtgtattgtgtacttctggcagggtagggaggcttctaatatggggtggttaacttttaccttttcactccagaagaagttcgaatccttgtttcccggcaagttggaggttgtacgaatgacccagcaacaggaaaatcccaagtttctttcacatttcaagagaaaattcatcattcacaggggtaagaggaaggccgtacagggcgcccagcagccttcactctaccagatcaggacaaatgggtccgcgctttgcactaggtgcatacagattaacaccgattcgtctctgctcaacagcgagttctgttttattttgaaggtacccttcgaaagtgaagataatcagggcatcgtctacgcctgggttggtagggcaagcgatcccgatgaagcaaagctcgcagaagacattcttaacaccatgtttgacaccagctactccaagcaagttatcaacgaaggcgaagagccagagaatttcttttgggtgggcattggcgcgcaaaaaccttacgacgacgatgcagagtatatgaagcacacgcgattatttaggtgtagtaacgagaagggatattttgccgtgacagagaagtgcagcgacttttgccaggatgatctcgcagatgacgacattatgctactagacaatggtcaggaagtttacatgtgggtgggtacgcagaccagccaggttgagatcaagttgagtctcaaagcatgtcaggtttatattcagcacatgaggtctaaagaacatgagcggccgagaagactccgactcgtgcgaaaagggaacgagcagcatgccttcacacggtgctttcatgcctggtcagccttttgcaaggccctggcatag

SEQ ID NO: 117215 - DNA, 3552 bp, synthetic construct
  misc_feature 1..3552: note = Description of Artificial Sequence: Synthetic coding sequence
  source 1..3552: mol_type = other DNA
atgacttcactgcgatggttaaaacttaacaggacaggtctgtgctatctccctgaagagctcgccgctctacagaagctggaacacctgagcgtgtctcacaataaccttacaactttacatggcgaactctcctctttaccttccctgagggccattgtggcacgggccaactctttgaagaacagcggagtgcctgatgacatttttaaactcgatgacctcagtgtccttgatttgtcacacaatcagctcacagagtgtccgagagaactggagaatgctaagaatatgctcgtcctcaacctgagccacaatcggcagctccccgctatgaccgcactgcagacgcttcatctccgatctactcagagaactcagtcaaatctgcctacttcactggagggtctgagcaacttggccgatgtcgatctctcctgcaacgacctaacccgggtacctgagtgtctgtacacactcccatccctacgtagactcaacctctcttcaaaccagataacggagctgagcctgtgcatcgaccaatgggtccatgtcgaaaccctcaatctctcgcgtaaccaacttacgagtctgccctctgcaatatgcaaactcagcaaactgaagaagctctacttgaactctaacaagctggactttgacggtctccccagtggcatcggaaagctcaccaacctggaagaattcatggcggccaataataatctggaattagttccagaaagtctatgccgctgtcccaagctgcggaaattggtcttgaacaagaatcacttggttactcttcctgaggctatccatttcctcactgaaatcgaagtcctggatgtgcgcgagaatcctaacctggtaatgcctccaaaaccggccgatcgcgcagcggagtggtacaatattgatttctcactgcagaatcagctccgtctggctggtgcgtccccagctactgtggccgcagcggcagcagggagcggaccaaaggatcctatggcccgtaaaatgagacttcgcaggaggaaggatagcgcgcaggatgatcaagccaaacaggtgttaaagggtatgagcgacgtggctcaagagaagaataagaaacaagaagagagcgccgacgcccgcgccccaagcggaaaggttcgccgctgggatcagggcctcgaaaaaccccgtctggattacagcgagttcttcaccgaagatgtgggtcagctgccagggttgaccatctggcaaattgagaactttgtcccggtcctggtggaagaggccttccatggcaagttttatgaggcggactgctacattgtgcttaaaacctttctggacgactccggcagtctgaactgggagatttattactggattggcggagaagctacgctggacaagaaagcgtgtagcgccatccacgcagtcaatctgcggaactatctgggtgccgaatgcaggaccgttagggaggagatgggtgatgagtctgaggagtttctacaagtcttcgacaacgatatcagctatatcgaggggggcacggccagcgggttttatactgtagaggacacacactatgtaacgaggatgtaccgggtttatggcaaaaaaaacataaagctcgagcccgtacccctgaaggggaccagtttggatccaagatttgttttcctcttggacagaggactggatatatatgtgtggcggggagcacaggcaactctaagctctacaacaaaagctcggctgtttgctgagaaaataaacaaaaacgagaggaaagggaaggctgagattacactgctcgttcaaggccaggagctgcccgagttttgggaggccctgggaggcgagccatcagagatcaaaaagcatgtgcctgaggacttctggcctcctcagccgaaactgtacaaagtcgggctgggcctcggctacctcgagctgcctcagataaactataagctgtcggtggagcataaacaacgacctaaggtagaacttatgccacgcatgcggctgctgcagtcgctcttggatactcgctgcgtgtatatcttggactgctggtcagatgtcttcatctggctcgggcggaaaagtccgagactggtgagggctgccgcgcttaaattgggacaggaactttgcggcatgttgcatcgaccccggcatgccacagtctcaaggtccttggaagggacagaagcccaagtatttaaggcgaagttcaagaattgggatgacgtcttgacagtcgattacactaggaatgctgaagcagtgctacagtctcccggcctgtcaggcaaagtaaagagagacgccgagaaaaaggatcaaatgaaagccgatttgacagccctgtttcttcctcgtcaaccccctatgtcgctggcggaagccgagcagctgatggaagagtggaacgaggaccttgatggcatggaggggtttgtactggagggcaaaaagtttgcgaggctgcctgaagaagaatttggacatttctacacacaggattgttacgtcttcctctgcagatactgggtgcctgtcgagtacgaggaagaagagaagaaagaggataaggaggaaaaagccgagggcaaggagggcgaagaggcgaccgctgaagctgaagagaagcagcctgaagaggatttccagtgcattgtgtatttctggcaggggcgggaggccagcaatatggggtggctgacattcaccttctctctgcagaaaaagtttgagtccctattcccagggaaattggaggttgtgcggatgacacaacagcaggagaatcccaagttcctgtctcattttaagagaaagtttatcatacataggggaaagcgcaaggctgtgcagggcgcccagcagccatcactgtaccagatacggaccaacggctccgctctttgtactagatgcatccagatcaataccgacagtagtctgctcaactcggagttttgtttcatacttaaagtgcccttcgaatctgaagacaatcagggtatcgtgtatgcctgggttggccgggcctctgaccccgatgaggcaaaattggccgaggacatcctgaataccatgttcgacacctcttattccaagcaagtaattaatgagggggaggagcccgaaaattttttctgggtcggaattggggcacagaagccctacgacgacgatgcagagtatatgaaacacacaagactatttagatgcagcaatgagaaaggttattttgctgttactgagaaatgttcagacttctgccaggacgacctggctgatgatgatattatgttgctggacaatggtcaagaggtgtatatgtgggtggggacacagacctcacaggtggagatcaagttaagcttgaaggcctgccaggtctacattcagcacatgcgcagtaaggagcatgagagaccacggcggctaaggctcgtaagaaaaggtaatgagcaacacgcttttacccgatgttttcacgcttggagcgctttttgtaaagccctcgcctag

SEQ ID NO: 117216 - DNA, 3447 bp, synthetic construct
  misc_feature 1..3447: note = Description of Artificial Sequence: Synthetic coding sequence
  source 1..3447: mol_type = other DNA
atggaagcgaccggcgtgctgcctttcgttagaggtgttgatctgtcgggcaacgacttcaagggtggatatttcccagagaacgtgaaggcaatgacctccctgcggtggcttaagctgaataggacaggcctgtgttaccttcccgaggagctggccgctttgcagaaactggaacatttgtctgttagccataataacctaaccacccttcacggtgaattgagcagcctcccaagcctccgagccattgtggcaagggcgaactccctgaaaaacagtggagtgcctgacgatattttcaaactggatgatctcagcgtcttggacttgtcccataatcagctgacggagtgtcccagagaattggagaatgcgaagaacatgctggttttgaatctgtctcataattcaatcgacacaataccgaaccagttattcatcaacctgacagacctgctctatctggacctgtccgagaatcggctagagagcttacctccccagatgcggaggttagtacatttacagactctggttctcaacggaaaccctttactccacgcccaactgcgccagcttcctgccatgactgccctgcagacgttgcatctgcgctcgacacagaggacccaaagtaacctgccaacgtccttagaaggcctgagtaatctcgcagacgtcgatctaagttgcaacgatttgacgcgggtgccggagtgtctgtacactcttccctccctgcggaggcttaacctttcatcaaatcagataaccgaactctctctgtgcatagatcagtgggtgcacgttgaaacactcaatctgtccaggaatcagctcacatccctgccctccgccatctgcaaactcagcaaactcaagaagctttatttgaattccaataagttagactttgatgggttgccctcagggattgggaagctgacgaacctggaagagtttatggcagctaacaataatttggagctggtgcccgaaagtctgtgccgctgtcctaaactgcgaaagttggttctgaacaaaaaccacctcgtgaccctcccggaggcaatccacttcctcactgagatcgaggttttggacgtcagggaaaatcccaacctggtgatgcctccaaagcctgccgatagggccgccgagtggtacaacattgactttagtctccaaaatcagctccgcctcgctggcgcttctccggccacagtggctgccgcagcagccgcgggctcagggcccaaagatcctatggccaggaagatgagattacgtcggagaaaagattccgcacaagatgatcaggcaaaacaggtgctcaaaggaatgagtgacgtggcacaggaaaagaataaaaaacaagaggagtctgccgacgcgcgagcccctagcggaaaggtgcgaaggtgggaccaaggactagagaagcctcgcctcgattatagcgagttttttacagaagacgtcggacaactgccagggctgactatctggcagattgagaacttcgtccctgtgctcgtggaagaagcttttcatggcaagttctacgaagctgactgctacatagtgctgaagacatttttagatgacagtggctcactgaactgggagatatactattggatcgggggtgaggccactctggacaaaaaggcttgctccgcaattcacgctgtcaatctgagaaactatctgggagctgagtgccggacagttcgcgaggaaatgggcgacgaaagtgaagagttccttcaggtgtttgacaatgacattagctacatcgagggaggaacagctagcggattctacactgttgaagacacacattatgtgactcggatgtatcgcgtgtacggaaagaaaaacattaagctggagccagtccctctcaagggcaccagcttggatccacgattcgtgttcttactggaccggggactggacatttacgtgtggcggggcgctcaagccaccctgagttcaaccaccaaggcccgtctctttgctgagaagataaacaaaaatgaacgcaaagggaaggctgaaatcaccctactggtccagggacaggaactccctgagttctgggaggcactcggaggcgaacctagtgagattaagaagaattgggatgatgtgctgactgtggattataccagaaatgctgaggccgtccttcagtccccggggctctctggcaaggttaaacgcgacgctgaaaagaaggatcaaatgaaagctgatctcaccgctctgtttttgccccggcagcccccaatgagcttagcagaagccgaacagctgatggaggaatggaacgaggatctggacgggatggagggcttcgtcttggaagggaagaaatttgcccgcttgcccgaggaagaatttggccatttttatactcaggattgctatgtgttcttatgccgttactgggtcccagtggaatacgaggaagaggagaaaaaagaagacaaagaggaaaaggccgagggcaaagaaggtgaagaggccacggcagaagccgaggaaaagcaacccgaagaagattttcagtgtatcgtctacttctggcaaggacgagaagcttcgaatatgggttggttaacctttacttttagccttcaaaaaaagttcgagtctctgttccccggcaaactggaagttgtacgcatgacccagcagcaggaaaaccctaaatttttatcgcacttcaaaagaaaatttatcattcaccgaggcaagagaaaggcagtacaaggcgcccagcagccctcgctctaccagatccgtactaacgggtccgctttgtgcactcgctgcatccagataaatacggactcctctctgcttaattccgaattctgctttatcctaaaagtaccatttgaatctgaggataatcagggaattgtgtatgcctgggtggggagggccagtgatcccgatgaagcaaagctggccgaggacattctgaatactatgtttgatacatcgtactccaaacaagtgatcaacgagggagaggaacccgaaaatttcttttgggtgggcataggagctcagaagccctacgacgacgacgccgaatacatgaagcacacccggctgttcagatgttctaacgaaaaaggatacttcgctgtgacagagaagtgtagtgatttttgccaggatgatctagccgacgacgacatcatgctgctggataatggacaggaggtgtatatgtgggtggggacgcagacatctcaggtagaaatcaaactctccttaaaagcatgccaagtttacattcagcacatgcggtccaaggagcatgaacgccctcggcggctgcgccttgtgcggaagggtaacgaacagcatgcctttacacgctgtttccatgcttggagcgcattttgcaaggctctcgcttag

SEQ ID NO: 117217 - DNA, 1284 bp, synthetic construct
  misc_feature 1..1284: note = Description of Artificial Sequence: Synthetic coding sequence
  source 1..1284: mol_type = other DNA
atgttttttacatgtgggccaaatgaggcgatggttgtctcagggttttgccggagtccgcccgttatggtggcgggaggacgagtgtttgtgctgccctgtattcagcagatacagaggatatcactgaataccttaactctgaatgtgaaatctgagaaagtgtacaccagacatggtgtaccaatctcagtgactggtattgctcaggttaagattcaaggacagaacaaggaaatgctggccgctgcctgccagatgttcctcggaaagaccgaggcagagattgcacacatcgcattggaaaccctggaaggccaccaacgggccatcatggcacacatgaccgtggaagagatctacaaggaccgacagaaattcagcgagcaagtcttcaaagtcgctagcagcgaccttgtgaatatgggtatatcggtggtgtcatatactctgaaggatatacacgacgaccaggattaccttcattcgcttggcaaagccaggacagcccaggtccagaaagatgctcgtatcggggaagcggaggcaaagcgggacgccggcatacgggaggctaaggcaaaacaggagaaggtgtcggcccagtatctgtcagaaatcgagatggccaaggctcagcgagattatgagttaaagaaagctgcatatgatatagaagtcaatactcgcagagcccaagctgatttggcatatcagctgcaggtcgcgaaaaccaagcaacagatagaggaacaaagagtgcaggttcaggtcgtggaacgtgctcagcaagtcgccgtgcaggaacaggagattgctaggcgggaaaaggaacttgaagccagggttagaaaacctgcagaggcggaacgttacaagctggagcggctggctgaggcggagaagtcacagctgataatgcaggcagaagctgaggcggccagcgtgaggatgcggggagaagcagaagccttcgcaatcggggcccgggcccgggccgaggccgaacagatggctaagaaggcagaagcctttcagttgtatcaggaggccgcacagctagacatgctgcttgaaaaactcccccaggtagccgaagagatttcaggtcccctcactagcgccaataaaatcacccttgtaagctctggatcagggacgatgggagcagcaaaagtgacaggggaggtgttggatatcctaacccgactgccagagtcagtcgagagactgaccggggtgagcatcagccaggtcaaccacaagccactgaggactgcttag

SEQ ID NO: 117218 - DNA, 1284 bp, synthetic construct
  misc_feature 1..1284: note = Description of Artificial Sequence: Synthetic coding sequence
  source 1..1284: mol_type = other DNA
atgttctttacatgtggtcccaacgaggctatggtcgtgagcggcttctgtagatctccacctgtgatggtcgctggagggcgcgtcttcgtgctaccgtgcattcagcagatccagagaatttctctcaacacactgaccctcaatgtgaagtctgagaaggtgtatactcgccatggtgtgcctatcagtgttaccggaatagctcaagtcaagattcagggacaaaataaggaaatgttggctgccgcttgccagatgtttctgggtaaaacagaagccgaaattgcacacatagccctggagacactggaagggcatcagcgagcgatcatggcccacatgaccgtggaagagatctacaaggacaggcagaagttttctgaacaagtctttaaggtcgcgagctccgatttggtcaatatgggcattagcgttgtgtcttacacgctgaaggacattcatgatgaccaggactacctgcacagcctggggaaggctcgcaccgcgcaggtgcagaaggatgccagaatcggcgaggccgaagctaaacgggacgcaggtataagagaggccaaggctaaacaagagaaagtctctgctcagtatctgtccgaaattgaaatggctaaggctcagagggattacgaactgaagaaggcagcatatgacatagaagtgaacacaagaagggcacaggcagacctggcctatcagctgcaggtggcaaagacaaaacagcagattgaagagcagagagttcaggtccaggttgtcgaaagggctcagcaagtggcagttcaagaacaggaaatcgctcgtagagagaaagaacttgaggccagggtgagaaagcctgcggaagccgagaggtataaactggagagactcgcggaggcagagaagtcacaactgatcatgcaggctgaggcagaagcagcatcagttaggatgcgcggagaagcagaggcttttgctatcggtgcaagggcgagagctgaagcagagcagatggccaagaaggccgaagccttccagctgtaccaggaagctgctcaactcgacatgttgctggagaagcttccccaggttgccgaggagatttctggccccctcacctcagctaacaaaatcactctggtgagcagtggttccgggacaatgggtgctgccaaggtgaccggggaggttcttgatatcttaaccaggctgcccgagtccgtggagcgtctgacaggcgttagcatctcacaggtcaaccataagcctctgcgcaccgcctag

SEQ ID NO: 117219 - DNA, 1284 bp, synthetic construct
  misc_feature 1..1284: note = Description of Artificial Sequence: Synthetic coding sequence
  source 1..1284: mol_type = other DNA
atgttcttcacatgtgggcccaatgaggcaatggtcgtgagcggtttctgtagatcaccacccgtgatggttgctgggggaagggtctttgtgctgccttgcatccagcagattcagcgtatctccctcaacacattgacacttaacgttaaaagcgaaaaagtctatacacgccacggcgtgcccatcagcgttacgggcatcgcccaagtaaaaatccaggggcagaacaaggaaatgttagccgcagcttgtcagatgtttcttggcaagacagaagctgagatcgcacacattgccctggagacgctggaaggccaccagagggccattatggcccacatgacagttgaggaaatctataaggacaggcagaaattctccgaacaggtctttaaggtggcttcctctgatctggtcaatatggggattagcgtagtgtcctatactctgaaggatattcacgacgaccaggactacctgcacagtctgggcaaggcccgcaccgcacaagtccagaaggacgcgcgcattggggaggcagaggccaaacgcgatgccggtataagagaagcaaaggcgaagcaggaaaaagttagcgcacagtatcttagcgagatcgagatggcaaaagcacagcgcgactacgagctgaagaaagcagcttatgacatcgaggtgaacacacgccgggcgcaagctgaccttgcataccaattgcaggttgcaaagacgaagcagcaaattgaggaacaacgggtgcaggtgcaagtggttgaaagggcccagcaggtcgccgtgcaggaacaggaaatagcgcgccgcgaaaaagagcttgaggccagggtgcgaaaacctgctgaagctgaaagatataaactggagaggcttgctgaagcagaaaaaagccaattgattatgcaggccgaggcagaggcagcatccgtgcgcatgcgaggagaagcggaagcttttgccatcggtgcccgggctcgcgccgaggcagagcagatggcaaaaaaggctgaggcttttcaactgtaccaggaagcagcgcagctggatatgctccttgagaagctgcctcaggtggcagaggagatctcaggccctctgactagcgcaaacaagatcacgctggtatccagtggctccggcactatgggtgctgctaaggtcaccggcgaagtgctagacatcctcacccgcctgccagagtctgtcgaacggttgactggagtgtctatttcccaggtcaaccacaagccactccgcacagcctag

SEQ ID NO: 117220 - DNA, 438 bp, synthetic construct
  misc_feature 1..438: note = Description of Artificial Sequence: Synthetic coding sequence
  source 1..438: mol_type = other DNA
atgggagtcgaggggaccggccggggaggatgtcgtctgggcggcccagatggaaagggtaagggttgggctcctgtagatgcgaccgcacggctgccccacccccaacgcctcagtctgcctctgctccagctgcaacctgaaccatgtttctccttagtggcacaaatgaggccctggtggtcaccagactacttacactctctgggaaaggctcggacagctcaagtgcagaaagacgctaggatcggcgaagccgaggcaaagagggatgcaggaatccgcgaggcgaaagcaaagcaagagaaggtgagcgctcagtacctgtctgaaatcgaaatggccaaagctcagagggattatgagctgaagaaggccgcctatgacatcgaagtcaatactcggagagctcaagccgacctagcctatcaattgtag

SEQ ID NO: 117221 - DNA, 579 bp, synthetic construct
  misc_feature 1..579: note = Description of Artificial Sequence: Synthetic coding sequence
  source 1..579: mol_type = other DNA
atgttctttacctgcggccctaacgaagcaatggttgtctccggattttgcagaagcccgccggtaatggttgctgggggccgcgtgttcgtgctaccctgcatccagcagatccagcgtatcagcctcaacaccttgacccttaatgtcaaaagtgaaaaggtgaagatccagggccagaacaaagaaatgctggctgctgcttgccagatgttcctcggtaaaacagaagctgagatcgcccatatagcactggagacattagagggacaccaaagggccatcatggctcatatgaccgtggaggagatttataaagacagacagaaattttcagagcaggtattcaaagtggcctcatctgatctggtgaatatgggcatctcagtggtgagctacaccctgaaggacatccatgacgaccaggattatttacacagcctggggaaagccaggactgcacaggttcaaaaagatgcccgaatcggcgaagcagaagccaaaagggacgccggcattagagaggcaaaagccaagcaggagaaggtgtccgcccagtatctatcagagattgagtag

SEQ ID NO: 117222 - DNA, 579 bp, synthetic construct
  misc_feature 1..579: note = Description of Artificial Sequence: Synthetic coding sequence
  source 1..579: mol_type = other DNA
atgttctttacctgtggtccgaacgaagcaatggtcgtgtctggtttttgtcgctcaccccccgtgatggtagctgggggtcgcgtatttgtgctgccctgcatccagcagatacaacggatcagtctcaacaccctcaccctgaatgttaagagtgagaaggtaaaaattcaaggccagaacaaagagatgctggccgccgcttgccagatgtttctaggcaagaccgaagctgaaatcgctcacatcgctttagagactcttgaaggacatcagagggccatcatggctcacatgactgtggaagagatttataaggacagacagaaattttccgagcaggtgtttaaagtggcctcttcagacctagtgaacatggggatctctgtggtttcgtacacgctcaaggacattcacgacgatcaggactacctccattctttaggcaaagccaggaccgcccaggtgcaaaaggatgcccgaattggcgaggccgaggccaagcgggacgccggtattcgggaggccaaggcgaagcaagagaaagtgtcggctcaatacctgagtgagattgaatag

SEQ ID NO: 117223 - DNA, 717 bp, synthetic construct
  misc_feature 1..717: note = Description of Artificial Sequence: Synthetic coding sequence
  source 1..717: mol_type = other DNA
atgagaccttggtggtctcctgtgaaaatccagggacagaacaaggaaatgctcgccgccgcttgccagatgtttttgggcaaaactgaagcggagattgcacacattgctctagagacgctcgaagggcaccagcgcgcaatcatggctcatatgaccgtcgaggaaatctacaaagaccgccaaaaattcagcgaacaagtgttcaaggtggcctcatcggatctagtcaatatgggtatcagcgtggtgagctacacacttaaggacattcacgacgaccaggattacttgcatagcctcggcaaggcgagaacggctcaagtgcagaaggacgcccgaatcggcgaggcagaggccaagcgcgacgcggggattagggaagctaaggctaagcaggagaaggtgtccgcacagtatctaagcgagatcgagatggcaaaagcccagagagactatgagcttaagaaggctgcatacgacattgaagtaaatactaggcgggcgcaggctgatctggcctaccagctccaggtggccaaaacaaagcaacagatcgaagaacagcgtgttcaggtgcaggtggtcgagcgcgctcagcaagtggcggtgcaggaacaagagatcgcaagacgagagaaagagcttgaagcacgggtccggaaaccggccgaggcggaacggtataagcttgagagacttgcggaagctgaatag

SEQ ID NO: 117224 - DNA, 579 bp, synthetic construct
  misc_feature 1..579: note = Description of Artificial Sequence: Synthetic coding sequence
  source 1..579: mol_type = other DNA
atgttcttcacctgcggaccaaacgaggccatggtggtctccggcttctgccggtctccgcccgtgatggttgcaggggggcgcgtcttcgtcctcccatgcattcagcagatacagcgaataagcctgaataccctcaccctgaatgtgaagtccgagaaagtgaagatccagggtcaaaacaaggaaatgcttgccgctgcctgtcagatgtttctgggcaaaaccgaggctgagatagctcacattgccctggagactctggaagggcaccagcgtgctatcatggcgcatatgaccgtcgaggagatctacaaggaccgccagaagttctccgaacaggtcttcaaagtggcatccagtgatctcgttaacatgggaatcagtgtggtgagctatactttaaaagacattcacgacgaccaggattatcttcactctctcgggaaggccagaactgcgcaggtacagaaggacgccagaatcggagaggccgaagcaaagcgtgacgcggggatacgtgaggcaaaggcaaagcaggaaaaagttagtgcacagtacctcagtgaaatcgagtag

SEQ ID NO: 117225 - DNA, 579 bp, synthetic construct
  misc_feature 1..579: note = Description of Artificial Sequence: Synthetic coding sequence
  source 1..579: mol_type = other DNA
atgttctttacatgcgggcctaacgaggctatggtggtcagcgggttctgtagatcaccaccggttatggtagcaggaggtcgcgtctttgtgctgccttgtattcagcagatccagcgaatttctctcaacactcttactctgaacgtgaagtcagaaaaagttaagatccagggacagaacaaagaaatgctcgccgccgcatgccagatgtttctggggaagactgaagccgaaattgctcacattgccctggaaaccctcgaagggcatcagagggctatcatggcccatatgactgttgaggagatctacaaagatagacagaaattttcagagcaggtctttaaggtcgcctcctcagatctcgtaaatatggggatctctgttgtcagctacacactgaaggatatccacgatgaccaggattacctccattcacttgggaaggcaaggactgcccaagtccaaaaagatgcccgaattggggaggctgaagccaagcgagatgcaggcatcagggaagccaaggccaagcaggagaaggtgagcgcacagtatttatctgagatagagtag

SEQ ID NO: 117226 - DNA, 438 bp, synthetic construct
  misc_feature 1..438: note = Description of Artificial Sequence: Synthetic coding sequence
  source 1..438: mol_type = other DNA
atgggcgtagaggggaccggcaggggtggctgcaggctaggtggcccggacggcaaagggaaaggttgggcaccggtcgatgcaaccgctagactcccccatccacagcgactgtctctgccattgctgcagcttcagccagagccctgtttcagcctcgtggcccagatgcggccctggtggagcccagactacctgcacagtctcgggaaggctcggactgctcaggtgcagaaggacgcgagaattggcgaggcagaggctaaacgggatgccggaattcgggaggccaaggcaaaacaggagaaggtgtccgcacagtacctgtcagaaatcgagatggcaaaggctcagcgtgattatgaattaaagaaagcagcctacgatattgaagtgaataccagaagggcccaggctgatctggcttatcaactgtag

SEQ ID NO: 117227 - DNA, 273 bp, synthetic construct
  misc_feature 1..273: note = Description of Artificial Sequence: Synthetic coding sequence
  source 1..273: mol_type = other DNA
taggccaagaaagccgaagcctttcagttataccaggaagcggcccaactcgacatgctgctggaaaagcttcctcaggtggcagaggaaatttccggtcccttgaccagtgcaaacaagattaccctcgtgagttcagggtctgggactatgggagcagcaaaggtcactggtgaagtgctggatatcctaacaagactgcccgaatcagtcgagagattaactggagtgagtatcagccaggtaaatcataaaccgctgcgaaccgcctag

SEQ ID NO: 117228 - DNA, 708 bp, synthetic construct
  misc_feature 1..708: note = Description of Artificial Sequence: Synthetic coding sequence
  source 1..708: mol_type = other DNA
atgttcttcacttgtggtcccaacgaagcaatggttgtgtccggtttttgccggtccccccccgtaatggtcgctggaggcagagtattcgtgctgccttgcatccagcagatccagcgcatcagtttgaatactctgacactgaatgtgaagtcagagaaggtgtataccagacacggtgtaccgatttctgtcacaggcatagcccaggtgaaaatccagggacagaataaggaaatgttagcggccgcatgccagatgttcttgggaaagaccgaagcagaaattgcccatattgctctggagactctggagggtcaccagcgcgctataatggcccatatgacagtggaggaaatttataaggaccgccagaaattttctgagcaggtgtttaaagtggctagcagcgacctggtgaatatgggcatatctgtggtatcctacacattgaaggacatccatgatgatcaagactacttgcactccctgggcaaggctcggactgcacaggtgcagaaagatgcacgcatcggcgaagcagaggcaaaaagagacgccgggatcagagaggcaaaagcgaaacaggaaaaagtttccgcacaatacctgagcgaaatagagatggccaaagcacaaagggattatgagttgaaaaaagccgcgtatgacattgaggtgaatactagaagggcccaagctgactag

SEQ ID NO: 117229 - DNA, 717 bp, synthetic construct
  misc_feature 1..717: note = Description of Artificial Sequence: Synthetic coding sequence
  source 1..717: mol_type = other DNA
atgcgaccatggtggtcacctgtcaagatccaagggcaaaataaagagatgcttgccgccgcctgtcaaatgtttctcggtaaaacagaggccgagatagcgcacatagctctggagacacttgagggccaccagcgcgccatcatggcgcacatgaccgtggaggagatttacaaagataggcagaaattcagcgagcaggtgtttaaagtggctagcagtgatctcgtcaacatgggcatctctgtggtatcgtatacactcaaggatattcacgatgatcaggactacctgcacagtctgggaaaggcaaggactgcacaggttcagaaggatgcaagaattggagaggcagaggccaagcgcgatgctgggattcgggaagctaaggctaagcaggaaaaggttagtgctcagtacttatccgagatcgaaatggcaaaagctcagcgcgactacgagctcaaaaaggccgcctacgacatcgaagttaacacccgccgggcccaggccgacctggcttatcaacttcaggtcgccaaaactaagcagcagattgaggagcaacgcgttcaggtccaggtcgtggagcgggcacagcaagtagccgtccaggagcaagaaattgcgcgccgggagaaggagctcgaagctagggtgcggaagcccgctgaggccgagcgctataaactggagaggttggccgaggccgaatag

SEQ ID NO: 117230 - DNA, 417 bp, synthetic construct
  misc_feature 1..417: note = Description of Artificial Sequence: Synthetic coding sequence
  source 1..417: mol_type = other DNA
gtgaaaatccagggacagaacaaggaaatgctagcggcagcctgccagatgtttttgggtaagaccgaagctgaaatagcacatattgcactggaaaccctagaagggcaccagcgcgctattatggctcacatgacggtggaagagatttataaagacagacaaaagttttcagaacaagtttttaaggtggcctcgagtgaccttgtgaatatgggcatcagcgtcgttagctacactctgaaggatattcatgatgaccaggattatctgcattctctgggcaaggctagaacagcccaggtccagaaagacgcacggatcggtgaggccgaggccaagagggatgcaggcattcgagaggctaaagctaagcaagaaaaggtctcggcccagtaccttagtgagattgaatag

SEQ ID NO: 117231 - DNA, 558 bp, synthetic construct
  misc_feature 1..558: note = Description of Artificial Sequence: Synthetic coding sequence
  source 1..558: mol_type = other DNA
atgttctttacctgcgggcccaatgaggccatggtggtgagcggattctgtcgcagcccacccgtgatggtggctggaggtagagtgttcgtcctcccgtgcatacagcagatccagcgaatttcactgaatacgttgacactgaacgtgaagtccgagaaggtgtacacacgacacggcgttcctatctcagtaactgggattgcccaagtcaagatccagggccagaacaaggaaatgctggccgcggcatgtcaaatgttcctgggaaaaacagaagctgagatcgcccacattgctctcgagacactggagggacaccagcgggccataatggcacacatgactgtggaggagatttacaaggataggcagaaatttagtgaacaggtattcaaagtcgcgagcagcgatctggtgaacatgggaatctccgtggtctcgtatacgctgaaggatattcatgacgaccaggactatcttcacagccttgggaaagcacgtactgcgcaagtgcagaaggatgcacgaattggggaagctgaagccaagcggtag

SEQ ID NO: 117232 - DNA, 348 bp, synthetic construct
  misc_feature 1..348: note = Description of Artificial Sequence: Synthetic coding sequence
  source 1..348: mol_type = other DNA
atgggagtggaagggacaggacggggcggctgtaggctcggaggcccagatgggaagggtaaagggtgggcaccagtcgatgcaaccgcccgacttccccatccccaacgtcttagcctgcccctgttacagttgcagcccgagccctgcttcagcctggtggcccagatgcgaccgtggtggtcccctgattatttacacagtctgggtaaggctcgaacagcccaggttcagaaggatgcacgaatcggcgaggcagaagccaagagggatgctggtatccgcgaggcaaaggctaaacaggaaaaggtgtccgctcagtatctctccgagatcgagatggcatag

SEQ ID NO: 117233 - DNA, 561 bp, synthetic construct
  misc_feature 1..561: note = Description of Artificial Sequence: Synthetic coding sequence
  source 1..561: mol_type = other DNA
gtggctaagactaagcaacagattgaggaacagagagtgcaagtccaggtcgtcgaacgtgctcagcaggtggccgtccaggagcaagaaattgccagaagggagaaagaactagaggcccgcgtgcgtaaacctgccgaagcggaacggtataagctggagcgcctcgcggaggcggagaaatctcagctgattatgcaggcagaagcagaggcggctagcgtgcgaatgagaggagaagctgaagctttcgctatcggggcccgcgcaagagccgaggcagagcagatggcaaagaaggccgaggcttttcagctttaccaagaagcggctcagctggacatgctgctggagaaacttccacaagtcgccgaagaaatcagtggcccacttacctctgcgaacaagatcacgttggtgagtagcgggtcaggaaccatgggtgccgccaaagttaccggtgaggttctggatatccttaccagactgccagagagcgtcgagcgattgaccggtgtgtctatttcacaggtcaaccacaaaccattacgcaccgcatag

SEQ ID NO: 117234 - DNA, 438 bp, synthetic construct
  misc_feature 1..438: note = Description of Artificial Sequence: Synthetic coding sequence
  source 1..438: mol_type = other DNA
atgggagtggagggaaccgggcggggtggttgcaggctggggggacccgatggcaagggcaagggctgggcgcccgtggacgctactgctcgtctgccccatccacagaggctgtccctgcccctcttacagctgcagcctgaaccctgctttagtctggtcgcccagatgagaccctggtggagccctgactacctgcacagtctgggcaaggctcggactgcgcaggtccaaaaagacgccagaatcggcgaggccgaggcgaagagggacgcgggaattcgcgaggccaaagccaaacaggagaaagtcagcgcacagtatctgtccgagattgagatggccaaggctcaacgagactatgagctaaagaaagctgcttacgatatagaagtcaatactagaagagctcaagctgacctcgcttatcagctttag

SEQ ID NO: 117235 - DNA, 558 bp, synthetic construct
  misc_feature 1..558: note = Description of Artificial Sequence: Synthetic coding sequence
  source 1..558: mol_type = other DNA
atgttcttcacatgcgggcccaatgaggcaatggtagtgagtggcttttgtcgctctcctcccgtcatggttgcaggaggacgggtctttgtgcttccttgcatccagcagattcaaagaatttctctgaataccctgaccctgaacgtgaagtctgaaaaagtatacacccggcacggcgtccccatatccgtcaccggcatcgcccaggtgaagatccaaggacagaacaaggagatgctagcagctgcatgtcagatgttcctgggtaagacagaggcagaaatagcgcatatcgcacttgaaactctggaaggccaccagcgggctatcatggctcatatgactgtggaggaaatatataaggatcggcaaaagttttccgaacaggtcttcaaggttgccagctccgatctagttaatatgggtatttcggtagtaagttacaccctaaaggatatccacgatgaccaggactacctgcacagcctgggcaaggccagaacggcgcaggtccagaaggatgcaaggatcggagaggctgaggccaagcgatag

SEQ ID NO: 117236 - DNA, 633 bp, synthetic construct
  misc_feature 1..633: note = Description of Artificial Sequence: Synthetic coding sequence
  source 1..633: mol_type = other DNA
atgttctttacctgcgggcctaacgaggccatggtcgtgagtgggttctgccgctcaccccctgtcatggtggcggggggtcgcgtctttgtgctgccctgcattcaacagatccagagaatttcactgaacactttaacgctaaatgtcaagagtgaaaaggtgtacacccgacatggagtgcccatatcagtcaccggcatcgcccaagtgaaaattcaggggcagaataaggaaatgttggcggcggcatgccaaatgtttttaggcaagacagaagcagaaatcgcccatatcgccctcgagacacttgaaggtcaccaacgcgctataatggcccatatgaccgtcgaggagatatacaaagaccgccagaagtttagtgagcaggtgtttaaagtggcgtcctctgatcttgtgaacatgggaatctctgttgtaagctacacactgaaagacatacatgatgatcaggactatctccactctctcggcaaagcgcgtacggcacaggtgcagaaagatgctagaattggggaagctgaggccaagcgggatgcaggaattcgggaggcaaaagctaagcaggagaaggtcagcgcccagtatctgagcgaaatcgaaatggcctag

SEQ ID NO: 117237 - DNA, 633 bp, synthetic construct
  misc_feature 1..633: note = Description of Artificial Sequence: Synthetic coding sequence
  source 1..633: mol_type = other DNA
atgtttttcacttgtggccctaacgaggcaatggtggttagcgggttctgccgctcccccccagttatggtggctgggggacgcgtgtttgtactcccttgcatccagcagattcagagaatctccctcaacacacttacgctcaacgttaagagcgagaaagtttacaccagacacggtgtacctatcagtgttacaggaatagcccaggtaaagatccaaggtcaaaacaaagaaatgctcgcagccgcatgtcaaatgttcctgggcaaaactgaggcagagatcgcccatattgcactggagactctggaggggcaccaacgagcgataatggcacatatgacagtggaagaaatttacaaggataggcaaaagttttctgaacaggtttttaaggttgctagctccgacctggtgaatatgggaatcagtgtggtgtcatatacactcaaagatattcacgacgaccaggattacttacactcgcttggcaaggccagaacagcccaggtccagaaagacgcacggatcggggaagccgaagccaaacgggatgctggtataagggaagcgaaagccaaacaagaaaaggtgagtgcccagtatctctccgaaatcgagatggcatag

SEQ ID NO: 117238 - DNA, 759 bp, synthetic construct
  misc_feature 1..759: note = Description of Artificial Sequence: Synthetic coding sequence
  source 1..759: mol_type = other DNA
atgttcttcacttgcggacctaatgaagccatggtcgtttccggcttctgccggtccccacccgtgatggtagccggcggacgggtgttcgtactcccttgtattcagcagattcaacggatttccttgaacactcttactcttaacgttaagtcagaaaaggtttataccagacacggcgtgcccatctctgtgacaggcatcgcccaagtcaagatccaaggccaaaacaaggaaatgcttgctgctgcttgccagatgttcctcggtaaaaccgaagctgaaattgctcatatagctttagaaacccttgaaggtcatcaaagagctattatggcgcatatgaccgtggaggagatctataaggatagacagaaattttccgagcaagtcttcaaggtcgcgagctccgacttagtgaacatgggcatttccgtggtgagctacaccttgaaggacatccatgatgatcaggattatctgcattccctggggaaggcccggactgcgcaggtgcagaaggacgcccgaataggcgaggccgaggctaagcgggatgctggcatcagagaggcaaaagccaagcaggagaaagtgtccgcccaatatctttcagagattgaaatggccaaagctcaaagggactacgagctgaagaaggccgcttacgatatcgaagttaatacacgcagagcccaggctgatctggcttatcagctgcaggtagccaagacaaagcaacaaattgaggagcagtag

SEQ ID NO: 117239 - DNA, 444 bp, synthetic construct
  misc_feature 1..444: note = Description of Artificial Sequence: Synthetic coding sequence
  source 1..444: mol_type = other DNA
atgcgcccctggtggagtccagtgaaaatacagggccagaacaaagagatgctagccgccgcatgccaaatgtttctaggaaagaccgaggccgagattgcccacattgccttggaaacactggaggggcaccaaagagctataatggctcacatgactgtggaggagatctataaggaccggcagaaattcagtgagcaggtgtttaaggtggcgtcgtcagatcttgtcaacatgggcatcagcgttgtcagttacacgctaaaggacatccacgacgaccaggactatctgcactctttgggtaaggctcgcactgcccaggtgcagaaagacgcacgcatcggcgaagcggaagctaaaagggacgcagggattagggaggcaaaggcaaagcaggagaaggtatcagcccagtaccttagcgaaattgagatggcttag

SEQ ID NO: 117240 - DNA, 549 bp, synthetic construct
  misc_feature 1..549: note = Description of Artificial Sequence: Synthetic coding sequence
  source 1..549: mol_type = other DNA
gttaagattcagggccagaacaaagagatgctggcagctgcctgtcagatgttcctcggcaagaccgaagcagaaattgcccacatagcgctggaaacacttgaagggcaccagcgtgcgatcatggcacatatgactgtcgaggagatctacaaagatagacagaaattttctgagcaggttttcaaggtggcatcgagcgatctggtgaacatggggatctctgtggtttcatatacacttaaggacattcacgatgatcaggactatctgcatagcctgggaaaggcccggactgcccaggtgcagaaggatgccagaattggagaggcagaagccaagcgcgacgcaggcatccgagaggccaaagctaagcaggagaaagtgtcagcgcaatatttgtccgagatcgaaatggctaaagcccagagagactacgagctgaagaaagccgcctatgatatagaagtgaacacccggcgcgctcaggctgacctagcttatcagttacaggtcgccaaaacgaagcagcagatcgaggaacagtag

SEQ ID NO: 117241 - DNA, 348 bp, synthetic construct
  misc_feature 1..348: note = Description of Artificial Sequence: Synthetic coding sequence
  source 1..348: mol_type = other DNA
gtgaaaattcagggacagaacaaggagatgctcgcagccgcgtgtcaaatgttcctgggtaagactgaggcagaaattgctcatattgctctcgaaacactagagggtcaccagagagctattatggctcacatgaccgtcgaggagatttacaaagataggcagaagtttagtgagcaggtcttcaaggtggcctcttcggatctggtgaacatggggatctcagtggtttcttacacactgaaagacatccacgatgaccaggattacttgcactcactggggaaagcacgcactgcccaagtgcagaaagacgcgcgtatcggggaggccgaagctaaaagatag

SEQ ID NO: 117242 - DNA, 708 bp, synthetic construct
  misc_feature 1..708: note = Description of Artificial Sequence: Synthetic coding sequence
  source 1..708: mol_type = other DNA
atgttcttcacatgtgggcctaacgaggccatggttgtctccggattttgtaggtccccacctgtaatggtggccggagggcgcgtgtttgttctcccatgcattcaacagatccaaagaatatcactgaacacattgactttgaatgtgaaatccgaaaaagtttacactcgtcacggagtccccattagcgtgaccggcatcgcacaagtcaagattcaaggtcagaataaagagatgctggcagctgcctgccagatgtttctgggcaaaacagaagctgagatcgctcatatagcactggaaacattagaaggacaccagagagctattatggcccacatgacagtcgaggagatctacaaggataggcaaaaatttagcgaacaggtattcaaggttgcgtctagtgacttggttaatatgggcatttccgttgtgagctatacgctcaaagacatacatgatgatcaagactacttgcactctttgggcaaggctagaactgctcaggtgcaaaaggatgctaggatcggcgaggccgaagcgaaaagggatgccggaattagggaggccaaggcaaagcaagagaaggtgagtgctcagtacctttcagaaattgagatggcgaaagcccagcgggactacgaacttaagaaagccgcatatgacatcgaggtcaatactcgccgggcccaggcagactag

SEQ ID NO: 117243 - DNA, 1284 bp, synthetic construct
  misc_feature 1..1284: note = Description of Artificial Sequence: Synthetic coding sequence
  source 1..1284: mol_type = other DNA
atgttctttacatgtggaccaaatgaagcgatggtggtcagtggattctgtcgcagcccccccgtgatggttgccggtggcagagtatttgtgctgccctgtattcagcagatacagagaatcagcctcaacactctgacgctcaacgtgaagagcgagaaggtgtacactcgtcacggggtaccgatcagcgtaacaggcattgcccaggtgaaaattcagggtcagaataaagagatgctagctgccgcctgtcagatgtttttgggcaagactgaagctgagatcgcccacatcgcactggaaactctggaagggcaccagcgggctataatggctcatatgactgtggaagagatctacaaagaccggcagaagttctccgaacaggtgtttaaggttgctagctctgacctcgtcaacatgggcatatctgtcgtttcctacacactcaaagacatacatgacgatcaagactatcttcattcacttggcaaggcgagaacagctcaggtgcagaaagatgctaggattggtgaagcagaggcaaagcgagacgcgggtattcgggaagctaaagccaaacaggaaaaagtgtccgcccaatacctgtcagaaatcgagatggcaaaggctcagagggactacgaacttaaaaaggccgcctacgacatagaggtgaatacacgacgtgcgcaagcagacttggcgtaccaactccaggtcgccaagaccaagcagcaaatcgaagagcagagagtgcaagtccaggtcgttgaacgcgcccaacaggtggctgtgcaggaacaggagatcgccaggcgggaaaaagagcttgaagcacgggtccgtaagccggctgaggcagaaaggtacaagctggagcggctggccgaagccgagaagtctcagctgattatgcaagctgaagccgaggctgcgtctgtgagaatgcggggcgaggctgaggccttcgcaattggagctagggccagggcagaagccgagcaaatggcaaagaaagccgaagcattccagttataccaggaggccgctcagttagatatgctcttggaaaagctgccccaagtggctgaggagatttctggccccttaacgtcagctaataaaatcacacttgtttccagcggtagcggcactatgggagctgcgaaagtcacaggggaagtcctggacattttgacgaggctccctgagtccgtcgaacgcctaactggcgtgagtatttcacaggttaatcataaaccgctaagaaccgcctag

SEQ ID NO: 117244 - DNA, 498 bp, synthetic construct
  misc_feature 1..498: note = Description of Artificial Sequence: Synthetic coding sequence
  source 1..498: mol_type = other DNA
gtcaagatccaaggccagaataaagaaatgttggctgcagcctgccagatgtttcttggcaagacagaggcagagattgcccacatcgccttggaaacactggagggccaccagagggctattatggcccatatgacagttgaggaaatctataaagaccgccagaaattctccgaacaggtatttaaagttgcatcaagtgatctcgtgaacatgggcattagcgtggtgtcctacaccctgaaggatattcatgacgaccaagactacctgcacagcctaggtaaagcccgtactgcgcaagtccaaaaggatgccaggatcggcgaagccgaagccaagcgggatgccggcatccgcgaagctaaggctaagcaggaaaaagtcagcgcccaatacctgagcgagatagaaatggccaaggctcagagggactacgaattgaaaaaggccgcctacgacatcgaagtgaatactcgtcgagcccaggccgactag

SEQ ID NO: 117245 - DNA, 438 bp, synthetic construct
  misc_feature 1..438: note = Description of Artificial Sequence: Synthetic coding sequence
  source 1..438: mol_type = other DNA
atgggggtagaggggaccggccgcggaggctgcagacttggaggccccgatgggaagggcaaaggttgggcacctgtggacgctactgctcgactcccccaccctcagcggctgtccctccccttgttgcagctacagcctgagccatgtttttcactcgttgcgcaaatgcgtccttggtggtcccccgattacctgcacagtctcggcaaggcaagaacagcacaagttcaaaaggacgcacgcatcggtgaagcagaggcaaaaagagacgcaggcatcagggaagctaaagcaaaacaagaaaaagtctctgcgcagtacctaagcgagatcgaaatggctaaggcccagagagactacgagctgaaaaaggctgcctacgacatcgaggtgaatactcgccgagcccaggccgatctagcatatcagctgtag

SEQ ID NO: 117246 - DNA, 759 bp, synthetic construct
  misc_feature 1..759: note = Description of Artificial Sequence: Synthetic coding sequence
  source 1..759: mol_type = other DNA
atgtttttcacctgcggccctaacgaagccatggttgtgagcggcttttgtagatccccacccgttatggtggccggaggccgggtgtttgtcctgccatgtattcagcaaatccaaagaatatctctcaacacccttacccttaatgtgaagtcggagaaagtttacacacggcatggcgtgccaatctccgttacaggtattgctcaagtcaagattcagggtcagaataaagaaatgctggcggcagcctgccagatgttccttgggaagaccgaggccgagatcgctcatattgcgctcgagacgctggagggacaccaacgcgctattatggcacacatgactgttgaggaaatttacaaagaccgtcagaaattttctgaacaagtgttcaaagtggcctcctctgacctggtgaatatgggaatttcagtggtcagctatacccttaaggacatccatgacgaccaggactatctacactctttgggcaaagcaaggaccgcccaggtgcaaaaggatgcccggatcggagaggcggaagcaaagcgagacgccgggatccgggaggcaaaggcaaaacaggagaaggtgagcgcccagtacctcagtgagattgagatggctaaagcccaacgcgactacgaacttaaaaaggctgcctacgatatcgaggtgaatacaagaagggcacaagccgacctggcctaccagctacaggtagccaaaaccaagcagcaaattgaggagcaatag

SEQ ID NO: 117247 - DNA, 759 bp, synthetic construct
  misc_feature 1..759: note = Description of Artificial Sequence: Synthetic coding sequence
  source 1..759: mol_type = other DNA
atgttctttacctgtgggccgaatgaagcaatggtcgtgagtggattctgccggtctccacctgtgatggtcgcgggaggtcgagtattcgtgctgccctgtattcagcaaattcagaggatatcattgaatactttaacactcaacgtcaagtctgaaaaggtctacacacggcatggcgtaccgatttctgtgacaggaatcgcccaagtcaaaatacaggggcagaacaaagagatgctcgccgccgcctgtcagatgtttcttggcaaaaccgaagcggagatagcgcatattgcccttgagacactggaaggccaccaacgtgctatcatggctcacatgaccgtggaagagatctacaaggataggcagaagttctcggagcaggttttcaaggtggcatccagtgatcttgtgaacatggggatcagtgtggtttcatacacactcaaggatatccacgacgaccaagactatctgcactcactgggaaaggcccgcacagcccaggtgcagaaggacgccagaatcggagaggctgaagccaaaagagatgctgggatccgcgaggccaaagctaagcaggaaaaagtcagcgcacagtatctgtccgagattgagatggccaaggctcaacgggactacgaactcaagaaggcggcgtatgatattgaggtgaacacacgccgggcacaggccgatctggcttaccagttacaggtggccaaaaccaagcagcaaatagaggagcagtag

SEQ ID NO: 117248 - DNA, 249 bp, synthetic construct
  misc_feature 1..249: note = Description of Artificial Sequence: Synthetic coding sequence
  source 1..249: mol_type = other DNA
gactacttacattcactgggaaaggccaggacagctcaagtccaaaaggacgccaggatcggtgaggccgaggctaaacgagacgcgggcataagggaagcgaaggccaaacaggaaaaagtgagcgcccagtacttatctgagatcgagatggccaaagcacagagggactatgagctgaagaaggcggcatatgacatcgaggttaacacaaggcgggcccaggctgatctggcataccagctgtag

SEQ ID NO: 117249 - DNA, 558 bp, synthetic construct
  misc_feature 1..558: note = Description of Artificial Sequence: Synthetic coding sequence
  source 1..558: mol_type = other DNA
atgtttttcacgtgtggacccaacgaagccatggtagtcagcggtttctgtcgcagtccccccgtaatggtggctggaggcagggtctttgttcttccctgcattcagcagattcagagaatttcccttaatacacttacacttaatgtgaaaagcgaaaaggtgtacacaaggcatggtgttccaatcagtgttaccggaattgcgcaggtgaagattcagggtcagaacaaggagatgttggcagctgcctgccaaatgtttctaggaaagactgaggctgagattgcacacatcgctcttgagactctggaaggacaccagcgggcgatcatggctcatatgactgtggaagaaatttacaaggatcgccagaagttctcagagcaggtgtttaaggtggcatccagcgacctcgtcaacatgggaatatccgtggtaagttacaccctaaaagatattcatgatgatcaggactatctgcacagtctgggcaaagcaaggacagcccaggtccaaaaagacgccaggatcggagaagccgaggcaaagaggtag

SEQ ID NO: 117250 - DNA, 759 bp, synthetic construct
  misc_feature 1..759: note = Description of Artificial Sequence: Synthetic coding sequence
  source 1..759: mol_type = other DNA
atgttctttacgtgtggtcctaatgaagccatggtcgtgagcggcttttgcaggagccctccggtcatggtagcaggaggccgcgtcttcgttcttccctgcattcagcagattcagcgtatctcacttaacacattaacattgaacgtcaagagcgagaaggtgtacaccaggcacggcgttcctatttccgtgactggcatcgcccaggtgaagatccagggacagaataaagaaatgctggccgctgcttgtcaaatgtttctcggcaagacagaagccgagatcgctcacatcgctctggaaactctcgaagggcatcagagagccataatggcccatatgacagtggaggagatctacaaggaccgccagaagttcagcgaacaagtatttaaagtggcctcctcagacttagtgaatatgggcatttctgtggtaagttacacactcaaagatatccacgacgaccaggattacttacattctctcggcaaggcgcggactgcccaagtgcaaaaggacgccaggattggggaagccgaagccaagagagatgctggaatcagggaagcaaaggccaagcaggaaaaggtatctgcacagtacctgagcgagattgagatggctaaagcccagagggactacgagttgaaaaaggcggcctatgatatagaagttaatacacgccgggcccaggccgatcttgcatatcagctccaggttgctaaaacaaagcagcagatcgaagagcaatag

SEQ ID NO: 117251 - DNA, 558 bp, synthetic construct
  misc_feature 1..558: note = Description of Artificial Sequence: Synthetic coding sequence
  source 1..558: mol_type = other DNA
atgttttttacatgcgggcccaacgaggccatggtggtaagtggtttctgccgcagcccccccgtcatggtggctggcggcagggtgtttgtgctgccctgcattcaacagattcagcgaattagtcttaacacactgaccctgaatgtgaagtctgagaaggtgtatactcggcacggcgtccccataagtgttacgggcatcgcgcaggttaagatccaagggcagaacaaagaaatgttagccgctgcctgccagatgttcctgggcaagaccgaagccgaaattgcacatatagctctggagacactggaaggacaccagcgcgccattatggcccacatgaccgtcgaggaaatttacaaggacagacagaagttttctgagcaagtgttcaaggtcgcctcctcggatctggtgaatatggggatttctgtggtgtcatacacgctcaaggatatccacgatgaccaggattaccttcattctttaggaaaggccagaactgctcaagtccagaaggatgccagaatcggcgaggcggaagcgaaacgttag

SEQ ID NO: 117252 - DNA, 717 bp, synthetic construct
  misc_feature 1..717: note = Description of Artificial Sequence: Synthetic coding sequence
  source 1..717: mol_type = other DNA
atgcggccatggtggtcacccgttaagattcagggccagaacaaggaaatgctggcggcggcatgccagatgttcctcggtaagacagaagcagaaatcgctcacattgccctagaaacactggaaggtcatcaacgcgccatcatggcgcatatgacagttgaggagatttataaagatcgtcaaaagtttagtgagcaggttttcaaggtcgcatcctccgacttagtgaacatgggcatctctgtggtgtcttacacactcaaggacattcacgatgaccaagactacctccactcactgggcaaggcaagaacagctcaggttcagaaggatgccagaattggcgaagccgaagcaaagagagacgcgggaatccgggaggcaaaggcaaaacaagaaaaggtctcagcacagtatctgtcggagattgaaatggctaaagcgcaacgggactacgagcttaagaaagccgcgtacgatatcgaggtgaacactcggcgcgcacaggcagatctggcctatcagcttcaggttgcgaaaaccaaacagcagatcgaagagcagcgggtgcaggtgcaagtagtagagcgcgctcaacaagtggcagttcaggagcaagaaatagcgcgacgggagaaggaactggaggctcgtgtgcggaagcctgcagaagccgagcgatacaagctggagagattggccgaagccgaatag

SEQ ID NO: 117253 - DNA, 1284 bp, synthetic construct
  misc_feature 1..1284: note = Description of Artificial Sequence: Synthetic coding sequence
  source 1..1284: mol_type = other DNA
atgttcttcacgtgtggcccaaatgaggccatggttgtgagtggattttgcagatcccctcctgtgatggttgccggcggtagagtgttcgttctcccatgcattcaacagatccaaaggatttctctcaacacattgaccctgaatgtgaaatctgagaaggtctatactcgccatggggttcccatctctgtcaccgggatagctcaggtgaaaatacagggacagaacaaagaaatgctggccgctgcctgtcaaatgttcttgggaaagacagaggctgagattgctcacattgcgctcgagacactggaaggacaccagagagctattatggcccatatgacagtggaagaaatatacaaggataggcaaaagttctctgagcaagtgttcaaggtggcaagctcagatcttgtgaatatgggaatcagcgtggtgtcatatacgcttaaagacatccatgatgatcaagactatctgcacagtttagggaaggcgcgaaccgcccaggtccaaaaggatgctcgtatcggggaggccgaagctaaaagggacgcaggtattcgggaagctaaggcaaaacaggagaaagtgagcgcccagtatcttagtgaaatagagatggccaaggcacagcgagattatgagctgaagaaggcagcatacgatatcgaagttaacacacggcgggcacaagccgaccttgcataccagctccaggtcgcgaagaccaaacagcagattgaggaacagcgcgtgcaagtgcaggtagtcgagagagcccagcaggtagctgtgcaggaacaggagattgccaggcgggagaaagaactggaggcgcgagtcagaaagcccgccgaggcagagagatataaactggaaaggctggccgaagcggagaagagtcaactgataatgcaggccgaggctgaggcagcatcagtgcgtatgcgaggagaggctgaagcgtttgctataggggcacgcgcccgagcagaggctgagcagatggccaagaaagctgaagcttttcagctgtatcaggaggccgcccaactcgacatgctactggaaaagctcccgcaagtggcagaggaaatcagcggccccctcacctctgcgaataaaatcacactggtgagttccggatcaggcacaatgggcgcggcgaaggtcacaggagaggttctcgatatcctgacgcgcctgcctgagtccgtcgagcgcctcaccggagtctctatttcccaagtaaatcataaacccctgaggaccgcatag

SEQ ID NO: 117254 - DNA, 579 bp, synthetic construct
  misc_feature 1..579: note = Description of Artificial Sequence: Synthetic coding sequence
  source 1..579: mol_type = other DNA
atgttcttcacctgcggccccaatgaagctatggtggtgtctggcttctgtcgttctcctcccgtcatggttgctggaggtcgcgtcttcgtgctgccttgcattcagcagattcagcgcatttctctgaacaccctcactctgaatgtcaaatcggaaaaagtcaaaatccagggacaaaataaagagatgctcgcagcggcttgtcagatgtttcttggcaagacagaggctgagatagctcatattgcccttgaaaccttggaagggcaccagcgggcgatcatggcgcacatgacggttgaagaaatatacaaagacaggcagaagttctctgaacaagttttcaaagtagccagcagtgacctggtaaatatggggatcagcgtggttagttatactctgaaagacatccatgacgaccaagactatctgcactccttaggtaaggctcgtactgcacaggtacaaaaggatgcccggattggcgaggccgaggccaagcgggacgccggaatcagagaggcaaaggccaaacaggaaaaggtaagcgcccagtatttgagtgagatcgaatag

SEQ ID NO: 117255 - DNA, 708 bp, synthetic construct
  misc_feature 1..708: note = Description of Artificial Sequence: Synthetic coding sequence
  source 1..708: mol_type = other DNA
atgttcttcacctgcggccctaacgaggctatggtggtgtcaggattttgtcggtcgcctccagtcatggtggccggcggtagggtcttcgtcttgccatgtatccagcaaattcagcgcatttcacttaatacgctcacgttaaatgtgaaaagcgaaaaggtctacactcgccatggggtgcctatttccgttacagggatagctcaggtaaaaattcaaggacagaataaagaaatgctggcagccgcttgccaaatgttcttagggaagaccgaggcagagatcgcgcacatagctctggagaccctcgagggacaccagagagcgatcatggctcatatgaccgtcgaggagatttacaaagaccggcaaaagttctccgagcaggtcttcaaggtggcgagctccgacctcgtgaatatgggcatcagcgtggtgtcgtacacactgaaagacatacatgatgaccaggactacctgcactcactgggaaaagctcggacagcccaggtccagaaagacgcacggatcggtgaggccgaagctaagcgggatgcggggataagagaggctaaagctaagcaggaaaaggtgtctgcacagtacctgtctgagatcgagatggctaaggcccagagggactacgagctaaaaaaggccgcttatgatatagaggttaacactcgtagggcgcaagccgattag

SEQ ID NO: 117256 - DNA, 183 bp, synthetic construct
  misc_feature 1..183: note = Description of Artificial Sequence: Synthetic coding sequence
  source 1..183: mol_type = other DNA
gtggctaagacaaagcagcaaatcgaagagcaaagagtgcaggttcaggtggtggaacgcgcccagcaggttgcggtccaagaacaggagatcgcccgcagagagaaggagctagaggcccgtgtgagaaagcctgccgaagccgagcgctataaacttgagaggcttgctgaggccgagtag

SEQ ID NO: 117257 - DNA, 717 bp, synthetic construct
  misc_feature 1..717: note = Description of Artificial Sequence: Synthetic coding sequence
  source 1..717: mol_type = other DNA
atgagaccctggtggtcacctgtgaaaattcagggccagaacaaggaaatgcttgcagccgcttgtcaaatgttcctgggtaagactgaagcagagatcgctcacatcgctcttgagaccctcgagggccatcagcgagcaattatggctcatatgaccgtggaggagatatacaaggaccggcagaagttttccgagcaagtgttcaaagtggcatcaagtgatctcgtgaacatgggaataagcgtggtctcttacacactgaaggacatccacgacgaccaggattacctgcattcattggggaaagcccgtacggctcaagtccagaaagatgcccgcattggtgaagcagaggctaagagagatgccgggattcgcgaggcaaaagccaaacaagagaaggtctcggctcaatatctctcagaaatcgagatggccaaagctcagagagactacgagctcaaaaaagctgcatacgacatcgaggtgaatacccgcagggctcaggcggacctagcataccagctgcaggtagccaaaaccaagcagcagatcgaggagcaaagagtccaggttcaggtggtggaaagagcgcagcaagtggccgttcaagagcaagaaatcgctcggcgcgagaaagagctggaagccagggtgcggaaacccgctgaagctgaaaggtataaattggagagactggccgaagccgagtag

SEQ ID NO: 117258 - DNA, 708 bp, synthetic construct
  misc_feature 1..708: note = Description of Artificial Sequence: Synthetic coding sequence
  source 1..708: mol_type = other DNA
atgttctttacatgcggccccaacgaggcaatggtagtgtccggcttctgcaggtccccccccgtaatggtggcagggggccgggtgtttgtcctgccctgtattcaacaaattcagcgcatctctctcaacacccttactctcaacgtgaagagcgagaaagtctatacgcggcacggcgtacccatttccgtgaccggtatagcgcaggtcaagatacaaggccagaacaaggagatgctcgcagccgcatgccagatgttcttgggtaaaactgaggccgagatcgcacatatcgcactcgagactcttgagggtcaccaaagagccattatggcgcatatgaccgtggaggaaatttacaaggatagacagaagttctctgagcaggtgttcaaagtcgccagctcggacctcgtgaatatgggcatcagcgttgtatcatatactctaaaagatattcatgacgatcaagactacctgcactccttagggaaggcccgcaccgcacaggtgcagaaggatgccaggatcggcgaggccgaggcaaaacgtgacgccggaatcagggaggctaaggccaagcaggaaaaagtgagtgctcagtacctgagcgaaattgaaatggccaaggcccagcgggactacgagctcaaaaaggcagcctacgatatcgaggttaacactaggcgcgcccaggccgactag

SEQ ID NO: 117259 - DNA, 1074 bp, synthetic construct
  misc_feature 1..1074: note = Description of Artificial Sequence: Synthetic coding sequence
  source 1..1074: mol_type = other DNA
gtgaaaatccaaggccaaaataaagagatgctcgccgcagcgtgtcagatgtttctcggcaaaactgaggccgagattgcccacatcgccctggagactcttgaggggcaccaacgagcaatcatggcgcacatgacagtggaagagatttataaagaccgccagaaatttagcgagcaggttttcaaggtcgcaagttccgaccttgtaaacatgggaatatccgtagtctcgtataccctcaaagacatacatgacgaccaggactacctgcactcgctgggaaaggctaggactgcgcaggtgcagaaggacgcacgcataggtgaggcagaagccaagcgagacgcagggattagggaggctaaggccaaacaggaaaaggtgagcgcacagtacttatccgaaatagagatggccaaggcccagcgagactacgagcttaaaaaagccgcctatgacatagaagtaaacaccagacgagcccaggcagatctcgcctatcagctgcaagtggccaagaccaaacagcagatcgaggaacagagagtacaggtccaagtggtagaacgtgcccaacaggtggccgttcaggagcaggaaattgcccggagggagaaggaactggaggcccgggttcgaaaacccgccgaagccgagcgttacaagttagagaggctggcagaagcggagaagtcacaactaattatgcaggccgaagccgaagccgcctccgttagaatgaggggcgaggcagaagccttcgcgatcggagcacgcgcgcgagctgaggcagaacagatggcaaagaaggccgaagctttccaactgtaccaagaggcagcccagctcgacatgctccttgagaagcttccgcaggtggcagaagaaataagtggccccttgaccagcgccaacaagattacactggtgtcatccggaagtgggaccatgggggccgccaaagtcactggagaggttcttgatatcctgactcgcctgccggagtccgtggagagacttaccggagtctccatttcccaggtcaaccataagccactccgcacagcctag

SEQ ID NO: 117260 - DNA, 36 bp, synthetic construct
  misc_feature 1..36: note = Description of Artificial Sequence: Synthetic coding sequence
  source 1..36: mol_type = other DNA
gtggccaagaccaagcagcagatagaggaacagtag

SEQ ID NO: 117261 - DNA, 759 bp, synthetic construct
  misc_feature 1..759: note = Description of Artificial Sequence: Synthetic coding sequence
  source 1..759: mol_type = other DNA
atgtttttcacttgcggacctaacgaagcaatggttgtgtccggattttgcagatctcctccagtgatggtggctggtggccgagtgttcgtcctgccctgtattcagcagatacaaaggatcagcctgaatacgttgactttaaacgtgaagtcggagaaagtgtacacgcgtcacggcgtgcccattagtgtgacgggaatcgcacaggtaaagatacaggggcagaataaggagatgttggcagctgcttgccagatgttcctgggtaaaacagaagccgaaattgcacacattgccttagagacattggagggccaccagcgtgccataatggcacacatgacagtggaggagatatataaggacagacagaagttcagcgaacaggtttttaaagtggcttcatcagatctggtgaacatgggcatttcagtggtgtcatacactttgaaagacatccacgatgaccaggactatctccacagcctgggtaaagcgcgtacagctcaagttcagaaggacgcccgtataggcgaggccgaggccaaaagagacgccggtataagagaggcgaaagctaagcaggagaaggtctccgcgcagtacctctcagagatcgagatggctaaagcccagagagattatgaactgaagaaggctgcatacgacattgaggtgaacacaagaagggcccaggctgatctggcataccagcttcaagtcgcaaaaacaaaacagcagattgaagagcaatag

SEQ ID NO: 117262 - DNA, 708 bp, synthetic construct
  misc_feature 1..708: note = Description of Artificial Sequence: Synthetic coding sequence
  source 1..708: mol_type = other DNA
atgttcttcacatgtggaccaaacgaagctatggttgtaagcggcttttgtcggtctcctcccgtgatggttgccggggggagagtatttgtgctgccatgcattcagcagatccagagaatttcgctcaatactctcacgcttaatgtcaagagcgaaaaagtctacacgaggcatggcgtgccaatctctgttacagggatcgcgcaagtcaaaatccaggggcagaacaaagagatgctagcggcggcctgccaaatgtttctggggaagaccgaggctgagatagctcatattgccttagagactctggagggacatcaaagggctattatggcccatatgacggtcgaggagatctacaaagatcgccaaaagttcagcgaacaggtcttcaaagtagcctcttcagatctggtgaacatggggatctctgttgtatcatacactttaaaagatatccacgatgatcaggactatcttcattctctaggaaaagccaggaccgcacaggtccaaaaagacgcacgtatcggggaagccgaagcaaagagagacgccggcatccgcgaagctaaggcgaaacaggaaaaagttagtgctcagtatctgagcgaaattgaaatggccaaggctcagcgagattatgagcttaaaaaggcagcatacgatatcgaagtaaatacacggagggcacaagctgactag

SEQ ID NO: 117263 - DNA, 558 bp, synthetic construct
  misc_feature 1..558: note = Description of Artificial Sequence: Synthetic coding sequence
  source 1..558: mol_type = other DNA
atgttctttacttgcgggcccaatgaagcaatggtcgtgtccggcttctgccggtcaccaccagtcatggttgccggcggcagagtatttgtccttccatgcatccagcagatacaaagaatttcgctcaatactctgaccctgaatgtcaagagcgagaaggtttatacacgacatggcgtccctatctcagtaaccggaatagcccaagtgaagattcagggacagaacaaagagatgcttgcagcggcctgtcagatgttcctgggaaagaccgaggctgaaattgcgcatatcgctcttgaaacgttggaagggcaccagcgagccatcatggctcacatgacagtggaggagatctacaaggaccgacaaaaattttccgaacaagtattcaaagttgcttccagcgacctggtgaacatggggatcagcgtagtgtcttacacccttaaggatatccacgacgaccaggactatctacattctttggggaaggccaggactgcccaggtgcagaaagatgccagaatcggtgaagctgaggccaagagatag

SEQ ID NO: 117264 - DNA, 438 bp, synthetic construct
  misc_feature 1..438: note = Description of Artificial Sequence: Synthetic coding sequence
  source 1..438: mol_type = other DNA
atgggcgtggaggggaccggcaggggcgggtgcagattgggaggacccgacggaaagggcaaagggtgggcccccgttgacgcaacagcccgtcttccccaccctcagcgactctccctgccattactgcaacttcagcccgagccgtgctttagcctggtggcccaaatgcgcccctggtggtcccccgattacctgcattcactcggcaaggcccggacagcccaggtccagaaagatgccaggattggggaagctgaggctaagcgggacgctggtatcagggaggccaaagcgaaacaggaaaaggtctctgcgcagtatctgagtgagattgagatggcaaaggcccaacgcgattacgagcttaagaaggctgcttatgacatagaggtaaatacccgtagggctcaagccgatttggcgtatcagctttag

SEQ ID NO: 117265 - DNA, 717 bp, synthetic construct
  misc_feature 1..717: note = Description of Artificial Sequence: Synthetic coding sequence
  source 1..717: mol_type = other DNA
atgcggccctggtggtcgcccgtgaaaatccagggacaaaacaaggaaatgcttgcagccgcatgtcagatgttcctgggaaaaacagaggctgaaatagcccatatagccctagagactctcgaggggcaccagagggctataatggcacacatgaccgtcgaggaaatatataaggatcggcagaagttttcagagcaagtgttcaaagtcgcatcctcggacctcgtcaatatgggtatctccgtggtgtcgtacacactcaaagacattcacgatgatcaggactatctccactctttggggaaagcgcgcactgcccaggtccaaaaggacgcacgtattggcgaggctgaggccaaaagggacgctggaattcgtgaagctaaggctaagcaagagaaagtttcagctcagtatctgtcagaaattgaaatggcaaaagcccaaagggactacgaattgaaaaaggccgcctacgacatcgaagtcaatactcgaagagcccaggctgatctggcatatcaactgcaagttgctaaaacaaaacaacaaattgaggagcagcgtgtgcaggtccaggttgtagagagggcacagcaggtggccgtccaggaacaggagatcgcccggcgagaaaaggaactcgaagcgagggtgcgcaagcccgcagaagcagagaggtataagctggagcggttggcagaggcagagtag

SEQ ID NO: 117266 - DNA, 1140 bp, synthetic construct
  misc_feature 1..1140: note = Description of Artificial Sequence: Synthetic coding sequence
  source 1..1140: mol_type = other DNA
atgttcttcacctgtggtcctaatgaagcaatggtagtgtccggattttgtaggagtccccctgtgatggtggccggcgggcgcgtgttcgttttaccatgcattcagcaaatccagcgaatttcactgaacaccctgaccttgaatgttaaatccgagaaagtgtataccaggcatggcgtgcccatcagcgttaccggcattgcacaggaaatatataaggacaggcagaagttctccgagcaggtgttcaaggtggcctctagtgacctggtgaacatgggcatctctgtggtatcttatactttaaaggatatccatgacgatcaagactatctgcattccttgggaaaggccaggactgctcaggtgcagaaggacgcaaggatcggcgaggccgaggcaaaacgggacgctggtattagagaggcaaaggctaagcaggagaaggtgtctgcccaatatctgagcgagatcgaaatggccaaagcccaaagggactacgagcttaaaaaggcagcttacgacatcgaagtgaacacccggcgagcccaagctgatctggcctatcagctccaagtggccaagaccaaacagcagattgaggaacagcgcgtccaagttcaagtcgtagagagggcgcagcaggtcgccgtacaggagcaggaaatcgctcgaagggagaaggagcttgaggcaagagttagaaagccagccgaggccgaacgctataaacttgagcgtctcgccgaggccgaaaagagtcagctaattatgcaggctgaggcggaggccgctagcgtgagaatgcggggggaggcggaggcgttcgcgatcggcgcacgcgccagagctgaagctgaacaaatggccaagaaagcagaagccttccagctgtaccaagaggctgctcagcttgacatgctgctggagaagctcccccaggtggccgaggaaatatcaggcccactgacatctgctaataaaattaccctggtgagctccggatccggaaccatgggcgctgcaaaggtgaccggagaagtactggatattctcactagattacccgaaagcgtcgagcgactgactggagtcagtattagtcaggttaaccataagccgctgcggaccgcctag

SEQ ID NO: 117267 - DNA, 558 bp, synthetic construct
  misc_feature 1..558: note = Description of Artificial Sequence: Synthetic coding sequence
  source 1..558: mol_type = other DNA
atgttcttcacctgcggtcccaatgaggccatggtggtgagcggcttctgccgctccccccctgtgatggtcgctgggggtcgagtctttgtgttgccttgcattcagcagatacagcgtatctcattgaacaccctcacgcttaacgtcaaatctgagaaagtgtataccagacatggtgtcccaatttcagttacagggatcgctcaggtcaagattcaagggcagaataaggagatgttagccgccgcatgtcagatgttcttgggcaaaacagaggccgagatcgcccacatcgccctggagactctggaggggcaccagagggctattatggcccacatgactgtagaagaaatttacaaagaccgtcagaaatttagtgaacaggtgttcaaggtggcctcatctgacctcgtcaatatgggaataagcgtggtcagctacactctcaaagacattcatgacgatcaggattaccttcactctctcgggaaagcccggactgcccaggtccaaaaagacgcccgtatcggtgaagctgaagctaaaagatag

SEQ ID NO: 117268 - DNA, 696 bp, synthetic construct
  misc_feature 1..696: note = Description of Artificial Sequence: Synthetic coding sequence
  source 1..696: mol_type = other DNA
gtaaagatccagggccagaataaagaaatgttggctgcagcctgtcaaatgtttttgggaaaaaccgaggccgaaatcgctcacatcgccctggagacactagagggtcaccaacgtgccataatggcccatatgactgtggaagaaatatacaaggacagacagaagttcagcgagcaggtttttaaggtggcctcgagcgacttggtcaacatgggtatatccgtcgtgagctacactcttaaggatatccacgacgatcaagattatctccacagtctaggtaaagcgaggaccgcacaggtgcagaaagatgcccggatcggagaggccgaggccaaaagggatgcaggaattcgagaagccaaagcaaagcaggaaaaggtgagtgcccagtatttaagcgagatagaaatggctaaagctcaaagagactatgagctgaaaaaggccgcatacgatattgaagtgaacacaaggcgcgcccaagccgacctagcttaccaactgcaggtggcaaagacgaagcagcagatcgaggagcaaagagtgcaggttcaggtggtcgaacgcgcccaacaggtggccgtgcaggaacaagagatcgctcgacgggagaaggaactggaagcacgtgttcgcaaacctgctgaggccgaacgctacaaactggaacgcctcgctgaggccgaatag

SEQ ID NO: 117269 - DNA, 633 bp, synthetic construct
  misc_feature 1..633: note = Description of Artificial Sequence: Synthetic coding sequence
  source 1..633: mol_type = other DNA
atgttttttacctgtggacccaatgaggcaatggtcgtttccggtttttgtagatctccaccagttatggtcgctggtggacgagtattcgtgctgccttgtatccagcagattcagagaatttccctcaacactctgaccctgaacgtaaaatctgaaaaagtttacaccagacacggtgtccccatttccgtcactgggatcgctcaggtgaaaatccagggccagaataaggagatgttagccgccgcctgccagatgtttctgggtaaaactgaagccgagatcgcccatatcgccctggaaacactcgagggccaccaaagagcgatcatggctcatatgacggtcgaagagatttacaaagaccggcaaaaattctccgagcaggtgttcaaagtagcctctagcgatctggtgaacatggggatctccgtggtgtcgtatacgcttaaggacatccacgatgaccaggactatctacacagcctcggtaaggcacgcactgcacaggtacaaaaagacgctagaataggtgaagctgaggccaagagagatgctgggatcagagaggccaaggccaagcaggaaaaagtgtccgcccagtatctgagtgaaattgagatggcctag

SEQ ID NO: 117270 - DNA, 579 bp, synthetic construct
  misc_feature 1..579: note = Description of Artificial Sequence: Synthetic coding sequence
  source 1..579: mol_type = other DNA
atgtttttcacatgcgggcctaacgaagcaatggtagtaagtggtttttgtaggtccccgcctgtgatggtggctggtgggagagtattcgtccttccatgcatccagcagatccaacgaattagcttaaatacactaaccttgaatgtgaagagcgagaaagttaagatccaagggcagaacaaggagatgctagcagccgcatgccagatgttcctgggcaagaccgaggcagaaatagcacacatcgccttggaaaccttagagggccatcagcgggcaatcatggctcatatgaccgtggaagagatctataaggatcgacaaaaattcagcgagcaggtgttcaaggtggctagttctgatttggtgaatatgggaatttcagtggtgtcttatactctcaaagacattcatgatgaccaggattacctgcatagtctgggaaaagcgcgaaccgcacaggttcagaaggacgccagaataggggaagcggaagcaaagcgcgacgcgggcattcgcgaagctaaggcaaaacaggagaaagtgtccgcgcagtacctgtccgagattgaatag

SEQ ID NO: 117271 - DNA, 1140 bp, synthetic construct
  misc_feature 1..1140: note = Description of Artificial Sequence: Synthetic coding sequence
  source 1..1140: mol_type = other DNA
atgttctttacctgtggccccaatgaagccatggtggtctccgggttttgccggtcacctcctgtgatggtggcaggaggtcgcgtctttgtgctgccctgtatccagcaaatacagcggatctccctgaataccttaacactcaatgtcaaatctgagaaggtctatactcggcacggagttccgatttctgtcaccgggatcgcccaggagatatataaggatagacaaaagttctcagaacaagtgttcaaagtggcctcaagcgacttagtaaatatggggatatcggtggtgtcctatacactgaaagacatacatgatgatcaagactacttgcactctctcggtaaggcaaggacagcccaggtccagaaggacgctcggataggagaagctgaagcaaaacgcgacgctggaattcgtgaagctaaagcaaaacaggagaaggtttccgctcagtacctgtcagaaatcgagatggccaaggcacagagagactatgaactcaagaaagctgcatacgacatagaggttaacactaggcgagctcaggccgatcttgcttaccagctgcaggtcgccaaaaccaagcagcagattgaggaacagcgcgtgcaagtacaggtcgtagaaagagcccagcaggttgccgtccaggagcaggagattgcccggcgagaaaaggagcttgaagcccgggtgagaaaacccgccgaggctgagcggtataagttggagcgactggcggaagcagaaaaatctcagctgatcatgcaggctgaggccgaggctgcttctgtgcgcatgcgaggcgaagctgaggcctttgccatcggggccagggcccgggctgaggctgaacagatggcaaagaaagcagaggctttccagctgtatcaggaagcagcacagctggacatgctgttggaaaaactgccacaggtggcggaggaaattagcggacccctgactagcgctaataagattacactcgttagtagtggtagcggcacgatgggcgctgccaaggtgacgggggaagtgctggacattttaacacgactcccggaatcagtggaacgcttgacgggtgtgtccataagccaggtaaatcacaaaccgctgcgcactgcctag

SEQ ID NO: 117272 - DNA, 1140 bp, synthetic construct
  misc_feature 1..1140: note = Description of Artificial Sequence: Synthetic coding sequence
  source 1..1140: mol_type = other DNA
atgtttttcacatgcggacctaatgaagcgatggtcgtgagtggcttctgccggtctccccctgtgatggtggccggcggacgtgtgttcgtcttaccctgtattcagcagattcagagaatatccttgaacacactgacactgaacgtgaagtctgaaaaggtgtatacccggcacggggtccctatctcggtaaccggtatagcccaggagatctacaaggatagacagaagttttctgagcaggtgttcaaggtggccagttcggatcttgtaaatatgggcatttctgtggtcagctacactctgaaggacatccatgatgatcaggactatttacatagcctcggcaaggcgcggacagcacaggtccagaaagatgcccggatcggcgaagccgaagctaaacgggacgccggtatccgcgaggctaaggcaaagcaggaaaaagtgagtgcgcagtatctgagcgagatcgaaatggcaaaagcccagagagattatgaactgaagaaagctgcgtatgatatagaagtcaacacccgaagagcacaagcagatttagcctaccagctccaagtagctaaaacgaagcagcagatcgaagagcagcgcgtccaggtccaagtcgtcgaaagggctcagcaagtcgctgtccaggaacaagagatcgcgagacgagagaaggagttggaagcaagggtacgaaagcccgccgaggcagaaaggtacaagctggagaggttggccgaggctgaaaaaagccagctgataatgcaggccgaggccgaagctgcaagcgtccgtatgcggggagaagccgaggccttcgctattggcgcacgcgccagagccgaagccgagcagatggcgaaaaaggcggaggcctttcagctgtaccaggaagcggcccagttggacatgttgctggagaaactgccccaggtagcagaagaaattagtgggccgcttaccagcgccaataagataacattagtgtcctctggatccggcaccatgggcgcagccaaggtgaccggcgaggttcttgacattctcacaagactgcccgagtcagtggagagactgacaggagttagcataagtcaggtgaatcataagccccttaggacggcttag

SEQ ID NO: 117273 - DNA, 1140 bp, synthetic construct
  misc_feature 1..1140: note = Description of Artificial Sequence: Synthetic coding sequence
  source 1..1140: mol_type = other DNA
atgttctttacctgcgggcctaatgaagccatggtagtgtcaggcttctgtcggtcgcctcctgtgatggtggcaggggggagagtattcgtcttaccctgcattcagcagatacagagaatctcactgaacacacttacattgaatgtgaaatcagaaaaggtgtacacacgtcatggagtgcccatatccgtaaccggcatcgcacaggagatttataaggaccggcagaagttcagtgagcaggtctttaaggtagcctcatccgacctagtgaatatggggatcagcgtcgtcagctacacactcaaggatatacacgatgaccaagattaccttcacagcctggggaaggcccgtaccgctcaggtccaaaaggacgcacgaatcggagaggcggaggccaaacgggatgctggcatcagggaagccaaagccaaacaagagaaggttagcgctcagtatctcagtgaaattgaaatggccaaggcccagagagattacgagctcaagaaagcggcttacgatatcgaggtgaatacccgacgggcccaggcagacctggcctatcagctccaagtggctaagactaagcagcaaatcgaagagcaacgagttcaagttcaggtggttgagcgtgctcagcaggttgctgtgcaggaacaggaaatcgctaggcgggagaaagaattagaagcccgtgtgaggaagccggctgaagctgagcgatataaactggagcgccttgccgaagcagaaaagtcacaactaatcatgcaggcagaagccgaggccgcctccgtcaggatgcgtggtgaggctgaggctttcgctattggagcaagagccagggccgaggccgaacaaatggctaagaaagccgaggcattccagttataccaggaggcggcacagctggacatgttgcttgagaagctgccgcaggtcgccgaggagatcagcggtcctctaacaagtgccaataagattactctggtttcctctggaagtggtacaatgggtgctgcgaaagtgacaggcgaagtgctcgatatcctgaccaggttgccagagtccgttgaacgtctgaccggagtcagcatcagtcaggtcaatcacaagccactgcggacagcatag

SEQ ID NO: 117274 - DNA, 1140 bp, synthetic construct
  misc_feature 1..1140: note = Description of Artificial Sequence: Synthetic coding sequence
  source 1..1140: mol_type = other DNA
atgttttttacatgtggccccaatgaggccatggttgtatcggggttttgccggagcccccctgtgatggtggccggtggtagggtgtttgtgctgccatgcattcagcaaatccagcgaatttccctcaatacgttgactcttaatgtgaagtcagagaaggtatatacacgtcatggcgtccctatatctgtgactgggatcgcacaggagatatacaaggacaggcagaaattttccgaacaggtgttcaaggtggcctctagcgatttggttaatatgggcattagcgtcgtgtcgtacactttgaaggacatccacgatgatcaagactacctgcactctttgggaaaggctcgtaccgcacaggtccaaaaggatgcacgcattggcgaagcggaggctaaacgcgacgcaggaattagggaggcaaaggcgaagcaggaaaaggtatccgctcaatacctgagcgagatcgagatggccaaagcccaacgggactacgaactgaaaaaggccgcttatgatatcgaagtgaacacaagacgggcacaagccgatctggcctatcagcttcaggtggcgaaaactaagcagcagatcgaggagcaacgcgtgcaggttcaggtcgtggagcgggctcagcaggtggcagttcaggagcaggaaatcgcccggagggagaaggaattggaggccagggtacgaaagcctgctgaagctgagagatataaacttgaacgactcgccgaggctgagaagtcacaactgattatgcaggcagaggccgaggccgcatcggtccgtatgcgcggcgaggcagaggcgttcgcaatcggcgcacgagcccgcgctgaagcagagcagatggcaaaaaaggctgaagcattccagttataccaggaagctgcacaactggacatgctcctcgaaaaattgcctcaagtagccgaggagatttctggccctttgacatctgctaacaaaattacactggtcagctctggaagcggaacaatgggcgcagccaaggtgaccggggaagtcctggacatcctcacccggttgcccgagtccgtggagaggttgacgggtgtcagtatttcccaagtcaaccacaaacctctaaggaccgcctag

SEQ ID NO: 117275 - DNA, 861 bp, synthetic construct
  misc_feature 1..861: note = Description of Artificial Sequence: Synthetic coding sequence
  source 1..861: mol_type = other DNA
atgggcatcagcgtggtgagctacactctcaaagacatccacgatgaccaggattacttacacagcctggggaaagctaggaccgcccaagtgcagaaggacgccagaattggggaggctgaggcaaagagggatgctgggatacgggaggccaaagcgaagcaggaaaaggtgtcagcgcagtatctgtctgagattgaaatggcaaaggcacagcgagattacgaactaaaaaaggctgcctatgacatcgaggtgaatactcggcgagctcaggcggaccttgcctatcagttgcaggtggccaagacgaagcagcagatcgaggagcagcgggtgcaggttcaggtcgtggagcgggcccagcaggtagcagttcaggaacaagagatcgctcgaagggagaaggagctcgaggcacgcgtccggaagcctgctgaggccgagcgttacaagttagaacggctcgctgaagcagagaagtcccagttaatcatgcaggccgaggctgaagcggcttccgtaagaatgcgcggggaggccgaagcatttgccatcggagctagagcaagggctgaagctgagcagatggccaaaaaggccgaggctttccagctctatcaggaagccgctcagctcgacatgcttcttgagaagttgccccaggtcgcggaggaaatctctggcccactgactagcgccaataaaatcactctggtgagctcggggtcgggtacgatgggggcagccaaggtcacaggtgaggttctcgatatcctgacacgcctccccgaaagcgtggagaggctgactggggtcagcatctctcaggtcaatcacaaacccttgagaactgcatag

SEQ ID NO: 117276 - DNA, 1452 bp, synthetic construct
  misc_feature 1..1452: note = Description of Artificial Sequence: Synthetic coding sequence
  source 1..1452: mol_type = other DNA
atggggaattgtcacacagtggggcccaacgaagcgctggtggtcagcggcggttgctgtgggtcagactacaagcagtatgtgtttggggggtgggcctgggcctggtggtgtatttcagatacccagagattatcgctggaagtcatgaccatcttgtgcagatgcgaaaacatcgaaactagcgaaggcgtcccgctcttcgtcactggagtggctcaggtcccttgtccctgcctgctggactgcaagtggggtaactccaagggcttttggaaactttgccaagtgtgccaaattagcttggagattatgacactccagccccggtgtgaggacgtggaaaccgcagagggggtcgccctcaccgtcactggggtcgcacaggtgaaaatcatgaccgagaaggagctcctggccgtggcctgcgaacaattcttgggcaagaatgtccaggacatcaagaacgtggttttgcagacactggaaggccacctgcgcagtatacttggaaccttgaccgtcgaacagatctaccaggacagagatcagttcgccaaattagtgagagaggtggcagcgcccgacgtcgggagaatgggcatagagattctgtccttcaccatcaaggatgtgtacgataaggttgactatttatcttcattaggcaagacccaaactgctgtggtccagcgcgacgctgacattggcgttgccgaggccgagcgcgacgctggaatccgagaggccgagtgcaaaaaggagatgctggacgtcaaattcatggctgacacaaagattgctgactcaaagagggccttcgaattgcagaaatcagccttttcagaagaagtaaatattaagacggccgaagcgcagctagcttatgaactccagggcgcccgtgagcaacagaaaatcaggcaagaagagatagagatcgaagttgtgcagcgaaaaaaacagatcgccgtcgaagctcaggagatcctgcgaaccgacaaggagctgattgccaccgtgaggcggcctgccgaagctgaagcccacagaatccagcagattgccgaaggggagaaagtcaaacaagtgctgttggcccaagccgaggcggagaaaataaggaagataggagaggccgaagctgctgtgattgaggccatggggaaagccgaggccgagcgcatgaagctgaaggcggaagcataccagaaatatggagacgctgcaaaaatggccctggtactagaggcacttccgcaaatcgctgcgaagattgccgctcccctaaccaaggtggacgagatcgtggttctttctggcgacaactctaaggtcacttcagaggtcaaccgtctcctcgccgagctcccggcttcagtccacgccctgaccggggtagatctgagcaagatccctctgattaaaaaagccacaggggttcaggtttag

SEQ ID NO: 117277 - DNA, 1287 bp, synthetic construct
  misc_feature 1..1287: note = Description of Artificial Sequence: Synthetic coding sequence
  source 1..1287: mol_type = other DNA
atgggtaattgccataccgtggggccgaacgaggccttggtagttagcgggggttgctgtggcagcgattacaaacaatacgtttttgggggatgggcatgggcttggtggtgtatatctgatacacagcggatcagcttagagataatgacgttacagcctcgttgtgaagatgtggagacggccgaaggcgtggccctaaccgtgaccggagtcgcccaagttaagataatgacggagaaagaactgcttgcggtggcttgcgagcaatttctcggaaaaaacgtgcaggatatcaagaacgtggtgctgcagacattggagggacaccttcgcagtatcctgggcaccctcaccgtggaacagatctaccaggaccgcgaccagtttgctaaactcgtccgagaagtggccgcacctgatgtgggaagaatgggcattgaaatcttatctttcacgatcaaggatgtttatgataaagtggattacctgtcttctctgggtaaaacacagaccgccgtggtgcagcgggacgcagatattggcgtggccgaagcggaacgtgacgcaggaatacgggaagccgagtgcaagaaagagatgctcgatgtcaaattcatggcagacactaagatagcggatagcaaacgggccttcgaactccagaaatccgcgttctctgaggaggtgaatataaagaccgccgaggcacaactagcgtacgagctacaaggtgcccgcgaacagcagaaaatacgacaagaggaaatagagatcgaggtcgtccagaggaagaaacagattgctgtggaggctcaggaaattctccgcaccgacaaggaattgattgctacggtccgaagacctgccgaggcagaggcccatcggatacagcagatagcagagggagagaaagtgaaacaggtgctcctggctcaggcagaggcagagaaaatacgtaagattggtgaggcagaggcagctgtaattgaagctatgggcaaagctgaagccgagcgtatgaaactcaaggctgaggcctatcagaaatacggcgatgccgcaaagatggctctggtattagaagcgctgccacagattgcagccaagatagcagccccattaaccaaagttgatgagatagtcgtattaagcggagacaacagtaaggtgacttctgaagttaatagactcctggccgagctcccggcctccgtgcacgctctgaccggggtggatctgagtaagattcccctcatcaaaaaggcgaccggggtgcaggtgtag

SEQ ID NO: 117278 - DNA, 2982 bp, synthetic construct
  misc_feature 1..2982: note = Description of Artificial Sequence: Synthetic coding sequence
  source 1..2982: mol_type = other DNA
atgcctgccctcgctcgggatgggggccagctccctttgttggttgtgttttcagccatgatcttcggcaccatcacgaaccaggatctgcctgtgatcaagtgcgtcctcatcaaccacaagaacaacgattccagtgtgggaaaatcatcgtcgtatcccatggtgtcggaatcccccgaggatctgggctgtgctctacgcccacagagcagcgggactgtgtacgaggcagctgctgtagaagtagatgtgtcggcctctattaccctccaagtattagtagacgcacccgggaatatctcttgcctgtgggtgtttaaacactcctccctaaattgccagccccatttcgacctgcagaatcgaggggtggtatccatggtgattctgaagatgacagaaactcaagccggcgagtatttgctgttcatccagagcgaggccacgaactataccattctgttcaccgttagtatcagaaataccctcctttatactctgcgccgaccctacttccgcaagatggagaatcaggatgcgctggtgtgcatcagtgaaagtgtgccggaaccgatcgtcgagtgggtgctctgcgacagccaaggcgaaagctgcaaggaggagtccccggcagtagtgaaaaaggaagagaaggtcttacatgagcttttcggaactgatatccgctgttgcgctcgtaatgaactgggcagagagtgcacacggctttttacgattgatctgaatcagacccctcagacaactctaccacagctgttcctgaaggtcggcgagcctctctggattaggtgcaaggccgtgcacgtgaatcatgggttcggcttgacgtgggagttggagaataaggccctcgaagaaggcaactacttcgaaatgtcgacctactcaaccaaccgcactatgatccgcatactttttgcattcgtttcttccgtggctaggaatgacacggggtattacacctgctcctcaagcaagcacccttcccagtcagccctggtgactatcgtggagaaagggttcattaacgccactaacagttccgaagattatgaaattgaccaatacgaggagttttgtttttccgtcagatttaaagcctatccacagatcagatgtacatggacattctcacgtaagtcgtttccatgcgagcaaaaaggactggataatggctactccatttctaagttctgcaatcacaagcaccaaccaggagagtacatcttccatgcagagaatgacgacgcccagtttaccaaaatgttcacacttaacatccgacgcaaaccccaggttcttgctgaggcgtccgctagtcaagccagctgcttctctgacggatacccactgcccagctggacatggaagaaatgttccgacaagtctcctaactgtactgaggagataaccgaaggagtctggaacaggaaagctaacaggaaagtgttcggacaatgggtcagctcatcaactttgaacatgtccgaagctatcaaaggcttcctggtgaagtgctgtgcatacaacagtctgggaacctcctgtgagaccatcttacttaattccccggggccattcccatttatccaggataatataagcttttacgcaacaataggggtgtgccttctgtttattgttgtccttacactgctcatatgccacaaatacaaaaagcaatttcgatatgagagtcagttgcagatggtgcaggttactggaagctctgacaacgagtacttctacgtggacttccgggagtatgagtatgatctgaagtgggaatttccccgggagaatctggagtttggaaaagtgctggggtcgggcgcctttggcaaagtcatgaacgcaactgcctacggcattagcaagactggtgtcagcatccaggttgccgtgaagatgttgaaggagaaggccgattctagcgagcgcgaggccctgatgtccgaactgaagatgatgacacagttgggttcacacgagaatatcgtaaacctgctgggagcttgcaccctcagcggtcctatctatctcatcttcgaatattgctgctacggtgacctcctgaactaccttcgtagcaaacgcgagaaatttcataggacttggactgaaatctttaaggagcataactttagcttctatccgaccttccagagccatccaaattcgtctatgccaggttcaagggaagtacagatacatccagattcagatcaaattagtgggctccacggaaactcatttcactccgaagatgaaatcgagtacgaaaaccagaagagactggaggaggaagaagacctgaacgtactaacgtttgaggacctgctgtgcttcgcctaccaggtggccaaagggatggagttccttgagttcaaaagttgtgttcaccgcgatctcgccgctcgcaacgtgttggttacgcacggcaaggtggtgaagatctgtgactttgggctcgccagggacatcatgagcgactccaattacgtcgtgagggggaacgctcgactgccagtgaaatggatggcccctgagagcctgtttgagggtatctatactataaaaagtgatgtgtggagctatggaatcctgttgtgggaaatcttttcacttggtgtaaacccttatcccggaatccccgtagacgctaatttctacaagctgatccagaatggcttcaagatggaccagcctttctacgccacagaggaaatctatatcattatgcaaagttgttgggctttcgatagcagaaagaggccttcttttcctaacttgacatcattcctgggttgccagttagccgacgctgaggaagcaatgtaccagaacgtcgacgggcgggtcagtgagtgccctcatacttaccaaaataggcgcccttttagccgcgagatggacctagggctgctctcacctcaggcccaggtagaggactcctag
